United States Patent Application Publication US 2013/0332133 A1 - sequence listing, part 12

SEQ ID NO: 138454 - protein, 159 aa, Unknown
  Bacterial polypetide isolated from the Sargasso Sea
MRRVIGIDPGSRKTGYGIIEISLSKISYVTSGHISVDDEVFPKRLGIIYSEVLELVRNYDVQEMAIEDVFLAKNPNSALKLGQARGVAIAAGIAKDLEIFEYAARQVKKTIVGKGGASKTQIQHMVRVLLNLPGVPQADAADGLAIALCHAHSTRRSDL

SEQ ID NO: 138455 - protein, 127 aa, Unknown
  Bacterial polypetide isolated from the Sargasso Sea
MKILGIDPGLRNTGWGVIHLESDKLKYVNDGVISTKRNLNDGERLLYIFQKLEDIILKFKPNIIGIEKTFVGEGNISSLKLGMARGVCLLVAAKTNISIRELAPKLVKKSVTGTGNADKQQVNSMIK

SEQ ID NO: 138456 - protein, 90 aa, Unknown
  Bacterial polypetide isolated from the Sargasso Sea
MATRLIGLDPGLRRTGWGVIEVEGNCLVHVASGAVTSTAALPLAERLSQLYEALAVVLTAHDPAEAAVEETFTNKNPSSTLKLGQARGAV

SEQ ID NO: 138457 - protein, 200 aa, Unknown
  Bacterial polypetide isolated from the Sargasso Sea
DLNNKPSGQIELNDQILETEYHPQAIKQAVVGFLAANRQGTHSTKTRAEVSYSTKKLYRQKGTGNARSGSNKSPLRRHGGITFGPSPRDYSIRSNKKFRKLALRSAIAEKIRQNQLVILEELKLEDHKTKNLKKVLATLEAPKALIVTENMSWELMLASRNLQGVHAINQQSLNVYELLRFPKVIFVKDAMESLNSRLSG

SEQ ID NO: 138458 - protein, 88 aa, Unknown
  Bacterial polypetide isolated from the Sargasso Sea
MIILGIDPGVSGAISILENKKVIDVFEMPTMIDGKKNKKQINGSQVANIFRETMNVYKETIVVVEHVNAMPGQGVTSMFNFGQSFGVI

SEQ ID NO: 138459 - protein, 166 aa, Unknown
  Bacterial polypetide isolated from the Sargasso Sea
MRLIGFDPGLRTTGWGVIQFRGNHLSYIGDGVVSTEPSYSLAERLVQIYTGLSEIILKFEPDEAAVEETFVNVNPISTLKLGQARGIAMVVPASHGVPVSEYTPNLVKKTIVGTGHASKKQVQMMVSTLLPEFRRGSTDAADALAVAICHAHHRNNVFSQKAAEVF

SEQ ID NO: 138460 - protein, 181 aa, Unknown
  Bacterial polypetide isolated from the Sargasso Sea
MPVEAFRTIGIDPGSRVTGIGVVEARGQSLHYIHSECVRTGTGSLGARLVQIHQRIREVIDRFQPVSGAIEKVFVSANPQSALVLGQARGSALLALAESDLEISEYSALEIKRAITGTGRADKEQVQHMVRVLLGMDRKPPQDAADALACAICHLHHAEGQQRQTVAQAADPLGKPKGLQQ

SEQ ID NO: 138461 - protein, 178 aa, Unknown
  Bacterial polypetide isolated from the Sargasso Sea
QIQNFDGDLIFTTHEEAPRNPLVPLLFDEITAKQPSVIKGLIIQKLDSGLNENKLILGIDPGKRIGLSVYYLGYQIDNSFFISIEKLVQNLIMIMAELKSQKKILKIGNGDMIIANKIVQLLNLRFCSNFEIEFVDERNTTLKIKNYNQRGKRDMLSAQFITQRNGYWRTVLPLSITG

SEQ ID NO: 138462 - protein, 207 aa, Unknown
  Bacterial polypetide isolated from the Sargasso Sea
MANLNTLDLNNKPSGQIELNDQILETEYHPQAIKQAVVGFLAANRHGTHSTKTRAEVSYSTKKLYRQKGTGNARSGSNKSPLRRHGGITFGPSPRDYSIRSNKKFRKLALRSAIAEKIRQNQLVILEELKLEDHKTKNLKNILATLEAPKVLIVTENMSRELMLASRNLQGVHAINQQSLNVYELLRFPKVIFVKDAMESLNARLSG

SEQ ID NO: 138463 - protein, 87 aa, Unknown
  Bacterial polypetide isolated from the Sargasso Sea
MSVILGIDPGTNITGYGIINSENNNLSYIHHEIIKTGLKNLYTTKLSLIHKNTQRLIELYKPDEIALESVFFSVNAGTAIKLVKLEV

SEQ ID NO: 138464 - protein, 110 aa, Unknown
  Bacterial polypetide isolated from the Sargasso Sea
MNKSSKIILGIDPGTTIMGFGIIEVNNKKMKLIELNELKLTKIKDHYLRLKLIFERTIELIEKFNPDEIAIEAPFFGKNVQSMLKLGRAQGVAMAAGLSRQIPVTEYHLK

SEQ ID NO: 138465 - protein, 154 aa, Unknown
  Bacterial polypetide isolated from the Sargasso Sea
MRILGIDPGLARVGYGVIDTSGGHQRMLDCGIICTDPGRSDGERMVEIASDLRQLIRAWRPELAAVEKFFFYRSSNTINVVQARGVVMMTLARFKVPVVEFPPMQIKLALAGFGHAEKDEVLEAVMRELDLTEPPRPDDAADALAVALTGWFQR

SEQ ID NO: 138466 - protein, 44 aa, Unknown
  Bacterial polypetide isolated from the Sargasso Sea
MNIILGIDPGSRLTGYGVIRQQGSKFEYIASRLYSDDPLGEMPG

SEQ ID NO: 138467 - protein, 154 aa, Unknown
  Bacterial polypetide isolated from the Sargasso Sea
MRILGIDPGLARVGYGVIDTSGGHLRMLDCGIIRTDPGRSDGERMVEIAGDLRQLIRAWRPELAAVEKFFFYRSSNTINVVQARGVVMMTLARFKVPVVEFPPMQIKLALAGFGHSEKDEVLEAVMRELDLTEPPRPDDAADALAVALTGWFQR

SEQ ID NO: 138468 - protein, 106 aa, Unknown
  Bacterial polypetide isolated from the Sargasso Sea
MIILGIDPGSRKAGFGLVELKGRDINYLDSFTLKFDTKLMFFDRLKKIYESCCEVFKEYSPDEVAFESLVYVKNVSSLVKLSQARGVMLSALFSHGESNILNTLQI

SEQ ID NO: 138469 - protein, 166 aa, Unknown
  Bacterial polypetide isolated from the Sargasso Sea
MTIILGIDPGTNITGFGLINISEDSKISYIHHEIIKTGLKNKYTTKLAMINEATSDIINKHNPAHVAIESVFFSVNAGTAIKLGQARGAAICACSRQYLDIYEYSPRRVKMVVTTDGGADKEQLQKKVKSILNIRRKLEIDASDALGVAICHGMTLNNDPDSLKII

SEQ ID NO: 138470 - protein, 161 aa, Unknown
  Bacterial polypetide isolated from the Sargasso Sea
MVILGIDPGLINTGYGLIQISGKNNLKVVDFGIISPNKKEKLSNRLKTIYDDLSLIIKKYSPNILSIEEVFFGKNVKSALLLGHARGVSMLCASNNNIPVFEYSPRKIKQSITGNGNADKSQVKFMVSQELNLKNMDFPDDASDALAIAICHNNQIKLNEL

SEQ ID NO: 138471 - protein, 164 aa, Unknown
  Bacterial polypetide isolated from the Sargasso Sea
MKILGIDPGSRVTGYGLVEHHGNSTRYLDSGCIRLPDKWKLADKLVQISNELGALIEKNRPDCASIEQIFFAHNARSALILGHVRGVILLKMAETGLPIHEYPPLQVKQAVVGVGRATKDQVIHMVQILLNKRQDFKEDEADALASAITHAHLHPTLERMQGKG

SEQ ID NO: 138472 - protein, 73 aa, Unknown
  Bacterial polypetide isolated from the Sargasso Sea
MILGIDPGSRVTGFGLVKSAGSKIEYVYCDCIRTNSADMQKRLKTIFDELCTVIEEYQPEEVAIEEVFMGKNA

SEQ ID NO: 138473 - protein, 47 aa, Unknown
  Bacterial polypetide isolated from the Sargasso Sea
MILGIDPGSRVTGFGLIKSDGDKIEYIDCGCVRTNSQNMRTRLKTIF

SEQ ID NO: 138474 - protein, 165 aa, Unknown
  Bacterial polypetide isolated from the Sargasso Sea
MTVILGIDPGTNITGYGIIKLEESKPIYLHHEILKTGLKNMYTIKLSMIYDNTKRLIEQYKPDDIALESVFFSVNAGTAIKLGQARGAALSACSGEHRNIYEYSPRRVKMIITGNGAADKAEVQKFVKRKLRLRRKLEEDASDALGVALCHGVTSTDTPEDIKPI

SEQ ID NO: 138475 - protein, 147 aa, Unknown
  Bacterial polypetide isolated from the Sargasso Sea
MKILGIDPGSRVTGYGLVEHHGNSTRYLDSGCIRLPDKWKLADKLVQISNELGALIENNRPDCASIEQIFFAHNARSALILGHVRGVILLKMAETGLPIHEYPPLQVKQAVVGVGRASKDQVIHMVQILLNKRQDFKEDEADALASA

SEQ ID NO: 138476 - protein, 121 aa, Unknown
  Bacterial polypetide isolated from the Sargasso Sea
MRILGIDPGSRKTGYGLIEHSNNKSFHLDSGFIRLNEKETLTERLLMLSIELGKIIDRLNPNCGAIEKIFYAKNAQSALSLAHARGVILLKFSEKQLPIHEYQALKVKQTVVGAGRADKGQ

SEQ ID NO: 138477 - protein, 66 aa, Unknown
  Bacterial polypetide isolated from the Sargasso Sea
MSDSLRILGIDPGSRKTGYGFIEHSGNKSRHLDSGFIKLNEKETLAERLYMLSRELGKIIDRINPN

SEQ ID NO: 138478 - protein, 101 aa, Unknown
  Bacterial polypetide isolated from the Sargasso Sea
MTVILGIDPGTNITGYGIIKLEESKPTYLHHEILKTGLKNMYTLKLSLIYDNTKRLIEQYKPDDIALESVFFSVNAGTAIKLGQARGAALSACSGEHRNIT

SEQ ID NO: 138479 - protein, 164 aa, Unknown
  Bacterial polypetide isolated from the Sargasso Sea
MKILGIDPGSRVTGYGLVEHQGNSTRYLDSGCIRLPDKWKLADKLVQISNELGALIEKNRPDCASIEQIFFAHNARSALILGHVRGVILLKMAETGLPIHEYPPLQVKQAVVGVGRATKDQVIHMVQILLNKRQDFKEDEADALASAITHAHLHPTLEMMQGKG

SEQ ID NO: 138480 - protein, 82 aa, Unknown
  Bacterial polypetide isolated from the Sargasso Sea
MAIILGVDPGSRITGYGVIQCQGRQQLYLGSGCIRTSGDDLPLRLKQIFDGISEIIRQYQPDEFAIERVFLAKNADSALKLG

SEQ ID NO: 138481 - protein, 164 aa, Unknown
  Bacterial polypetide isolated from the Sargasso Sea
MIKILGIDPGTNITGFGIIGFEKNQFNYIHHSIVKTGLKNKYTTKLAILNEATENILNQFSPHHVAVESVFFSVNAGTAIKLGQARGAAICACSRKGIEIFEYSPRKVKNMVTSNGAADKDLLQKEVKKKLNIRRKLEIDASDALGVAICHALMLTENQDIPSV

SEQ ID NO: 138482 - protein, 161 aa, Unknown
  Bacterial polypetide isolated from the Sargasso Sea
MRILGIDPGSRKTGYGLIEHSNNKSRHLDSGFIRLNEKETLIERLLMLSTELEKIIERLNPNCGAIEKIFYAKNAQSALSLAHARGVILLKFSEKQLPIHEYQALKVKQTVVGAGRADKGQIKHMVKILLKINDSLQEDQADALAVALTHAHLWRANNNWL

SEQ ID NO: 138483 - protein, 78 aa, Unknown
  Bacterial polypetide isolated from the Sargasso Sea
MINSLRILGCYSGSGGYNRYPSSQLLILNNKSYLIDCGEGTQFLLKKYKTKLSSIDNIFISHLHGDHYFGLPWFNIIL

SEQ ID NO: 138484 - protein, 243 aa, Unknown
  Bacterial polypetide isolated from the Sargasso Sea
IFVTHLHGDHCLGILGLLQTMSLQKRTEAVEIYGPSGIEEFITANIKVLNFGLPFPVFITIVDEGNVVKEKNYQINCCEAQHGIPAFSYCFEENERAGVFYPEKAKELGIPEGKLWQELQNGNSIEINGKNIDSSQVTGEKRQGKKIGISGDTRPTQKLKEFFKNSDYLSFDCTFSYELKDRAIETNHSTAKEAAELAKEANVKNLILTHFSARYSDESVLIDEAKQTHNSVIAAKDLLEIDI

SEQ ID NO: 138485 - protein, 146 aa, Unknown
  Bacterial polypetide isolated from the Sargasso Sea
MNNSLRILGCYSGSGGYGRYPSSQLLILNNKNYLVDCGEGTQFLLKKYETKLNSIDNIFISHLHGDHYFGLPGLISHYNLKGRTKDLSIYGPIGLKKIISLIMKSSNSWTSYKLNIIELEPKDLTFIENDKISVSSIKLSHRIPCT

SEQ ID NO: 138486 - protein, 270 aa, Unknown
  Bacterial polypetide isolated from the Sargasso Sea
MLDFLFLGTSAATPTKSRNLSSLAIRRQNKANFWLIDCGEATQHRILFSSLSLARINCIFITHLHGDHLFGLAGLIASRSLQGAQNPLKIFGPQGLKEYINVSLKTSSCRPLYPLEIIELNQKGASWKQEGWEIKAIPLEHGVTCFAYSFTEEKIAAPFLFEKAQKLKIPSGPLWGELQRGSRISLEDGRQFEGKDFLGETRQKLKFIVAGDNYTPSLLEEDLKDANLLIHEATYTDDVYKNLGKKQLHSTAKKLAKSVAFTGLKNLILT

SEQ ID NO: 138487 - protein, 219 aa, Unknown
  Bacterial polypetide isolated from the Sargasso Sea
ELQAFINSALKSSFCKLSFPLNFVQVENFASKNKLLFENDKIKVNCACLKHKIPAYGYRVSEKDKPGIFDIKKAESMKIAPGPIYSELQQGKKVVLADGRTFNGEEFCGPPRQGGSFVYCTDTVFSESAVSLSKNADLLVHESTFSDEDESMAYEKLHSTTIMAAKTALLSKTKKLIITHLSPRYTNKSAITPSDLLKEAQKVFPNTQLAKDFLTTEIK

SEQ ID NO: 138488 - protein, 143 aa, Unknown
  Bacterial polypetide isolated from the Sargasso Sea
MKFELTILGCGGSIPTLDRNPTSQYLNIQDRHFLIDCGEGTQIQLRKYRCKFSKIDHIFISHLHGDHFLGLFGYLSTLDLLGRTNNINIYANSELSNLIESHNKTTGKKFNFEIIFHSLDFKSPKNIFEDNVLEVLSFPVNHN

SEQ ID NO: 138489 - protein, 249 aa, Unknown
  Bacterial polypetide isolated from the Sargasso Sea
MNRGDVEVVFLGTGSAMPAKYRNVSGFFARFGGEGYGGNIALDLGEGSLAQMIRRYGAEDVEAKLEEMRLVWISHIHADHHVGLTRVLAARADAFRRAGVEPPTIPVVGPRPLRRFLELYAEVEDLCCDFVDLSETTQDEWDSETMSPAVARLRNALTGSDVREIVAVPVFHCAHAYGAKLVGHRGWSMVYSGDTRPCPSLVRAAKDATLLIHEATFENGMEDEAKKKRHSTTGEAVQTGIDARCYRTI

SEQ ID NO: 138490 - protein, 110 aa, Unknown
  Bacterial polypetide isolated from the Sargasso Sea
PPREGESFVYCTDTVFSESAVSLSKNADLLVHESTFSREDENMAYEKLHSTTIMAAKTALLSNTKKLIITHLSPRYTNKNAITPSDLLKEAQKVFPNTQLAKDFLTAEIK

SEQ ID NO: 138491 - protein, 70 aa, Unknown
  Bacterial polypetide isolated from the Sargasso Sea
MKFEVTILGSASATPVYNRNPTAQLLNCNERHYLIDCGEGTQQQLIKYGFKASKIDYIFISHLHGDHFFG

SEQ ID NO: 138492 - protein, 262 aa, Unknown
  Bacterial polypetide isolated from the Sargasso Sea
MRKYKCKFQKIDNIFISHLHGDHYLGLIGFLSSLNLLGRNRKLNIYAPEKLQKILAVHEEVNGRKFDFEIIFQPLKFDAMHCIYEDNVVQVFSFPVTHSVPTCGFLFKEKIRPRKILKDKIKEFDISISDINKIKSGNDFIQNDKVVKNDLLTLPAPPPRSYAYCADTMYDKTIVDFIKNVDLLYHEATFLSSMKSRAKSTKHSTAEQAALIAKDAVVSKLLIGHFSARYKEVDLFELEAKAVFTSTKAVVDGDEFELNFNN

SEQ ID NO: 138493 - protein, 161 aa, Unknown
  Bacterial polypetide isolated from the Sargasso Sea
MVYSGDTTPAPSLVAAGRQWAQQGSAVLLVHEATFLDTAEGREHAVRKRHSTVADAVGAGCAIGAWRTVLTHFSNRHPSFPVPAVALGHQQPRQGQSVGNDERPAAEERRRVFCELTEELAAYASRCAFALGCLYCQKSQHVAICCPQVRDCGAGRPCGDG

SEQ ID NO: 138494 - protein, 152 aa, Unknown
  Bacterial polypetide isolated from the Sargasso Sea
MGLPGLPGLPGLPGLLGLLGLPGLPGIQPGPSGPSGPSRPPSGHSARAFRAFRAFRAFRAFSPGLPGLPGLPGLPGIQRGPSGPSGPSGHSARAFRAFRAFSAGLPGLPGLLGIQPGPSGPSGPLAGIDPYCPLPPQVVPASCLARSAAPAP

SEQ ID NO: 138495 - protein, 113 aa, Unknown
  Bacterial polypetide isolated from the Sargasso Sea
PLPPATILIHEATFEDEMAEDAVAKKHCTVSEAIDVGRRMDAHRIILTHFSQRYPTIPNLPAHLSSRVLVAFDMLSVSFNQLLQAPASVPVLRCLFPPEIDDDEENLIESEKP

SEQ ID NO: 138496 - protein, 298 aa, Unknown
  Bacterial polypetide isolated from the Sargasso Sea
MKIVYLGTSAAAPTVERSLTCICLVRENEVLMFDAGEGAQVAYLKAGLPWNKKMKIFVTHLHGDHCLGILGLLQTMSLQKRTEAVEIYGPSGIEEFITANIKVLNFGLPFPVFITIVDEGNVVKEKNYQINCCEAQHGIPAFSYCFEEEERAGVFYPEKAKELGIPEGKLWQELQNGNSIEINGKNIDSSQVTGEKRQGKKIGISGDTRPTQKLKEFFKNSDYLSFDCTFSYELKDRAIETNHSTAKEAAELAKEANVKNLILTHFSARYSDESVLIDEAKQTHNSVIAAKDLLEIDI

SEQ ID NO: 138497 - protein, 387 aa, Unknown
  Bacterial polypetide isolated from the Sargasso Sea
SFAIFYCLVALPIGRLVDTKSRKNIVAVGITLWSFMTAMCGLAQNYAQLFLARIGVGVGEATLGPAAYSMLADTFPPKKLGFAMGIFNMGTAVGAGLALIIGGSIISFVTANESGRTILFGIEFLAGWQWVFILVGLPGLLIAALSALIKEPRRIIAETENGNGENPIALNEVKHFFLQHFDFHFPHHAAASFSNLALVGINSWVSVYFIRIHGWSLSEAGLNIGLSLIFGGLVGLVGGGLLSDQMSIRFKGGKAIFCLCCALVAVPFSLLFALTENASASLIFFALAYGFMVAPIPSAAAILQEVTPNRMRGTLSAFYLLVISIIGLALGATIVALINDNFFDGDSGIRESLLIAIPVFNLVAAGFYFKLIKPYRARSENKPRSHA

SEQ ID NO: 138498 - protein, 256 aa, Unknown
  Bacterial polypetide isolated from the Sargasso Sea
MINSLRILGCYSGSGGYNRYPSSQLLILNNKSYLIDCGEGTQFLLKKYKTKLSSIDNIFISHLHGDHYFGLPGLISYFNLKGRTKDLKIYAPKGLKEIITLMMKSGKSWTSYNLIFNELEHKSLQIINNDEISVHTLKLNHRIPSTGFLFKSKKHQDISYAYCSDTSYNPQISSLIEGVNILYHESTFLSKHQDLADKTKHSTALEAGKIAVKARVNKLILGHFSSRYKNLDEFRIEATSLFSNAFIAEEGKIYTF

SEQ ID NO: 138499 - protein, 193 aa, Unknown
  Bacterial polypetide isolated from the Sargasso Sea
MINSLRILGCYSGSGGYNRYPSSQLLILNNKSYLIDCGEGTQFLLKKYKTKLSSIDNIFISHLHGDHYFGLPGLISYFNLKGRTKDLKIYAPKGLKEIITLMMKSGKSWTSYNLIFNVLDHNSLQIINNDEISVHTLKLNHRIPSTGFLFKSKKHQDISYAYCSDTSYNPQITSLIEGVNILYHESTFLSKHQ

SEQ ID NO: 138500 - protein, 252 aa, Unknown
  Bacterial polypetide isolated from the Sargasso Sea
VFGLPGLLASFGLAGSSAAGVDLYGPDPLESYLNGVLRTSSTRIGYPLAVHRVRDAAEQGTLLFEDDDFTVRCSPLTHRVPAYAYRIEQKPLAGRFDIEKARELNIPPGPVYAQLKRGETVTLEDGRSIDGTSLCGEERPGVSVVYCTDTVFCEAAVELARGADLLIHESTFAHGEAEMAFQKQHSTSTMAAQTAAEAGVGQLVLTHLSPRYVPGNPVTPQDLLNEAKAIFPNTLLAKDFLSIDVKPRCNSS

SEQ ID NO: 138501 - protein, 224 aa, Unknown
  Bacterial polypetide isolated from the Sargasso Sea
MSLRAGGAPHSATRIGYPLRFHRVEAAAASRQPLFVDGAFSVSCAALKHRIPAFGYRIQQSERPGRFDIAKAKAMRLPPGPEFARLKAGETVTFADGRRIDGRELCGPSQPGSSLVYCTDTVFSEQAVALAKGADLLIHEATFSHRDAAMAYQRQHSTSTMAAQTAAEAGVQQLALTHLSPRYVPGAAESPDDLLQEAKAIFPNTVLAKDFLSLEVTAPACNSL

SEQ ID NO: 138502 - protein, 178 aa, Unknown
  Bacterial polypetide isolated from the Sargasso Sea
MTFLGTSSGAPSFTRNVSSVALRLDNEVWLFDCGEATQHQLMRSKLKYAKITRIFITHMHGDHIFGLPGLICAISGARTAHSRSYGGTAVPLHIIGPPGIRQYVYSAITWSRSVLGMPLIVTELRQPAPRVAASASPAAHTSVDPRGKIFMGEYWPDALDCEPVPNFKDIEGWSRLGE

SEQ ID NO: 138503 - protein, 301 aa, Unknown
  Bacterial polypetide isolated from the Sargasso Sea
MELIILGCHSASPRQNFHTSSQLLKFKNHLFLIDCGEGTQMRLREEKISFTRIKHIFISHLHGDHFYGLIGLINTFKLLGREIDLNIYGPKGIKEVILIQMKLSKSFTNFNLIFFELEKKYPEVIFEDDLVKITTIPLKHRVYTNGFLFEDKLKTKKINYDNVNLYKIPSTFYEKLKEGFDYKDGKGNLVKNSMLTFNSISPFSYAYCSDTSFFTKIVDQIKNIDILYHESTFLNRDIDLAKKTKHSTAQQAGKIASLANVNQLILGHFSTRYNEKSSFVLEAQKEFKNVILAEQGKKYNF

SEQ ID NO: 138504 - protein, 222 aa, Unknown
  Bacterial polypetide isolated from the Sargasso Sea
MKINYQSLEKKIDLKFKNKDLLTRALTHKSFNPNENNEKIEFLGDRVLGLVIAKKLLEIYPGEKEGILDKKFASLVNKKTCLNIAKKINLASYVKTFNPNNKKIKIEDKIISDSCEALIGAIYLDKGFTIVEKTILNLWQDHIEKSVVTEIDAKTKLQELTLKNFKKLPTYKLISNTGPRHKPIFKVGVKLPNTKYFIATGKSKKEAEQNAAIECLKNTNKK

SEQ ID NO: 138505 - protein, 186 aa, Unknown
  Bacterial polypetide isolated from the Sargasso Sea
MYKQLYEKINYSFKNENILDLVLTHKSSGEKNNERLEFLGDAILGAVISEELYNRFTNINEGDLTRIRAALVKGSTLIKKGKELDLLALARLSKAAKNLSDLEDSSILGTIFEALVGGIYLDSSWSETKAVILSLYRNDIESIDIQNSFKDPKSELQEYLQSLGEEPLEYICEKSRNDSQDIFVCY

SEQ ID NO: 138506 - protein, 209 aa, Unknown
  Bacterial polypetide isolated from the Sargasso Sea
KSLTHPSYLKEKNNSNIKNNHFERLEFLGDRVLGLSIASLLFEKYKNFDEGDLSKKYSYLVQKNFLHKISIDLQIEDIINYNYKNKNKKMIVSILSDTVESLIGAIFIDGGYMSSYDFINKFWSSHIDIDVSKILDPKTSLQELSQQKLKKLPEYKILKKEGPPHSPLFTVVLRVLNLKKIKATGTSIREAERKAALIALNLIDEKKIT

SEQ ID NO: 138507 - protein, 232 aa, Unknown
  Bacterial polypetide isolated from the Sargasso Sea
MAWLIDIISFLKSLLSSTPSHRFTELTKLISYRFNNIDYLEQAFTHRSISSEPRKNYERLEFLGDAVIDIIISRELMRYYPDGDEGLLTKKRSALVQQSFLTNIGNMLNIMNYLIVEPNVDLNNEKVANKQQANLVEALIGAIYLDGGIKPAKKIIIDTIWKNKNEAWKTINYKGQLIEYCHANGINNPKFHLVNASGPDHQKTFEIHVTINKEKYPTGIGSDKKTAEQSAA

SEQ ID NO: 138508 - protein, 170 aa, Unknown
  Bacterial polypetide isolated from the Sargasso Sea
MKELFSNIGYSFKDSSLVEVALTHKSFSSSNNERLEFLGDALINLYISERLFKTYEGLDEGKLTRFKASMVSRDNLNLIASKLNIGSLIKLGRGEKLEGNSILGNTFEALVGAVFLDSDYSRTQIVLDNLFDDDFISIDEVDELKDPKSQLQEIIQKNYQSLPKYFVKEI

SEQ ID NO: 138509 - protein, 129 aa, Unknown
  Bacterial polypetide isolated from the Sargasso Sea
MIINKFFKNIFYRYDSEIEKILKYNFKNKYYLSQALTHKSISNNPGKNYERLEFLGDAVIDIIVSEKLMNEYPECDEGILTQKRSALVQKSFLSYIGKFLNIINYIKIEDNVDLSQEKIADKQYANLFE

SEQ ID NO: 138510 - protein, 86 aa, Unknown
  Bacterial polypetide isolated from the Sargasso Sea
MISKKKLNQFEIKIGYKFKNNSLLNQSLTHPSFYSEDKSEKKIDNQFERLEFLGDRVLGLTIATILFKKYKFFDEGNLSKKHSYLV

SEQ ID NO: 138511 - protein, 226 aa, Unknown
  Bacterial polypetide isolated from the Sargasso Sea
MTNIETIENSIKYHFVNRALLEAAITHTSFVNNKKDYTYERLEFLGDRVLGLVIADLIYKNFSNESEGDLARRIAFLVSGKTLSEIAFKLKLQNYVRVSENLKFNNGENNSILSDTMEAIIGAIFLDSNYSEVKKVIKYIWIEYIKNDVKPPKDPKSALQELSMELKYEMPVYSNYIKEGPDHSPVFKVKVSIKGLNKSQGIGVSKKSAEIDAASKLLSIIERNSN

SEQ ID NO: 138512 - protein, 52 aa, Unknown
  Bacterial polypetide isolated from the Sargasso Sea
MKKLYTHSSFKNNTKSNQERLEFLGDRVLGLVIVEYLFPNFISDREGLLTTK

SEQ ID NO: 138513 - protein, 203 aa, Unknown
  Bacterial polypetide isolated from the Sargasso Sea
MISTKKIDQFENHIGYSFKNKKLIISALIHPSFLVDKKKTKFKLPNDFERLEFLGDRVLGLAISSIIYKKFDNNNEGDLSKKLSYLVQKNFLHKISINLKINNILKYSSKKNEKMNISILADSIESLIGAIYLDGGFKNALKFINEVWGPYLDISHNNMQDSKTKLQEISQQKLKKLPEYSLLKKEGPSHSPIFTVSVKVLNL

SEQ ID NO: 138514 - protein, 230 aa, Unknown
  Bacterial polypetide isolated from the Sargasso Sea
MNDVQSILRSYGLPTTVNNFEYYKLAFVHKSYTKKNIDNEMIKCINRPNNCIELKEKSNERLEFLGDGILEAVTKFYLYRRFPNENEGFMTEKKIAIVKNESIGKFAYEIKLNKWLLLSNCAEEKKNRSNYKKLGCIFEAFIGALFLDLNNIDIKDENKWFETIFRSGPGFQLVQIFLENVFEEHINWNELLHNDDNYKNKLQIILQKEFKTTPHYIEIEKDVDGYNMGV

SEQ ID NO: 138515 - protein, 170 aa, Unknown
  Bacterial polypetide isolated from the Sargasso Sea
MKGLFDELGYTFSNDDLIKKALTHKSSSSDNNERLEFLGDAILNLYVSEKLIHSYPELSEGKLTRFKASIVSRQNLNLVAEKLRLSEFIKIGKGERLDGNSILGNTLEAIIGAIFLDSDYPNTKEILQRLFLKDFLEIEEESELKDPKSALQEYIQKTYKSLPTYSIQKS

SEQ ID NO: 138516 - protein, 231 aa, Unknown
  Bacterial polypetide isolated from the Sargasso Sea
MKISAELKAFEGRIGYSFKEPALLVRAVTHSSMSTPNRDDNQRLEFLGDRVLGLVMCEALLEADKQASEGQLAPRFNALVRKEACADVARQIDLGAVLKLGRSEMISGGRRKNALLGDAMEAVIAAVYRDGGFAAAKDLVLRLWGNRIHEVEEDARDAKTALQEWAQARKLPPPVYREVARKGPDHAPVFTISAELKTGESEAATAASKRAAEQAAAKALCKDGTLNDPRR

SEQ ID NO: 138517 - protein, 216 aa, Unknown
  Bacterial polypetide isolated from the Sargasso Sea
THKSYLPTESELNLGNNERIEFLGDAVLDLVISEMLMQEFPELDEGGLSKFRASLVSESGLCKQARALELGDCLLLGKGEELTGGREKTSLLSDTFEAVMAAIYLDSREKNGLSEIARVIRKLFLPQLPKNAEGYITRDYKSELQEQVQKIMGLPSTYELVDETGPDHQKEFTMAVFVKDEEYGRGSGASKKIASQLAAENALERIKQDPSLLKGS

SEQ ID NO: 138518 - protein, 221 aa, Unknown
  Bacterial polypetide isolated from the Sargasso Sea
MTDINKLMEIIGYNFRNKSLIKTALTHSSFSKENKIKNNERLEFLGDRVLGLIISSEIFKKNLSSTEGELAKQQSFLVCKTTLKKVANNIKLREFVNCTQSLKKNSLDSVIANTLEALIAAIYLDSNLNQASKVVLKLWKSFLENINLSSFDPKSKLQEWSLKNKKRLPTYEIMDKSGPDHSPTFTIKVILDEKFSSFAKGKSKQDAEIKAADKLLKKICE

SEQ ID NO: 138519 - protein, 105 aa, Unknown
  Bacterial polypetide isolated from the Sargasso Sea
MNQKWLDLCNRLDYKFENLDILRQALTHKSYIPSESDENFGNNERIEFLGDAVLDLVISEMLMEEFPELDEGGLSKFRASLVSESGLCKQASALDLGDCLLLGRG

SEQ ID NO: 138520 - protein, 219 aa, Unknown
  Bacterial polypetide isolated from the Sargasso Sea
MILTKEINRFEKNIKFKFKNKNNLLIALLHPSYIKEKKTTKNYLPNEFERLEFLGDRVLGLVISSLIFNKFKSYDEGDLTKKFSYLVQKNFLYKIALELNMDKFLKYSIKKYNKKNNISILADSMESLIGSIFIDSGYSAVVKFIKYIWGPYLDLEASNIADAKTMLQEISQKKYKILPIYKLVKKEGPSHSPVFTISVEVKNLKIFKAKGSSKREAEK

SEQ ID NO: 138521 - protein, 85 aa, Unknown
  Bacterial polypetide isolated from the Sargasso Sea
MEKQSIFQGSSVKKSEPIRSFEQRLGYQFSNVSLLIEALTHSSIVSESRKDNQRLEFLGDRVLGLVMAEALLEIDRLAPEGTLAP

SEQ ID NO: 138522 - protein, 239 aa, Unknown
  Bacterial polypetide isolated from the Sargasso Sea
MEKQSIFQGSSVKKSEPIRSFEQRLGYQFSNVSLLIEALTHSSIASESRKDNQRLEFLGDRVLGLVMAEALLEIDRLAPEGTLAPRFNSLVRKEACAEVARQIDLGSVLKIGRSEMLSGGRRKDALLGDGMEAVIAAIYQDGGFELAKKIVIELWGDRIRNVKGDARDAKTMLQEWAQARGQPPPKYEVISQSGPDHAPDFLVQVRLDSGETADALAGSKRQAEQMAAKSLLQTMRELI

SEQ ID NO: 138523 - protein, 122 aa, Unknown
  Bacterial polypetide isolated from the Sargasso Sea
MKLFVKLKQYFLDKSDSVSILEKKINYIFHNKEYLNQAFTHKSLNTEPRKNYERLEFLGDAVIDIIVSRELMRDFPEGDEGLLTQRRAALVQKPYLASIGHLLDLMDYLMIEKSVNLEIEKI

SEQ ID NO: 138524 - protein, 222 aa, Unknown
  Bacterial polypetide isolated from the Sargasso Sea
MKINYQSLEKKIDLKFKNKDLLIQALTHKSFNPNENNEKIEFLGDRVLGLVIAKKLLEIYPDEKEGILDKKFASLVNKKTCLDIAKKINLASYVKTFNPNNKKIKIEDKIISDSCEALIGAIYLDKGFTIVEKTILNLWQNHIEKSVVTEIDAKTKLQELTLKKFKKLPTYKLISNTGPRHKPIFKVGVKLPNTKYFIASGKSKKEAEQNAAIECLKITNKK

SEQ ID NO: 138525 - protein, 149 aa, Unknown
  Bacterial polypetide isolated from the Sargasso Sea
MKTKNKNIDPLENILLKLKYKFKDKNILKLALTHSSFVEKNSNKNYERLEFLGDRVLGLVIAEMLFKKFPNEKEGELSKRFAYLVNKKTLIKVADLLGLRDVIITAKNYRLRVNITDSMVADSLEALIGAIFLDSNFENVKNLVERLWE

SEQ ID NO: 138526 - protein, 165 aa, Unknown
  Bacterial polypetide isolated from the Sargasso Sea
PEAREGDLSRMRSQLVNGVALAELSRELSLPEWLRLGAGEQHSGGRERDSILADAFEALIAAVYLDSDYETCQTNVLRWFGSRLANVELQAAVTKDAKTRLQEWAQARQQPLPSYQSTVTGKAHAQTFTVTCRIAGMELMTTATARSRRAAEQAAAKQYLEEINE

SEQ ID NO: 138527 - protein, 155 aa, Unknown
  Bacterial polypetide isolated from the Sargasso Sea
MITTKNINFFENKIGYIFKNKEILISSLLHPSYIKEKKIKYSKLNQNFERLEFLGDRVLGLVIASLIFSKFKDLNEGDLSKKLSYLVQKNFLYKISNELTLIKVIKYRFKKQNEKMNQSVFADTVESIIGAIYLDGGYQASTKFIKKFLGSIFKH

SEQ ID NO: 138528 - protein, 187 aa, Unknown
  Bacterial polypetide isolated from the Sargasso Sea
MNKFSIFQKIDETPDDVIEHDLYNNKNFLINRKQVQDILEQCEITDLIDNLELYQRAFTHKSYIEKEDCVKIVENQINALELQKKSYERLEFLGDSVLGLIVVSYLYRRFFDQNEGTMTKYKAKLVSKKALSEFSKLLGFSKYFIISKQIEQNNGRENINILEDTFEAFLGALFLDFNHQFTIKKSK

SEQ ID NO: 138529 - protein, 107 aa, Unknown
  Bacterial polypetide isolated from the Sargasso Sea
MDYQFENSGILRQALTHKSYQPLESELNLGNNERIEFLGDAVLDLVISEMLMQEFPDLDEGGLSKFRASLVSETGLSKQARALELGDCLLLGKGEELTGGREKTSLL

SEQ ID NO: 138530 - protein, 113 aa, Unknown
  Bacterial polypetide isolated from the Sargasso Sea
MAWLIDIISFLKSLLSPPPSHRFIELTKLISYRFDNIDYLEQAFTHRSISSEPRKNYERLEFLGDAVIDIIISRELMRYYPDGDEGLLTKKRSALVQQSFLTNIGNMLNLMNY

SEQ ID NO: 138531 - protein, 100 aa, Unknown
  Bacterial polypetide isolated from the Sargasso Sea
MYKKLYEKINYSFKNENILDLVFTHKSSGEKNNERLEFLGDALLGAVISEELYNRFTNINEGDLTRIRASLVKGSTLIKKGKEKDLLDLAKLSKAAKNLS

SEQ ID NO: 138532 - protein, 222 aa, Unknown
  Bacterial polypetide isolated from the Sargasso Sea
MKINYQSLEKKIDLKFKNKDLLIQALTHKSFNPNENNEKIEFLGDRVLGLVIAKKLLEIYPKEKEGILDKKFASLVNKKTCLDIAKKIDLASYVKTFNPNNKKIKIEDKIISDSCEALIGAIYLDKGFTLVEKTILNLWQDHIEKSVVTEIDAKTKLQELTLKNFKKLPIYKLISNTGPRHKPIFKVGVKLPNTKYFIATGKSKKEAEQNAAIECLKNTNKK

SEQ ID NO: 138533 - protein, 138 aa, Unknown
  Bacterial polypetide isolated from the Sargasso Sea
MAELEFAIGYKFKSISLLTLAMTHRSFSKDNNERLEFLGDAILGAVVSSILFEANPNFQEDRLSLMRAELVKGQSLANIGRSVGIPEMLRLGAGEAKQGGAERESIIADAFEALIGAVQLDAGMEIVEKIVRRILRTV

SEQ ID NO: 138534 - protein, 160 aa, Unknown
  Bacterial polypetide isolated from the Sargasso Sea
MITKKNISLFENLIGYKFKNTEILKSALIHPSYFKDKKMKLKKSPEEFERLEFLGDRVLGLVIASLIFKRFHDQNEGKLSRKLSYLVQKNFLYKISIELSLDKILIFLFKKQNEKMNISVLSDAVEAIIGAIFLDGGYQSSFKFIKKFWGPYLDTKASDI

SEQ ID NO: 138535 - protein, 212 aa, Unknown
  Bacterial polypetide isolated from the Sargasso Sea
MPENIKIPKKITNSKNFKLAFIHKSFDKDQNNERLEFLGDAVIQLAISEKLHHEEQHFNEGELTRIRAKLVNTSFLSSVCKKHDFHKYIKASKGTNSLSEHQKDKVYAGMLEAIIGAVFLETDYFYASKFVYTLFGDELYSLDSTKDAKTLLQEYCQSNNIELPRYYSTEDNKSNEFVCTLNINNMTVEAKHVQKKISEQLAAKKALAVITK

SEQ ID NO: 138536 - protein, 180 aa, Unknown
  Bacterial polypetide isolated from the Sargasso Sea
EFLGDRVLGLVIAKKLLEIYPNEKEGILDKKFASLVNKKTCLEIAQNLELEKFVLTFNVKKKNNIIEDKVLADSCEALIGSIYLEKGFLAVEKFILNQWSKHIKDSVITKVDAKTKLQEFSLKKFKKLPVYKLFSNTGPRHKPIFKVGVKLFNTKFYISKGKSKKEAEQNAAVLCLENIS

SEQ ID NO: 138537 - protein, 217 aa, Unknown
  Bacterial polypetide isolated from the Sargasso Sea
LTHKSYLPSKTGLNLGNNERIEFLGDAVLDLVISEMLMQEFPELDEGGLSKFRASLVSESGLCKQARALELGDCLLLGKGEELTGGREKTSLLSDTFEAVMAAIYLDSREKNGLAEIARVIRKLFLPQLPKNAEGYITRDYKSELQEHVQKIMGLPSTYELVYETGPDHQKEFTMAVFIKDKEYGRGCGASKKIASQLAAENALVRIQQDPSLLKGG

SEQ ID NO: 138538 - protein, 89 aa, Unknown
  Bacterial polypetide isolated from the Sargasso Sea
MSIFSRFILNNDEKKVSNFISDKFFYKPKKIELFIQALTHKSKTFNSDKQSNERLEFLGDAILDAIVADFLCREFPNSDEGQLTRIKSK

SEQ ID NO: 138539 - protein, 145 aa, Unknown
  Bacterial polypetide isolated from the Sargasso Sea
MYINKLEKKINYYFKNVDLLEEAITHSSFQRNNLKIKKNNYERLEFLGDRVLGLVLSEYFFKTYPNANEGVLDNYFQRHANQENLFNYAKKINLSTYLQTQKGDNLENNKSILSDVVEAMIGAIYIDTGLNNCKKFILNNIKTKI

SEQ ID NO: 138540 - protein, 99 aa, Unknown
  Bacterial polypetide isolated from the Sargasso Sea
MKKTFKVSKLIADAGICSRRKAEQLIKDGKVKLNDKILTSVPERASLIDSIKVNNKTINSKQKTRLWKYNKPAGKLTTNYDPKDRKTIFDDLPKNYLEL

SEQ ID NO: 138541 - protein, 198 aa, Unknown
  Bacterial polypetide isolated from the Sargasso Sea
HSSYQKSNLKIKKNNYERLEFLGDRVLGLVLSEYFFKTFPTANEGILDNYFQKYANQENLFKYAKSINLNNFLKTQKGDNLENKKSILSDVIEAIIGAIYIDTGLKNCKKFIIKNIIDKDLIYSQPLKHPKSILQEYSLEKYKTLPKYSILNKFGNEHEPIYEVSVYIKNNNIVSATGSNLKNAEEAAATKLLNILKI

SEQ ID NO: 138542 - protein, 110 aa, Unknown
  Bacterial polypetide isolated from the Sargasso Sea
MYKKLYEKINYSFKNENILDLVFTHKSSGEKNNERLEFLGDAILGAVISEELYNRFTNINEGDLTRIRAALVKGSTLIKKGKELDLLALAKLSKAAKNLSNLEDSSILGT

SEQ ID NO: 138543 - protein, 222 aa, Unknown
  Bacterial polypetide isolated from the Sargasso Sea
MKNSFKELEIILDYNFKNSDLLKQSLIHKSFDNLNNNEKLEFLGDRVLGLIISKKLIEIYPKEKEGIIDKKFANLVNKKTCSSIANKLNIKKFMFLGASHKSLQKFADKIIGDCLEALIGAIYLDGGLKYAEKFVLKFWKKNLENSSLPLIDSKTKLQEHSLKIYKELPRYTFYKKTGPQHKPIFKTDVQIPNSKKVMGTGTSKKNAQQNAAGKLLRSLKIL

SEQ ID NO: 138544 - protein, 223 aa, Unknown
  Bacterial polypetide isolated from the Sargasso Sea
DILRQALTHKSYVPLESEENFGHNERIEFLGDAVLDLVTSEMLMKAFPELDEGGLSKFRASLVSESGLCKQARALELGDCLLLGRGEEMTGGREKTSLLSDTFEAVMAAIYLDSRDKHGLSEIARVIRKLFLPHLPENAQGYITRDYKSELQEHVQKLTGMPSKYELVDEKGPDHQKEFTMAVFVRDKEYGRGSGASKKLASQLAAENALVRIQRDPSLLEGG

SEQ ID NO: 138545 - protein, 131 aa, Unknown
  Bacterial polypetide isolated from the Sargasso Sea
MTGAGPKDDALATLEAEIGHVFTDRQLLVEALTHASHGPSGASYERLEFLGDRVLGLVLAEHVFSAYPQDDEGGLSLRFHAAARQSTLADIARDLNVASHVRSQSGMDVAANESILADVVESLMAAIYIDG

SEQ ID NO: 138546 - protein, 156 aa, Unknown
  Bacterial polypetide isolated from the Sargasso Sea
MKDLMTKLGYNFQDKTLLNMALTHKSFSTQHNERLEFLGDAILNLYVTEYLYKEFDSLDEGKLTQFKATIVSRENLTKISQDIGLSKFIFTGKGEVLEGNSILGNAIEALIGAVYLDSDYSKAYAVLDKILKENLLNLEEGTDLKDPKSKLQELLQ

SEQ ID NO: 138547 - protein, 192 aa, Unknown
  Bacterial polypetide isolated from the Sargasso Sea
SYNPVENNEKLEFLGDRVLGLIISQNLLKFFPNDKEGDLDKKLASLVNKKQCAVIAKEINLQEYILIKNSNSKTNIENKVLSDCLESVIGCIYLDQGLDVAEKFITKNWRKYLNKSLITERDSKTKLQEYSLKTYKLLPIYKLLDNKGPRHKPLIKVSVNIKNSKNITATGNSKKEAEQRAAKKLLKSLQLS

SEQ ID NO: 138548 - protein, 145 aa, Unknown
  Bacterial polypetide isolated from the Sargasso Sea
MEKKIKELEKILKYNFKKTLLLEKALTHKSFDNNNNNEKLEFLGDRVLGLVISEKLLEKFPNEKEGIIDKKFANLVNKKTCSMIAKKINLKKFILLGSSHKKIERSADKINSDCLEAIVGAIYLDGGLRSVEKFILIFWEEYLLK

SEQ ID NO: 138549 - protein, 200 aa, Unknown
  Bacterial polypetide isolated from the Sargasso Sea
MNRYNVYYNVQNFEIFKRAFVHKSYVIPSKLNDDVKLSLKPPNCIDLCSRSNERLEFLGDGILENVTKFYLYKRFPEQDEGFMTEKKIALVKNDHIGYLAYKMGLNDYYLLSKNAEEKKTRFNYKKLGCLFEAFLGALFLDANNMTLSDNNGYLNNYFNCGIGFQVCQIFLESIFEQLVDWNEMLENDNNYKNIFQVMIQ

SEQ ID NO: 138550 - protein, 116 aa, Unknown
  Bacterial polypetide isolated from the Sargasso Sea
MDNQFNKNCETLCSQIEYQFQNEELLHLALTHKSFTEFKSKSGQRNNEKLEFLGDAVLDMAISELLMDRFPELDEGGLSKFRASLVNEDGLAHIARKMDLGKCLRMGKGEDLSGGR

SEQ ID NO: 138551 - protein, 143 aa, Unknown
  Bacterial polypetide isolated from the Sargasso Sea
MDNQFKKNCQTLCSQIEYQFQDDELLHLALTHKSFTEFKSKSGQKNNEKLEFLGDAVLDMAISELLMDRFPELDEGGLSKFRASLVNEDGLAHIARKMDLGKCLRMGKGEDLSGGREKSSLLADALEAVFAAIYLDSRKAGGF

SEQ ID NO: 138552 - protein, 191 aa, Unknown
  Bacterial polypetide isolated from the Sargasso Sea
NRNENNEKIEFLGDRVLGLVIAKKLLEIYPEEKEGILDKKFASLVNKKTCLDIAKKINLSSYVKTFNPNNKKIKIEDKIISDSCEALIGAIYLDKGFTIVEKKILDLWEDHIEKSVVTEIDAKTKLQELTLKNFKKLPTYKLISNIGPRHKPIFKVGVKLPNTKYFIATGKSKKEAEQNAAIECLKNTNKK

SEQ ID NO: 138553 - protein, 81 aa, Unknown
  Bacterial polypetide isolated from the Sargasso Sea
MSDCLVVEINITDNSIKLEQILGYEFQNKAILNLSIVHSSIVKKRLESNERLEFLGDRVLGLIKGEILYQTFPNEVEGQLG

SEQ ID NO: 138554 - protein, 54 aa, Unknown
  Bacterial polypetide isolated from the Sargasso Sea
MRALTHGSFNGTVSAKNAQPAAGDYQRLEFLGDRVLGLAVASWLYSAGAAPERQ

SEQ ID NO: 138555 - protein, 93 aa, Unknown
  Bacterial polypetide isolated from the Sargasso Sea
MKRLALLEAAIGYSFKDTGLLEQALTHRSHSARHNERLEFLGDSVLNFTVAALLFDRFQRIDEGDLSRLRANLVKQAALAEIATRLGLSDYLR

SEQ ID NO: 138556 - protein, 191 aa, Unknown
  Bacterial polypetide isolated from the Sargasso Sea
YNPIDNNEKLEFLGDRVLGLIISQNLLKFFPNDKEGDLDKKLASLVNKNQCAKIAKDINLQDYIFIKNSKNNTNIENKVLSDCLESVIGCIYLDQGLDIAEKFIIKNWRKYLNKSLITERDSKTRLQEYSLKHYKLLPVYKLIYNKGPRHKPLIKVSVKIKDSKNIIAIGNSKKEAEQKAAKKLLTSLKLS

SEQ ID NO: 138557 - protein, 186 aa, Unknown
  Bacterial polypetide isolated from the Sargasso Sea
MDYQFENLGILRQALTHKSYLPSESGLNLGNNERIEFLGDAVLDLVISEMLMQEFPELDEGGLSKFRASLVSESGLCKQARALELGDCLLLGKGEELTGGREKTSLLSDTFEAVMAAIYIDSREKNGLSEIARVIRKLFLPQLPKNAEGYITRDYKSELQEHVQKITGLPSTYELVNETGPDHQKV

SEQ ID NO: 138558 - protein, 175 aa, Unknown
  Bacterial polypetide isolated from the Sargasso Sea
RVLGLIISKNLYKLFPKDKEGDLDKKLASLVNKKRCVEISNYLSLKDYVLVGDNKDNLKIENKILADTVESIVGALYLDQGLEVTEKFILNYWKGFLNEKLTIYRDPKTMLQEYSLKLYKTLPVYNVLENKGPRHKPVIKVSVKIKNSKKYLGIGNSKKEAEQKAALKLLDTFKK

SEQ ID NO: 138559 - protein, 206 aa, Unknown
  Bacterial polypetide isolated from the Sargasso Sea
MINKKKIDQLEEIISYRFKNKKLIQSALIHPSYISENKKKIIKETSDFERLEFLGDRVLGLAISSIIYKKFNKNNEGDLSKKLSYLVQKNFLHKISVNLKIDRFLKFSSKKNEKMNISILADSIESLIGALFLDGGFKNAKKFIESTWGPYLNIEDKYMQDPKTKLQELSQQKLKKLPDYNLIKKEGPSHSPTFKISLKVLNLRKI

SEQ ID NO: 138560 - protein, 229 aa, Unknown
  Bacterial polypetide isolated from the Sargasso Sea
MEVGSIFKGYLVRNKEKQNILCETLRYRFKDSTLLMSALTHSSLNKPNQPDNQRLEFLGDRVLALVISEELIKTNPHAREGQLAPQLNALVRRETCAEVASSLGVGPALMIGKSEMISGGRSKVAILADAMEAIVAAIYLDGGLEKVRKFILQAWQEKLLIAPIASFEAKSYLQEWAQARGMSPPTYSEVERSGPDHAPIFMVKVILDNGEFAYGQASAKRPAQQQAAK

SEQ ID NO: 138561 - protein, 212 aa, Unknown
  Bacterial polypetide isolated from the Sargasso Sea
YDPNVLRQALTHASLERSSWNVYERLEFLGDRVLGLVVSETLLKRFPNEREGQISRRYANLVKRDSLAVVARKIKFGDYLLISAGEEAAGARESLTILSDALEAVIGALYWDGGLEIARQFILEHWEPLLALDEEPPVDSKTALQEWAQRRQYALPEYRVISQEGPAHSPKFLIEVYLGKFEPQKGYGTSKRQAEQMAAKSLLAEVLKGQEC

SEQ ID NO: 138562 - protein, 227 aa, Unknown
  Bacterial polypetide isolated from the Sargasso Sea
MKSKLKYINTLEQKINYNFNNKDLLEEALTHSSFKNKSNSNQERLEFLGDRVLGLVIAEFLFQSFLSEREGVLTNKFRYLIQNKQCTKIAEKLDIANYLQFGNSEKNKITNSILADSIEALLGAIYLDGGYDESKKVILSLWDEYLNNDEMLNATVSSKNILQEYLHANSLTEATYLVISKDGEDHNPNFLVEVSVDKVGKADAFGKSIKEAEINAAKKFIDEFEIG

SEQ ID NO: 138563 - protein, 125 aa, Unknown
  Bacterial polypetide isolated from the Sargasso Sea
MQKVTSISDYCFNDVDLLLEALSHPSLDRSASYQRLEFLGDRVLGLVIAEALFKEFPDEAEGALNNRLSALVRRETVAEVALGLGLDQLIILSEGADLEGTRQKQSVLCDVGEAVIGAIFLDGGL

SEQ ID NO: 138564 - protein, 225 aa, Unknown
  Bacterial polypetide isolated from the Sargasso Sea
MSASGLLRLEDRLGYRFQNPALLQHALTHASTTTDRLQSNERLEFLGDRVLALIIADMLFETFPDEPEGDLGYRFTALVRRESLARVAQEINLGISIAMSDGERETGGADKNGLLANACEAVIAAIYQDGGLTAAQQFVERYWSPLLAEQHYPRKDPKTALQEWAQAKGHALPRYQTVHRSGPDHQPMFRVEVRIGESAPAWGEGTSKRAAEQAAAEQLLLVMDT

SEQ ID NO: 138565 - protein, 245 aa, Unknown
  Bacterial polypetide isolated from the Sargasso Sea
MSSPEVNKADKLREWLDQQALDVINTEPLQEALTHTSAGLSSNHEELEFLGDAVLRLAATQYLRQHQGELSVGQKSELRAWLVSDRWLAIFGDQIGLLELIEMGEKGRHDTTATNTILAEITEAMIGAVFTSSGIDTVLTWLTPHWNSSSAEMLRHPERFNSKSSLQEYSQGLGHGLPVYATEQISQHHGDPQRFRSIVSVAGETSAEGFGKSRKDAEQQAAKEALALIRHQSSAATSTSSDVPQ

SEQ ID NO: 138566 - protein, 241 aa, Unknown
  Bacterial polypetide isolated from the Sargasso Sea
MDNQFNKNCETLCSQIEYQFQNEELLHLALTHKSFTEFKSKSGQRNNEKLEFLGDAVLDMAISELLMDRFPELDEGGLSKFRASLVNEDGLAHIARKMDLGKCLRMGKGEDLSGGREKSSLLADALEAVFAAIYLDSRKAGGFSKVSKIINDLYSDELPDQVDSFISRDYKSELQEVVQKSLNLPANYELINQFGPDHQKEFEMVVKVEERILGRGRGFSKKQAGQAAAQDALVRMQNESE

SEQ ID NO: 138567 - protein, 78 aa, Unknown
  Bacterial polypetide isolated from the Sargasso Sea
MPLSPLESRLRYEFRNAELLRQALTHRSHSSTHNERLEFLGDSVLNCAVAALLFNVSANWTKAICRASAPIWSSSSRS

SEQ ID NO: 138568 - protein, 222 aa, Unknown
  Bacterial polypetide isolated from the Sargasso Sea
MKINYQSLEKKIDIKFKNKGLLIQALTHKSFNPNENNEKIEFLGDRVLGLVIAKKLLEIYPEEKEGILDKKFASLVNKKSCLDIAKKINLASYIKTFNPKNKKIKIEDKIISDSCEALIGAIYLDKGFTLVEKTILNLWQDHIEKSVVTEIDAKTKLQELTLKNFKKLPTYKLISNTGPRHKPIFKVGVKLPNTKYFIATGKSKKEAEQNAAIECLKNTNKK

SEQ ID NO: 138569 - protein, 184 aa, Unknown
  Bacterial polypetide isolated from the Sargasso Sea
MDNISSNLGYVFTDKRLIELALTHKSFSLENNERLEFLGDAILNLYVSEKLYASYEDLNEGKLTRFKASIVSRDNLNLVALNLEIAEEIKLGKGEKLDGNSILGNTLEALIGAVFLDSNFNKTKKVLDNLFSNNFNDLNKIDELKDPKSCLQELIQKKYKSLPRYSSKENTSLSYKIDLKLHVM

SEQ ID NO: 138570 - protein, 222 aa, Unknown
  Bacterial polypetide isolated from the Sargasso Sea
MKINFQSLEKKINFKFKNKDLLIQSLTHKSFDPINNNEKIEFLGDRVLGLVIAKKLLEIYPGEKEGILDKKFASLVNKKTCLDIAKKINLASYVKTFNPNNKKIKIEDKIISDSCEALIGAIYLDKGFTIVEKTILNLWQDHIEKSVVTEIDAKTKLQELTLKNFKKLPTYKLISNTGPRHKPIFKVGVKLPNTKYFIATGKSKKEAEQNAAIECLKNTNKK

SEQ ID NO: 138571 - protein, 205 aa, Unknown
  Bacterial polypetide isolated from the Sargasso Sea
LIEALTHSSIASESRKDNQRLEFLGDRVLGLVMAEALLEIDRLAPEGTLAPRFNALVRKETCAEVARQIDLGSVLKIGRSEMLSGGRRKDALLGDGMEAVIAAIYKDGGFEVAKKIVIELWGDRIKNVKGDARDAKTMLQEWAQARGQSPPKYEIMSQSGPDHAPDFLVKVILDSGETAHALAGSKRQAEQMAAKSLLQTMGELI

SEQ ID NO: 138572 - protein, 191 aa, Unknown
  Bacterial polypetide isolated from the Sargasso Sea
SEPRKNYERLEFLGDAVIDIIISRELMRYYPDGDEGLLTKKRSALVQQSFLTNIGNMLNIMNYLIVEPNVDLNNEKVANKQQANLVEALIGAIYLDGGIKPAKKIIIDTIWKNRNEAWKTINYKGQLIEYCHANGINNPKFHLVNASGPDHQKTFEIHVTINKEKYPTGIGTDKKTAEQSAAQNALIRLTK

SEQ ID NO: 138573 - protein, 222 aa, Unknown
  Bacterial polypetide isolated from the Sargasso Sea
MKINYQSLEKKINLKFKNKDLLIQALTHKSFNPNENNEKIEFLGDRVLGLVIAKKLLEIYPGEKEGILDKKFASLVNKKTCLDIAKKINLASYVKTFNPNNKKIKIEDKIISDSCEALIGAIYLDKGFIIVEKTILNLWKDHIEKSVITEIDGKTKLQELTLKNFKKLPTYKLISNTGPRHKPIFKVGVKLPNTKYFIATGKSKKEAEQNAAMECLKNINKK

SEQ ID NO: 138574 - protein, 230 aa, Unknown
  Bacterial polypetide isolated from the Sargasso Sea
MIRKIQNINNLEDKINYKFKDINLLEEALTHSSFKNNTKSNQERLEFLGDRVLGLVIAEYLFQNFISDREGLLTNKFRYLIQNKQCTNIAKKIDIINYIQFGSSEKNNKKTISDSILADSVEALLGAIYIDGGLNKSKKIILSLWDEHLTNEETLNAKVSVKNILQEYLHLNNFSQASYLVISKDGQDHEPNFLVEVSVLEIGKAKAHGKSIKDAEINAAQKFIEEFNIG

SEQ ID NO: 138575 - protein, 549 aa, Unknown
  Bacterial polypetide isolated from the Sargasso Sea
MEAGHGYSVAHHGHARVDAAQQAWLAPGARLPSDADLWLWVPARADRIRHAAGGGRTAAPRSGGRVTVSFEAVAPGCAGLPGRRAGALLAAAGLIALTCFAPLSAEAQSSRAPKQRTRTTAPAYVSYVTHEGDTLYEIAGRYLRDAGDWAMLSRLNHVPAPRRMPAGISLRLPADRLKQDPESARVIATSGPAERASGNSPYTPLAAGTTLGEGDRIRTGHNGFVTLELPDGSHVTMSPDGLLDIDKLRRTVLTGSGDRVLGLRRGEVASEVTHATKKDDRFQIRSPSVVAGVRGTRFKVAYDGDAQTTAVEVLDGAVGVDPAAAGGKAYAPPPGVPLQASAQLVKARFGSVTRAGSAIGAPVELLPAPALVDPAKVQDGKTVAFDLVPASPAVAYRVQIARDADQLDLIRDLRVSAPHADFGELADGTYFVRIAAIDANGLEGLPQVYGFERRQLGLAASAAPRAGSRDYEFRWFVSRSTVETRFRFVLATSADLRHPLVDRTDLSGGEIVVSDLSGGVYYWTVIAEQFENGRFYEKSSSVRSFTLAR

SEQ ID NO: 138576 - protein, 216 aa, Unknown
  Bacterial polypetide isolated from the Sargasso Sea
MSLDDLSKKIGYEFADIKLLELAITHKSADSKSNNERLEFLGDAILSTVVSEYLYTKFPYQKEGLLTRMRSHLVKGDTLTRIAYKLELTNFIKLSKGTANLSSERKQSILEGVVEAIIGAVMLDSNWETSKKFVLKLLKKELSKISIDKEFRDSKTELQELLQSKKIDPPIYETTELDDGFKSSIKYEDKIFKAKGNSKRDAEREVAKKALKFIKI

SEQ ID NO: 138577 - protein, 24 aa, Unknown
  Bacterial polypetide isolated from the Sargasso Sea
SFHYERLEFLGDAILVKCYFCIFI

SEQ ID NO: 138578 - protein, 222 aa, Unknown
  Bacterial polypetide isolated from the Sargasso Sea
MDVQINKLQKILNIKFNNTNLLIQSITHKSYNSEINYEKLEFLGDRVLGLIISNKLLELYPNDKVGILDKKFSNLVNKNICYEIGVKLKLNHFVLIGNSKKKISNVEKKIISDICESIIGAIYLDKGLRAAKDFILNMWSEYLKSSNFTKVDSKTKLQEFSLKKYKSLPIYKIISNTGPRHKPNFKVGVKIKNSKFTYSNGSSIKNAEQSAASILLKNLNLL

SEQ ID NO: 138579 - protein, 221 aa, Unknown
  Bacterial polypetide isolated from the Sargasso Sea
MKIDYSKLEKKIDYKFKNRNLLVQSLTHKSFNKMKNNEKIEFLGDRVLGLVIAKKLLEIYPEEKEGILDKKYASLVNKKTCLEIAKSINLQNYILIFNPKNRSVTIEDKVISDSCEALIGAIYLDRGFNITEKIILELWKEKIKESVITQIDAKTKLQEFSLKKFKRLPTYKIISNTGPRHRPILRVAVKLQNTKFYNGEGKSKKEAEQKAALLCLNDNLI

SEQ ID NO: 138580 - protein, 231 aa, Unknown
  Bacterial polypetide isolated from the Sargasso Sea
MISKKKIKQLEEIISYKFKDKKLLENALIHPSFITENKKKILKEVSDFERLEFLGDRVLGLAISSIIYKKFNKNNEGDLSKKLSYLVQKNFLYKISTNLEIDRFLKFSSKKNNKMNISILSDSIESLIGALYLDGGFISAKKFIKSTWEPYLDIENKNIQDPKTKLQELSQQKLKKLPEYKLVKKEGPSHSPTFTISLKVLNLKKIISSGSSIRDAEKNAASIALKLINEK

SEQ ID NO: 138581 - protein, 150 aa, Unknown
  Bacterial polypetide isolated from the Sargasso Sea
MIRSFFFKKKESLLSSNYLKFLNEVLGVYPKDENLYKEAITHASFKKNKKNINDNERLEFLGDAFISLIIGEYLFEKFPNKNEGFLSQLRAKIVSREQLNSLGKKIGLEEHLLFQKSTNKYKSLIGNAFEALFGAILLDQGVVKARERFS

SEQ ID NO: 138582 - protein, 73 aa, Unknown
  Bacterial polypetide isolated from the Sargasso Sea
MDNQFKKNCQTLCSQIEYQFQNEELLHLALTHKSFTEFKSKTGQRNNEKLEFLGDAVLDMAISELLMDRFPEL

SEQ ID NO: 138583 - protein, 221 aa, Unknown
  Bacterial polypetide isolated from the Sargasso Sea
MKKYIKKDFSYTFFENKFLIEAFTHKSISKKNYERYEFLGDAVLRLSITKKLYQMYPKASEGELSREVQRLISKDTLAGLTFTKKLLGFLEHKDLELENLSSLTKSLSADLIESLIGAIYVDSNFETIDKIIVKIYKSLLDKKDVIGKKDPKTILQEYTQSNNLPLPVYNTEKLSGPPHSPRFRVSCVVNNSSEISTLCSTVQEGQQRVADIILKKLKMDE

SEQ ID NO: 138584 - protein, 219 aa, Unknown
  Bacterial polypetide isolated from the Sargasso Sea
MKDIFSNIGYSFKDSRLVEVALTHKSFSSTNNERLEFLGDALINLYISERLFKTYDGLDEGKLTRFKASMVSRDNLNLMASKLNIGSLIKLGRGEKLEGNSILGNTFEALIGAVFLDSDYSTTQIVLDNLFDGDFISIDEVDELKDPKSQLQEIIQKNYKSLPKYSVKEISNGSITAKFEATCSVKEANLKSKGEGKTRKRSELEAAAKMLQLLKNNES

SEQ ID NO: 138585 - protein, 90 aa, Unknown
  Bacterial polypetide isolated from the Sargasso Sea
MDNQFKKNCETLCSQIEYQFQDEELLHLALTHKSFTEFKSKSGQRNNEKLEFLGDAVLDMAISELLMDRFPELDEGGLSKFRASLSTRMD

SEQ ID NO: 138586 - protein, 222 aa, Unknown
  Bacterial polypetide isolated from the Sargasso Sea
MKINYQSLEKKIDVKFKNKDLLIQALTHKSFNPNENNEKIEFLGDRVLGLVIAKKLLEIYPGEKEGILDKKFASLVNKKTCLEIAKKVNLASYVKTFNPNNKKIKIEDKIISDSCEALIGAIYLDKGFTIVEKTILNLWQDHIEKSVVTEIDAKTKLQELTLKNFKKLPTYKLISNTGPRHKPIFKVGVKLPNTKYFIATGKSKKEAEQNAAIECLKNTNKK

SEQ ID NO: 138587 - protein, 119 aa, Unknown
  Bacterial polypetide isolated from the Sargasso Sea
MVKKINFSLIYFIKNLFKSYFFSEIEKKCNYLFKNKNYLIQAFSHKSISTKPRDNYERLEFLGDAVIDIVISRELMREFPEGDEGILTQKRSALVQKSFLASMGKLLNLLDFINIESTS

SEQ ID NO: 138588 - protein, 225 aa, Unknown
  Bacterial polypetide isolated from the Sargasso Sea
MHISDLEKKLGYFFSDSSLLTLALTHKSFSSKNNERLEFIGDAVLGYVIATDLYSRYKELHEDALSLMRVALVRGDMLSEVALECGLPDHLLLGPGELKSGGRTRSSILADALEAVIGAVHEDGGIEDCRNLITNIFGSRLMNLEPENLKDPKTRLQEILQGNNEELPVYEVESVTGQDHDLSFKVKCSLPSLNIAQFGEGASRRLSEKIAAQRIIEELEALGLG

SEQ ID NO: 138589 - protein, 219 aa, Unknown
  Bacterial polypetide isolated from the Sargasso Sea
MDNISSNLGYVFTDKRLIELALTHKSFSLENNERLEFLGDAILNLYVSEKLYASYEDLNEGKLTRFKASIVSRDNLNLVALNLEIGEGIKLGKGEKLEGNSILGNTLEALIGAVFLDSNFNKTKQVLDNLFSHNFKELNKIDELKDPKSCLQELIQKKYKSLPRYSSKENTASSHKSRFEATCYVDEAKLRSNGTAKTRKGAELEAAAIMLKMMEDNDS

SEQ ID NO: 138590 - protein, 212 aa, Unknown
  Bacterial polypetide isolated from the Sargasso Sea
MSKLGYNFKDKSLLKKALTHKSLSSQNNERLEFLGDALLNLHVSEHLYSRFDSLDEGKLTQFKAKLVSRENLTKIAENLELSRFIRAGKGEKLVDNSIVGNTLEALIGAVYLDSSLSRVNQVLNNLLKENLLILEENADLKDPKSKLQEYLQKRNLQLPIYSVTLKGSKEKKVDFKVLCAVKDLNMTTTGRGQSRKKAELNSAEKILDKLKV

SEQ ID NO: 138591 - protein, 83 aa, Unknown
  Bacterial polypetide isolated from the Sargasso Sea
MYKKLYEKINYSFKNENILDQVFTHKSSGEKNNERLEFLGDAILGAVISEELYNRFTNINEGDLTRIRAALVKGSTLIKKGKE

SEQ ID NO: 138592 - protein, 246 aa, Unknown
  Bacterial polypetide isolated from the Sargasso Sea
MKISNHRVEEIINFIKGLKLDQKFQKEFTKEKIKNILYINESLTHSSANSEINYENLEFLGDAVLRLIASDFIKNKYPYMQVGERSELRSHLVSDLWLEEVGKKIEINSVLVIGNKALRDKSANATIQAEATEALIGALYESLTIVEPIKDWLIPFWEEKSKEVLADPHKKNYKSALQELTQSKGLSIPIYKTIEIDKKHDNPKRFFCNVYVKNRSIAEGSGKSIKQAEKNAASKALKYFENNVID

SEQ ID NO: 138593 - protein, 58 aa, Unknown
  Bacterial polypetide isolated from the Sargasso Sea
MHYKFKNIKLLELALIHKSSNNSLNNERLEFLGDAILNAVISSYLFKKFPNEKEGLLT

SEQ ID NO: 138594 - protein, 89 aa, Unknown
  Bacterial polypetide isolated from the Sargasso Sea
MAWLIDIISFLKSLLSPPPSHRFIELTKLISYRFNNIDYLEQAFTHRSISSEPRKNYERLEFLGDAVIDIIISRELMRYYPDGDEGLLT

SEQ ID NO: 138595 - protein, 227 aa, Unknown
  Bacterial polypetide isolated from the Sargasso Sea
MKSKLKYINTLEQKINYNFNNKDLLEEALTHSSFKNKSNSNQERLEFLGDRVLGLVIAEFLFQSFLSEREGVLTNKFRYLIQNKQCTKIAEKLDIANYLQVGNSEKNKITNSILADSIEALLGAIYLDGGYDESKKVILSLWDEYLNNDEMLNATVSSKNILQEYLHANSLTEATYLVISKDGEDHNPNFLVEVSVDKIGKADAFGKSIKEAEINAAKKFIDEFEIG

SEQ ID NO: 138596 - protein, 408 aa, Unknown
  Bacterial polypetide isolated from the Sargasso Sea
MPSSQLESRLRYEFRNAELLRQALTHRSHSATHNERLEFLGDSVLNCAVAALLFQRFGKLDEGDLSRVRANLVKQQSLYEIAQALNISDGLRLGEGELRSGGFRRPSILADAFEAIIGAVFLDGGFEAAQGVIKRLYIPILDHIDPRTLGKDAKTLLQEYLQGHKIALPTYTVVATHGAAHNQQFEVECTVPKLDVKVSGSGASRRAAEQAAAKKALDEVMAAAPMLAAKPKRSKNARGSKHVEPEIVPGVKGVQEALDLRSPERKERAAAREARAAGAAPAATAATGAEPAAAPMAAIRAAHVDAAAEKGERAAKPAADKAVDKPAERADKAAEKPVEAVPAARAADKPAGQAADPASSSADKSSAGTDSASRAAARTRDTAAPDSETPPGGASLAAAQARVADADH

SEQ ID NO: 138597 - protein, 141 aa, Unknown
  Bacterial polypetide isolated from the Sargasso Sea
MISKNKHKQLESNIQYIFNDSDILTRALTHRSHSAKNYERLEFLGDAVLDMVLSERLYKEFSQIEEGRLSRMRAHLVNQRALAQIAREIELDDFLILGKGESTSGKNRDSILSDSLEALIGGVYIDGGFESAQIVIKCLLK

SEQ ID NO: 138598 - protein, 148 aa, Unknown
  Bacterial polypetide isolated from the Sargasso Sea
MTSRKKHKRLEDKIQYIFDDSQILSRALTHRSHSPENYERLEFLGDAVLDMVLSEKLYNHFSEIEEGRLSRIRAHLVNQKALAEIARSIELDSHLILGKGEKTTGKNRDSILSDSLEAILGGVYIDGGFESVKLVIENLFDNVIGQIN

SEQ ID NO: 138599 - protein, 134 aa, Unknown
  Bacterial polypetide isolated from the Sargasso Sea
MISKNKHKQLESNIQYIFNDSDILTRALTHRSHSAKNYERLEFLGDAVLDMVLSERLYKEFSQIEEGRLSRMRAHLVNQRALAQIAREIELDTFLILGKGESTSGKNRDSILSDSLEAVIGGVNIDGGFESAQK

SEQ ID NO: 138600 - protein, 118 aa, Unknown
  Bacterial polypetide isolated from the Sargasso Sea
MKLFYKIKKYILNSILSASSIEKKINYIFKNKEYLQQAFTHKSLENSPRYNYERLEFLGDAVLDIIVSRELMREFPDGDEGLLTQRRASLVQKPYLATMGHLIELMDYLKIDNNVDLN

SEQ ID NO: 138601 - protein, 149 aa, Unknown
  Bacterial polypetide isolated from the Sargasso Sea
MIKHIQRFFNRINISSEIKKFEKNLNYTFNNTYYLEKALTHRSVQNHSKGNYERLEFLGDAIIDQTVSVWLFKKYPDADEGSLTKKRSALVNRIFLSILGKNLDVMNFVKIEQSVNTQDPKVITNISSNVYKAIVGAIYLDGGFQEASK

SEQ ID NO: 138602 - protein, 240 aa, Unknown
  Bacterial polypetide isolated from the Sargasso Sea
MTTESTFENIGELESRLGINFQNKEYLKLALTHSSFAKRDPNIELPDNERLEFLGDAVLKLVSSELFYEAFPDLLEGTLTKYRSFIVSDKTLALIAHHFDIGDFLLFSYGEQKSGGPNKDSNLADCVEAILGAYYLDSGLEKSRELFMFLLTSVFPNWKNMSYFHDFKSKLQEWMQHEVSMVPHYDITDEKGPDHDKLFFVEVKLTYKSKQYCGKGKGKSIKDAEQDAAKSVLTQLGVLE

SEQ ID NO: 138603 - protein, 225 aa, Unknown
  Bacterial polypetide isolated from the Sargasso Sea
MTKEVDRLEHALHYFFTDKSLILTALTHRSFGKSNNERLEFLGDSILGYLVAERLFQRFTAAPEGALSRMRSSLVNQTTLSSIARELDLGGCLRLGDGEKKTGGDRDSILADALEALIAAIYLDSGLENCGRVVESLFESRLQDDIEIVQQKDPKTQLQEFFQARGHRLPEYSVVKVEGEAHNQIFYVQCSVEGFAKKEACVGRSKRSAEQAAAKEMLKSIEDAN

SEQ ID NO: 138604 - protein, 136 aa, Unknown
  Bacterial polypetide isolated from the Sargasso Sea
ELLNLGPGELKSGGHRRSSILADAVEAILGAIYLDSGMDEVRGVIDRLWETRINKLDPNAHPKDSKTRLQEFLQGRKQALPTYEVLSISGKDHAQTFEVSCQVESLPEAVVASGNSRRKAEQEAARLTLEKLDDNA

SEQ ID NO: 138605 - protein, 213 aa, Unknown
  Bacterial polypetide isolated from the Sargasso Sea
KCGYRFKDRSYLDQAFSHRSISTKPRENYERLEFLGDAVIDIVVSRELMREFPEGDEGILTQKRSALVQKSFLSSMGQLLNLLDYIKIESNVDLAQEKIALKQAANLYEALVGAIYLDGGLENAKKVIINTIWAHREHAWESVNFKGKLIELCHIKQMENPKFLVSNVSGPEHKKLFEVTVKIGNDIYPSGIGSNKKTAEQQAAQLAIDSISS

SEQ ID NO: 138606 - protein, 146 aa, Unknown
  Bacterial polypetide isolated from the Sargasso Sea
MISKNKHKQLESNIQYIFNDSDILTRALTHRSHSAKNYERLEFLGDAVLDMVLSERLYKEFSQIEEGRLSRIRAHLVNQRALAQIAREIELDTFLILGKGESTSGKNRDSILSDSLEAVIGGVYIDGGFESAQKVIKNLFDKTIRQ

SEQ ID NO: 138607 - protein, 152 aa, Unknown
  Bacterial polypetide isolated from the Sargasso Sea
MPLFKQAFVHKSSSPNQNNERLEFLGDAVLEIFISEYLFNRFSDLDEGRLTQMRASLVNTQSLAEIFLRLDCRGLLSTSKGTKNLDETHKYSIYAGTLEACIGAVFIELGFEESKKFIFNLFKSNFSYLDESIDLKDAKSKLQEVLQASGRE

SEQ ID NO: 138608 - protein, 75 aa, Unknown
  Bacterial polypetide isolated from the Sargasso Sea
MQYKFQDVELLQVALTHSSWCAENDGSPSNERLEFLGDAVLGMAVTRYIFNQYPELSEGKLSQLRALVVSSSSLS

SEQ ID NO: 138609 - protein, 100 aa, Unknown
  Bacterial polypetide isolated from the Sargasso Sea
MDTNLETVRTLLLGWYASRLDEIKPGIEQKDPKTRLQEILQGSRKSLPTYTVTNVKGEAHNQEFTVQCDVEGLDGPLVGVGTSRRKAEQAAAQQALEKLS

SEQ ID NO: 138610 - protein, 234 aa, Unknown
  Bacterial polypetide isolated from the Sargasso Sea
MVFFSDKDYKQLSQKLDYKFKDRNLLELALTHKSVLDPKGSYIESNERLEFLGDRVLGLSIADMLIKRFPEENEGQIARRFSYLVSQEMLFAVAKRLDLGRFIIFSTSEKKAGGEGKKSVLADTCEAIIAAIYLDGGLVVAMEFIDDNWQSKLNDQEDPPVDPKTELQEWALQNGLPLPKYSDIRQEGADHDPKFTVGLDILNFGTITGVGSTKRIAQRQAAIGMIKRIKDTNG

SEQ ID NO: 138611 - protein, 217 aa, Unknown
  Bacterial polypetide isolated from the Sargasso Sea
MKKNTLAIKKSYLQLPLFKQAFIHKSSSPDQNNERLEFLGDAVLEIFISEYLFNRFSDLDEGRLTQMRAFLVNTQSLAEIFLRLDCRDLLITSKGTKNLDETHKYSIFAGTLEACIGAVFIELGFEESKNFIFNLFKSKFSYLDESIDLKDAKSKLQEFLQASGRELPEYSVVANKEGNKFNCTVIFNGETFQASAGLKKESEQKVSELILERVNEL

SEQ ID NO: 138612 - protein, 220 aa, Unknown
  Bacterial polypetide isolated from the Sargasso Sea
MKKNISSFEKIIGIKFKNQNLLLQSLTHKSNNPLNNNEKLEFLGDRVLGLIISKNLYKLFPNDKEGDLDKKLASLVNRKRCVEISNYLSLKDYVLVGDNKENSKIENKILADTVESIVGALYLDQGLEVTEKFILNYWKSFLNEKLTIYRDPKTMLQEYSLKLYKTLPIYNVIENKGPRHKPVIKVSVKIKNSKKYLGIGNSKKEAEQKAALKLLDTFKK

SEQ ID NO: 138613 - protein, 228 aa, Unknown
  Bacterial polypetide isolated from the Sargasso Sea
MTSRKKHKRLEDKIQYIFDDSQILSRALTHRSHSPENYERLEFLGDAVLDMVLSEKLYNHFTEIEEGRLSRIRAHLVNQKALAEIARSIELDSHLILGKGEKTMGKNRDSILSDSLEAILGGVYIDGGFESVKLVIENLFDNVIGQINSDDLFKDSKSALQEALQKNNIELPHYNLIKTKGEQHEQIFEVECIVSSLKLVTNGTGKSLKIAEQHAAEKALEIFLKNDA

SEQ ID NO: 138614 - protein, 228 aa, Unknown
  Bacterial polypetide isolated from the Sargasso Sea
MTSRKKHKRLEDKIQYIFDDSQILSRALTHRSHSPENYERLEFLGDAVLDMVLSEKLYSHFSEIEEGRLSRIRAHLVNQKALAEIARSIELDSHLILGKGEKTTGKNRDSILSDSLEAILGGVYIDGGFESVKLVIENLFDNVIGQINSDDLFKDSKSALQEALQKNNIELPRYNLIKTKGEQHDQSFEVECIVSSLKLVTNGTGKSLKIAEQQAAEKALEIFLKNDA

SEQ ID NO: 138615 - protein, 236 aa, Unknown
  Bacterial polypetide isolated from the Sargasso Sea
MFIKLKQYFLDQTESVSNLEKKINYIFHNKEYLNQAFTHKSLNTEPRKNYERLEFLGDAVLDIIVSRELMREFPAGDEGLLTQKRASLVQKPYLANIGQLLDLMDYLKIEQSVNLSIEKIAEKQQANLFEALIGAVYLDGGIDPCRKLILDTVWAYKEEAWKSTNYKGKLIEYCHSHDIQNPTFELKDISGPDHQRTFEIQVKIGSKKYDSGLGTNKKTAEQIAAKLALEELGASF

SEQ ID NO: 138616 - protein, 202 aa, Unknown
  Bacterial polypetide isolated from the Sargasso Sea
MTYLSSLQLAIDYKFEDEDLLVEAVTHPSASNEYPDRFSTNNQRLEFLGDAVLDMSIASELFSMFPDHREGDLTKWRTNLVRGKTLAMIARSIQLGSYLILGAGEEKSSGNDKDSNLSDAFEALIGAVFLDSGIEAVNKMTERLFHHEFAKLFSPDSKNPKGDLQELAASLGHRPKYALVEESGPEHALEYRVSVALCIETK

SEQ ID NO: 138617 - protein, 228 aa, Unknown
  Bacterial polypetide isolated from the Sargasso Sea
MISKNKHKQLESNIQYIFNDSDILTRALTHRSHSAKNYERLEFLGDAVLDMVLSERLYKEFSQIEEGRLSRMRAHLVNQRALAQIAREIELDDFLILGKGESTSGKNRDSILSDSLEALIGGVYIDGGFESAQTVIKSLFEKMIRQINPEDLFKDSKSALQEVLQKNNMKLPEYKLIKTEGDQHDQIFEVECIITAMNLITNGTGKNLKTAEQQAAEKALNVVLNDHD

SEQ ID NO: 138618 - protein, 217 aa, Unknown
  Bacterial polypetide isolated from the Sargasso Sea
MKKNTLAIKKSYLQLPLFKQAFVHKSSSPDQNNERLEFLGDAVLEIFISEYLFNRFSDMDEGRLTQMRASLVNTKSLAEIFLRLDCRDLLSISKGTKNLDETHKYSIYAGTLEACIGAVFIELGFEESKNFIFNLFKSNFSNLDEFIDFKDAKSKLQEVLQSSGRELPEYSVVANKEGNQFNCTVIFNGETFQASAGLKKESEQKVSELILDRVNEL

SEQ ID NO: 138619 - protein, 238 aa, Unknown
  Bacterial polypetide isolated from the Sargasso Sea
MKLFIKLKQYFIDKTESISNLEKKINYIFHNKEYLDQAFTHKSLNTVPRKNYERLEFLGDAVLDIIVSRELMREFPEGDEGLLTQKRASLVQKPYLANIGQLLDLMDYLKIEQSVNLNIEKIAEKQQANLFEALIGAIYLDGGINPCRSLILDTVWAYRKEAWKSTNYKGKLIEYCHSHDINSPTFVLKDISGPDHQRTFEIQVKIGSINYSSGLGTNKKTAEQIAAKHALEELGASF

SEQ ID NO: 138620 - protein, 228 aa, Unknown
  Bacterial polypetide isolated from the Sargasso Sea
MTSRNKHKRLEDKIQYIFDDSQILSRALTHRSHSPENYERLEFLGDAVLDMVLSEKLYNHFTEIEEGRLSRIRAHLVNQKALAEIARSIELDSHLILGKGEKTMGKNRDSILSDSLEAILGGVYIDGGFESVKLVIENLFDSVIGQINSDDLFKDSKSALQEALQKNNIELPRYNLKKIKGEQHEQTFEVECIVSSLKLATNGTGKSLKIAEQQAAEKALEIFLKNEA

SEQ ID NO: 138621 - protein, 228 aa, Unknown
  Bacterial polypetide isolated from the Sargasso Sea
MISKNKHKQLESNIQYIFNDSDILTRALTHRSHSAKNYERLEFLGDAVLDMVLSERLYKEFSQIEEGRLSRIRAHLVNQRALAQIAREIELDTFLILGKGESTSGKNRDSILSDSLEAVIGGVYIDGGFESAQKVIKNLFDKMIRQINPEDLFKDSKSALQEVLQKNNMKLPEYKLIKTEGDQHDQIFEVECIITAMNLITNGTGKNLKTAEQQAAEKALNVVLNDHD

SEQ ID NO: 138622 - protein, 222 aa, Unknown
  Bacterial polypetide isolated from the Sargasso Sea
MNKINKLNEILSEKTLNSDLFINSLTHRSASSNNNERLEFLGDAVLGLVIANHLYSSFKNDQEGILSRKRSHLVKKDTLFRIAKKLSLSDLINIGEGEKKSGGKNSSSILSDALEAIIGVVFLIDGYDAAKEFILKVYQEELENIPDDEELKDSKTKLQEFLQGKGFNLPKYETKEVLIEKDLHFETTCHVKELKIEEKGVGKNKRLSQQTAASKVLNNINK

SEQ ID NO: 138623 - protein, 143 aa, Unknown
  Bacterial polypetide isolated from the Sargasso Sea
MKTVNIYTDGACRGNPGDGGWGALVEYQDFSKEYFGGQKNTTNNQMELKAAIEGLKALKETCNVNLTTDSKYVMDGITSWIDNWKKNNWKSSSKKDVKNKDLWIELDKYRSMHNVKWIWVKGHSGHEKNEIADMLANKGIDSI

SEQ ID NO: 138624 - protein, 83 aa, Unknown
  Bacterial polypetide isolated from the Sargasso Sea
PELENYNLKSFIKGDKKVPSISAASIIAKVSRDKFITALSKKNKGYDWDKNFGYGTRQHLKALKKLGITKHHRKTFSPISKIN

SEQ ID NO: 138625 - protein, 144 aa, Unknown
  Bacterial polypetide isolated from the Sargasso Sea
KSRIKIAEYIKENSWYAIGSASVYEIDKYNIFNATLLSMERAAKKLKKKPNIFLIDGTHAPKKLNNSKTIIKGDQKIKCISAASIVAKVYRDLYMIRLGKKFPQYKWDKNFGYGTWQHLGALRKFGVTNYHRKSYRPVHNILSK

SEQ ID NO: 138626 - protein, 85 aa, Unknown
  Bacterial polypetide isolated from the Sargasso Sea
MIQVYTDGACSGNPGVGGWGVVILLNKNEPILLNGGELQTTNNRMELTAAIKALNYFNELKSIQIFTDSKYVKDGIEKWIINWKK

SEQ ID NO: 138627 - protein, 141 aa, Unknown
  Bacterial polypetide isolated from the Sargasso Sea
MIEIYTDGSCLQNPGNGGWAAIINYEGNIKKISGSEKNTTNNRMELLAPINALKQIEHNKEIQIYTDSQYVKLGITEWINTWVKNNWQTSKKEDVKNKDLWIELYDLNNSFNIKWNWIKAHSGNALNEEVDLLAKKAALLD

SEQ ID NO: 138628 - protein, 52 aa, Unknown
  Bacterial polypetide isolated from the Sargasso Sea
MLKAFNDDLFVCGVDEAGRGCLAGPVTAAAVILPKNYKNKLIQDSKKLNKQN

SEQ ID NO: 138629 - protein, 185 aa, Unknown
  Bacterial polypetide isolated from the Sargasso Sea
MKIAGVDEAGRGPIAGPVYAAAVILNPEKAIPDLADSKKLNKNKIALLAEEIKKHSLSWSVSSASVEEIEKFNILNASLLAMKRAVISLDIKPSELIIDGNFTLDMDIEMRAIIKADDKFKEVMAASILAKYHRDNYMINLDKKFPEYSFKNHKGYPTKQHLEAIELKGICVHHRKTFKPILKYL

SEQ ID NO: 138630 - protein, 105 aa, Unknown
  Bacterial polypetide isolated from the Sargasso Sea
ERAAKKLKKKPHLFLVDGTHAPKKLKNSKTVIQGDKKIKCISAASIIAKVYRDLYMIKLGNKFPKYKWHKNFGYGTSQHMNALKKFGVTNYHRRSYKPVHNILSK

SEQ ID NO: 138631 - protein, 117 aa, Unknown
  Bacterial polypetide isolated from the Sargasso Sea
MDNNSNQSFISGSENNTTNNRMELIAPIMALKKIKKKSEITIYTDSKYVKDGITEWIKKWKLNNWKSSNKKPVKNKDLWVKLDNSCQKHKVIWKWVKAHAGNKYNNMVDKLAVSQTK

SEQ ID NO: 138632 - protein, 199 aa, Unknown
  Bacterial polypetide isolated from the Sargasso Sea
MTAQESLPLGRDVAGVDEVGRGCLFGPVFAAAVVLERAAAQELLKAGLTDSKKLSAKRRAALVPVIQSMCVASGLGQASAREIDTCGIRVATERAMLRALQRLPQRPGLVLVDGNLPLRLWQGPQRTVIAGDSRSVAIAAASVLAKEARDALIRRLSARFPGYGLERHAGYGTAQHRQSLMASGPTPLHRHTFLRRLLG

SEQ ID NO: 138633 - protein, 88 aa, Unknown
  Bacterial polypetide isolated from the Sargasso Sea
KLPKIDNYKLKNIIKGDEKIPEISAASIIAKVSRDRLVSRLSKKFKNYYWEKNSGYGTKNHIRAIRKFGVTKHHRKTFQPIYNILSLK

SEQ ID NO: 138634 - protein, 76 aa, Unknown
  Bacterial polypetide isolated from the Sargasso Sea
MPTSTLASASITAVSSATTSIAAASISTASISATTIPAVAISTTAFSATTITAPAVSASTVAAPSISTTATPPTTL

SEQ ID NO: 138635 - protein, 141 aa, Unknown
  Bacterial polypetide isolated from the Sargasso Sea
MIKIYTDGSCLENPGNGGWAAIIIINKEKKIISGNQKNTTNNRMELLAPIEALKTLEINSEIEIITDSKYVKLGITEWINNWKKNGWKTANKKEVKNIELWKELDSLVENFNIKWSWVKGHSSDQLNNEVDLIAKKAANLN

SEQ ID NO: 138636 - protein, 160 aa, Unknown
  Bacterial polypetide isolated from the Sargasso Sea
ASCVILPEQINEIFKDSKSTSESLRSKQFQFLRRNAYASIGLCTPQEIDEMNILNATHLAMKRAINNIQIKPEKLLIDGKYVPSGLLNAEAFIGGDKVHQQISAASIYAKYFRDNLMGQYAQIFPKYYFEKNKGYPTQMHKEAIIEFGLSKIHRKSFKMK

SEQ ID NO: 138637 - protein, 130 aa, Unknown
  Bacterial polypetide isolated from the Sargasso Sea
MRELTTAGVDEVGRGCLAGPVVSAAVILKKGINLSLLKDSKKITFKKREEISKHIKSNSYFAIGIASVEEILNLNILQASLLSMKRALEKLAVKPGLTLIDGNFAPKGLKNYKTIINGDEKIKVISAASI

SEQ ID NO: 138638 - protein, 188 aa, Unknown
  Bacterial polypetide isolated from the Sargasso Sea
MKNNKIIVGVDEVGRGCLAGPVVSAAVILKNGISLKNIKDSKKINFKNRLKLANYIKENSYYSIGLASVDEIFKFNILKASLLSMKRAIEKLSKKPDLILIDGTFAPEGIKNSKTIINGDEKIKCISAASIVAKAYRDLLMIKLSEKFSNYAWDSNFGYGTKAHLDGLKKFGITAHHRKGFKPVHKIL

SEQ ID NO: 138639 - protein, 91 aa, Unknown
  Bacterial polypetide isolated from the Sargasso Sea
MIKIYTDGSCMSNPGNGGWAAIININGEIKKISGNEKNTTNNRMELMAPINALKNINSKDSIEIFTDSQYVKNGITEWINTWILNNWKTSK

SEQ ID NO: 138640 - protein, 36 aa, Unknown
  Bacterial polypetide isolated from the Sargasso Sea
QTNSGYGTKEHLSALKNYGITPIHRKSFKPVHNILN

SEQ ID NO: 138641 - protein, 110 aa, Unknown
  Bacterial polypetide isolated from the Sargasso Sea
MPLPDFDVETGLIKKGYKAIAGVDEVGRGCIAGPVTAAAVILNPQKIPSGLNDSKKVSFKSREKIFQSIQDTCTFCVAHSSVEEIDQINILQASLLSMKRAIFGLNIKPD

SEQ ID NO: 138642 - protein, 46 aa, Unknown
  Bacterial polypetide isolated from the Sargasso Sea
SIKFQDFGWEKNAGYGTKMHIQNIYRLGPTIHHRKTFEPIKSLIHS

SEQ ID NO: 138643 - protein, 107 aa, Unknown
  Bacterial polypetide isolated from the Sargasso Sea
MKLKIYTDGACSGNPGKGGWAAIILDDSDQSSISGSESNTTNNRMELMAPIMALKKIKKKSEITIFTDSKYVKDGITDWIKKWKVNNWKSSNEKPVKNKDLWIKLDN

SEQ ID NO: 138644 - protein, 139 aa, Unknown
  Bacterial polypetide isolated from the Sargasso Sea
FIFTSSINPSIAAASIKSIELSKESETLRLRIRRNSKFIREGLKSIQVPFIDNDSHIVPILVKGPLECKQISKLLLDKFGIYIQPVFYPTVPKGDERLRVTITPKHSKKDIESFVNSIDEAWNILGFDRVEEQIIHNQI

SEQ ID NO: 138645 - protein, 141 aa, Unknown
  Bacterial polypetide isolated from the Sargasso Sea
MKLKVYTDGACSGNPGKGGWAAIILDGNSNYSSISGKEINTTNNRMELMAPIMALKKIKKKSEIIIFTDSKYVKDGITVWIKKWKLNNWKSSNKRPVKNKDLWIKLDNSCLKHKITWKWVKAHAGNKYNNLVDQLAVSETK

SEQ ID NO: 138646 - protein, 141 aa, Unknown
  Bacterial polypetide isolated from the Sargasso Sea
MITIYTDGSCLTNPGNGGWAAIISQDGKIKKITGCEKNTTNNRMELLAPINALKQIDTKSKIEIFTDSQYVKLGITEWINKWVNNNWQTAKKEDVKNKDLWVELYNLNQSLNVKWNWVKAHAGDPMNEEVDILAKEAANLN

SEQ ID NO: 138647 - protein, 91 aa, Unknown
  Bacterial polypetide isolated from the Sargasso Sea
MIKIYTDGACSGNPGIGGWGVVILESNKNHIFLNGGDKNTTNNRMELRAAIEALKYFKEKKDITLVTDSKYVKDGIQSWIKNWKKNGWKTA

SEQ ID NO: 138648 - protein, 84 aa, Unknown
  Bacterial polypetide isolated from the Sargasso Sea
PSLKLIRIFTDSVYVKEGITVWINNWEKNNWKTTDKKNVKNVDLWKRLKELVKSNQVEWNWVKGHSEDPMNDLADKLAKKATPI

SEQ ID NO: 138649 - protein, 54 aa, Unknown
  Bacterial polypetide isolated from the Sargasso Sea
WKTASKKPVKNKDLWKKLKDLSSKHSIKWIWVKGHAHNKYNNIVDELAQGAIRR

SEQ ID NO: 138650 - protein, 122 aa, Unknown
  Bacterial polypetide isolated from the Sargasso Sea
AIIIINEKIINEISGSEKNTTNNKMELLAPIKAIEKFKKKSKISIFTDSTYVKDGITTWIKKWEKNGWKTASKKPVKNKELWKKLKSLSIKHSIEWIWVKGHAQNKYNNLVDELAQDAIKNK

SEQ ID NO: 138651 - protein, 143 aa, Unknown
  Bacterial polypetide isolated from the Sargasso Sea
MKEIEVFTDGACRGNPGVGGWGVLFIIDGEETTLYGGEENTTNNRMELKAAIKALEHFDDKVSVSITTDSNYVKDGITKWLDNWKTKNWVTASKKPVKNKDLWEQLDILNSFHKVSWRWVKAHAGHRENEIADMLANKGIDEL

SEQ ID NO: 138652 - protein, 141 aa, Unknown
  Bacterial polypetide isolated from the Sargasso Sea
MITIYTDGSCLTNPGSGGWAAIINDGKEIKKISGNEKNTTNNRMELLAPINALKDMKPGVEITIYTDSQYVKNGITEWINTWLANNWKTSKKEDVKNKDLWINLYNLNKSLNIQWNWVKAHDGNPLNEEVDLLAKKAANLD

SEQ ID NO: 138653 - protein, 61 aa, Unknown
  Bacterial polypetide isolated from the Sargasso Sea
MKLKIYTDGACSGNPGKGGWAAIILDDTNKSSISGSESSTTNNRMELMASIMALKKIKKKS

SEQ ID NO: 138654 - protein, 125 aa, Unknown
  Bacterial polypetide isolated from the Sargasso Sea
ILVDNEKKELFGGEKLTTNNRMELTAAIEALEYCDKEEGKQLSLNQIRIYTDSNYLKEGITSWINTWEKNNWKTADKKNVKNVDLWKKLKELVKSKQIEWFWVKSHSENPMNNLADTLAKKATPI

SEQ ID NO: 138655 - protein, 205 aa, Unknown
  Bacterial polypetide isolated from the Sargasso Sea
MQEKKEEDLQQVLNKVSEVGIDEVGRGSIFGPVFAAAVVLTEKNKLILKQFGVTDSKKLTSKKRKLLLPKILLLSSDYGIGQSSAREIDKLGIRVATELSMIRAIKKLKEKPSELIIDGPLLLRPWNGIQKNIVSGDSKFISIASASIVAKVSRDNLMERLEKKYSGYLIFKNKGYGTREHLSLIQKNGITKLHRKSFLKKSNLI

SEQ ID NO: 138656 - protein, 81 aa, Unknown
  Bacterial polypetide isolated from the Sargasso Sea
MDFNFDLQFDKYVIGVDEVGRGSWAGPVMAAAALLNYKMPIDKRFNDSKKLTHKIRKEILDNLTENSLFGIGEVSNDKIDE

SEQ ID NO: 138657 - protein, 284 aa, Unknown
  Bacterial polypetide isolated from the Sargasso Sea
MVANAYPCVDSFFVLSGFIVTYVLLTKIKRHGMFTSMQWVIFYLHRYVRLTAPYLVMILVDGFLYRQIVYGPLSLDMNRASSHKMCKEYWYTYLLYINNLVPWIPKENTSCFGGSWYIANAMQFFIITPIFVVILYKKPLAGVVIILGVVTSSSIAAASITAYLNLGPTMLLGNAGNYLLLYRVPWIRVVAFLVGVLAGWFYWVFGDMMAENIRTLKTWKKFLLAAPVWFCTALTQYFVVFGLYHEVVNATHIGDDLSGRVASEAVSVSYQLLSRVGWSLALTT

SEQ ID NO: 138658 - protein, 135 aa, Unknown
  Bacterial polypetide isolated from the Sargasso Sea
MITIYTDGSCLTNPGNGGWAAIIKDGKETRKISGNEKNTTNNRMELLAPINALKDLKPGIEIKIYTDSQYVKNGITEWINTWLGNNWKTSKKEDVKNKDLWIDLYNLNKSLNIQWNWVKAHDGNPLNEEVDLLAK

SEQ ID NO: 138659 - protein, 143 aa, Unknown
  Bacterial polypetide isolated from the Sargasso Sea
MKTVNIYTDGACRGNPGDGGWGVLIEYEDIKKELFGGEKNTTNNKMELKAAIEGLRSLKESCDVHITTDSKYVMDGITSWIKNWKKNNWKNSSKKDVKNKDLWIELDQLTSKHNVKWTWVKGHSGHDKNEIADSLANKGIDNL

SEQ ID NO: 138660 - protein, 113 aa, Unknown
  Bacterial polypetide isolated from the Sargasso Sea
SIQSNVSGGENSTTNNRMELMAPIMALNKIKKSSEIIIYTDSKYVKDGITEWIKKWKLNNWKSANKKPVKNKDLWIKLDNSCQKHKVTWKWVKAHAGNKFNNLVDELAVLETK

SEQ ID NO: 138661 - protein, 180 aa, Unknown
  Bacterial polypetide isolated from the Sargasso Sea
MIGVDEAGRGSWAGPLVSTACWFDFIKYKSLHSEINDSKKLKSSKRREIIISLDNFVKYSSSIASVIEIDKYGLTYANAIAMKRSIFSLTQELKKHSHIYRNKNFCIYVDGKFKPDFENLDNFLQLNKLHLDNYSIESLVKGDSICKTIALASIISKETRDTVMRQWSKKYPSYLFDSNL

SEQ ID NO: 138662 - protein, 120 aa, Unknown
  Bacterial polypetide isolated from the Sargasso Sea
MITIYTDGSCLTNPGNGGWAAIIKDEKEIRKISGNEKNTTNNRMELLAPINALKDMKPGVEIKIYTDSQYVKNGITEWINTWLSNNWKTSKKEDVKNKDLWIELYNLNKSNNVQWNWVKA

SEQ ID NO: 138663 - protein, 127 aa, Unknown
  Bacterial polypetide isolated from the Sargasso Sea
GPGGWAALILIDDKIKEEISGSEKNTTNNKMELLAPIKAIQKFKKKSEISIYTDSTYVKDGITTWIKKWEKNGWKTASKKPVKNRELWKKLNNLSSKHSIQWIWVKGHAQNKYNNIVDELAQGAIKR

SEQ ID NO: 138664 - protein, 49 aa, Unknown
  Bacterial polypetide isolated from the Sargasso Sea
MTSADLFEGTAGHLVAGVDEVGRGPLAGDVVAAAVILAESHPDGVTDSK

SEQ ID NO: 138665 - protein, 66 aa, Unknown
  Bacterial polypetide isolated from the Sargasso Sea
MIKTAVPENIPAGPGVAGVDEVGRGSLFGPVFAAAVVLDHSSAGRLLKASLNDSKKLSAKRREQLL

SEQ ID NO: 138666 - protein, 151 aa, Unknown
  Bacterial polypetide isolated from the Sargasso Sea
MLDIEAYTDGACSGNPGIGGWGVVLLAKKNGVVINRREIAGGVLNSTNNQMELRAAIEALKALKRRTEITLITDSVYVKKGISEWLSKWKKNNWKTSSRKPVKNRDLWQELDTLASANIVTWKWVKGHAGTPENERADTLATNEVKKIKKN

SEQ ID NO: 138667 - protein, 59 aa, Unknown
  Bacterial polypetide isolated from the Sargasso Sea
KKIIWKNASKKDVKNKDLWIELDKYVSKHNVKWHWVKGHAGHEKNEIADTLANKGIDNL

SEQ ID NO: 138668 - protein, 136 aa, Unknown
  Bacterial polypetide isolated from the Sargasso Sea
TDGSCLTNPGNGGWAAIINQDGKIKKITGSEKNTTNNRMELLAPINALKQIDNKTKIKIFTDSQYVKLGITEWINKWVNNNWQTAKKENVKNKDLWVELYNLNQSLDISWNWVKAHAGNPLNEEVDLLAKKAANLK

SEQ ID NO: 138669 - protein, 141 aa, Unknown
  Bacterial polypetide isolated from the Sargasso Sea
MIIIYTDGSCLTNPGNGGWAAIINDGKEIKKISGNEKNTTNNRMELLAPINALKDMKPGVEIKIYTDSQYVKNGITEWINTWIANSWKTSKKEDVKNKDLWIDLYNLNKSLNIQWNWVKAHDGNPLNEEVDLLAKKAANLD

SEQ ID NO: 138670 - protein, 268 aa, Unknown
  Bacterial polypetide isolated from the Sargasso Sea
IALGPAYIKFGQLLSTRPDIVGADLANELKVLQDSLDPFPTAEAKKIVNEELGSPVESIFSSFSDSIAAASIAQVHKATVKETKELVAVKILRPDVEKVFLKDLAALLFLAKFIEFIIPSFRRLKPIEVINHFERLVREELDLRMEISAAAEFAENTKSDRNFYVPKVIWSLSGRRVVTTEWVDGMSVGDIENIKKSGVDIERFAKRIIKTFLTQALRDGFFHGDMHQGNLKCRSDGTLIVMDFGIMGRIDEYTRKTYAEILIGFLRR

SEQ ID NO: 138671 - protein, 76 aa, Unknown
  Bacterial polypetide isolated from the Sargasso Sea
MIIIYTDGSCLTNPGNGGWAAIINDGKEIKKISGNEKNTTNNRMELLAPINALKDMKPGVEIKIYTDSQYVKNGIT

SEQ ID NO: 138672 - protein, 165 aa, Unknown
  Bacterial polypetide isolated from the Sargasso Sea
MIGLDEAGRGSWAGPIVATACWIRFQNHKLLHSDINDSKKLTSKKRKEIILSLDNSVKYSTSISNEKEIDFYGLTLANTMAMNRSTFCLIKKLSKIIDLENYEIHLYVDGKYKPNFSDFDISLKNKLKLKGISVIPLVRGDSKSKTISLASIIAKETRDSIMKNY

SEQ ID NO: 138673 - protein, 97 aa, Unknown
  Bacterial polypetide isolated from the Sargasso Sea
MIKIYTDGACSGNPGIGGWGCVIIKNDEKPIFLNGGENYTTNNRMELIAAIKGLNYFREENNITIVTDSKYLKDGIESWIENWKKNGWKTASKKPVK

SEQ ID NO: 138674 - protein, 105 aa, Unknown
  Bacterial polypetide isolated from the Sargasso Sea
EKNTTNNKMELLAPIRAIQKFKKKSEIMIYTDSTYVKDGITTWIKKWEKNGWKTASKKPVKNIELWKKLKNLTLKHSIKWTWVKGHAQNKYNNLVDEIAQEAIKR

SEQ ID NO: 138675 - protein, 142 aa, Unknown
  Bacterial polypetide isolated from the Sargasso Sea
MINIYTDGACSGNPGIGGWGVVILDNDKEILLNGGDQHTTNNKMELTAAIKALEYFEIKKELIIYTDSKYVKDGIELWITNWKKNGWKTSTKKIVKNKELWVQLDNLINKHYVTWKWVKGHAGFEFNEKADELARKYIESNI

SEQ ID NO: 138676 - protein, 113 aa, Unknown
  Bacterial polypetide isolated from the Sargasso Sea
EIDSINIHHATLLSMKRAVYNLNIEPDLVLVDGLYQPEVGIDCESIVQGDSKVEQISAASIIAKVARDYEMNFLHDKFEMYNFKKNNGYGTRQHLEAIQSLGKTIYHRESFVK

SEQ ID NO: 138677 - protein, 126 aa, Unknown
  Bacterial polypetide isolated from the Sargasso Sea
MSRAERPLSPHLQVYRPQITSVLSVLHRGTGIILSMGVLVLLYWLISIASGEEAYTNAYVLLASLPLKIFYFGLCFCFFYHFANGIRHLIWDIGIGLDRDAYRKSGWCVVVFSIAAASIYSIIFII

SEQ ID NO: 138678 - protein, 94 aa, Unknown
  Bacterial polypetide isolated from the Sargasso Sea
MKLKIYTDGACSGNPGKGGWAAIILDNNSNQSSISGSEKNTTNNRMELLAPIMALKKIKRKSEITIFTDSKYVKDGITDWIKKWKVNNWKNSNK

SEQ ID NO: 138679 - protein, 141 aa, Unknown
  Bacterial polypetide isolated from the Sargasso Sea
MIKIYTDGSCLENPGNGGWAAIINDNGNIKKISGGEKNTTNNRMELMATINALKNIDTNNGIEIYTDSQYVKLGITEWINTWVKNNWQTSKKENVKNKDLWLELYNLNKSLNIKWIWIKAHAGNPLNEEVDSLAKKAAILD

SEQ ID NO: 138680 - protein, 163 aa, Unknown
  Bacterial polypetide isolated from the Sargasso Sea
ILKKNIKKKILKDSKEISFKDRIKIAKYIKKNSWYAIGAASVDEIDKYNIFNATLLSMERAVKKLKKKPHIFLVDGTHAPKNLKNSKTVIKGDQKIKCISAASIIAKVYRDLYMIKLGNRFPRYKWHKNFGYGTLQHLNALKKFGVTIYHRKSYKPVYNILSK

SEQ ID NO: 138681 - protein, 88 aa, Unknown
  Bacterial polypetide isolated from the Sargasso Sea
LKEPCKVKLYTDSKYVMDGINSWIANWKKNNWKTASKKDVKNKDLWIELDAETCKHEIEWIWVKGHSGNIGNEKADALANMGIDNLDV

SEQ ID NO: 138682 - protein, 117 aa, Unknown
  Bacterial polypetide isolated from the Sargasso Sea
MQEKKEEDLQQALNKLTEVGVDEVGRGAIFGPVFAAAIVLTEKNKFTLKQFGVTDSKKLTPKKRELLLPKILLLSSDYGIGQSSAREIDKLGIRVATELSMIRALKKLKEKPSELII

SEQ ID NO: 138683 - protein, 131 aa, Unknown
  Bacterial polypetide isolated from the Sargasso Sea
MQEKKEEDLLQALNKVSEVGIDEVGRGAIFGPVFSAVVVLTEKNKFTLKQLGVTDSKKLTPKKRKLLLPKILLLSLDYGIGQSSAREIDKLGIRVATELSMIRALNKLKEKPSELIIDGPLLLRPWNGTQK

SEQ ID NO: 138684 - protein, 175 aa, Unknown
  Bacterial polypetide isolated from the Sargasso Sea
MEDIKSLIAGVDEVGKGCLFGPVFAAAVVLSKENEIELLNQGLKDSKKLSHRQRHNLVPLIKTNSIAWTIGQASAREIDVIGIRDATEKAMLRALEKFSSPPDLILVDGILPIRLWPGKQKTQVQGESHFASIAAASVLAKETRDELIKRLALKYNCYGLEKNKGYGTEIHRTNL

SEQ ID NO: 138685 - protein, 134 aa, Unknown
  Bacterial polypetide isolated from the Sargasso Sea
MITIYTDGSCITNPGNGGWAAIINDGKEIKKISGNEKNTTNNRMELLAPINALKDMKPGVLIKIYTDSQYVKNGITEWINTWLGNNWKTSKKEDVKNKDLWIDLYNLNKSLNIQWNWVKAHDGNPLNEEVDLLA

SEQ ID NO: 138686 - protein, 141 aa, Unknown
  Bacterial polypetide isolated from the Sargasso Sea
MIKIYTDGSCLQNPGNGGWAAIINYEGNIKKISGSEKNTTNNRMELLAPINALKKVEHNKEIQIYTDSQYVKLGITEWINTWIKNNWQTSKKEDVKNKDLWIELYDLNNSLNIKWNWIKAHSGNALNEEVDLLAKKAALLD

SEQ ID NO: 138687 - protein, 138 aa, Unknown
  Bacterial polypetide isolated from the Sargasso Sea
ERLSIAAASIAVIETVLEYTIQYCHERKAFGQKIGSFQNSKFKLAEMKTEAEIGRTFYDQCVFELNDKKLTPEKAAMAKWWLTDVEHRVVDQCLQLHGGYGYILEYPVAKAYLDSRVQTIYGGTNEIMKEIIGRSLGF

SEQ ID NO: 138688 - protein, 92 aa, Unknown
  Bacterial polypetide isolated from the Sargasso Sea
MITIYTDGSCLINPGNGGWAAIINDEKEIRKISGSEKNTTNNRMELLAPINALKNMKPGTEIKIYTDSQYVKNGITEWINTWLANNGKPQKK

SEQ ID NO: 138689 - protein, 152 aa, Unknown
  Bacterial polypetide isolated from the Sargasso Sea
KDSKKIKFNMREEISEHIKDYSYYSIGIASVNEILNLNILQASLLSMKRAIERLTVKPGLTLIDGNFAPKGLKNYKTIINGDEKIKVIGAASIIAKVYRDRLMINLSKKFSNYAWEKNFGYGTKAHLEGLKKFGITSHHRKSFKPVHKILSR

SEQ ID NO: 138690 - protein, 190 aa, Unknown
  Bacterial polypetide isolated from the Sargasso Sea
MKNNFIIAGVDEVGRGCLAGPVVSAAVIFKKNISLKKIKDSKKINFSDRLEIADYIKKNSYYSVGVASVNEIFKYNILKASLISMRRAIKKLSLKPSLILIDGPFAPEGIKNYKTIIRGDSKVKCISAASIIAKTYRDLLMIKLSEKFSNYAWERNFGYGTRDHLKGLRKFGITSHHRKGFKPIYKMLSK

SEQ ID NO: 138691 - protein, 189 aa, Unknown
  Bacterial polypetide isolated from the Sargasso Sea
MANKILAGVDEVGRGCLAGPVISCALILRKNINKKLLKDSKTIPFRDRIKIADHIKKNSWYAIGSASVNEIDKYNIFNATLLSMERAVKKLKKKPHLFLIDGTHAPKKLKNSKTIIKGDQKIKCISAASIVAKAYRDLYMIKLGNKFPQYNWHKNFGYGTWQHLSALKKFGVTNFHRKSYRPVHNMLSK

SEQ ID NO: 138692 - protein, 147 aa, Unknown
  Bacterial polypetide isolated from the Sargasso Sea
ENLYDVIQSECLGSSIQSIDNHVIDEKNILVATLESMKEAIDAIEIAVDEIVIDGPHKPVMHNDRDLITSGVIGGDKLFHCISAASIIAKVYRDRFMIKLHQKFPEYNFQKNKGYPTKDHIEVIKTLGPSPYHRLTFKPELYDERLL

SEQ ID NO: 138693 - protein, 59 aa, Unknown
  Bacterial polypetide isolated from the Sargasso Sea
MRIAKVTRDRMITILGKKFKGYYWHKNYGYGTKQHLQAIKTLGITSHHRKTFSPINKIK

SEQ ID NO: 138694 - protein, 123 aa, Unknown
  Bacterial polypetide isolated from the Sargasso Sea
MSVAYDYAAGLLRRLFDRHIDGGAVLDPAAFPDAGRFVRAWTDIQAEAFAVARDMPRIPRFHEIMRIAKVTRDRMITILGKKFKGYYWHKNYGYGTKQHLQAIKTLGITSHHRKTFSPINKIK

SEQ ID NO: 138695 - protein, 169 aa, Unknown
  Bacterial polypetide isolated from the Sargasso Sea
MKTEPETGKHSRGKKRISTNDYTLFQFLKRVRKRARRWILIEAISLIGLSIAVWFWGTLLLDWLIEPPPAVRLLATGLLCLWIGTIILKRLIIRLRAPLRDEQLALLVERTHPELQDSLSTAVELGLGEKHSASSTIDPSLLDRTTSIAAASIKRITMGRLFRRAHLLR

SEQ ID NO: 138696 - protein, 90 aa, Unknown
  Bacterial polypetide isolated from the Sargasso Sea
KAMQKFKKKSEISIYTDSTYLKEGITTWIKKWEKNGWKTATKKPVKNIELWKKLRDLSSRHSIKWIWVKGHAQNEYNNIVDELAKGAIKR

SEQ ID NO: 138697 - protein, 147 aa, Unknown
  Bacterial polypetide isolated from the Sargasso Sea
MLSKYIKKNSIYAIGKANVEEINKMNILNATLLSMKRALNKLKQKPSIAYIDGTFAPKNLKIKCRTFVKGDERFLCISAASIIAKVARDLFMIKLSKKFPEYEWNKNFGYGTYDHLNSIKKYGITKYHRKKFRPIHNILFSNKRETQ

SEQ ID NO: 138698 - protein, 144 aa, Unknown
  Bacterial polypetide isolated from the Sargasso Sea
MSIEIYTDGACSGNPGLGGWGAIILINKNEPIYINGGSLKTTNNQMELIAAIEALKYLSKSAYLNLFTDSKYVKDGIESWIQNWKKNGWKTSAKKEVKNKDLWIELDKQILRHKIQWFWVKGHAGNKYNEKADLLARKFIIDNQ

SEQ ID NO: 138699 - protein, 141 aa, Unknown
  Bacterial polypetide isolated from the Sargasso Sea
KFIKKNSTWAIGSASVKEIEKLNILSASLLAMKRAIKKLKVKPNLVLIDGNKSPELSNYLIKTIIKGDQKIKEISAASIIAKVSRDKLMLKISESFKKYKWDLNAGYGTRDHIDAIRKYGVTRFHRKTFNPIHNILSHRKK

SEQ ID NO: 138700 - protein, 112 aa, Unknown
  Bacterial polypetide isolated from the Sargasso Sea
MKRAVEGLKTKPSNAVIDGWRWESMNEYLNLPVTSEVKGDAKFYSIAAASIIAKEFHDEYIREICNEDPSLNTNYDLLKNMGYGTKKHLKGIEDNGISVHHRKTFKPCSNYV

SEQ ID NO: 138701 - protein, 96 aa, Unknown
  Bacterial polypetide isolated from the Sargasso Sea
MVVTMYTDGACSGNPGKGGYGTLLLAGSHRKEISEGYRLTTNNRMELLAVIIGLEAIKTDGTEIHVYTDSKYVCDAVEKGWLRNWQVKGFKGKKNV

SEQ ID NO: 138702 - protein, 100 aa, Unknown
  Bacterial polypetide isolated from the Sargasso Sea
NKLKTNIDIILIDSINLDIKEKNIGFNKADSISVSVAAASILAKVARDQMMTKIYNNLYPGYFFKSNKGYGSKAHIESLNSIGVSKIHRKSFKPISNLLI

SEQ ID NO: 138703 - protein, 135 aa, Unknown
  Bacterial polypetide isolated from the Sargasso Sea
MDFDFDFQFKKQVIGIDEVGRGSWAGPVVASAALINNNKKIDRRLNDSKKLSPKIRKDVFQNLTKYSFFGVGKISNDEIDKIGIVNATFKAMQLALNNLLKKHYKVEKPIILIDGILMPDFIQSFNAELKLIKRG

SEQ ID NO: 138704 - protein, 142 aa, Unknown
  Bacterial polypetide isolated from the Sargasso Sea
MITIYTDGACSGNPGIGGWGAVILENKKDDILLNGGNDNTTNNKMELTAAIESLKFFKEKQEIRLVTDSKYVKDGIQSWIHNWKKNGWKTSSKKPVKNKELWIELDELIARHKITWEWTKGHAGNKYNEKADYLARRYIEEI

SEQ ID NO: 138705 - protein, 185 aa, Unknown
  Bacterial polypetide isolated from the Sargasso Sea
AEELGLSDQIDIINGTLSKSFGQLGGYVAANANIIDYIRSFASGFIFTSSINPSIAAASIKSIELSKESETLRLRIRRNSKFIREGLKSIQVPFIDNDSHIVPILVKGPLECKQISKLLLDKFGIYIQPVFYPTVPKGDERLRVTITITPKHSKKDIESFVNSIDEAWNILGFDRVEEQIIHNQI

SEQ ID NO: 138706 - protein, 68 aa, Unknown
  Bacterial polypetide isolated from the Sargasso Sea
MELQLGIKKWEKNGWKTASKKPVKNIELWKKLKNLSSKHSIKWIWVKGHAQNKYNNLVDEIAQGAIKR

SEQ ID NO: 138707 - protein, 125 aa, Unknown
  Bacterial polypetide isolated from the Sargasso Sea
GGWAAIIKMNGNIKKISGNEKNTTNNRMELMAPINALKNINSGEEINIYTDSQYVKLGITEWIKTWVKNNWKTSKKEEVKNKDLWTELYNLNKTLNIKWIWIKAHAGNPLNEEVDLLAKKAAGLD

SEQ ID NO: 138708 - protein, 65 aa, Unknown
  Bacterial polypetide isolated from the Sargasso Sea
ISAASIIAKVYRDNLMIKLSEKFSNYAWESNFGYGTKAHLNGLRKFGITSHHRKGFRPVHKILSN

SEQ ID NO: 138709 - protein, 91 aa, Unknown
  Bacterial polypetide isolated from the Sargasso Sea
PIMALKKIKKKSDITFYTDSQYVKTGITEWIKKWKINNWRNSNKKPVKNKDLWIKLDNSCQRHKVNWKWVKAHAGNKLNELVDEIAVLKTK

SEQ ID NO: 138710 - protein, 101 aa, Unknown
  Bacterial polypetide isolated from the Sargasso Sea
AINSLSVKPDKVLVDGFALDIKIENKGIINGDQKYQQIMAASIIAKVTRDEIMRSFHYIYPQYDFISNSGYGTKKHLKALDKYSYTRIHRLTFKPISNNIK

SEQ ID NO: 138711 - protein, 164 aa, Unknown
  Bacterial polypetide isolated from the Sargasso Sea
MNIKIAAKNKNQRIIGADEVGRGSLAGPIVGAAVKLEFQHLDLLSDVKDSKKLSPKKREEIYERVKENRIEYFISECSNLHIDQNGISVSNKVVLFNSINKLYQKSDKVYVDHFKIDKFGSISLVRGEDNSYSIALASIIAKVYRDNLMVDFGTKYPKYLFEKN

SEQ ID NO: 138712 - protein, 141 aa, Unknown
  Bacterial polypetide isolated from the Sargasso Sea
MITIYTDGSCLTNPGNGGWAAIINDGKEIKKISGNEKNTTNNRMELLAPINALKDMKPGVEINIYTDSQYVKNGITEWINTWLSNNWKTSKKEDVKNKDLWIDLYNLNKSLNIKWNWVKAHDGNPLNEEVDLLAKKAANLD

SEQ ID NO: 138713 - protein, 263 aa, Unknown
  Bacterial polypetide isolated from the Sargasso Sea
GSAVIASNTSSLPEVVGLPEALFDPMDLEDIARLIEKALKDEKFRLRLIEHAPVQAAKFSWKNTASKALEFFEQLIETECPSAVAELSEKKRNAEWQSGYADRLSGLVSLLSKSLAEEANVKNRQTLMSQVAIAIEQNESELLRYRRRVSEEVSPWRIEGPFDTSYSLALVNRELARGLVTLGVDVSLHSTDGPGDFEPDQKFLQEHPDLANLERKSREESSQPAAVTSRNLYPPRVSDLPRGFNMLSAFAWEEGELPADWVA

SEQ ID NO: 138714 - protein, 141 aa, Unknown
  Bacterial polypetide isolated from the Sargasso Sea
MITIYTDGSCLTNPGNGGWAAIINDGKEIKKISGNEKNTTNNRMELLAPINALKDMKPGVEIKIYTDSQYVKNGITEWINNWLDNNWKTSKKEDVKNKDLWIDLYNLNKSLNIQWNWIKAHDGNPLNEEVDLLAKKAANLD

SEQ ID NO: 138715 - protein, 139 aa, Unknown; identical to SEQ ID NO: 138644
  Bacterial polypetide isolated from the Sargasso Sea

SEQ ID NO: 138716 - protein, 92 aa, Unknown
  Bacterial polypetide isolated from the Sargasso Sea
TLIDGNFAPKGLKNYKTIINGDEKIKVISAASIIAKVYRDKLMIRLSKKFSNYAWDRNFGYGTKAHFEGLKKFGVTSHHRKGFKPIHKILSS

SEQ ID NO: 138717 - protein, 133 aa, Unknown
  Bacterial polypetide isolated from the Sargasso Sea
LILKKSFFAYGVVSNNKIDKINILNASLLAMKRAILKLPVRPSMVLVDGTFKPDLDIPMRAIIGGDSSENAISAASIIAKVYRDNLMIKYDSIFPVYDLKGNKGYGTKKHLEALKNYGHCEIHRTTFNGVIIK

SEQ ID NO: 138718 - protein, 115 aa, Unknown
  Bacterial polypetide isolated from the Sargasso Sea
NNEITLFGGEKNTTNNQMEMTAAIEGLSYFEERTNIEIFTDSNYLKDGIESWIHSWKKNGWKTASKKPVKNQELWMKVDELNQFHNVSWSWVKGHSGNRENDIADMLANKGIDEI

SEQ ID NO: 138719 - protein, 29 aa, Unknown
  Bacterial polypetide isolated from the Sargasso Sea
MISLSKHKINWYWVKGHAGHEFNERADLL

SEQ ID NO: 138720 - protein, 54 aa, Unknown
  Bacterial polypetide isolated from the Sargasso Sea
HRDKLMLNYSKIYPDYRFEKNSGYGTKEHLLAIQKYGITPIHRKSFSPIHKILN

SEQ ID NO: 138721 - protein, 176 aa, Unknown
  Bacterial polypetide isolated from the Sargasso Sea
MVQFYAAAVIFNLKINKKEIKDSKKLKKIEREKLSKYIKKNSIWAIGSASIREIERLNILNASLLAMKRAIKKLKVKPNLVLVDGNKSPDLNNYITKTVIKGDQKIKEISAASIVAKVSRDKLILKMSESYKKYKWDSNAGYGTKDHTNAIRKYGITRFHRKTFSPIHNILSLKKK

SEQ ID NO: 138722 - protein, 56 aa, Unknown
  Bacterial polypetide isolated from the Sargasso Sea
MNKVCEVGIDEVGRGAVFGPVFSAVVVLTEENKCILKKFGVVDSKKLTPKKRKLLL

SEQ ID NO: 138723 - protein, 152 aa, Unknown
  Bacterial polypetide isolated from the Sargasso Sea
IRSFAPGFIFTSSANPSIAAASIQAIKIAKKADILRANIRANSDLIREGLTEYEIPFLANDSHIIPIHLYEPELCKQAANVLIEEHGIYIQPIFYPTVPKGDERFRVTITPKHSASDVQSFVQSLDKVWSGLNLKRLPKTSDKVETKVSKIY

SEQ ID NO: 138724 - protein, 97 aa, Unknown
  Bacterial polypetide isolated from the Sargasso Sea
KKREVLYSETLENATSVAVGIKWNDYIDKHNIKIASEDAMKDAISSLNVTPDKILVDGFSLDIHIENEGIIKGDQKYQQIMAASIIAKVTRDEIMRS

SEQ ID NO: 138725 - protein, 143 aa, Unknown
  Bacterial polypetide isolated from the Sargasso Sea
MKTVNIYTDGACRGNPGDGGWGVLIEYENISKEYFGGEKNTTNNKMELKAAIYGLSVLKESCEVNITTDSKYVMDGITSWIENWKKNNWKNASKKDVKNKDLWIELDKLTTKHDVKWNWVKGHSGHEKNEIADALANKGIDNL

SEQ ID NO: 138726 - protein, 145 aa, Unknown
  Bacterial polypetide isolated from the Sargasso Sea
SKKLSLKNRIKLSNIIITDSLCVSIGVATRDEIDDINIHHATLLSMKRAVDNLTITPDKIYFDGLYVPDLNIESHAIVKGDSKIREISAASIIAKVARDNEMAHLNKIFRTYDFIKNKGYGTPHHLRAISFFGKTIYHRESFLKL

SEQ ID NO: 138727 - protein, 102 aa, Unknown
  Bacterial polypetide isolated from the Sargasso Sea
MKRAILNLPIKPTMVLVDGIYKPDLNISMKTIIGGDSIEDEISAASIIAKVYRDNLMINYDKKYSSFSFKQNKGYGTKKHFEALEHFGCTEIHRKTFKGVIK

SEQ ID NO: 138728 - protein, 176 aa, Unknown
  Bacterial polypetide isolated from the Sargasso Sea
SLIGPVYAAAVVLNHSINKKLLKDSKKLSKKRREILAQYIKKNSTWAIAKASICEIEKKNILQASLMAMKRAILKLKKKPSMILIDGNKLPKIENYKLKSVIKGDQKIPSISAASIIAKVARDNFISKLGIRYKGYSWDENYGYGTKKHLRAIKKFGATVHHRKTFSPLNKLNTSN

SEQ ID NO: 138729 - protein, 84 aa, Unknown
  Bacterial polypetide isolated from the Sargasso Sea
TPELKNYNLKSVIKGDKKVPSISAASIIAKVSRDKFVIALSKKNKGYDWDKNFGYGTKKHLKALKKLGITKHHRKTFSPISKIN

SEQ ID NO: 138730 - protein, 92 aa, Unknown
  Bacterial polypetide isolated from the Sargasso Sea
MKYVIYTDGACSGNPGKGGWAAIILDKNYNQLNISGSVNNTTNNRMELMATIMALKKIKKKSEIEIYTDSKYVKDGITEWIKKWKLNNWKSS

SEQ ID NO: 138731 - protein, 96 aa, Unknown
  Bacterial polypetide isolated from the Sargasso Sea
MDNFLKDKKLKLKDYSVKSLIKGDTLSKTIALASIISKETRDTIMRQLSKKYPSYLFDSHFGYGTKNHINAILKNGVLDLHRKSFKPIATIYSKTI

SEQ ID NO: 138732 - protein, 179 aa, Unknown
  Bacterial polypetide isolated from the Sargasso Sea
GEVLIWSVISCCVIANEKFNNLNLSKIKDSKKLSEKIRNKFVREFIDEGCDFGLGYSNNKYIDEFNISEATLFSMQDSINNLNIKPKAILIDGIHKIPNIDCYQLAIPKGDSKCKTIGAASILAKFVRDFIIRKYHNAVPYYDLIKNVGYGTSIHIKNINTYGKSFGHRKSFKIKSIDR

SEQ ID NO: 138733 - protein, 181 aa, Unknown
  Bacterial polypetide isolated from the Sargasso Sea
EKKNIPKLRKLGVRDSKKLSPKKRELLYKEIVKLVDDYHVIRIPPRTIDKYVFEHNLNHLEAKKMAEVISNLNPDLSYVDSCDVNAARFGREISDLSKKSKVKSYHYADSRFVVVSAASIIAKVSRDRSIMRLNKTTNLGSGYPSDKKSVNYVKKVVSSKKSLPTSIRKSWKPVQKILGLI

SEQ ID NO: 138734 - protein, 112 aa, Unknown
  Bacterial polypetide isolated from the Sargasso Sea
MEDIKNQIIGIDEVGRGAFCGPVVSCSILLSKEILKYDLVHEINDSKKLNEKKRLNLSNFIKKNSLYSIGVANSKEIDKFNILEATNLSMKRSYIKFKSFENFVKIDGNRTF

SEQ ID NO: 138735 - protein, 119 aa, Unknown
  Bacterial polypetide isolated from the Sargasso Sea
MNKVSEVGIDEVGRGAIFGPVFSAVVVLTEKNKFTLKQLGVTDSKKLTPKKRKLLLPKILLLSLDYGIGQSSAREIDKLGIRVATELSMIRALNKLKEKPSELIIDGPLLLRPWNGTQK

SEQ ID NO: 138736 - protein, 174 aa, Unknown
  Bacterial polypetide isolated from the Sargasso Sea
FCDYFSRPVTRTDYTLMKYISAASILSLVIVISYCAYFAAGIVLNNEGWAFLLDTTTYFIGGLVAAIMLVVTFTSIGLALSSLSTGRFFPAASFLGVIFGSRILAFLIQLLFDRDTMYLLSPYDNLAHTGQWMMGLNPTYDFPVAWSFVALLVMNGVSMYILISRVNSLEVTRE

SEQ ID NO: 138737 - protein, 143 aa, Unknown
  Bacterial polypetide isolated from the Sargasso Sea
MKTVNIYTDGACRGNPGDGGWGVLIEYENFSKEYFGAEKNTTNNKMELKAAIEGLKVLKETCEVHITTDSKYVMDGITSWIQNWKKNNWMNSSKKEVKNKDLWIELDELTSRHNIKWNWVKGHSGHKKNEIADSLANKGIDNL

SEQ ID NO: 138738 - protein, 142 aa, Unknown
  Bacterial polypetide isolated from the Sargasso Sea
MINIYTDGACSGNPGIGGWGVVILDNNKEILLNGGDQHTTNNKMELTAAIKALEYFEIKKELIIFTDSKYVKDGIESWITNWKKNGWKTSTKKIVKNKELWMQLDNLINKHNVTWKWVKGHAGLEFNEKADELARKYIESYI

SEQ ID NO: 138739 - protein, 127 aa, Unknown
  Bacterial polypetide isolated from the Sargasso Sea
IGIATVSEIDKHNILNASMLSMERAVNKLKKKPDLYLIDGVHAPKKMKNFKTIIKGDQKIKCISAASIVAKVYRDLYMIKLSRRFPNYKWHKNFGYGTFQHLNALKKFGVTSYHRRSYKPVHNILSK

SEQ ID NO: 138740 - protein, 112 aa, Unknown
  Bacterial polypetide isolated from the Sargasso Sea
KEISGSEKNTTNNRMEMMAVIEALKYVDTESKINLYTDSKYVKEGITNWITGWKTNNWKNSKKNDVKNKDLWVELDILSEKHNISWNWVKGHSGNIENDIADKLATEAIKDL

SEQ ID NO: 138741 - protein, 197 aa, Unknown
  Bacterial polypetide isolated from the Sargasso Sea
MSQEGANIFIGVDEAGRGCLAGPVVSASVAIYEDQVIEGVNDSKLLSPKKRDDLYDVIQNECLSFSVASIDNHVIDQKNILVATLQSMKDSIDAIGVNADEIIIDGPHKPVMHDQRDLITRGVIGGDKLFHCVSAASIIAKVYRDKFMIELHHKYPKYNFQKNKGYPTKDHIQAIRELGPSPYHRLSFKPELYENES

SEQ ID NO: 138742 - protein, 141 aa, Unknown
  Bacterial polypetide isolated from the Sargasso Sea
MITIFTDGSCLTNPGNGGWAAIINDGKEIKKISGNEKNTTNNRMELLAPINALKDMKPGVEIKIYTDSQYVKNGITEWINTWLGNNWKTSKKEDVKNKDLWIDLYNLNKSLSIQWNWVKAHDGDRLNEEVDLLAKKAANLD

SEQ ID NO: 138743 - protein, 179 aa, Unknown
  Bacterial polypetide isolated from the Sargasso Sea
MIIAGVDEVGVGCLAGPVVASCVILPEQINEIFKDSKSTSESLRSKQFQFLRRNAYASIGLCTPQEIDEMNILNATHLAMKRAINNIQIKPEKILIDGKYVPRGLINAEAFIGGDKAHQQISAASIYAKYFRDNLMGQYAKIFPKYYFEKNKGYPTQMHKEAIIEFGLSKIHRKSFKMK

SEQ ID NO: 138744 - protein, 105 aa, Unknown
  Bacterial polypetide isolated from the Sargasso Sea
MITIYTDGSCLTNPGNGGWAAIINDEKEIRKISGSEKNTTNNRMELLAPIKALKDMKHGTEIKIYTDSQYVKNGITEWINTWLANNWKTSKKEDVKNKDLWIELY

SEQ ID NO: 138745 - protein, 143 aa, Unknown
  Bacterial polypetide isolated from the Sargasso Sea
VIRIPPRTIDKYVFEHNLNHLEAKKMAEVISNLNPDISYVDSCDVNAARFGREISDLSNKSKVKSYHYADSRFVVVSAASIIAKVSRDRSIMRLNKTSNLGSGYPSDKKSVNYVKKIVSSKKPLPTSVRKSWKPVQKILGLIN

SEQ ID NO: 138746 - protein, 58 aa, Unknown
  Bacterial polypetide isolated from the Sargasso Sea
MIKIYTDGACSGNPGIGGWGVVILENSKDDIFLNGGDNNTTNNRMELQAAIEALKYFT

SEQ ID NO: 138747 - protein, 98 aa, Unknown
  Bacterial polypetide isolated from the Sargasso Sea
MINIYTDGACSGNPGKGGWGVVILDNDEEIELNGGEQNTTNNKMELTAAIKALEYFERRKDLIIHTDSKYVKDGIETWIINWKKNGWKTSAKKPVKNK

SEQ ID NO: 138748 - protein, 140 aa, Unknown
  Bacterial polypetide isolated from the Sargasso Sea
MKLKIYTDGACSGNPGKGGWAAIILDDSNQSSISGSASNTTNNRMELMAPIMALKKIKKKSEITIFTDSKYVKDGITDWIKKWKVNNWKNSNKKIVKNKDLWIKLDNACLKHKVSWKWVKAHAGNKYNNLVDELAVSKTK

SEQ ID NO: 138749 - protein, 102 aa, Unknown
  Bacterial polypetide isolated from the Sargasso Sea
KAVAGLKHLPREIIVDGRDSLNSKHPVSTLVKADNLVAEVMAASIIAKVFRDELMLLLDSKYPKYFFGSHKGYATKKHIDAINSYGIIKEHRKSFGIVKKYK

SEQ ID NO: 138750 - protein, 143 aa, Unknown
  Bacterial polypetide isolated from the Sargasso Sea
MKTVNIYTDGACRGNPGDGGWGALVEYQNFSKEYFGGQKNTTNNQMELKAAIEGLKALKETCNVNLTTDSKYVMDGITSWIDNWKKNNWKSSSKKDVKNKDLWIELDKYRSMHNVKWIWVKGHSGHEKNEIADMLANKGIDSI

SEQ ID NO: 138751 - protein, 143 aa, Unknown
  Bacterial polypetide isolated from the Sargasso Sea
MKTVNIYTDGACRGNPGDGGWGVLIEYENISKEYFGGEKNTTNNKMELKAAIHGLSVLKESCDVNITTDSKYVMDGITSWIENWKKNNWKNASKKDVKNKDLWIELDKLTTKHNVKWNWVKGHSGHEKNEIADALANKGIDNL

SEQ ID NO: 138752 - protein, 200 aa, Unknown
  Bacterial polypetide isolated from the Sargasso Sea
MIEDQNWAKNKNQRIIGADEVGRGSLAGPIVGAAVKLEFQHLDLLKDVKDSKKLSPKKREEIYERVKANKIEYSISECSNLHIDQNGISVSNKEVLFNSINKLYKKLDKVYVDHFKIDKFGSISLVRGEENSYSIALASIIAKVYRDNLMVDFGSKYPQYLFEKNKGYGTREHLNMIQKYGVCDIHRLSFNLGPTQQPQG

SEQ ID NO: 138753 - protein, 155 aa, Unknown
  Bacterial polypetide isolated from the Sargasso Sea
MTDSLLQHVVIYTDGACSPNPGTGGWGAVLISQKHQQRKELSGAEADTTNNRMELTAAVEALSALKQPCRVELYTDSSYLRNAFEQKWLQNWQLKNWRTSGGKAVLNRDLWEKLLRLDQLHQVSWHWVKAHAGDPENERADALAVAARKELAAES

SEQ ID NO: 138754 - protein, 239 aa, Unknown
  Bacterial polypetide isolated from the Sargasso Sea
MVITESTYSQENQMPRNESEKGLIDFANEVIDRKGTLFIPSFSVERSQEVASVLINSGFKHKIIMDGMALKVNEVLLRYPEYLRNPEIFKNVMDKVVAVRDHNERKKALKEPCVVISPAGMLVGGNAVYYLQELSFSDKNGIALVSYQGEGTPGKKLLDTGKVQTRGKDLNVKAEVKQFQFSGHADRDSLFEMIKNLKGNPRIMTVHGDDESCTRFAEEIHEKFGFEAHAAKLDEKIII

SEQ ID NO: 138755 - protein, 144 aa, Unknown
  Bacterial polypetide isolated from the Sargasso Sea
MNKIKIYTDGACKGNPGNGGWGAVIICNDEVKEIKGYSKNTTNNKMELLASIMALRTVDGEGDIEIYTDSMYLKNGITNWIHNWKKNNWLNSSKKIIKNKELWEEIDKFNNIYNISWRWVKAHNGDFYNERADELANIAIKEMN

SEQ ID NO: 138756 - protein, 103 aa, Unknown
  Bacterial polypetide isolated from the Sargasso Sea
TQQITKWSYWHPIRAIQKFKKKSEILIYTDSTYVKDGITTWIKKWEKNGWKTASKKPVKNIELWKKLKNLSSKHSIKWIWVKGHAQNKYNNLVDEIAQGAIKR

SEQ ID NO: 138757 - protein, 50 aa, Unknown
  Bacterial polypetide isolated from the Sargasso Sea
MKKLSLKFQDFGWEKNAGYGTKMHIENIYRLGPTIHHRKTFEPIKSLIHN

SEQ ID NO: 138758 - protein, 143 aa, Unknown; identical to SEQ ID NO: 138751
  Bacterial polypetide isolated from the Sargasso Sea

SEQ ID NO: 138759 - protein, 143 aa, Unknown
  Bacterial polypetide isolated from the Sargasso Sea
MKEIEVFTDGACRGNPGVGGWGVLFIIDGEETILYGGEENTTNNRMELKAAIKALEHFDNKVSVSITTDSNYVKDGITKWLDNWKTKNWVTASKKPVKNKDLWEQLDILNSFHRVSWKWVKAHAGHRENEIADMLANKGIDEL

SEQ ID NO: 138760 - protein, 110 aa, Unknown
  Bacterial polypetide isolated from the Sargasso Sea
SQISGSEKNTTNNRMELMAPIMALKKIRRESEITIYTDSKYVKDGITEWIKKWKLNNWKNSNKKPVKNKDLWIKLDNSCQKHKVKWKWVKAHAGNKLNNLVDKLAVSETR

SEQ ID NO: 138761 - protein, 80 aa, Unknown
  Bacterial polypetide isolated from the Sargasso Sea
SEYVRKGITEWIHGWKAKGWRTASKQPVKNVELWQRLDALVSTGGHRIEWRWVKGHSGDPGNERADALANRGVDQALGRR

SEQ ID NO: 138762 - protein, 205 aa, Unknown
  Bacterial polypetide isolated from the Sargasso Sea
MQEKKEEDLQQALNKLSEVGIDEVGKGAIFGPVFSAVVVLTEKNKFILKKFGVKDSKKLSPKKRKLLFPKILLLSSDYGIGQSSAREIDELGIRVATELSMIRALKKLKEKPSELIIDGPLLFRPWNGIQKNIVSGDSKFISIASASIVAKVSRDNLMERLEKKYSGYLIFKNKGYGTREHLYLIKKNGITKLHRKSFLKKSNLI

SEQ ID NO: 138763 - protein, 200 aa, Unknown
  Bacterial polypetide isolated from the Sargasso Sea
MIEDQNWAKNKNQRIIGADEVGRGSLAGPIVGAAVKLEFQHLDLLKDVKDSKKLSPKKREEIYERVKDNKIEFSISECSNLHIDQNGISVSNKEVLFNSIKKLYQKSDKVYVDHFKIDKFGSISLVRGEDNSYSIALASIIAKVYRDNLMVDFGSKYPQYLFEKNKGYGTREHLNMIQKYGVCDIHRLSFKIGPTQQPQA

SEQ ID NO: 138764 - protein, 91 aa, Unknown
  Bacterial polypetide isolated from the Sargasso Sea
EALKVFNDPCEVNLTTDSKYVMQGITSWIKNWKKNNWKNSSKKDVKNKDLWIELDNYVSKHNVKWNWVKGHSGHEKNEIADLLANKGIDNI

SEQ ID NO: 138765 - protein, 138 aa, Unknown
  Bacterial polypetide isolated from the Sargasso Sea
MNPSIAAASITSIKIAMESEHLRDNIRLNSDRIRLGLRDLEIPFLENDSHIIPIHLYDPRLCKGAANLLIEKHGIYIQPVFHPTVPKGDERFRVTITPRHEASDIDHFLNALDDVWKSMDLKRAEPTEAEKTAVSRIY

SEQ ID NO: 138766 - protein, 114 aa, Unknown
  Bacterial polypetide isolated from the Sargasso Sea
SSKQLYGGDISTTNNKMELTAAIMALKEIKEPCEIILYTDSKYVLQGIEEWIHNWKKRGWRGANKKPVKNIDLWKELDELRDEHNIKWNWVKGHSGDPGNETADMLANRGIDEL

SEQ ID NO: 138767 - protein, 110 aa, Unknown
  Bacterial polypetide isolated from the Sargasso Sea
SLLSMKRALEQLTIKPDLTLIDGNFAPSGLKNYKTIINGDEKVKVISAASIIAKVYRDNLMIKLSEKFSNYSWESNFGYGTKAHLDGLKKFGVTSHHRKGFKPIHKILSN

SEQ ID NO: 138768 - protein, 30 aa, Unknown
  Bacterial polypetide isolated from the Sargasso Sea
MAEGRGRVVAAATDGACSGNPGPGGWGGLL

SEQ ID NO: 138769 - protein, 40 aa, Unknown
  Bacterial polypetide isolated from the Sargasso Sea
FGWEKNAGYGTKMHIENIYRLGPTIHHRKTFEPIKSLIHS

SEQ ID NO: 138770 - protein, 59 aa, Unknown
  Bacterial polypetide isolated from the Sargasso Sea
MTDSSLQHVVIYTDGACSPNPGTGGWGAVLISQKHQQRKELSGAEADTTNNRMELTAAV

SEQ ID NO: 138771 - protein, 146 aa, Unknown
  Bacterial polypetide isolated from the Sargasso Sea
ERKLAKFIKKNSTWAIGSASVKEIEKLNILSASLLAMKRAIKKLKVKPNLVLIDGNKSPELSNYLIKTIIKGDQKIKEISAASIIAKVSRDKLMLKMSESFKKYKWDLNAGYGTRDHINAIRKYGVTRFHRKTFNPIHNILSHRKK

SEQ ID NO: 138772 - protein, 86 aa, Unknown
  Bacterial polypetide isolated from the Sargasso Sea
MITIYTDGSCLTNPGNGGWAAIIKDEKEIRKISGNEKNTTNNRMELLAPINALKDMKPGVEIKIYTDSQYVKNGITEWINTWLANN

SEQ ID NO: 138773 - protein, 163 aa, Unknown
  Bacterial polypetide isolated from the Sargasso Sea
GYVAANSDIIDYIRSFAPGFIFTSSMNPSIAAASITSINIAKSSEDLRDNIRNNSNLIRKGLSDLEIPFLENDSHIIPIHLYDPILCKQAANLLIEKHGIYIQPVFYPTVPKGDERFRVTITPRHEANDIYNFLNALEDVWKEMDLRRADTETEEKSAISRIY

SEQ ID NO: 138774 - protein, 131 aa, Unknown
  Bacterial polypetide isolated from the Sargasso Sea
GGWAFLIINKNDISYRAGFERNATNNQMELMAAIKALEFLDQHNDINLNTDSNYVKQGITNWIFNWKKNNWQTSSKKPVKNKELWERLDELNLSKNINWIWVRAHNVDEFNNQVDILARKAAENLTESSFN

SEQ ID NO: 138775 - protein, 105 aa, Unknown
  Bacterial polypetide isolated from the Sargasso Sea
KNTTNNRMELLAPINALKDMEPGAEIKIFTDSQYVKNGITEWINTWLANNWKTSKKEDVKNKDLWIDLYNLNKSLNIQWNWVKAHDGNPLNEEVDLLAKKAANLD

SEQ ID NO: 138776 - protein, 142 aa, Unknown
  Bacterial polypetide isolated from the Sargasso Sea
MIKIYTDGSCLGNPGNGGWAAIIIENEKRIQIKGSKKDTTNNRMELLAPIEALKNIPKGTKVQIFTDSKYVKSGITEWIHNWKKNDWKTTNKQPVKNKDLWNELDLMNNEFDIKWTWVKGHSSDKLNNEVDLIAREAALINI

SEQ ID NO: 138777 - protein, 180 aa, Unknown
  Bacterial polypetide isolated from the Sargasso Sea
MRITGVDEVGVGCLAGPVISAAVCFGNQKPSIIFRDSKKISHTRREKLYKYIKHNFHVSIGIATPPEVDKLNILKATHLAMKRAINNLPVIPETILIDGLYVPDGIDNAQSIVKGDEIQQEIAAASIYAKYFRDELMKLYGIKYPQYLLEKHKGYPTKEHKKAINEHGLSNIHRKSFKIK

SEQ ID NO: 138778 - protein, 62 aa, Unknown
  Bacterial polypetide isolated from the Sargasso Sea
MKYKIYTDGACSGNPGPGGWAAIILVDDKIKNEISGSENSTTNNKMELLAPNKSNSKIKKKS

SEQ ID NO: 138779 - protein, 138 aa, Unknown
  Bacterial polypetide isolated from the Sargasso Sea
MKRYKIIAGVDEVGRGCLAGPVVSAAVILKKNFQIKNLKDSKKLTFEQRIEISKDIKNNSFFSIGVASVKEIEKLNILQASLLSMKRSILSLPKKPDLVLVDGIFAPKILIKCKTVIKGDEKIKCISAASILAKVYRD

SEQ ID NO: 138780 - protein, 239 aa, Unknown
  Bacterial polypetide isolated from the Sargasso Sea
MNSDSIAIEAATDGACSGNPGPGGWGGLIIFEDYSELEIGGSEQNTTNNRMELTAAIKTLEKLKTYQLKENFKLRTDSKYVIEGYTKWIINWKRNGWKTSSGKPVQNLDLWQKIDQLRINGLVMEYVKGHSGDKQNDRVDKIATNYSKGIFIESNLKKAESSVDFFEKIAPAEIQELFSRNELIKKFAEKKYLLSSPELDTLLGEEYHLKVKQYALFEWRNWRLIPKDKKYWIIEKKEA

SEQ ID NO: 138781 - protein, 142 aa, Unknown
  Bacterial polypetide isolated from the Sargasso Sea
MNKVLIFTDGACSGNPGPGGWGAILRYNQHEKELSGGEASTTNNRMEMIAAISALEALTKPVQVVLYTDSVYLKDGITKWIHVWKSREWKTAGKKLVKNKDLWLRLEAAMKMHKIEWCWIKGHAGHIENERADQLARDAIPS

SEQ ID NO: 138782 - protein, 171 aa, Unknown
  Bacterial polypetide isolated from the Sargasso Sea
IGPVYAAAVILNKSINIKLLKDSKSLSKNKRETLAKYIKKNSLWGIGKASVKEIEKKNILNASLLAMERAIKKLKKKPKLILIDGNKVPKMKNYKLKSVIKGDQKIPAISAASIIAKVDRDKMITNLGKKFKSYYWSQNFGYGTKQHLKAIKNFGITPHHRKTFSPINKIR

SEQ ID NO: 138783 - protein, 121 aa, Unknown
  Bacterial polypetide isolated from the Sargasso Sea
MLVAGVDEVGRGTLAGGVFASAVILNISKPISGLKDSKKLSEKQREKLRQEIEDKALSFSVAEASVEEIDSLNILQASLLAMKRAVDSLSIKPEFVLVDGTHIPTWNYSAEAIIRGDSKIA

SEQ ID NO: 138784 - protein, 168 aa, Unknown
  Bacterial polypetide isolated from the Sargasso Sea
MKIIAGVDEVGRGSLIGPVYASAVILKKSINSKLLKDSKSLSKKEREYLCTYIKKNSTWSIGKASVKEIEKLNILQASLLAMKRAIKKLKRKPTHVLIDGNKTPELENYNLKSVIKGDKKIPSISAASIIAKVSRDKFITTLSKKNKGYNWDKNFGYGTKHHLKALKK

SEQ ID NO: 138785 - protein, 163 aa, Unknown
  Bacterial polypetide isolated from the Sargasso Sea
MKNFIEIFTDGSCSGNPGPGGWAAVILINNDEYIFSGFEKETTNNRMELLASINSLKKIKEDYKIKLYTDSNYLKNGITLWIQNWKKNSWLNSQKKPVANQDLWLQLDNINKGLNVEWNWVKGHENNLYNNLADKYAVDAMKNQQGRSLKNNQIIDALKGFQH

SEQ ID NO: 138786 - protein, 160 aa, Unknown
  Bacterial polypetide isolated from the Sargasso Sea
MLEKITIFSDGSSLGNPGPGGYGVIMRWKDQEIKISEGFRKTTNNRMELLGPITALKKLKKPQNVLITTDSRYVIDGIEKGWAKKWKQNNWMRDKKNKALNSDLWELLIDQCDYHLSVKFKWVKGHKGHAENEECDLLAKEAAMSSDLKIDEIFELKELE

SEQ ID NO: 138787 - protein, 189 aa, Unknown
  Bacterial polypetide isolated from the Sargasso Sea
IIAGVDEVGRGSLIGPVYAAAVILKKNIKKKKIKDSKNLTKIDREKLAKYIKKNSTWAIGSASVKEIEKLNILNASLLAMKRAIKKLKVKPNLVLIDGNKSPELKNYLVKTIIKGDQKIKEISAASIIAKVSRDKLMFKMSESFKKYKWDLNAGYGTRDHINAIRKYGVTRFHRKTFNPIHNILSQKKK

SEQ ID NO: 138788 - protein, 105 aa, Unknown
  Bacterial polypetide isolated from the Sargasso Sea
MIRAVKKLKHIPSELLIDGPLPLRLWEGNQRNIISGDSKFISIATASIIAKVMRDSLMERLESKYPGYFIFKNKGYGTKQHFSSLKENGLTNLHRKSFLNKLNLI

SEQ ID NO: 138789 - protein, 192 aa, Unknown
  Bacterial polypetide isolated from the Sargasso Sea
MNLKSIFKGIQNIAGVDEVGRGSLIGPVYASAVILKKNCDVKKLKDSKKLTKKEREVLNKYIKKNSYWSIGSASKEEIEKLNILNASLLAMKRAIKKLKKKPRLVLVDGNRIPVMKNYNLKYVIKGDRKIPQISAASIVAKVSRDSLMEKISKNFSKYQWNKNCGYGTKVHIQAIRKFGITKHHRRTLNLYT

SEQ ID NO: 138790 - protein, 194 aa, Unknown
  Bacterial polypetide isolated from the Sargasso Sea
MEYKSQKSIAGVDEVGRGSLIGPVYAAAVVFKKGFDKKRVKDSKKLSPKEREFLENYIKKNSYWAIGTASKKEIEKINILNASLLAMKRSILKLKFKPQIVKVDGNKKPNINNLNIKSVVRGDQKIPEISAASILAKVSRDRLIRKMSKKFKAYLWDKNVGYGTRDHLSAIKKFGITKHHRKTFKPIHNILSPK

SEQ ID NO: 138791 - protein, 98 aa, Unknown
  Bacterial polypetide isolated from the Sargasso Sea
MIIAGVDEAGRGPLAGPVVSAAVILNSQANLIGLNDSKKLSADKRQSLSNEIKIHSVSWSIGVATVQEIDDINILRASLLSMARAIKNLSEVPEKVIV

SEQ ID NO: 138792 - protein, 75 aa, Unknown
  Bacterial polypetide isolated from the Sargasso Sea
MNIDSIAIEAATDGACSGNPGPGGWGGLIIFDDKSELEIGGSEQNTTNNRMELTAAIKTLEKLKTFKLKENFKLR

SEQ ID NO: 138793 - protein, 149 aa, Unknown
  Bacterial polypetide isolated from the Sargasso Sea
MKITKVYTDGACSGNPGSGGWGVVILTDKLKTYNGSEKETTNNRMELKAAIMGIKNSDVTSQITIYTDSKYVKDGITNWITNWKKNNWITASKKPVKNQDLWKELDNMNNQFNVKWEWVKAHQDNDSDDSKYNNMADELARKGAMEWTD

SEQ ID NO: 138794 - protein, 92 aa, Unknown
  Bacterial polypetide isolated from the Sargasso Sea
MNSEKNIAIEAATDGACSGNPGPGGWGGLIVFSDNSEIEIGGSEQNTTNNRMELTAAIKTLEKLKNFQLKENFKLRTDSKYVIEGYTKWIIN

SEQ ID NO: 138795 - protein, 185 aa, Unknown
  Bacterial polypetide isolated from the Sargasso Sea
ITAGVDEVGRGCIAGPVVSAAVILKKSINLKLLKDSKKISFKQREKISEHIKNNSYYAIGVSSVEEIFKLNILQASLLSMNRAIKKLKITPGLTLIDGNFAPTGLKNYKTIINGDEKIKVISAASIIAKVYRDKFMIKLSKKFSNYSWEKNFGYGTKAHLDGLKKFGITIFHRKGFKPVHKMLSN

SEQ ID NO: 138796 - protein, 96 aa, Unknown
  Bacterial polypetide isolated from the Sargasso Sea
MIIAGVDEAGRGPLAGPVVSAAVIIKSQTNLIGLNDSKKLSADKRQSLSNEIKIHSASWSIGIATVQEIDDMNILRASLLSMARAIKNLSEVPEKV

SEQ ID NO: 138797 - protein, 140 aa, Unknown
  Bacterial polypetide isolated from the Sargasso Sea
KKRIELSNEIKKNSYFAIGSASHNEIDEINIHNASLLAMKRAILNLPIKPNMILVDGKFKPNLKTQMKAIIGGDSKHSEISAASIIAKVYRDNLMIEYSKKYMKFNLDKNKGYGTRDHLEALKNNKYSVIHRKSFNGVLN

SEQ ID NO: 138798 - protein, 153 aa, Unknown
  Bacterial polypetide isolated from the Sargasso Sea
MSKTKVEIYTDGACSPNPGVGGWGAILISNKHKIRTEISGAEGDSTNNRMEMTAAIKALEALKKPCIVELYTDSSYLKNAFEQKWLDNWKNKGWRTKGGDTVANKDLWLRLLEVSQNHEISWYWVKGHSGNPENERCDELAVKARKEWSKSAK

SEQ ID NO: 138799 - protein, 107 aa, Unknown
  Bacterial polypetide isolated from the Sargasso Sea
MSEVSIVAGVDEVGRGPLAGPVVAGAVVLPKNHDIEGLRDSKKLTKKKRENLYPIISDKALGTGIGIVSVQKIDEINIREATFLAMERALDDLPKIPHSALIDGESL

SEQ ID NO: 138800 - protein, 69 aa, Unknown
  Bacterial polypetide isolated from the Sargasso Sea
MEVKIYTDGSCIGNPGPGGWAAIIISENGKEEIFGGEKLTTNNRMELTAAIRALEFFEKKEIKQLSFKQ

SEQ ID NO: 138801 - protein, 191 aa, Unknown
  Bacterial polypetide isolated from the Sargasso Sea
KLIKKIIIAGVDEVGRGCLAGPVVSAAVVLKEGVNLDLLKDSKKISFKKRLEISDHIKSHSYYAFGMASVKEILDLNILQASLLSMKRALDQLTVKPDLTLVDGNFAPSGLKNYKTIINGDEKIKVISAASIIAKVFRDKLMIKLSEEFSNYAWESNFGYGTKAHLEGLKKFGITSHHRKGFKPVHKILSN

SEQ ID NO: 138802 - protein, 156 aa, Unknown
  Bacterial polypetide isolated from the Sargasso Sea
MTNPDIIIYTDGSSRGNPGPGGYGIVMQKYGTNYIKEFSEGFRKTTNNRMELLAVIVALEKLKKSNQKVHVYTDSKYVSESVEKKWVNRWEKKGFKSKKNPDLWIRFLKIFRKHEVHFFWIKGHNNNLGNERCDELAFNASLKQKLLIDAEYESKK

SEQ ID NO: 138803 - protein, 189 aa, Unknown
  Bacterial polypetide isolated from the Sargasso Sea
MNNKILAGLDEVGRGCLAGPVISCALILKKNIKKDFIKDSKTIPFKDRIKIAEHIKKNSWYGIGSASVKEIDKYNIFNATLLSMERAAKKLRKKPHLFLIDGTHAPKKLKNSKTIIKGDQKIKCISAASIVAKVYRDLYMIKLGNKFPKYKWNKNFGYGTSQHLSALKKFGVTSYHRRSYKPVHNILLK

SEQ ID NO: 138804 - protein, 186 aa, Unknown
  Bacterial polypetide isolated from the Sargasso Sea
MIAGVDEVGRGSLVGPVYAAAVILNKNINKKELKDSKKLNKIKREFLAKYIKKNSTWAIGSASLKEVEKINILNASLLAMKRAIIKLKKKPKTVLIDGNKSPKIKNYFIKAVIKGDQKIPEISAASIIAKVSRDKLMNRMSKKFKKYKWDLNAGYGTTDHIKAIRKYGVTKFHRKTFKPIHKILSL

SEQ ID NO: 138805 - protein, 167 aa, Unknown
  Bacterial polypetide isolated from the Sargasso Sea
MIEDKIWKSNPDKYIIGSDEVGRGSFAGPIGAASVRVNYHHISLLADVKDSKKLSPKKRNSIFELVQKNEIEFSYMERDNKFIDLYGIKLANEKVLEDSISSIFHHGDIVYVDHFKISKFNAVSLIRGEDNCRPIALASIIAKVLRDKFMVEISNKYNKYAFEKNKG

SEQ ID NO: 138806 - protein, 168 aa, Unknown
  Bacterial polypetide isolated from the Sargasso Sea
IVLTEKNKFILKQHGVTDSKKLTPKKRKLLLPKILFLSSDYGIGQSSAREIDKLGIRVATELSMIRALKKLKEKPSELIIDGPLLLRPWNGIQKNIVSGDSKFISIASASIIAKVSRDNLMERLEKKYSGYLIFKNKGYGTREHLSLIKKNGITKLHRKSFLKKSNLI

SEQ ID NO: 138807 - protein, 49 aa, Unknown
  Bacterial polypetide isolated from the Sargasso Sea
MEIKIYTDGACIGNPGPGGWAAIILLENEKKELFGGEKLTTNNRMELTA

SEQ ID NO: 138808 - protein, 148 aa, Unknown
  Bacterial polypetide isolated from the Sargasso Sea
MHKNHEIIIYTDGACSGNPGPGGWGAVIYSKENKTEISGYELDTTNNRMEILAAIKALESLETKSTVLLYTDSNYLKLGITSWIKVWKKNNWKNRSKKLIKNLDLWKRLDELNSVHLVNWSWVKAHSGNSDNERADNLATGAIKDLLR

SEQ ID NO: 138809 - protein, 149 aa, Unknown
  Bacterial polypetide isolated from the Sargasso Sea
SPRQRINLYFEILETFSVGVSFSSVKMIDSFNILSNSLYVMQMAVKKVAKTKDSLYFDGNILPESYRSASRAYSIIKGDKKIASIAAASIVAKVSRDFHMKSLNIRFPGYGWDKNVGYGVEQHKAAIYRLGINTEHRRSFRPIYNMLCS

SEQ ID NO: 138810 - protein, 140 aa, Unknown
  Bacterial polypetide isolated from the Sargasso Sea
MKLKIYTDGACSGNPGKGGWAAIILDDSNQSSISGSESNTTNNRMELIAPIMALKKIKKKSNITIFTDSKYVKDGITDWIKKWKVNNWKSSNKKPVKNKDLWIKLDNACLKHKVTWKWVKAHAGNKYNNLVDELAVSKTK

SEQ ID NO: 138811 - protein, 140 aa, Unknown
  Bacterial polypetide isolated from the Sargasso Sea
MKLKIYTDGACSGNPGKGGWAAIILDDSNQSNISGSESNTTNNRMELMAPIMALKKIKKKSEITIFTDSKYVKDGITDWIKKWKVNNWKSSNKKPVKNKDLWIKLDNACLKHKVTWKWVKAHAGNKYNNLVDKLAVSKTK

SEQ ID NO: 138812 - protein, 191 aa, Unknown
  Bacterial polypetide isolated from the Sargasso Sea
MKKKLITAGVDEVGRGCLAGPVVSAAVILKEGVNLKLLKDSKKISFKRRIEISNYIKSCSIYAIGLASVDEILDLNILQASLLSMKRAVEKLPVKPNLTLIDGNFTPSGLKNCKTIINGDEKVKVISAASIVAKVYRDNLMIKLAKEFSDYAWESNFGYGTKAHLEGLKKFGVTSHHRKGFKPVHKILSNY

SEQ ID NO: 138813 - protein, 231 aa, Unknown
  Bacterial polypetide isolated from the Sargasso Sea
MISFDIERDLYKKDIIMIGVDEAGRGSWAGPLVSTACWFDFTKYKSLHSEINDSKKLKSSKRREIILSLENFVKYSSSIASVKEIDKYGLSYANNIAMKRSIFSLTIELKKNSEIYRKKNFCIYIDGKYKPDFENVDNFLQFKKLHLYNYSIEALVKGDSLSKTIALASIISKETRDYMMRQLSKKHPSYFFDSHYGYGTKNHKNAILKNGVLDLHRKSFKPIATIYSKKI

SEQ ID NO: 138814 - protein, 183 aa, Unknown
  Bacterial polypetide isolated from the Sargasso Sea
GPLAGPVVVSAVILGRNWNENHRLDDSKALKVKEREELYEIICQEALAVSTVSMSAELVDRLNVLQASLKGMKKAVERLNPKADYALIDGNRYPEMKLPGEALVKGDSRSASIAAASIVGKVVRDRVMQGMECLYPGWGFERHKGYPTQEHREILQKRKPSMIHRHSFQYLGNSEDLIQPSLF

SEQ ID NO: 138815 - protein, 33 aa, Unknown
  Bacterial polypetide isolated from the Sargasso Sea
MHNLFAYTDGACSGNPGPGGWGVLLIAKKQDTI

SEQ ID NO: 138816 - protein, 49 aa, Unknown
  Bacterial polypetide isolated from the Sargasso Sea
MRVKAYTDGACSGNPGPGGWGVYLVAENNVGEIVKEEALYGKNKETTNQ

SEQ ID NO: 138817 - protein, 73 aa, Unknown
  Bacterial polypetide isolated from the Sargasso Sea
MRVLQKILRPTLEFENAAYNRGFSKIAGIDEAGRGPLAGPVFVAAVILGKSWNPKLEINDSKQLPAKKREELF

SEQ ID NO: 138818 - protein, 74 aa, Unknown
  Bacterial polypetide isolated from the Sargasso Sea
TSIAAASILAKVSRDEYIEKLCDSHPDLDDKYCILKNKGYGTKAHHDGIYEHGISEFHRKTFGICRNYNKIENA

SEQ ID NO: 138819 - protein, 108 aa, Unknown
  Bacterial polypetide isolated from the Sargasso Sea
MSKRVNIYTDGSSIGNPGPGGYGLIMEWVGKNLIKEFSKGFIETTNNRMELLAVIIGLELLKKDGFDVVVFSDSKYVVDAVKKKWLFEWEKNNFKKKKNIDLWKRFLI

SEQ ID NO: 138820 - protein, 69 aa, Unknown
  Bacterial polypetide isolated from the Sargasso Sea
VGGDNLIPSISAASIVAKVYRDKLMMAYSEEFPDYGFHKHKGYPTKFHKEMLKRYGLTRIHRKTFKGVN

SEQ ID NO: 138821 - protein, 84 aa, Unknown
  Bacterial polypetide isolated from the Sargasso Sea
NYITKTVIKGDQKIKEISAASIIAKVSRDKLMLNISENFKKYKWNLNAGYGTKEHIYALRKYGITRFHRKKFNPIHNILSLKKK

SEQ ID NO: 138822 - protein, 198 aa, Unknown
  Bacterial polypetide isolated from the Sargasso Sea
MKVNIIIKKKIISGVDEAGRGSWAGPVVSAAVILKNYTNTKELKDSKILNKNDRNEIFNKLKKNSIIGVGFSSVEEIEKFNILQATFLSMSRAINSLAITPDLLLIDGNRVPPKLTIEAYPIIKGDKFISEISAASIVAKVIRDTHMNILDKKYPGYGFTNNAGYGVKLHLDALKTLGVTPIHRQTFKPIHNILYEEN

SEQ ID NO: 138823 - protein, 178 aa, Unknown
  Bacterial polypetide isolated from the Sargasso Sea
MIAGVDEVGRGCIAGPVVAASVMLKRPIKGLMDSKKLSSKKREHLSQVIIENSIFAIGAADNKEIDQINILQASLLAMQRSLEKLDVKPKKVLVDGAHIFKTPIEIESIVGGDNLIPSISAASIVAKVYRDRLMMTYSKEFPNYGFDKHKGYPTKLHKEMLKRYGLTRIHRRTFKGVN

SEQ ID NO: 138824 - protein, 199 aa, Unknown
  Bacterial polypetide isolated from the Sargasso Sea
MKKIIAGVDEVGRGSLIGPVYAAAVILNNNIEIKKLIDSKKLTKFKRENLDIYIKNNSRWSIGTASIKEIEKYNILKASLLAMRRAIKKLKKKPTLVLIDGNKTPILKGYKLKFIIKGDQKIPEISAASIIAKVARDKLIKKISKKYKGYFWDQNAGYGTSKHLKAIRKLGITKFHRKKFKPVYNMLRVVKSHTQIKYK

SEQ ID NO: 138825 - protein, 169 aa, Unknown
  Bacterial polypetide isolated from the Sargasso Sea
MSRKLPNINIERSYQNHINGYICGIDEVGRGCLAGPVVAAAIILNFDSIPIGINDSKKLSKKKRQNIYKDIKKEALDIAIGQASNIEIDQMNILNASLLAMKRAYKNLKTPTELALIDGNYAPKINCKTINIIKGDSKSLSIAAASIVAKTYRDKLMEEIGNKYPKYNF

SEQ ID NO: 138826 - protein, 170 aa, Unknown
  Bacterial polypetide isolated from the Sargasso Sea
MLQQLFLKKNLNKKKLKDSKKLTKKNREILEKYIKKNSYWSVGSASLHEIEKLNILNASLLAMKRAIKKLNKKPSHILIDGNRVPKMKNYNLKYVVKGDEKIPEISAASIIAKVARDKLITKMSKKFNRYSWDKNAGYGTKLHLIAIKKFGVTKHHRKTFSPIHNILSPN

SEQ ID NO: 138827 - protein, 190 aa, Unknown
  Bacterial polypetide isolated from the Sargasso Sea
MKKNKVIAGVDEVGRGCLAGPVVSAAVILKKSINLNKLKDSKKLTFIQRKNISIHIKENSFFSIGISTVKEIEKLNIFQASLLSMKRAILNLSKKPDLVFVDGNFSPDINFKCKCYVKGDEKIKSISAASIIAKVYRDELMIRISKKYNKYFWEKNFGYGTKQHLRGLKNYGLTPMHRRNFKPIHNMLLK

SEQ ID NO: 138828 - protein, 113 aa, Unknown
  Bacterial polypetide isolated from the Sargasso Sea
MKFKIYTDGACSGNPGKGGWAAVILDGKNQSSISGSENKTTNNRMELMAPIMALKKIKTKSEITIYTDSRYVKDGITGWIKKWKLNDWKSSNKKPVKNKDLWVKLDNCCQKHN

SEQ ID NO: 138829 - protein, 186 aa, Unknown
  Bacterial polypetide isolated from the Sargasso Sea
MITAGVDEVGRGCLAGPVVSAAVILKDSINLKLLKDSKKITFKKRIEIAKHIRLNSTYAVGISSVEEILNLNILQAALLSMRRAIDKLVIKPELILIDGNFAPKGLENYKTIINGDEKIKSISAASIVAKVFRDQLMIKLSEEFNKYAWERNFGYGTKAHMHALKKFGITSHHRKGFKPIHKMLSS

SEQ ID NO: 138830 - protein, 76 aa, Unknown
  Bacterial polypetide isolated from the Sargasso Sea
IIKGDSKIPEISAASIIAKVHRDFYMINLSKKNPGYGWEKNYGYGTKQHMLALKKIGITKFHRKTFYPVYKMLSKK

SEQ ID NO: 138831 - protein, 72 aa, Unknown
  Bacterial polypetide isolated from the Sargasso Sea
LSIAAASIVAKVVRDRAMARLAVRYPFFGWEGNAGYGVKKHMAGLGEVGPTAHHRKSFKPIADLFDAMMAGR

SEQ ID NO: 138832 - protein, 186 aa, Unknown
  Bacterial polypetide isolated from the Sargasso Sea
MIIAGVDEVGRGCLAGPVVSAAVILKKGIDLKLLKDSKKISFKKRLDISEHIKSNSCYAIGVASVEEIFNLNILQASLLSMNRAIKSLSIKPGLTLIDGNFAPEGLKKFKTIINGDEKVKVISAASIVAKVYRDKLMIKLSEQFSNYAWERNFGYGTKAHLEGLRRFGITAHHRKSFKPIHQILSN

SEQ ID NO: 138833 - protein, 109 aa, Unknown
  Bacterial polypetide isolated from the Sargasso Sea
MKIICGIDEVGRGPLAGPVVSAAVILPIGHGIIGLMDSKKISPKIREELFEQIIKISDVGIGVVSSRQIDKINILQATYKSMEKALYNLKKQPDRIMVDGFDLSLKGIK

SEQ ID NO: 138834 - protein, 170 aa, Unknown
  Bacterial polypetide isolated from the Sargasso Sea
FAAAVIFKKNINKKKIKDSKQLSKEKREELERYIKKNSIWSIGSASLKEIEKINILNASLLAMKRSVKKLKLKPTVTLIDGNKLPKMNGFKLRSIIKGDQKVSEISAASIIAKVARDRLITKISKKFKKYAWDKNAGYGTKNHIKAIKKFGITKHHRKTFAPIHNMLSPR

SEQ ID NO: 138835 - protein, 141 aa, Unknown
  Bacterial polypetide isolated from the Sargasso Sea
MKFKIYTDGACSGNPGKGGWAAIILDDLNLSSISGSESNTTNNRMELMAPIMALKKIKKKSDITIFTDSKYVKDGITDWIKKWKQNNWKSSNKKPVKNKDLWIKLDSSCQKHKITWKWVKAHAGNKYNDLADKLAVIETKK

SEQ ID NO: 138836 - protein, 71 aa, Unknown
  Bacterial polypetide isolated from the Sargasso Sea
CLSKSIAAASILAKVKRDRKMAEFGEKYPQWGFERHKGYPTKEHRAAIAKYGLSPIHRRSFNPKTLQTSLL

SEQ ID NO: 138837 - protein, 192 aa, Unknown
  Bacterial polypetide isolated from the Sargasso Sea
MKKIIAGVDEVGRGSLIGPVYAAAVILNSNINKKELKDSKKLNKIKREILAKYIKKNSTWAIGSASLKEIETINILNASLLAMKRAIIKLKKKPKIVLIDGNKSPKIKNYFIKTIIKGDQKIPEISAASIIAKVSRDKLITGISKNFKSYKWHLNAGYGTKEHLIAIKKFGVTKFHRKTFKPIHNILSLKKN

SEQ ID NO: 138838 - protein, 143 aa, Unknown
  Bacterial polypetide isolated from the Sargasso Sea
MKKLTIYTDGACSGNPGKGGWAAILIVGDNKKNLSGAEYKTTNNRMELTAVIQSLQSLDDYNDFEIEINTDSKYVKDGIEIWINKWKENGWKTANKKEVKNQDLWKNLDNIIQGKKIKWNWVKGHSNNELNNEVDKLARESIL

SEQ ID NO: 138839 - protein, 171 aa, Unknown
  Bacterial polypetide isolated from the Sargasso Sea
GPVVSAAVILKTGFKIKNLKDSKKLNFKQRAEVAEDIKNNSFFSFGIASVKEIEKLNILKASLLSMKRAIMKLTKKPDLVLVDGIFAPQVKNKCKTIIRGDEKIKCISAASILAKVYRDKIMIKMSKKFKNYHWDKNFGYGTKQHIIGLKKYGLTTIHRKNFKPIHKMLLK

SEQ ID NO: 138840 - protein, 186 aa, Unknown
  Bacterial polypetide isolated from the Sargasso Sea
MKIIAGVDEVGRGSLIGPVYASAVILKKSINQKLLKDSKSLSKKEREYLCTYIKKNSIWSIGKASVKEIEKLNILQASLLAMKRAIKKLKKKPTHVLIDGNKTPELENYNLKSVIKGDKKIPSISAASIIAKVSRDKFITTLSKKNTGYDWDKNFGYGTKQHLKALKKLGITKHHRKTFSPISKIN

SEQ ID NO: 138841 - protein, 174 aa, Unknown
  Bacterial polypetide isolated from the Sargasso Sea
GRGSLIGPVYAAAVILNKSINLKLLKDSKCLTKKKRETLSKYIKKNSIWAIGKASNKEIDKINILQASLLAMKRAIKKLKKKPSYILIDGNKLPDLKNFKMKAIVKGDQKIPVISAASIIAKVSRDKFIITLAKKNSGYFWHQNYGYGTKKHLNAIKKLGVSIHHRKSFAPIKK

SEQ ID NO: 138842 - protein, 140 aa, Unknown
  Bacterial polypetide isolated from the Sargasso Sea
MKLKIYTDGACSGNPGKGGWAAIILDDTNQSSISGSESNTTNNRMELMAPIMALKKIKKKSEITIFTDSKYVKDGITDWIKKWKVNNWKSSNKKPVKNKDLWIKLDNVCLKHKVKWKWVKAHAGNKYNNLVDELAVSKTK

SEQ ID NO: 138843 - protein, 118 aa, Unknown
  Bacterial polypetide isolated from the Sargasso Sea
LNASLLAMKRAIKKLNKKPSSVLIDGNKTPKIENYNLKSVVKGDEKIPEISAASILAKVARDRLIRKLSKKFTKYNWDKNAGYGTKHHLRAIKKFGVTIYHRKTFGPIHNILSPNKII

SEQ ID NO: 138844 - protein, 187 aa, Unknown
  Bacterial polypetide isolated from the Sargasso Sea
MAEVSPPTMKQEQYCWTQGESVVVGIDEVGKGAWAGPLTVGAVVLPRSGRVKGIRDSKMLTSGRREKLYDKIGEWAEDWSVGHASARECDELGMSDAQRLATRRALEMLTLEPDRVLVDGNWDYVDWVPSTTITKGDQSCLSIAAASIMAKVTRDRLMAAAAADFPAYMFENNKGYPAPQHLTALAG

SEQ ID NO: 138845 - protein, 46 aa, Unknown
  Bacterial polypetide isolated from the Sargasso Sea
MICGIDEVGRGPLAGPVVSAAVILPISHGIAGLKDFKEISRKFVRN

SEQ ID NO: 138846 - protein, 140 aa, Unknown
  Bacterial polypetide isolated from the Sargasso Sea
MKSIVAGVDEVGRGSLVGPVYAAAVILKKKVDKKKIKDSKTLTKKNREILEKYIKKNSYWSIGSASLKEIEKLNILNASLLAMKRAIKKLKKKPVQVLIDGNKVPKIKNYNLKYVIKGDKKIPEISAASIIAKVSRDRLI

SEQ ID NO: 138847 - protein, 190 aa, Unknown
  Bacterial polypetide isolated from the Sargasso Sea
MKSIIAGVDEVGRGSLVGPVYAAAVILKKKINKKILKDSKKLTKINREMLEKYIKKNSYWSIGSASLKEIEKLNILNASLLAMKRAIKKLNKKPSRVLIDGNKIPKIKNYNLKFVIKGDEKIPEISAASIIAKVSRDRLIAKMSKKYIKYSWDKNAGYGTKNHLSAIKKFGITKYHRKTFKPIHNILSLK

SEQ ID NO: 138848 - protein, 113 aa, Unknown
  Bacterial polypetide isolated from the Sargasso Sea
LLAMKRAIKKLKIKPYLVLIDGNKSPKIKNYLIKEIIKGDQKIKEISAASIIAKVSRDKLMKKLSNQYKKYKWDKNAGYGTKDHIEAIKKYGITEFHRKTFKPIHNILSHKKK

SEQ ID NO: 138849 - protein, 142 aa, Unknown
  Bacterial polypetide isolated from the Sargasso Sea
MITIYTDGACSGNPGIGGWGAVILENKNDEILLNGGDNNTTNNRMELTAAIKALKHFQSRKDITLITDSKYVKDGIQLWIKNWKKNGWKTVSKKPVKNKELWIELDALITKHNIVWEWVKGHTGNKYNEKADYLARQYIENI

SEQ ID NO: 138850 - protein, 204 aa, Unknown
  Bacterial polypetide isolated from the Sargasso Sea
MNFDIEKKFGEIIVGIDEVGRGTLAGPVVAVAVYIKRSLWKNFLEKYPDIIKINDSKKISKKVREKLYKILIKIINFGIGAASVKEIEEKNILQASLIAMERAYSSLKIDADFVLVDGIYKPKIKAKVEAIKNGDNKSISIASASIIAKVVRDNLMKKLSYKYPNFFWHKNSGYGTKIHINKIKLLGITPHHRKSFKPIIKMIR

SEQ ID NO: 138851 - protein, 142 aa, Unknown
  Bacterial polypetide isolated from the Sargasso Sea
MTNPDIIIYTDGSSRGNPGPGGYGIVMQKHDTNYIKEFSEGYRKTTNNRMELLAVIVALEKLKKLNQKVHVYTDSKYVSESVEKKWVNNWEKKAFKNKKNPDLWIRFLKIFRKHDVRFFWIKGHNNNPTNERCDELAFNASL

SEQ ID NO: 138852 - protein, 141 aa, Unknown
  Bacterial polypetide isolated from the Sargasso Sea
MKYKIYTDGACSGNPGKGGWAAIILNEKSFTTCISGKENITTNNRMELTAPIMALNKIKKKSDVIIYTDSKYVKDGITDWIKKWKLNDWKGSNKKPVKNKDLWIKLDNSCLKHKVTWKWVKAHAGNKYNNLVDELAVSKTK

SEQ ID NO: 138853 - protein, 136 aa, Unknown
  Bacterial polypetide isolated from the Sargasso Sea
YAIGSASVKEIEKLNILNASLLSMKRALKKLKIKPSLAYIDGSFVPPNLKVKCKAFIKGDERIKSIAAASIIAKVKRDFFMIKLAKKFSRYKWNKNFGYGTAEHLKIIKKYGVTKHHRKKFKPVHNILMRKTRETL

SEQ ID NO: 138854 - protein, 155 aa, Unknown
  Bacterial polypetide isolated from the Sargasso Sea
MPDFEIEKSLKGTVIGVDEVGRGPLAGPVVSCACTYKNYEIDKKFIDKIDDSKKISYKNRIKIFKIIQNLKDNKEINYSLGFATVEEIDSHNILEATKLSMIRAINKLNFKKGNIIFDGQMKLNIKNFISKDIVQGDNKSISIATSSIIAKIIET

SEQ ID NO: 138855 - protein, 141 aa, Unknown
  Bacterial polypetide isolated from the Sargasso Sea
KILSEQIKIHSVSWSIGIATPQEIDELNILRASLLSMERAIKNLSEVPEKVIVDGQYTPEITMPCEAIIRGDTKEASIMAASIIAKVERDKMMLELDKDYPNYGFHQHKGYPTKLHLQALRAFGPCIEHRQTFNPVKKFLT

SEQ ID NO: 138856 - protein, 113 aa, Unknown
  Bacterial polypetide isolated from the Sargasso Sea
GSENYTTNNRMEIIAVIKALNTIKLKQATLITDSQYVKNGIEVWIHKWKDNGWMTAEKKPVKNKDLWTKLDKIQKTKKIKWEWVKGHSSDKLNNEVDRIARERAESIGYSEKI

SEQ ID NO: 138857 - protein, 171 aa, Unknown
  Bacterial polypetide isolated from the Sargasso Sea
MDDSKKMTAASRVAFHGILTELPHHHVVLSVPVEVIDRDGILRATLAGMARAAELLAKRLAEAGIGEAAQILIDGNQMPPLSRPAQTVVKGDSRSLSIAAASVIAKHERDRIMVGLAGENPGYGWQRNMGYGTAAHREALNRLGVTRHHRRSFAPIRRLLCDGAETPSSKG

SEQ ID NO: 138858 - protein, 67 aa, Unknown
  Bacterial polypetide isolated from the Sargasso Sea
MNFEKEFNSPIAGVDEVGRGPLAGPVVAAAVILDKNNLPEGIRDSKKISKNRREVIAEKIKLNSHYA

SEQ ID NO: 138859 - protein, 80 aa, Unknown
  Bacterial polypetide isolated from the Sargasso Sea
IKGDNTYKSIAAASILAKTYRDNYILKLVEDYPELKKYDIHNNKGYGTKKHMEAIETYGITQWHRKSFAPCKDKTLTLIK

SEQ ID NO: 138860 - protein, 175 aa, Unknown
  Bacterial polypetide isolated from the Sargasso Sea
RGSLIGPVYAAAVILNKTINKKLLKDSKNLKKNKREFLAKYIKKNSIWATGKASVSEIEKINILHASLLAMERAIKKLKKKPKLILVDGNKTPNLKNYKLQSVIKGDQKIPSISAASIIAKVTRDKMISRLGKKFKNYYWSKNYGYGTKQHLKAIKKFGITSHHRKTFSPISKLK

SEQ ID NO: 138861 - protein, 155 aa, Unknown
  Bacterial polypetide isolated from the Sargasso Sea
ENISGLKDSKKLSHKTRSALAKLILENSYFGFGIVNNIQIDKINILKASLLAMKRAILNLPIKPALVLVDGIHKPDLNVPMRTIIGGDASEAEISAASIIAKVYRDNLMIQYNSKFPNYDFINNKGYGTAEHLRLLKINGYCEIHRKSFKGVIDK

SEQ ID NO: 138862 - protein, 145 aa, Unknown
  Bacterial polypetide isolated from the Sargasso Sea
MKYITAGVDEVGRGSLIGPVFAAAVIFKNNIDKKKIKDSKKLTKKNRKILEKYIKKNSYWSIGSASLKEIEKLNILNASLLAMKRAIKKLNKKPSRVLIDGNKAPKIENYNLKYVIKGDEKIPEISAASIIAKVARDRLIGKMSK

SEQ ID NO: 138863 - protein, 193 aa, Unknown
  Bacterial polypetide isolated from the Sargasso Sea
MNSDSIAIEAATDGACSGNPGPGGWGGLIIFDDNSELEIGGSEQNTTNNRMELTAAIKTLEKLKTYKLKENFKLRTDSKYVIEGYTKWIINWKKNGWKTSSGKPVQNLDLWQKIDLLRINGLKMEYVKGHSGDKQNDRVDKIATNYSKGISIESNLKKVESSVDFFEKNAPAEIQKLFSRNELIQKFAEKSTC

SEQ ID NO: 138864 - protein, 154 aa, Unknown
  Bacterial polypetide isolated from the Sargasso Sea
MKDVITAGVDEVGRGCLAGPVVSAAVILKKGIDLKLLKDSKKISFKKREEISEHIKKNSYYAIGIASVEEILNLNILQASLLSMSRAIEKLKIKPGLTLIDGNFAPAGLKNYQTIINGDEKIKVISAASIIAKVYRDRFMIKLSEKYSNYAGKE

SEQ ID NO: 138865 - protein, 173 aa, Unknown
  Bacterial polypetide isolated from the Sargasso Sea
PVYAAAVILNKSINRKILKDSKSLTQEKRKSLSDYIKKNSIWAIGKASAEEIEKINILQASLLAMKRAIKNLKKKPSYVLIDGNKIPDLNNYNLKAIVKGDQKIPSISAASIVAKVSRDQFIITLSSKNKDYHWDQNFGYGTKQHLKAIKKFGITKHHRKNFSPISKIVMHHI

SEQ ID NO: 138866 - protein, 58 aa, Unknown
  Bacterial polypetide isolated from the Sargasso Sea
LAKTYRDNYVKGLVKEDPNLSKYGIEKNKGYGTKQHMEAIKEHGITSWHRKSFAPCKS

SEQ ID NO: 138867 - protein, 39 aa, Unknown
  Bacterial polypetide isolated from the Sargasso Sea
MSFEAGVDEVGRGPLAGPVYAAAVILDPKIKIKGLNDSK

SEQ ID NO: 138868 - protein, 186 aa, Unknown
  Bacterial polypetide isolated from the Sargasso Sea
MDEEKCFQSLGYKAITGIDEVGRGPLAGPVIAGAAILPIEMEDKWLKIIRDSKQLTSRKRILALDELSQFAIIATGKSSPEEIDRYGIVNAINLAIKRALHNLDAKSDFLLLDAFKLPETTLPQKAIIRGDASCISIGAASIVAKVERDALMNELHESFPAYGFNSNKGYGTKHHIDAINAIGPCD

SEQ ID NO: 138869 - protein, 169 aa, Unknown
  Bacterial polypetide isolated from the Sargasso Sea
MEYKSQKNVAGVDEVGRGSLIGPVYAAAVIFKKSFDKKKVKDSKKLSRKKREFLENYIKKNSYWAIGTASKKEIEKINILNASLLAMKRSILKLKFKPKIVKVDGNKKPNINNLNIKSVVRGDQKIPEISAASILAKVSRDRLIKRCQKNLKLICGIKILAMELEIIFQ

SEQ ID NO: 138870 - protein, 206 aa, Unknown
  Bacterial polypetide isolated from the Sargasso Sea
MMPAKVAPILGVGDSKTITDEAVREELYEKIVSTPGVVWSARVISAKRIDDINILMASLEAMRLSIVDVLGKKPPKQALALIDGPFSPWKEGEKYVDFQEPPPPKGCDLTVEPIKGGDGKVYCIAAASIIAKVTRDRLMHAYDKEWPMYGLASHKGYPTAAHVSAIAKHGAVAIHRRTFAPLKQRELAPPTAKELKRVEEIAKKVK

SEQ ID NO: 138871 - protein, 123 aa, Unknown
  Bacterial polypetide isolated from the Sargasso Sea
MSNSISIFTDGACRGNPGPGGWGVLILLEGEEITLYGGEDSTTNNQMEMMAAIKALEYFREKKSIELVTDSNYLKDGIEKWIHGWKKNGWKTSAKKPVKNQELWMKIDALNHFHEVQWKWVKG

SEQ ID NO: 138872 - protein, 186 aa, Unknown
  Bacterial polypetide isolated from the Sargasso Sea
MKIIAGVDEVGRGSLVGPVYAAAVILKKSIKREFLKDSKSLSKVKREILAKYIKKNSIWSVGKASTIEIEKLNILNASLLAMKRAIKKLKKKPSITLIDGNKLPKIKNYKLKSIIKGDEKIPSISAASIIAKVTRDKIINNLGKKFKGYYWEKNFGYGTRQHLKAIKTLGITIHHRKTFSPINKIK

SEQ ID NO: 138873 - protein, 142 aa, Unknown
  Bacterial polypetide isolated from the Sargasso Sea
MKILTAGVDEVGRGSLIGPVYAAAVILKKNLDKKKLKDSKKLTKKNREILEKYIKKNSYWSIGSASLKEIEKLNILNASLLAMKRAIKKLNIKPSRVLIDGNKIPKIKNYNLKYVIKGDEKIPEISAASIIAKVARDRLITK

SEQ ID NO: 138874 - protein, 141 aa, Unknown
  Bacterial polypetide isolated from the Sargasso Sea
MKLKIYTDGACSGNPGKGGWAAIILDKNFNQSSISGSENNTTNNRMELLAPIMALKKIKRKSEVTIFTDSKYVKDGITDWIKKWKVNNWKNSNKKPVKNKDLWIKLDNACLKHKVTWKWVKAHAGNKYNNLVDELAVSKTK

SEQ ID NO: 138875 - protein, 159 aa, Unknown
  Bacterial polypetide isolated from the Sargasso Sea
SSVILDYEILGLDDSKKLSKTKREALYEIITKNCTFAIGSASNEEIDSMNIHNASLLAMKRSVKNLSKQPSFVFVDGKFNLDIDIDNKAVINGDSLIDSISAASIIAKVYRDNYMREMHDYFPNYDFINNKGYPTKNHKIALKKHGPSEIHRLSFRGVF

SEQ ID NO: 138876 - protein, 171 aa, Unknown
  Bacterial polypetide isolated from the Sargasso Sea
VFAAAVIFKTNIDKKKIKDSKKLSKKKRNILEKYIKKNSIWSIGSASLKEIEKLNILNASLLAMKRSIKKLKLKPSITLIDGNKLPELNGYKVKYVIKGDQKISEISAASIIAKVARDRLITKLSKKFKKYGWDKNSGYGTKEHIKAIKKFGITQYHRKTFGPIHNILSPK

SEQ ID NO: 138877 - protein, 186 aa, Unknown
  Bacterial polypetide isolated from the Sargasso Sea
MKIVIAGVDEVGRGSLVGPVYAAAVILNKNLDKKKLKDSKKLSKNCRKILEKYIKKHSYWSIGSASLKEIEKFNILEATLLAMKRAIKKLKIKPKKVLIDGNKLPKMKNYSLKYVIKGDQKIPEISAASIIAKVSRDRLISKMGKKYVKYSWNKNAGYGTKGHLLAIKKFGITKHHRKTFQPIHNI

SEQ ID NO: 138878 - protein, 79 aa, Unknown
  Bacterial polypetide isolated from the Sargasso Sea
MKYKIYTDGACSGNPGPGGWAAIILSNDKITDEIYGSEKNTTNNKMELLAPIRAIQRFKKKSEIMIYTDSTYVKEGITS

SEQ ID NO: 138879 - protein, 78 aa, Unknown
  Bacterial polypetide isolated from the Sargasso Sea
MNIDSIAIEAATDGACSGNPGPGGWGGLIIFDDKSELEIGGSEQNTTNNRMELTAAIKTLEKLKTYKLKENFKLRTDS

SEQ ID NO: 138880 - protein, 157 aa, Unknown
  Bacterial polypetide isolated from the Sargasso Sea
MKKLVAGVDEVGRGSLIGPVYAAAVILNKNINKKDFKDSKKLNKTKREFLAKYIKRNSTWAIGSASLKEIEKTNILNASLLAMKRAIIKLKKKPNLVLIDGNKSPKIKNYLTRNIIKGDQKIAEISAASIIAKVFRDRLMKNISNKYKKYKWDKNAG

SEQ ID NO: 138881 - protein, 121 aa, Unknown
  Bacterial polypetide isolated from the Sargasso Sea
MKLKIYTDGACSGNPGKGGWAAIILDDSNQSSISGSESNTTNNRMELMAAIMALKKIKKKSEITIFTDSKYVKDGITDWIKKWKVNNWKSSNKKTVKNKDLWIKLDNACLKHKVTWKWVKA

SEQ ID NO: 138882 - protein, 135 aa, Unknown
  Bacterial polypetide isolated from the Sargasso Sea
EIFLDACDVIAESSGRMVAKTLGDGWHDCKIYSEHKMDSRDEVVAAASIIAKVSRDSVMEELSQELNIDLGSGYPSDPKTREALEILCEEEVLADCIRRKWANVKRIWSRSHHRPIQSRANERNGVFQSALDEWE

SEQ ID NO: 138883 - protein, 181 aa, Unknown
  Bacterial polypetide isolated from the Sargasso Sea
MNLKSIFKGNQNIAGVDEVGRGSLIGPVYASAVILKKNCDIKKLKDSKKLTKKEREVLNKYIKKNSYWSIGSASKKEIEKLNILNASLLAMKRAIKKLKKKPCLVLIDGNRIPVMKNYNLKYVIKGDRKIPQISAASIVAKVSRDSLMKKISKNFSKYQWNKNCGYGTKVHIQAILKFGIT

SEQ ID NO: 138884 - protein, 102 aa, Unknown
  Bacterial polypetide isolated from the Sargasso Sea
MKNNVVIYTDGACKGNPGEGGWGAILEFTDETNKIYGYQENTTNNRMEIVAAIEAIKLVKEESDIIIYTDSKYLMNGINTWIHSWKKNNWKTSGNKNVKNVD

SEQ ID NO: 138885 - protein, 93 aa, Unknown
  Bacterial polypetide isolated from the Sargasso Sea
MKYKIYTDGACSGNPGPGGWAAIILVDDKIKNEISGNEENTTNNKMELLAPIRAIQKFKKKSEILIYTDSTYVKDGITTWIKKWEKNGWKTAS

SEQ ID NO: 138886 - protein, 109 aa, Unknown
  Bacterial polypetide isolated from the Sargasso Sea
AVERLNPKADYALIDGNRYPEMRLPGEALVKGDSRSASIAAASIVGKVVRDRVMQGMECLYPGWGFERHKGYPTQEHRENLQKRKPSMIHRHSFQYVGNPEDLIQPSLF

SEQ ID NO: 138887 - protein, 162 aa, Unknown
  Bacterial polypetide isolated from the Sargasso Sea
MKIFAGVDEVGRGSLIGPVYAAAVILNKSINKKLLKDSKTISKNERELLSKYIKKNSIWAVGKASVKEIEKINILQASLLAMKRAIKKLKKKPSCVLIDGNNLPRINNYKLKSVVKGDQKSPSISAASIIAKVARDRMIANLGKKFKGYNWDQNFGYGTKQH

SEQ ID NO: 138888 - protein, 158 aa, Unknown
  Bacterial polypetide isolated from the Sargasso Sea
MTKKINIYTDGSSIGNPGPGGYGIIMISDNGEYKKEFSKGFKLTTNNRMELLAVIVALESIKIKNCNAEVFTDSKYVSDAVDKKWVFEWEKINFKKKKNPDLWKRFLMIYRKHSVTFTWIKGHNNHPENERCDYMANNSAKSSNLISDTYYEKNIKGV

SEQ ID NO: 138889 - protein, 67 aa, Unknown
  Bacterial polypetide isolated from the Sargasso Sea
LSIASASIIAQVHRDRLMSILDSKFTFYDWKKNAGYGTKKHIDAIHKHGVTQFHRKSFEPIKSLLKK

SEQ ID NO: 138890 - protein, 179 aa, Unknown
  Bacterial polypetide isolated from the Sargasso Sea
MKSNIAGVDEVGRGSLVGPVYAAAVILKKKVDKKKLKDSKKLTKINRQILEKYIKKNSYWSIGSASLKEIEKLNILNASLLAMKRAIIKLKKKPGQILIDGNKIPKIKNYNLKYVIKGDEKIPEISAASIIAKVSRDRLITKMSKKYIKYYWNKNAGYGTKDHLSAIKKFGITKYHRKT

SEQ ID NO: 138891 - protein, 189 aa, Unknown
  Bacterial polypetide isolated from the Sargasso Sea
MKVFIAGVDEVGRGSLIGPVYAAAVILKRKLDKKKLKDSKKLTRKNREILEKYIKKNSYWSIGSASLKEIEKFNILNASLLAMKRAIKKLTKKPSQVLIDGNKIPKIKNYNLICVIKGDEKIPEISAASIIAKVARDRLITQMSKKFRKYAWDKNAGYGTKSHIKAIKKFGVTKHHRRTFNPIHNILSP

SEQ ID NO: 138892 - protein, 151 aa, Unknown
  Bacterial polypetide isolated from the Sargasso Sea
MLLDDIKNQVIGIDEVGRGAFCGPVVSCSVLLEQKILNNNLVFQITDSKKLNHKKRIILSKFIKEYSSYSIGVANNIEIDEMNILRATNLSMIRSYDKFKKTDNLIKIDGLKTFSLNEKTTFIKNGDQKSISIAAASIIAKTWRDRLMTLY

SEQ ID NO: 138893 - protein, 39 aa, Unknown
  Bacterial polypetide isolated from the Sargasso Sea
MDVKIYTDGACVGNPGPGGWAAVILDGKIRKELFGGEKS

SEQ ID NO: 138894 - protein, 145 aa, Unknown
  Bacterial polypetide isolated from the Sargasso Sea
MIKIYTDGACSGNPGPGGWGYVVVENGKLHSSNGSESQTTNNRMELTAAIKALESARKDESLYLYTDSTYLQKGITEWIVNWKKNNWITSSKKPVSNKDLWIKIDQLNHELDIEWKWVKAHQSDNSDDTFYNNMADELATGAIHK

SEQ ID NO: 138895 - protein, 238 aa, Unknown
  Bacterial polypetide isolated from the Sargasso Sea
MNIDSIAIEAATDGACSGNPGPGGWGGLIIFDDSSELEIGGSEQNTTNNRMELTAAIKTLEKLKSFKLKENFKLRTDSKYVIEGYTKWIINWKRNGWKTSSGKSVQNLDLWQKIDQLRINGLIMEYVKGHSGDKQNDRVDKIATNYSKGISIVSNLIEEESVDFFEKNAPAEIQELFSRNELIQKFSEKEYLLNSLELSNLLGEENHLKIKKYLLFEWRNWRLIPKDKKYWIIEKKGS

SEQ ID NO: 138896 - protein, 210 aa, Unknown
  Bacterial polypetide isolated from the Sargasso Sea
MPDLSIESGFDGPVIGVDESGRGPWAGPVTIAAAWLEQDALAAFPLGLDDSKKMTAASRAAFHGILTQLPHHHVVLSVPVEVIDRDGILKATLAGMARAAELLAKRLSEAGIGEAAQILIDGNQMPPLARPAQTVVKGDSRSLSIAAASVIAKHERDRIMQGLAGENPGYGWEGNMGYGTAAHREALDRLGVTRHHRRSFAPIRRLLCDG

SEQ ID NO: 138897 - protein, 115 aa, Unknown
  Bacterial polypetide isolated from the Sargasso Sea
MNKPITIYTDGSSIGNPGPGGYGIVMLVEGEDYKKEFSQGFKLTTNNRMELLAVIIALEKIKIKNSNVTIFTDSKYVSDAVEKGWVFDWEKKNFKNKKNPDLWMRFLNIYNEHKI

SEQ ID NO: 138898 - protein, 80 aa, Unknown
  Bacterial polypetide isolated from the Sargasso Sea
MAEGRGRVVAAATDGACSGNPGPGGWGALLRFEDGSIEEFGGHAPDTTNNRMELQAALEVLQRLEHLPRHPDLTLRTDSK

SEQ ID NO: 138899 - protein, 189 aa, Unknown
  Bacterial polypetide isolated from the Sargasso Sea
MKKFITAGVDEVGRGCLAGPVVSAAVILKTGINLKLLKDSKKISFNKREEISEHIKNNSYYAFGIATVKEILSLNILQASLLSMKRAIEKLSVKPDLTLIDGSFAPEGLKSYKTIINGDEKIKVISAASIIAKVFRDRLMIKLSEKFSNYAWERNYGYGTKAHLNGLKKFGITAHHRKAFKPVHKILSR

SEQ ID NO: 138900 - protein, 147 aa, Unknown
  Bacterial polypetide isolated from the Sargasso Sea
ETKRESIAQEIKEKAIAWSIGISSSEEIDEVNILKATLIAMKRAIEGLKIFPDIALIDGQHAPQTECKVRTIVKGDQSKKNIMAASILAKVSRDNYMKEIDDKYPEYGFKQHKGYPTKMHLEALKLYGVTSEHRLSFKPVKIINEPR

SEQ ID NO: 138901 - protein, 132 aa, Unknown
  Bacterial polypetide isolated from the Sargasso Sea
MVRQSKRILFPVRNGFCCGVDEVGRGAIAGPVVSAAVILPRGYYPVGLDDSKKLSKSKREDLYASMKEKVQFGIGLATSKEVDRVNVHHASLLAMRRALVNLKISPEIVLIDGKYVPKNIDAFTQSVVSGDS

SEQ ID NO: 138902 - protein, 152 aa, Unknown
  Bacterial polypetide isolated from the Sargasso Sea
ILQATYVSMKKAYDQLKIVPEKILVDGFAIPSKRIKSEGIVKGDEKVQEISAASIVAKVIRDKFMILVDPVFPNFEFYKNKGYGTKLHIEALKRYRPTLIHRISFAPVKNNLPDLSVVSSVKYKDMLIKQKKTLKNINNDIKNWLSLKNLIY

SEQ ID NO: 138903 - protein, 63 aa, Unknown
  Bacterial polypetide isolated from the Sargasso Sea
NKGWKTKGGDPVANKDLWLRLLEVSQNHDVSWYWVKGHSGHPENERCDELAVNARKECSKSRK

SEQ ID NO: 138904 - protein, 166 aa, Unknown
  Bacterial polypetide isolated from the Sargasso Sea
MSHELKAWREGFRNIAGVDETGRGPLAGPVVVSAVILGRNWNENHRLDDSKALKVKEREELYEIICQEALAVSTVSMSAELVDRLNVLQASLQGMKKAVERLNPKADYALIDGNRYPEMKLPGEALVKGDSRSASIAAASIVGKVVRDRVMQGMECLYPGWGFERH

SEQ ID NO: 138905 - protein, 242 aa, Unknown
  Bacterial polypetide isolated from the Sargasso Sea
MNSDSIAIEAATDGACSGNPGPGGWGGLIIFEDNSELEIGGSEQNTTNNRMELTAAIKTLEKLKTYKLKENFKLRTDSKYVIEGYTKWIINWKKNGWKTSSGKPVQNLDLWQKIDQLRINGLIMEYVKGHSGDKQNDRVDKIATNYSKGISLESNLKKIESSVDFIEKNAPVEIQELFSRNELIQKFAEKKYLLSSPELENLLGDENHLKIKQYSLFEWRNWRLIPKDKKYWIIEKRKPNFL

SEQ ID NO: 138906 - protein, 76 aa, Unknown
  Bacterial polypetide isolated from the Sargasso Sea
MRYKIYTDGACSGNPGPGGWAAVILVDDKIKNEISGSENSTTNNKMELLAPIKAIQKFKKKSEISIYTDSTYVRDG

SEQ ID NO: 138907 - protein, 151 aa, Unknown
  Bacterial polypetide isolated from the Sargasso Sea
MGSMINKVIIYTDGACSGNPGYGGWGAYLLYEDNKKKISGYELNTTNNRMELRAAIEGLNALKRPCKVMLYTDSVYLKDGITKWIINWEKNNWKNANKKEVKNKDLWIKLLQAGKMHQIEWNWVKGHEGNEGNEIADKLATQAILHAKINQ

SEQ ID NO: 138908 - protein, 51 aa, Unknown
  Bacterial polypetide isolated from the Sargasso Sea
MPTKASPAVDAPVVVAAACDGACRGNPGPGGWGALLRFSDGRVEELGGSEA

SEQ ID NO: 138909 - protein, 138 aa, Unknown
  Bacterial polypetide isolated from the Sargasso Sea
MKINIYTDGACVGNPGPGGWAAVIIKESKKKELFGGEKLTTNNRMELTAAIKGLEHCLSEEGAQPSLKEIKIYTDSVYLKEGITVWIEKWEKNNWKTSDKKNVKNIDLWKKLKELTKSNQIEWCWIKGHSGDPMNELA

SEQ ID NO: 138910 - protein, 159 aa, Unknown
  Bacterial polypetide isolated from the Sargasso Sea
DKKKLKDSKKLTKKNLEILEKYIKKNSYWAIGSASLKEIEKFNILNASLLAMKRAIKKLNKKPSQVLIDGNKIPKIKNYNLKCVIKGDEKIPEISAASIIAKVARDRLITKMSKKFAEYAWDKNAGYGTKLHLIAIKKFGATKHHRKTFDPIHNILSLN

SEQ ID NO: 138911 - protein, 40 aa, Unknown
  Bacterial polypetide isolated from the Sargasso Sea
MGYFIFKNKGYGTKEHFLSLKANGITNLHRKSFLNKLNLV

SEQ ID NO: 138912 - protein, 176 aa, Unknown
  Bacterial polypetide isolated from the Sargasso Sea
MLKQFYEKDKIEIGIDEAGRGCLFGPVFVAGVIWLDKDPDESKEYILKDSKKCSEKKRILLKDYIKDNSIAYSVVQISEEEIDKTDILKATMKGMHQCIDEIREKLEIDMILVDGNNFDIYTDKELNPIDHECIINGDNTYKSIAAASILAKTYRDEYILNLVKENPQLSMYAIQN

SEQ ID NO: 138913 - protein, 167 aa, Unknown
  Bacterial polypetide isolated from the Sargasso Sea
MKKIIAGVDEVGRGSLIGPVYAAAVILNKKINKKKLKDSKKLSKKKREILYNYIKKNCIFAIGSASKKEIEKINILNASLLAMKRAVKKLKKKPNLVLIDGNNIPKINYYKIKNIIKGDQKIPEISAASIIAKVSRDRLITKLSKKFNRYYWDRNAGYGTKNHLSAI

SEQ ID NO: 138914 - protein, 117 aa, Unknown
  Bacterial polypetide isolated from the Sargasso Sea
MNKPITIYTDGSSIGNPGPGGYGIVMLVEGEDYKKEFSQGFKLTTNNRMELLAVIIALEKIKIKNSNVTIFTDSKYVSDAVEKGWVFDWEKKKFKNKKNPDLWMRFLNIYNEHKIKF

SEQ ID NO: 138915 - protein, 113 aa, Unknown
  Bacterial polypetide isolated from the Sargasso Sea
RELNGSEPNTTNNRMELMAAIMGLDALTRPMTVDLHTDSRYVMNGIQDWMPRWKANGWKTAAKKPVANQDLWQQLDAAVERHTVNWHWVKGHAGNPLNERCDVLARSAAESIA

SEQ ID NO: 138916 - protein, 141 aa, Unknown
  Bacterial polypetide isolated from the Sargasso Sea
MKLKIYTDGACSGNPGKGGWAAIILDNDLNQSSISGGESNTTNNRMELMATIMALKKIKKKSEITIFTDSKYVKDGITDWIKKWKLNNWKSSNKKPVKNKDLWIKLDDSCQKHKVTWRWVKAHAGNKYNNLADELAVSKTK

SEQ ID NO: 138917 - protein, 186 aa, Unknown
  Bacterial polypetide isolated from the Sargasso Sea
IAGVDEVGRGSLVGPVYAAAVILKKNLDKKKLKDSKKLTKKNREILEKYIKKNSYWSIGSASLKEIEELNILNASLLAMKRAIKKLNKKPSHILIDGNKIPKIKNYNLKYVVKGDEKIPEISAASIIAKVARDRLITKMSKKFTKYDWDKNAGYGTKLHLIAIKKFGVTKHHRKTFGPIHNILSPN

SEQ ID NO: 138918 - protein, 190 aa, Unknown
  Bacterial polypetide isolated from the Sargasso Sea
MTNKLFAGVDEVGRGCLAGPVVSCAVILKKNIKKKLLKDSKMIPFKDRLYIADHIKKNSWFSIGIASVSEIDKYNIFNASLLSMERAIKKLKKKPDLYLIDGTHGPKKIKNFKTVIKGDQKIKCISAASIVAKVFRDLYMIKLGNKFPQYSWQKNFGYGTLQHLNALKRFGISNYHRKSYRPVHNICQNK

SEQ ID NO: 138919 - protein, 144 aa, Unknown
  Bacterial polypetide isolated from the Sargasso Sea
MIAGVDEVGRGCLAGPVVAASVILKRPIKGLMDSKKLSSKKREHLSKVIIENSIFAIGAADNKEIDQINILQASLLAMQRSLDKLDVKPKKVLVDGTNIFETPIEIESIVGGDNLIPSISAASIVAKVYRDGLMMAYSKEFPNY

SEQ ID NO: 138920 - protein, 186 aa, Unknown
  Bacterial polypetide isolated from the Sargasso Sea
MKIIAGVDEVGRGSLIGPVYASAVILKKSINPKLLKDSKSLSKKEREYLYSYIKKNSTWSIGKASVKEIEKLNILQASLLAMKRAIKKLKKKPTHVLIDGNKTPDLENYNLKSVIKGDKKVPSISAASIIAKVSRDKFITALSKKNKGYNWDKNFGYGTKQHLKALKKLGITKHHRKTFSPISKKN

SEQ ID NO: 138921 - protein, 167 aa, Unknown
  Bacterial polypetide isolated from the Sargasso Sea
MKKIIAGVDEVGRGSLIGPVFAAAVILHNKVDKKKLKDSKQLSRKKREVLEKYIKKNSLWAIGYASKNEIEKLNILNASLLAMKRAIKKLKKKPKLVLIDGNKVPNMDNYKIKNVIKGDQIIPEISAASIIAKVSRDRLIKKISEKYKKFNWDKNAGYGTFEHLKAI

SEQ ID NO: 138922 - protein, 193 aa, Unknown
  Bacterial polypetide isolated from the Sargasso Sea
MKKIIAGVDEVGRGSLIGPVYAAAVILNNSINKEKIKDSKKLSKTSRENLEKYIKKNSCWAIGSASLIEIEKLNILNASLLAMKRAIIKLKKKPTLVLIDGNKLPEIKNYKLKSIIKGDQKISEISAASIIAKVSRDRLISNLSKKFKNYSWSKNAGYGTRDHMIAIKKYGLTKFHRKTFKPIHNILSLKKLV

SEQ ID NO: 138923 - protein, 124 aa, Unknown
  Bacterial polypetide isolated from the Sargasso Sea
DRLNVLKASLQGMKKAVERLNPKADYALIDGNRYPEMKLPGEALVKGDSRSASIAAASIVGKVVRDRVMQGMECLYPGWGFERHKGYPTQEHREILQKRKPSMIHRHSFQYVGNPEDLIQPSLF

SEQ ID NO: 138924 - protein, 155 aa, Unknown
  Bacterial polypetide isolated from the Sargasso Sea
MKVKAYTDGACSGNPGPGGWGVYLVAENNVGEIVKEEVLYGKNKETTNQIMELTAAIQALGSLKRKNVDITIFTDSKYVIEGITKWIFGWLKNNWSTASKKPVANRLLWEKLFNLTKNQNVEWVWVKGHAGVHGNEKADSLAVRGREEASNELIG

SEQ ID NO: 138925 - protein, 148 aa, Unknown
  Bacterial polypetide isolated from the Sargasso Sea
MKRIIAGVDEVGRGSLIGPVYAAAVILKNSIDKKKLKDSKKLSKAKRENLEKYIKKNSYWAIASASLIEIEKLNILNASLLAMKRAIQKLKKKPTLVLIDGNKLPEMKNYQLKSIIKGDQKISEISAASIIAKVSRDRLITNLSKKFN

SEQ ID NO: 138926 - protein, 140 aa, Unknown
  Bacterial polypetide isolated from the Sargasso Sea
MKLKIYTDGACSGNPGKGGWAAIIIDGKNQSIISGSENKTTNNRMELMAPIMALKKIKTKSEITIYTDSKYVKDGITEWIKKWKLNNWLSSNKKPVKNKDLWIKLDNCCQKHYVSWKWVKAHAENKLNNLADELAVSKAK

SEQ ID NO: 138927 - protein, 182 aa, Unknown
  Bacterial polypetide isolated from the Sargasso Sea
MSKLFTAGVDEVGRGCLAGPVVSAAVILKSGIKLNLLRDSKKISFKRREEISDHIKSNSFFSIGIASVDEILKFNILGASLLSMKRAIENLEIKPNLTLIDGNFAPKGLTNYKTIVNGDEKIKVISAASIIAKVYRDRFMIKLSEKFSNYAWERNFGYGTKAHLEGLKKFGVTSHHRKSFKP

SEQ ID NO: 138928 - protein, 154 aa, Unknown
  Bacterial polypetide isolated from the Sargasso Sea
MSHEQKAWCEGFRNIAGVDETGRGPLAGPVVVSAVILGRNWNENHRLDDSKALKVKEREELYEIICQEALAVSTVSMSAELVDRLNVLQASLQGMKKAVERLNPKADYALIDGNRYPEMKLPGEALVKGDSRSASIAAASIVGKVVRDRVMQGM

SEQ ID NO: 138929 - protein, 75 aa, Unknown
  Bacterial polypetide isolated from the Sargasso Sea
MQLGLDFTLVEELVAGVDEVGRGPLCGAVVTAAVILDPARPILGLNDSKKLSEARREVLFDEIREKALAWCIARA

SEQ ID NO: 138930 - protein, 139 aa, Unknown
  Bacterial polypetide isolated from the Sargasso Sea
FEQILKNSHVGIGVAYVECVDTINVLNATKHAMNTAYKKLKKRPDILLIDGNFKINTEIVNIPIIKGDQKSISIAAASIIAKVVRDRIMDKFSFVFNKYTFNKHKGYPTKNHIREIEKYGVLAIHRKTFSPVNEIIKKN

SEQ ID NO: 138931 - protein, 131 aa, Unknown
  Bacterial polypetide isolated from the Sargasso Sea
MIKIYTDGACSVNPGIGGWGAIIIFDSGEEKEISGSELETTNNRMEITAVIKSLELKELNIEDKVKIYSDSTYVINTITKNWKRNANNDLWDKLDNLLEKRIVEWEWVKGHSGNKYNDIADKLAVNAINDL

SEQ ID NO: 138932 - protein, 189 aa, Unknown
  Bacterial polypetide isolated from the Sargasso Sea
MKKIVAGVDEVGRGSLIGPVYAAAVIFNPKINKKEIKDSKKLKKIEREKLFKYIKKNSIWAIGSASIREIERLNILNASLLAMKRAIKKLKVKPNLVLVDGNKSPDLNNYITKTVIKGDQKIKEISAASIVAKVSRDKLILKMSESNKKYKWDVNAGYGTKDHINAIRKYGITRFHRKTFNPIHNMLSL

SEQ ID NO: 138933 - protein, 171 aa, Unknown
  Bacterial polypetide isolated from the Sargasso Sea
IGPVYAAAVILNKSIDKKLLKDSKTIAKEKRKILSNYIKKNSIWAIGTASVKEIEKINILQASLLAMKRAIKKLKKKPTHVLVDGNILPDLKRYSLKAVIKGDQKIPSISAASIIAKVTRDKFITKLAKINKGYYWDQNFGYGTKQHLKAIKNLGITSQHRKTFSPINKFK

SEQ ID NO: 138934 - protein, 190 aa, Unknown
  Bacterial polypetide isolated from the Sargasso Sea
MKVIIAGVDEVGRGSLIGPVYAAAVILKKKLDKKKLKDSKKLTKKNREILEKYIKKNSYWSIGSASIKEIEKFNILNASLMAMERAIKKLNKKPSIVLIDGNKIPKIKNYNIKYVIKGDQKIPEISAASIIAKVARDRLVKQMSKKFTKYAWDKNAGYGTKIHLLAIKKFGVTKHHRKTFAPIHNILSLN

SEQ ID NO: 138935 - protein, 192 aa, Unknown
  Bacterial polypetide isolated from the Sargasso Sea
MRKIIAGVDEVGRGSLIGPVYAAAVILKKNINKKEIKDSKKLNKIDREKLAKYIKKNSIWTIGSASVKEIEKLNILNASLLAMKRAIKKLKVKPNLVLIDGNKSPELRNYLVKTIIKGDQKIKEISAASIIAKVSRDKLMFKMSESFKKYKWDLNAGYGTRDHINAIRKYGVTRFHRKTFNPIHNILSLRKK

SEQ ID NO: 138936 - protein, 223 aa, Unknown
  Bacterial polypetide isolated from the Sargasso Sea
QSKAPHLANEHRYWNQGASVVAGVDEVGKGAWAGPLTIGAVVLPREGLVEGIRDSKMLTPSKRQQLSAQIRSWAQDWAVGHASARECDELGMSEAQRVATRRALDRLKSVPDRVLLDGKWNYIDWLPSTAIIKGDQESLSIAAASIIAKVERDRLMASAAEDFPAYMFQNNKGYPAPQHRMALSGYGPCVIHRKSWSFMDDLLWTGIRRTNRNEIDQEKLFVT

SEQ ID NO: 138937 - protein, 146 aa, Unknown
  Bacterial polypetide isolated from the Sargasso Sea
MKKIIAGVDEVGRGSLIGPVYAAAVILNSNIDKTKLKDSKKISRLKRKILEKYIKKNSVWAIGSASLSEIEKFNILNASLLAMKRAIKKLKKKPQLVLIDGNKIPKLKNYKLRNIIKGDQKIPEISAASIVAKVSRDKLITKMSKK

SEQ ID NO: 138938 - protein, 195 aa, Unknown
  Bacterial polypetide isolated from the Sargasso Sea
MIEDKVWSENPSKYIIGADEVGRGSFAGPICAAAVKINYSHLELLANVKDSKKLSAKKREKIFSIVQENNIEYSFKESSNNFIDQFGIKNANEKVLTDSISDIYTGNEIVYVDHFKINNFKSISVVRGEDNCRAIALASIVAKVLRDNLMIKFSEKYPEYSFEKNKGYGTKDHREAISKYGLSNIHRKSFSLKPI

SEQ ID NO: 138939 - protein, 189 aa, Unknown
  Bacterial polypetide isolated from the Sargasso Sea
MKELITAGVDEVGRGCLAGPVVSAAVIFKKGINLKLLKDSKKISFKKRKVISDHIKNNSYFAIGIASVEEIFNLNILQASLLSMRRAIEQLAVKPDLTLIDGNFAPTGLKNYKTIINGDEKIKVISAASIIAKVYRDKLMINLSEEFSNYSWEKNFGYGTKAHLEGLKKFGITSHHRKRFKPVHKILLN

SEQ ID NO: 138940 - protein, 190 aa, Unknown
  Bacterial polypetide isolated from the Sargasso Sea
MKKIIAGVDEVGRGSLVGPVYAAAVILNNKVDKKKIKDSKKLSKKKRETMNNYLKKNSVWSIGSASLKEIDKLNILNASLLAMKRAVKKLKKKPEIVLIDGNKLPKINNYKLKNIIKGDEKIPEISAASIIAKVSRDRLVSQLSKKFKNYYWNKNSGYGTKDHIKAIRKFGVTKYHRKTFQPIYNILSLK

SEQ ID NO: 138941 - protein, 153 aa, Unknown
  Bacterial polypetide isolated from the Sargasso Sea
MNKSITIYTDGSSIGNPGPGGYGIVMLVDGEDYKKEFSQGFKFTTNNRMELLAVIVALETIKIKNSNVSIFTDSKYVADAVEKGWVFDWEKKKFKNKKNPDLWIRFLNIYKEHKIKFHWVKGHSNDFYNDRCDLLATNAAKSSNLIEDLGYIN

SEQ ID NO: 138942 - protein, 190 aa, Unknown
  Bacterial polypetide isolated from the Sargasso Sea
MTRVIAGVDEVGRGSLVGPVYAAAVILKKNLDIKKLKDSKQLSKKNREILEKYIKKNSHWSIGSASTKEIEKINILNASLLAMKRAIEKLKKKPSLVLIDGNKVPIMKNYNLKFIIKGDQKIPEISAASIIAKVSRDRLITKLSKKNNKYLWNKNAGYGTKDHLSAIKKFGITKHHRKTFQPIHNILSLK

SEQ ID NO: 138943 - protein, 101 aa, Unknown
  Bacterial polypetide isolated from the Sargasso Sea
MVRQSKRILLPVRNGFCCGVDEVGRGAIAGPVVSAAVILPRGYYPVGLDDSKKLSKSKREDLYAFMEEKVQFGIGLATSKEVDRVNVHHASLLAMRRALVN

SEQ ID NO: 138944 - protein, 143 aa, Unknown
  Bacterial polypetide isolated from the Sargasso Sea
MEEIEIFTDGACRGNPGLGGWGALIRKDGKETSLWGGETDTTNNRMEMEAAIRGLESIVESSNITITTDSNYLKDGITQWLDGWKKKDWKTASKKPVKNKDLWIKLDELSNFHNVKWKWVKGHSGHRENDIADLLANKGIDEL

SEQ ID NO: 138945 - protein, 140 aa, Unknown
  Bacterial polypetide isolated from the Sargasso Sea
RESLSDYIKKNSIWAIGKASTKEIEKTNILQASLLAMKRAIKKLKKKPSHVLIDGNKIPELNNYKLKAIVKGDQKIPSISAASIVAKVSRDKFIITLSVKNKGYHWDQNFGYGTKQHLNAIKKLGVTRHHRKNFSPISKM

SEQ ID NO: 138946 - protein, 192 aa, Unknown
  Bacterial polypetide isolated from the Sargasso Sea
MKKAIAGVDEVGRGSLIGPVYAAAVILNKNIKKKEIKDSKKISKAKREILAKYIKKNSVWAIGAASLKEIEKINILNASLLAMKRAIKKLKIKPKLVLIDGNKSPKIKNYLIKTIVKGDQKIKEISAASIIAKVSRDKLINKMSKKFKKYKWDLNVGYGTKDHIKAIKKHGITKFHRKTFKPIHKILSLQKN

SEQ ID NO: 138947 - protein, 142 aa, Unknown
  Bacterial polypetide isolated from the Sargasso Sea
EILEKYIKKNSFWSVGSASIIEIEKLNILNASLLAMKRAIKKLKKKPKLVLIDGNKIPKLQNYKMKNIIKGDQKIPEISAASIIAKVSRDRLITKMSKKYKNYNWDKNAGYGTNEHLKSIRKFGVTKHHRKTFKPVHNILSR

SEQ ID NO: 138948 - protein, 190 aa, Unknown
  Bacterial polypetide isolated from the Sargasso Sea
MAGVDEVGRGCLAGPVFAAAVILKKNINTKDIRDSKKLSFDKRILLSQYIKKNSIYALGIATVEEINKINILNASLLSMKRAVSNLKIKPNIAYIDGPFAPDLNMKCKTFIKGDEKIKSIAAASIIAKVSRDLFMIKLSSKYPKYFWHKNFGYGTKDHLHSLKKHGITKHHRKKFKPIHNILFYKTRETL

SEQ ID NO: 138949 - protein, 72 aa, Unknown
  Bacterial polypetide isolated from the Sargasso Sea
FKGDKKIPSISAASIIAKVTRDKMIANLGKKIKGYHLDQNYGYGTKQHLKAIKKLGITPQHRKTFSPINKMK

SEQ ID NO: 138950 - protein, 73 aa, Unknown
  Bacterial polypetide isolated from the Sargasso Sea
MSKIIEIYTDGSCSGNPGPGGWAAIVLMNDDKYIISGFEKQTTNNRMEILASINSLKKIKEDYRIKLYTDSNY

SEQ ID NO: 138951 - protein, 220 aa, Unknown
  Bacterial polypetide isolated from the Sargasso Sea
MTTKYGLSTCYHSNDIYEIGVDEAGRGPLFGPVYTAAVVLPKDNSFNHELMRDSKKITSKKKIKEIADYIKANAIAWSIQFETEQMIDKINIRQCVLSSMHKAIKDCIHQVNTHEVQLLIDGNDFKPYTYIENDQIEYCPHVTIKGGDNLYTSIAAASILAKTARDEFIVELCNENAELEQHYGIASNKGYGAKRHMDGIRLHGITQWHRKTYGICKEYV

SEQ ID NO: 138952 - protein, 161 aa, Unknown
  Bacterial polypetide isolated from the Sargasso Sea
MSNRVNIYTDGSAIGNPGPGGYGIIMEWVNKKYIKEFSAGYQMTTNNRMELLAVIIALESLKIQPMDVIVFSDSKYVIESIDKKWVFNWEKNQFSGKKNQDLWQRYLLIHRKHRVKFQWVKGHNKHPQNERCDRLAVNAAKEKKKKIDHYFENSIKGISKS

SEQ ID NO: 138953 - protein, 157 aa, Unknown
  Bacterial polypetide isolated from the Sargasso Sea
MKKVAGVDEVGRGSLIGPVYAAAVILNKNINKKVLKDSKILPRNRREILATYIKKNSIWAVGKASAKEIEKINILNASLLAMKRAIKNLKIKPELVLIDGNKLPDMKNYNLRSVIKGDQKIASISAASIIAKVSRDKMIIKLGKKFKGYNWCQNFGY

SEQ ID NO: 138954 - protein, 186 aa, Unknown
  Bacterial polypetide isolated from the Sargasso Sea
MKIIAGVDEVGRGSLIGPVYAAAVILNKSINKKLLKDSKSLTKNKREILSKYIKKNSIWAIGKASVKEIEKINILHASLLAMKRAVKKLKKKPTLVLIDGNKSPQIKNYKLKLVIKGDQKIPSISAASIIAKVARDKMITKLGKKFKVYNWDQNYGYGTKEHLKAIKNLGITAHHRKTFSPINKIK

SEQ ID NO: 138955 - protein, 187 aa, Unknown
  Bacterial polypetide isolated from the Sargasso Sea
MVGIDEVGIGCLAGPVVAAAVILDPANPITGITDSKKISEQKRKILADQIMANAVAWAIGQASVSEIDQHNILRASHLAMQRAYGDLKSDATLVLVDGNKSPYFPVESKAVIKGDETVLAIGAASIIAKVFRDGLMEELGKKYPAYDFERNKGYPTKSHMQTLRAIGPCAQHRNSFAPVKNWNRTSY

SEQ ID NO: 138956 - protein, 225 aa, Unknown
  Bacterial polypetide isolated from the Sargasso Sea
ACSGNPGPGGWGGLIIFDDNSELEIGGSEQNTTNNRMELTAAIKTLEKLKTYQLKENFKLRTDSKYVIEGYTKWIINWKRNGWKTSSGKPVQNLDLWQKIDQLRINGLVMEYVKGHSGDKQNDRVDKIATTYSKGIFIESNLKKAESSVDFFEKIAPAEIQELFSRNELIKKFAEKKYLLSSPELNTLLGEEYHLKIKQYSLFEWRNWRLIPKDKKYWIIEKKEA

SEQ ID NO: 138957 - protein, 114 aa, Unknown
  Bacterial polypetide isolated from the Sargasso Sea
MSSDSIAIEAATDGACSGNPGPGGWGGLIIFDDNSELEIGGSEQNTTNNRMELTAAIKTLEKLKTYKLKDNFKLRTDSKYVIEGYTKWIINWKKNGWKTSSGKPVQNLDLWQKI

SEQ ID NO: 138958 - protein, 205 aa, Unknown
  Bacterial polypetide isolated from the Sargasso Sea
MGRFKNYKKKNRRTADKNIKFNILAGVDEVGRGSLVGPVYAAAVILNKSINLKILKDSKTLTKEKREYLFSYIKKNSIWAVGKASVKEIDKINILQASLLAMKRAIKKLKRKPTKVLIDGNKIPNIKNYNLRAIIKGDQKIPSISAASIIAKVSRDTFIKTLAKKNKGYNWEQNYGYGTKQHLKAIKQLGITKHHRRTFAPVSKF

SEQ ID NO: 138959 - protein, 239 aa, Unknown
  Bacterial polypetide isolated from the Sargasso Sea
MNIDSIAIEAATDGACSGNPGPGGWGGLIIFDDKSELEIGGSEQNTTNNRMELTAAIKTLEKLKTYKLKENFKLRTDSKYVIEGYTKWITNWKRNGWKTSSGKSVQNIDLWQKIDQLRINGLVMEYVKGHSGDKQNDRVDKIATNYSKGISLESKFKESESSADFFEKNAPLEIQELFSRNELIQKFADKKYLLSSPELSTLLGEENHLKIKLYSLFEWRNWRLIPKDKKYWIIEKKEA

SEQ ID NO: 138960 - protein, 239 aa, Unknown
  Bacterial polypetide isolated from the Sargasso Sea
MNSDSIAIEAATDGACSGNPGPGGWGGLIIFNDKSELEIGGSEQNTTNNRMELTAAIKTLEKLKTYKLKENFKLRTDSKYVIEGYTKWIINWKRNGWKTSSGKSVQNLDLWQKIDQLRINGLIMEYVKGHSGDKQNDRVDKIATNYSQGISIIKNSKESETSVDFFDKDAPSEIQELFSRNELIQKFADKKYLLSSLELSNLLGKENHIKIKQYLLFEWRNWRLIPKDKKYWIIEKKES

SEQ ID NO: 138961 - protein, 142 aa, Unknown
  Bacterial polypetide isolated from the Sargasso Sea
MITIYTDGACSGNPGVGGWGVVIIEDNKNEILLNGGDKDTTNNKMELTAAIQALKTFEHKSTITLITDSKYVKDGIQSWIQNWKKNGWKTAAKKPVKNKELWIELDELIARHNITWEWVKGHAGNTHNEKADYLARQYIEEM

SEQ ID NO: 138962 - protein, 143 aa, Unknown; identical to SEQ ID NO: 138944
  Bacterial polypetide isolated from the Sargasso Sea

SEQ ID NO: 138963 - protein, 197 aa, Unknown
  Bacterial polypetide isolated from the Sargasso Sea
MNNFSNSNFEAGVDEAGRGSLAGPLTAAAVILPKDYENNALNDSKRLSEKKRFQLKSIIEKDSIDFAVFFVDPYVIDKINILNSTYKAMHGALNNLKTIPSFIVVDGNRFKKFKNINHKCIIKGDAKYQNIAAASILAKTYRDSYMIDQHNSFPVFGWNKNKGYGTEFHITNIIKYGMSELHRKSFVIKKSQTRLEL

SEQ ID NO: 138964 - protein, 190 aa, Unknown
  Bacterial polypetide isolated from the Sargasso Sea
MKVIIAGVDEVGRGSLIGPVYAAAVILKKNLDKKKLKDSKKLTKKNREILEKYIKKNSYWSIGSASIKEIEKFNILNASLMAMERAIKKLNKKPSLTLIDGNKIPKIKNYNIKYVIKGDQKIPEISAASIIAKVARDRLVTKMSKKFTKYAWDKNAGYGTKIHLLAIKKFGVTKHHRKTFAPIHNILSPN

SEQ ID NO: 138965 - protein, 143 aa, Unknown
  Bacterial polypetide isolated from the Sargasso Sea
MKTVNIYTDGACRGNPGDGGWGVLIEYENFSKEIFGGMRDTTNNQMELQAAIEGLSMLKEPCEVVITTDSKYVMNGITLWIEKWKKNNWKSASKKDVKNKDLWIKLDQLTIKHNVKWNWVKGHSGHEKNETADALANKGIDNL

SEQ ID NO: 138966 - protein, 191 aa, Unknown
  Bacterial polypetide isolated from the Sargasso Sea
MIIAGVDEVGRGCLAGPVLAAAVILNDSIDSLNDSKKLSKKKREILYDEILEKATSVAVGVKWNDYIDEYNIKIASEDAMKDAINSLNVTPDKVLVDGFSLDIQIQNEGIIKGDQKYQQIMAASIIAKVTRDEIMRSFHYIYPQYDFISNSGYGTKKHLEALEQYSYTPIHRLTFKPISTNIKKCKTSLKK

SEQ ID NO: 138967 - protein, 239 aa, Unknown
  Bacterial polypetide isolated from the Sargasso Sea
MNSDSIAIEAATDGACSGNPGPGGWGGLIIFDDKSELEIGGSEQNTTNNRMELTAAIKTLEKLKTYKLKENFKLRTDSKYVIEGYTKWIINWKRNGWKTSSGKSVQNLDLWQKIDQLRINGLLMEYVKGHSGDKQNDRVDKIATNYSKGISLVNNLKESESSFDFFEKNAPPEIQELFSRNELIQKFADKKYLLSSLELSNLLGEENHLKIKQYLLFEWRNWRLIPKDKKYWIIEKNES

SEQ ID NO: 138968 - protein, 178 aa, Unknown; identical to SEQ ID NO: 138823
  Bacterial polypetide isolated from the Sargasso Sea

SEQ ID NO: 138969 - protein, 143 aa, Unknown
  Bacterial polypetide isolated from the Sargasso Sea
MKKEITIFTDGACSGNPGKGGWGAVLLYQDNEKHLSGSEKLTTNNRMELKATIEALKAIKHPSKIKLYTDSQYVKNGITEWIINWKKNGWKTANKKKVSNKELWIELDENVNLHNVEWFWVKGHSGNHYNEIADKLAVNAMNE

SEQ ID NO: 138970 - protein, 142 aa, Unknown
  Bacterial polypetide isolated from the Sargasso Sea
MKYKIYTDGACSGNPGPGGWAAVILLNDQVEEMISGSEKNTTNNKMELLAPIKAILKLKKKSEVLIFTDSTYVKDGITIWIKKWETNGWKTSSKKPVKNKDLWKKLKSLSTKHSIKWIWIKGHAQDKYNNLADHLAQRAIKN

SEQ ID NO: 138971 - protein, 228 aa, Unknown
  Bacterial polypetide isolated from the Sargasso Sea
MKNALENLSVRPNQVLIDGLDKPEIDIETKCIVKGDSKIESIMAASIIAKVTRDQMMINYSKIFYEYGFEKNKGYGTKQHMMALNNFMSTSIHRRSFQPVNKYLPTLKWLKDNNRLRWMAQKMTALYLMDLEYEIISLNYILNQKLIFDVICNQSQKINFICIKLKNDSIYNKKLESILKTEIKNYIINYFKKEHIIKSQLWQIDIMEVDLYNKKSKFEHFQGILNSI

SEQ ID NO: 138972 - protein, 166 aa, Unknown
  Bacterial polypetide isolated from the Sargasso Sea
MRELITAGVDEVGRGCLAGPVVSAAVILKKGINLNLLKDSKKITFNKREEISEHIKNNSCYAIGIASVKEILNLNILQASLLSMKRAIEKLPVRPGMTLIDGNFAPKGLKNYKTIVNGDEKIKVISAASIVAKVYRDRFMIKLSKKFSNYAWERNFGYGTKAHLSG

SEQ ID NO: 138973 - protein, 189 aa, Unknown
  Bacterial polypetide isolated from the Sargasso Sea
MVNKIFAGVDEVGRGCLAGPVVSCVVILKKNIKKKLLRDSKIIPFKDRLYIADHIKKNSWFSIGTASVSEIDKYNIFNASLLSMERAIKKLKKKPDLYLIDGTHGPKKIKNFKTVIKGDQKIKCISAASIVAKVFRDLYMIKLGNKFPQYNWQKNFGYGTLQHLNALKKFGISNYHRKSYRPVHNILSK

SEQ ID NO: 138974 - protein, 151 aa, Unknown
  Bacterial polypetide isolated from the Sargasso Sea
MVKIIVYTDGACSGNPGRGGWGAILTASEDGITVSEKEIFGGEANTTNNRMELTAAIKALEALKKKTTLTVVTDSKYLRDGMTMWLDNWIKNNWKSSQNKEIKNKDLWQKIYTLSQRHKISWHWVKGHNDHPENERADNLARKGIQNTQDN

SEQ ID NO: 138975 - protein, 192 aa, Unknown
  Bacterial polypetide isolated from the Sargasso Sea
MKKIIAGVDEVGRGSLIGPVYAAAVIFNPKINKKEIKDSKKLKKIEREKLSKYIKKNSIWAIGSASIREIETLNILNASLLAMKRAIKKLKVKPNLVLVDGNKSPDLNNYITKTIIKGDQKIKEISAASIVAKVSRDKLILKMSESFKKYKWDVNAGYGTKDHINAIRKYGITRFHRKTFNPVHNILSLKRK

SEQ ID NO: 138976 - protein, 109 aa, Unknown
  Bacterial polypetide isolated from the Sargasso Sea
MKLKIYTDGACSGNPGKGGWAAIILDDSNQLSISGGESNTTNNRMELMATIMALKKIRKKSEITIFTDSKYVKDGITDWIKKWKVNNWKSSNKKPVKNKDLWIKLDNVC

SEQ ID NO: 138977 - protein, 141 aa, Unknown
  Bacterial polypetide isolated from the Sargasso Sea
MKLKIYTDGACSGNPGKGGWAAIILDNNSNQSSISGSENNTTNNRMELLAPIMALKKIKKKSDITIFTDSKYVKDGITDWIKNWKINNWKNSNKKPVKNKDLWIKLDNACLKHKVNWKWVKAHAGNKYNNLVDELAVSNTK

SEQ ID NO: 138978 - protein, 153 aa, Unknown
  Bacterial polypetide isolated from the Sargasso Sea
MENSEKIKMYTDGACKGNPGIGGWGVLIQDSKTETELNGFSPSTTNNKMELNAVIMGLKSLNSRRIVTVITDSQYVKNGISQWIINWKRNGWRTASKKPVKNKELWQILDSLVQKHDVHWEWVRGHSGHPGNERADQLANKGIEEHLQNITLR

SEQ ID NO: 138979 - protein, 104 aa, Unknown
  Bacterial polypetide isolated from the Sargasso Sea
KRAIKKLKKKPSHVLIDGNKLPNMKNYKLKSIIKGDQKIPSISAASIIAKVTRDKMISDLGKKFKGYNWQKNFGYGTSQHLKAIKILGITKHHRKTFSPINKLK

SEQ ID NO: 138980 - protein, 195 aa, Unknown
  Bacterial polypetide isolated from the Sargasso Sea
MIEDKIWSEDPNRFIIGADEVGRGSFAGPICAAAVKINYSHLEYLSSVKDSKKLSAKKREAIFAMVQKNSIEYSFKESSNIFIDQFGIKNANEKVLTDSISDIYTGREAVYVDHFKINDFKSISVVRGEDNCRAIALASIIAKVFRDNLMIKYAEKYPEYLFEKNKGYGTKDHRKAISKYGLSNIHRKSFNLKPI

SEQ ID NO: 138981 - protein, 162 aa, Unknown
  Bacterial polypetide isolated from the Sargasso Sea
MIKLNISKEEIDIFTDGSCSGNPGPGGWAGVIIHDLISILTGHETDTTNNRMELMATINIIKLIDPRININLYTDSNYVKNGITVWIHNWIKNNWKNSQKKEVANKDLWLQLYDLNNKYRINWNWVKAHENNKYNNLADEYAVLSMKNQKSYNIENYTTTNV

SEQ ID NO: 138982 - protein, 190 aa, Unknown
  Bacterial polypetide isolated from the Sargasso Sea
MKIIAGVDEVGRGSLIGPVYAAAVILNRSVNYKILKDSKTLTKEKREILFNYIKKNSIWATGKASVKEIDKINILQASLLAMKRAIKKLKKKPSQILIDGNKIPDLKNYNLRAIVKGDQKIPSISAASIIAKVTRDNFIKTLAKKNKGYHWDQNFGYGTNQHLKAIKKLGVNKHHRKTFSPISKLKKHNI

SEQ ID NO: 138983 - protein, 198 aa, Unknown
  Bacterial polypetide isolated from the Sargasso Sea
MKVNIIIKKKIISGVDEAGRGSWAGPVVSAAVILKNYPNAKELKDSKIINKKDRNEIFDKLKNNSIIGVGFSSVKEIEKFNILQATFLSMKRAINSLTLTPDLLLIDGNRVPPKLTIEAYPIIKGDKFISEISAASIVAKVIRDTHMKILDKKYPGYGFTNNAGYGVKLHLDALKTLGVTPIHRQTFKPIHNILYEEN

SEQ ID NO: 138984 - protein, 185 aa, Unknown
  Bacterial polypetide isolated from the Sargasso Sea
MILGLDEVGRGSIAGPVVSAAVILGENKIFGLKDSKDLSEKKRIEYSNQIKELSLEWSIGLSSVEEIDKYNIREATKLSMIRAISRLKKPFSKIIIDGNDNFFNDKSVEFIIKADTKIREVMAASIIAKVYRDEYMRELENKFKGYFFDKHKGYSTKLHKSMIKKYGVTNIHRKSFKPIKQFLNE

SEQ ID NO: 138985 - protein, 193 aa, Unknown
  Bacterial polypetide isolated from the Sargasso Sea
MKKVIAGVDEVGRGSLVGPVFAATVIFKKNVDKKKIKDSKKLSKNKRNLLEKYIKKNSIWTIGSASLKEIEKLNILNASLLAMQRSIKKLKSKPSLIMIDGNKLPIMNGYKLKSIVKGDQKVPEISAASIIAKVSRDRLISKMSKKFVKYGWNKNSGYGTKQHLKAIKKFGVTKHHRKTFVPIHNILSLKKIL

SEQ ID NO: 138986 - protein, 144 aa, Unknown
  Bacterial polypetide isolated from the Sargasso Sea
MSIKVYTDGACKGNPGPGGWGALIIDGDSRKELYSGNPDTTNNQMEMQAAIEALKHLKGTSELIELYTDSNYLRKGITEWIVKWKSNNWRTASKKPVANRDLWMEVDELSNTLNVEWHWIKGHDGDPGNERADYLANLGADSVS

SEQ ID NO: 138987 - protein, 145 aa, Unknown
  Bacterial polypetide isolated from the Sargasso Sea
MNNVIAGVDEVGRGSLVGPVFAATVIFKKDVDKKKFKDSKLLSKVKRENLEKYIKNNCIWTIGSASLQEIEKLNILNASMLAMKRSIKKLKIKPSLILIDGNKSPHLIGYNLKCIVKGDKKIPEISAASIIAKVARDRLITKMSK

SEQ ID NO: 138988 - protein, 205 aa, Unknown
  Bacterial polypetide isolated from the Sargasso Sea
MQEKKEEDLQQALNKVFEVGIDEVGRGAIFGPVFAAAVVLNEKNISILKQFGVTDSKKLTPKRRKLLLPKILLLSSDYGIGQSSAKEIDKLGIRVATELSMIRALKKLKEKPSELIIDGPLLLRPWDGMQKNIVSGDSKFISIASASIVAKVYRDDLMERLEKKYSGYMIFKNKGYGTREHLSLIKKNGINELHRKSFLKKSNLI

SEQ ID NO: 138989 - protein, 158 aa, Unknown
  Bacterial polypetide isolated from the Sargasso Sea
MTKKINIYTDGSSIGNPGPGGYGIIMISDNGEYKKEFSKGFKLTTNNRMELLAVIVALESIKIKNCNAEVFTDSKYVSDAVDKKWVFEWEKINFKKKKNPDLWKRFLMIYRKHNVTFTWIKGHNNHPENERCDYMANNSAKSSNLISDTYYEKNIKGL

SEQ ID NO: 138990 - protein, 178 aa, Unknown
  Bacterial polypetide isolated from the Sargasso Sea
MIAGVDEVGRGCLAGPVIAASVILKRPIKGLMDSKKLSSKQRENLSQEIIENSIFAIGSADNHEIDKINILQASLSAMQRSLEKLEVKPKKILVDGAHIFETSIEIESIVGGDNLIPSISAASIVAKVYRDKLMMAYSEEFPEYGFHKHKGYPTKFHKEMLKRYGLTRIHRKTFKGVD

SEQ ID NO: 138991 - protein, 143 aa, Unknown
  Bacterial polypetide isolated from the Sargasso Sea
MKTVNIYTDGACRGNPGDGGWGVLIEYENVSKEYFGGELNTTNNKMELKAAIEGLKALKEPCIVNLTTDSKYVMQGITAWIDNWKKNNWKNASKKDVKNKDLWVELDKYVAKHNVRWNWVKGHSGHEKNEIADALANKGIDNI

SEQ ID NO: 138992 - protein, 155 aa, Unknown
  Bacterial polypetide isolated from the Sargasso Sea
MKKSIRIYTDGSSIGNPGPGGYGIVMLVEGENYKKEFSQGFRLTTNNRMELLAVITALEKIKIKNSNVNIFTDSKYVSDAVEKGWVFEWEKKNFKNKKNSDLWVRFLNIFNEHKIKFHWVKGHSNNLYNDRCDLLANNAARGSSLIEDSGYINKN

SEQ ID NO: 138993 - protein, 239 aa, Unknown
  Bacterial polypetide isolated from the Sargasso Sea
MNIDSIAIEAATDGACSGNPGPGGWGGLIIFDDKSELEIGGSEQNTTNNRMELTAAIKTLEKLKTYKLKENFKLRTDSKYVIEGYTKWIINWKRNGWKTSSGKSVQNLDLWQKIDQLRINGLVMEYVKGHSGDKQNDRVDKIATNYSKGISLKSNLKESESSEEFFEKNAPSETQELFSRNELIQKFADKKYLLNSLELSNLLGEENHINIKQYLLFEWRNWRLIPKDKKYWIIEKKES

SEQ ID NO: 138994 - protein, 141 aa, Unknown
  Bacterial polypetide isolated from the Sargasso Sea
MITIYTDGACSGNPGIGGWGAVIIKEKKITHLSGGLDETTNNQMELTAAIKALEYFKEPEKIAIHTDSKYVMNGIESWINNWKKNGWKTASKKPVKNKELWMALDTVISKHEIEWHWVKGHSGDENNEIADQLARKYIEKY

SEQ ID NO: 138995 - protein, 196 aa, Unknown
  Bacterial polypetide isolated from the Sargasso Sea
MIENKVWSNNPNQFVIGADEVGRGSFAGPIVGAAVKINKSHEDLLVEVKDSKKLSEKKRNQIYELISNNNVAYSISECSNNIIDEVGISEANKIVLENSIEEIYTGKEKVYVDHFKINKFSSVSLVRGEDNSKAIALASIIAKVYRDNLMKKLSKKYPQYLFENNKGYGTQAHRESIEKYGLTEIHRRSFNLEPNK

SEQ ID NO: 138996 - protein, 183 aa, Unknown
  Bacterial polypetide isolated from the Sargasso Sea
MKNIIAGVDEVGRGAIAGPVIAAAVILKKDIEGLKDSKKISEKKRIELSNKIKKYSYFAIGSASHNEIDKFNILNASLLAMKRAILNLPIKPTKILVDGIHKPDLDIEMEVIIGGDSLIKQISAASIIAKVYRDNLMYKFDKKFSVYGFKNNKGYGTKQHYSALEINGHSTIHRRTFKGVLKR

SEQ ID NO: 138997 - protein, 158 aa, Unknown
  Bacterial polypetide isolated from the Sargasso Sea
MSLVSIFSDGSSLGNPGPGGYGVIMRWKNEEIKISQGYRETTNNRMELLGPIEALSKLKKPEEVVITTDSRYVIDGIEKGWAKKWKKNNWMRDKKNKALNADLWDRLLDLCEFHQKIEFVWVKGHKGHAENELCDLLAKDAASSDSLLIDENFEKKEN

SEQ ID NO: 138998 - protein, 143 aa, Unknown
  Bacterial polypetide isolated from the Sargasso Sea
MDKIEIFTDGACRGNPGDGGWGALIVVNSNESFIYGGERNTTNNKMELMAAIKALDHFDKPSTVTLTTDSEYVRKGITEWIENWKVRGWKTASKKPVKNRELWELLDNLDKKHNVNWKWVKGHSGHRENEIADQLANKGIDEL

SEQ ID NO: 138999 - protein, 124 aa, Unknown
  Bacterial polypetide isolated from the Sargasso Sea
GWGALIRKDGKETSLWGGETDTTNNRMEMEAAIRGLESIVESSNIIITTDSNYLKDGITQWLDGWKKKDWKTASKKPVKNKDLWIKLDELSNFHNVKWKWVKGHSGHRENDIADLLANKGIDEL

SEQ ID NO: 139000 - protein, 93 aa, Unknown
  Bacterial polypetide isolated from the Sargasso Sea
VLVDGNRLPSLIFNDIIIEGDAIVKGDEKVPQISAASILAKVYRDKMMENFDKIYDGYLFSEHKGYGTKKHIDIISSLGPSPQHRLTFKPFSS

SEQ ID NO: 139001 - protein, 197 aa, Unknown
  Bacterial polypetide isolated from the Sargasso Sea
MSEYVVGVDEVGRGSLVGSAIICAFRSQNSLFDKLPFSVSDSKKINKKKREEIYEYFRLNKGFDYNYQIIFGKKKFIERFNIHNVVLQSMKQSIILLSKKSDTIIIDGKFIPSEMKGYKVKSLIKADDKINQVSAASIIAKVFRDKLLLKLHSLDGNYQWNKNAGYGTKSHLSAINTHGVSKYHRNTNQPISKLIKK

SEQ ID NO: 139002 - protein, 144 aa, Unknown
  Bacterial polypetide isolated from the Sargasso Sea
MDKVTFITDGACSGNPGPGGWCVIIKKGDKVNEFFGGDLETTNNKMELTAVIKGFENLNNISEVLVKTDSTYVINGITKWLPNWKAKGWINSAKKPVANKELWEQLESLISKHKVDWLWVKGHSGDYENERADELARKGLTDNL

SEQ ID NO: 139003 - protein, 91 aa, Unknown
  Bacterial polypetide isolated from the Sargasso Sea
MENKIPKIKNYNLKYIVKGDEKIPEISAASIIAKVSRDRLITKMSKKYIKYSWNKNAGYGTKDHMSAIKKFGITKYHRKTFKPIHNILSLK

SEQ ID NO: 139004 - protein, 198 aa, Unknown
  Bacterial polypetide isolated from the Sargasso Sea
MNKFSKFKYEAGIDEAGRGSLAGPVTAAAVILGKKFENKNLNDSKKLSPKKRLELKKYIEKNALAYSVAFVSSSHIDKNNILNSTFKAMHNSIEGLDIEPNFILVDGKLFKPYMNLEHKCIIKGDQKYQNIAAASILAKTYRDEYMSNLHLKYPEYNWIKNKGYGTKFHIDMITKYGRTEYHRKSFQIKSNQQTLKFN

SEQ ID NO: 139005 - protein, 58 aa, Unknown
  Bacterial polypetide isolated from the Sargasso Sea
MAEERGRVVAAATDGACSGNPGPGGWGALLRFEDGSVEEFGGHDPATTNNRMELQAAL

SEQ ID NO: 139006 - protein, 75 aa, Unknown
  Bacterial polypetide isolated from the Sargasso Sea
MRVKAYTDGACSGNPGPGGWGVYLVAENNVGEIIKEEVLYGKDKETTNQIMELTAAIQALESLKRKNVEITISPT

SEQ ID NO: 139007 - protein, 190 aa, Unknown
  Bacterial polypetide isolated from the Sargasso Sea
MKFIIAGVDEVGRGSLIGPVYAAAVILKKKLDKKKLKDSKKLTKKNREMLEKYIKKNSYWSIGSASLKEIEKLNILNASLLAMKRAIKKLNKRPSCVLIDGNKIPKIKNYNLKYVIKGDEKIPEISAASIIAKVARDRLITKMSKKFVKYAWDKNAGYGTKLHLIAIKKFGITKYHRKTFSPIHNILSPN

SEQ ID NO: 139008 - protein, 187 aa, Unknown
  Bacterial polypetide isolated from the Sargasso Sea
MTSQIYAGVDEVGRGCLAGPVVSAAVILKKEIDCNILKDSKKLSERKRILIADYILNHSLSLGIGVCSNYIVDDINIHNASLLAMKRAIMNLSIKPSQVLIDGLFAPHVDVETSTIIKGDEKIPEISAASIIAKVLRDNYMAYLDRIAFGYGFSKHKGYATKEHVLALELLGPSIFHRFSFKPVCEL

SEQ ID NO: 139009 - protein, 165 aa, Unknown
  Bacterial polypetide isolated from the Sargasso Sea
MGLKLSFSGSLEAGIDEAGRGSLAGPVTAAAVILPDNFNSEILDDSKKISKLKRNKLRKIIEKEAVAFSVINIESKIIDEINILNATIKAMHLAIQNLKVIPKHLLIDGNFFYDYKNIPHTCIIKGDGKYQNIAAASILAKTYRDDHMLNLNKINCNYGWNKNKG

SEQ ID NO: 139010 - protein, 102 aa, Unknown
  Bacterial polypetide isolated from the Sargasso Sea
MELMAAIKALETVKEMCEIDLYTDSKYVKQGITEWIIKWKVNGFKNSKKKPVVNADLWVQLDDLTSKHKINWYWVKGHAGHEFNERADLLANKGLDDMLESS

SEQ ID NO: 139011 - protein, 184 aa, Unknown
  Bacterial polypetide isolated from the Sargasso Sea
MKIIAGVDEVGRGSLIGPVYAAAVILNKTINLKYLKDSKKLTKEKREFLSNYIKKNSIWAIGKASNKEIDKINILQASLLAMKRAINKLKKKPSYILVDGNKLPDLKNFKMKAIVKGDQKIPVISAASIIAKVSRDKFITSLAKKNSGYYWHLNFGYGTKQHLGAIKKLGVSKHHRKTFAPIRK

SEQ ID NO: 139012 - protein, 178 aa, Unknown
  Bacterial polypetide isolated from the Sargasso Sea
MIAGVDEVGRGCLAGPVVAASVILKRPIKGLMDSKKLSSKKREHLSQVIIENSIFAIGVADNIEIDQINILQASLLAMQRSLEKLDVKPKKVLVDGAHIFKTPIEIESIVGGDNLIPSISAASIVAKVYRDRLMMTYSREFPNYGFDKHKGYPTKLHKEMLKRYGLTRIHRRTFKGVN

SEQ ID NO: 139013 - protein, 192 aa, Unknown
  Bacterial polypetide isolated from the Sargasso Sea
MKKIIAGVDEVGRGSLIGPVYAAAVIFNSKINKKEIKDSKKLKKIEREKLSRYIKKNSIWAIGSASIREIETLNILNASLLAMKRAIKKLKVKPNLVLVDGNKSPDLNNYITKTIIKGDQKIKEISAASIVAKVSRDKLILKMSESFKKYKWDLNAGYGTKDHIKAIRKYGITRFHRKTFNPIHNILSLKKK

SEQ ID NO: 139014 - protein, 190 aa, Unknown
  Bacterial polypetide isolated from the Sargasso Sea
MTKAIAGVDEVGRGSLVGPVYAAAVVLKKKIIKKKFKDSKKLSKKNRKILYKYIKKNSFWAIGSASLKEIEKFNILNASLLAMKRAITKLKKKPGLVLIDGNKIPKMKNYNLKNIIKGDQKIPEISAASIIAKVSRDRFIAKLSKNFKKYSWHKNFGYGTKDHIQAIKKFGITKHHRKTFMPVHNMLSLR

SEQ ID NO: 139015 - protein, 140 aa, Unknown
  Bacterial polypetide isolated from the Sargasso Sea
MKLKIYTDGACSGNPGKGGWAAIILDDTNQSSISGSESNTTNNRMELMAPIMALKKIRKKSEITIFTDSKYVKDGITDWIKKWKVNNWKNSNKKPVKNKDLWIKLDNVCIKHKVTWKWVKAHAGNKYNNLVDELAVSKTK

SEQ ID NO: 139016 - protein, 189 aa, Unknown
  Bacterial polypetide isolated from the Sargasso Sea
MIEAGVDEAGRGPIAGPVFAAAVILGKKHSIFNLNDSKKISEKRRELLAEEIKVNAISWSIGISTVKEIDDINILRASLLAMRRAIDGLDVRPELISVDGQFSPETDLKVRTIIKGDQSNENIMAASILAKVYRDNYMKELDKSVPEYGFKQHKGYPTKMHLEALESYGITLEHRLSFKPVRNINESTR

SEQ ID NO: 139017 - protein, 98 aa, Unknown
  Bacterial polypetide isolated from the Sargasso Sea
SLEKLDVKPKKVLVDGAHIFKTPIEIESIVGGDNLIPSISAASIVAKVYRDRLMMTYSKEFPNYGFDKHKGYPTKLHKEMLKRYGLTRIHRRTFKGVN

SEQ ID NO: 139018 - protein, 200 aa, Unknown
  Bacterial polypetide isolated from the Sargasso Sea
MSEYVVGVDEVGRGSLVGSAIVCAFRSQNSFFQALPFDVSDSKKINKKKREEIYNYFKLNKGFNYNYQIIVGKKKFIEKFNIHNVVLQCMKKSIILLSKKTDTVIIDGKFIPNGMEDYKVKALVKADDKINQVSAASIIAKVYRDKLITKLHLKDNVYQWNKNAGYGTKNHLDAIYSHGVSKFHRTTYQPISRLIKKLST

SEQ ID NO: 139019 - protein, 142 aa, Unknown
  Bacterial polypetide isolated from the Sargasso Sea
MRYKIYTDGACSGNPGPGGWAAIILVDDKIKDEISGSEKNTTNNKMELLAPIRAIQKFKKKSEILIYTDSTYVKDGITTWIKKWEKNGWKTASKKPVKNIELWKKLKNLSSKHSIKWIWIKGHAQNKYNNLVDEIAQGAIKR

SEQ ID NO: 139020 - protein, 192 aa, Unknown
  Bacterial polypetide isolated from the Sargasso Sea
MRKIIAGVDEVGRGSLIGPVYAAAVILKKNIRKKEIKDSKKLTKIEREKLAKFIKKNSTWAIGSASVKEIEKLNILSASLLAMKRAIKKLKVKPNLVLIDGNKSPELSNYLIKTIIKGDQKIKEISAASIIAKVSRDKLMLKMSESFKKYKWDLNAGYGTRDHINAIRKYGVTRFHRKTFNPIHNILSHRKK

SEQ ID NO: 139021 - protein, 190 aa, Unknown
  Bacterial polypetide isolated from the Sargasso Sea
MKFIIAGVDEVGRGSLIGPVYAAAVILKKKLDKKKLKDSKKLTKKNREKIEKYIKKNSYWSIGSASLKEIEKLNILNASLLAMRRAIKKLNKKPSLVLIDGNKIPKIKNYNLKYVIKGDEKISEISAASIIAKVARDRLISKMSKKFTQYAWDKNAGYGTKIHLLAIKKFGVTKHHRKTFAPIHNILSPN

SEQ ID NO: 139022 - protein, 156 aa, Unknown
  Bacterial polypetide isolated from the Sargasso Sea
MTNPDIIIYTDGSSRGNPGPGGYGIVIQKYDTNYSKEFSEGFRKTTNNRMELLAVIVALEKLKKPNQKVHVYTDSKYVSESVEKKWVNRWEKKGFKNKKNPDLWIRFLKIFRKHEVCFFWIKGHNNNPGNERCDELAFNASLKQKLLIDAEYESKK

SEQ ID NO: 139023 - protein, 119 aa, Unknown
  Bacterial polypetide isolated from the Sargasso Sea
MKQVIIYTDGACRGNPGPGGWGALIKFGSEEKEIYGGQANTTNNQMELAAAIEGLASLKVSCSVDLFTDSKYVMDGITKWIQNWKKNNWRTAAKKDVKNKELWQKLDQLISQHQYNGIG

SEQ ID NO: 139024 - protein, 144 aa, Unknown
  Bacterial polypetide isolated from the Sargasso Sea
MASKKVVMYTDGACSGNPGNGGWGAYIEIDDKKIELSGSENNTTNNRMELKAVIYALDYLNEKRDIIIFTDSKYVMQGIQEWIKKWKTNDWKTAQKKDVKNKDLWVELDNLTDKHSIKWEWVKGHSGDYGNEIADKLAVAQIKR

SEQ ID NO: 139025 - protein, 140 aa, Unknown
  Bacterial polypetide isolated from the Sargasso Sea
MKLKIYTDGACSGNPGKGGWAAIILDDSIQSSISGSENNTTNNRMELMAPIMALKKIKMKSEITIFTDSKYVKDGITDWIKKWKVNNWKSSNKKPVKNKDLWIKLDNACLKHKITWKWVKAHAGNKYNNLVDELAVSKTK

SEQ ID NO: 139026 - protein, 192 aa, Unknown
  Bacterial polypetide isolated from the Sargasso Sea
MKKIIAGVDEVGRGSLIGPVYAAAVILNNNINKKELKDSKKLNKIKREVLAKYIKKNSTWAIGSASLKEIETINILNASLLAMKRAIIKLKKKPKIVLIDGNKSPKIKNYFIKTIIKGDQKIPEISAASIIAKVSRDKLITDISKKFKSYKWHLNAGYGTKEHLRAIKKFGVTKFHRKTFKPIHNILSLQKN

SEQ ID NO: 139027 - protein, 191 aa, Unknown
  Bacterial polypetide isolated from the Sargasso Sea
MKKTLAGVDEVGRGSLIGPVFAAAVILNNDINKKILKDSKSLSKNKRENLEKYIKKNSKWSVGSASLKEIEKYNILNASLLAMKRAIKKLKIKPKIILVDGNKIPDMRSYNLKYVIKGDQKIPEISAASIIAKVSRDRLIKKLAKIHHRYFWHKNAGYGTKDHLQALKKFGVTKYHRKKFKPIHNILSLEK

SEQ ID NO: 139028 - protein, 178 aa, Unknown
  Bacterial polypetide isolated from the Sargasso Sea
MIAGVDEVGRGCLAGPVIAASVILKRPIKGLMDSKKLSPKKRENLSQEIIENSIFAIGAADNHEIDKINILQASLLAMRRSLEKLDVKPKKILVDGTHIFETSIEIESIVGGDNLIPSISAASIVAKVYRDKLMMAYSEEFPDYGFHKHKGYPTKFHKEMLKRYGLTRIHRKTFKGVN

SEQ ID NO: 139029 - protein, 186 aa, Unknown
  Bacterial polypetide isolated from the Sargasso Sea
MITAGVDEVGRGCLAGPVVSAAVVLKKSINLNLLKDSKKISFNKREEISEHIKKNSYYALGIASVEEILNLNILQASLLSMKRAILKLEIKPGLTLIDGKFAPKGLKNYKTIVNGDEKIKVISAASIIAKVYRDRFMIRLSKKFSNYAWDRNFGYGTKAHFEGLKKFGVTSHHRKSFKPIHKILSN

SEQ ID NO: 139030 - protein, 153 aa, Unknown
  Bacterial polypetide isolated from the Sargasso Sea
MRARVFTDGSCSGNPGPGGWAWIVPNGSFAAGYSPDTTNQRMELTAAIEAVTTLKGPLEIVSDSTYVVNCFRDSWWKGWLQRDWKNSQRKPVANKDLWEPLIAEYQNRDLLFTWVKGHGGDQWNDYADRLAVEAGYLQADRSGSQPPDEIILP

SEQ ID NO: 139031 - protein, 144 aa, Unknown
  Bacterial polypetide isolated from the Sargasso Sea
MDTITLVTDGACSGNPGPGGWCVIVKKENEIKEFFGGELKTTNNKMELTAVIKGFENIDSYSNVTVKTDSTYVINGITKWLANWKKKGWINAAKKPVANKELWEKLESLVSNHKVKWEWVKGHSGDAENERADELARKGIQNII

SEQ ID NO: 139032 - protein, 118 aa, Unknown
  Bacterial polypetide isolated from the Sargasso Sea
INILNASLLAMKRSILKLKIKPKIVKVDGNKKPNVNNLNIKSVVRGDQKIPEISAASILAKVSRDRLIKKMSKKFKAYLWDKNVGYGTRDHLSAIKKFGITKHHRKTFKPIHNILSPK

SEQ ID NO: 139033 - protein, 144 aa, Unknown
  Bacterial polypetide isolated from the Sargasso Sea
MDSDILHIYTDGACSGNPGRGGWGVYIEKGIEKIELNGSDEDTTNNRMELVAVIQALRYVDQNSKIKLFTDSKYVMQGIQEWILKWKTNDWKTANKKDVKNKDLWMDLDELVELHNIDWIWVKGHSGDFGNEIADKLATSAISN

SEQ ID NO: 139034 - protein, 144 aa, Unknown
  Bacterial polypetide isolated from the Sargasso Sea
MSIKVYTDGACRGNPGPGGWGVYILDGNEQKEFYGGSPSTTNNQMEMQAALEALIYLKDRNEHIELFTDSNIVKKGMTEWMENWKRNNWKNSNKKTVKNKEIWMQLDEASKSLNVTWTWVKGHDGDPGNEKADFLANKGADSVS

SEQ ID NO: 139035 - protein, 54 aa, Unknown
  Bacterial polypetide isolated from the Sargasso Sea
MSVKALNAETYQRPQVQLICGVDEVGRGPLVGAVVTAAVILDPNNPIVGLNDSK

SEQ ID NO: 139036 - protein, 191 aa, Unknown
  Bacterial polypetide isolated from the Sargasso Sea
MKKIIAGVDEVGRGSLVGPVYAAAVILNKEINRKILKDSKKLNKIQRETLAKYIKKNSVWALGSASIKEIEKINILNASLLSMKRAIKKLKLKPRKVLIDGNKPPDLKNYVIKTIVKGDEKIPEISAASIIAKVERDKLMKKMSFSFKKYGWDNNAGYGTKDHIKAIKKFGVTRFHRKTFQPIHKILSLKK

SEQ ID NO: 139037 - protein, 304 aa, Unknown
  Bacterial polypetide isolated from the Sargasso Sea
MQSIQPIQIYTDGSCKGNPGPGGWAAVIFSNGQIIKELSGGDANTTNNKMEITAVIKGLQAIPSSSKIDIFSDSSYVINSMTRNWKRNVNKDLWSQLDFEAARHQLTWYWVKGHSGDPGNELADKLAYAAADAASKGDTVMDQHQPSEGLTHIDEGGNASMVDVADKNVTVREATAVGAVTMSKETLNLIKQGLIKKGDVFTVAQLAGIMGAKKTSDLIPLCHPLPLEKITVELKIEESTSSINIEGYAKTSSKTGVEMEALTAVSIAALTIYDMAKASDRQMTITDIKVIKKSGGRSGDLDFS

SEQ ID NO: 139038 - protein, 198 aa, Unknown
  Bacterial polypetide isolated from the Sargasso Sea
MNQKNAKIFIGVDEAGRGCLAGPVVSASVAIYEDQIINGVNDSKLLSPKKRESLYDVIQNECLGFSIKSIDNHVIDEKNILVATLESMKEAIDAIEIAADEIVIDGPHKPAMHNDRDLITRGVIGGDKLFHCISAASIIAKVYRDRFMIQLHQKFPEYNFQKNKGYPTKDHIEVIKTLGPSPYHRLTFKPELYDESLL

SEQ ID NO: 139039 - protein, 196 aa, Unknown
  Bacterial polypetide isolated from the Sargasso Sea
MIENKVWSNNPNQFVIGADEVGRGSFAGPIVGAAVKINKSHEDLLIEVKDSKKLSEKKRNQIFELISNNNVVYSISECSNNIIDEIGISEANKIVLENSIKEIYTGAEKVYVDHFKINKFSSVSLVRGEDNSKAIALASIIAKVYRDNLMKKISKNYPQYLFENNKGYGTQAHRESIEKHGLTDIHRRSFNLEPNK

SEQ ID NO: 139040 - protein, 205 aa, Unknown
  Bacterial polypetide isolated from the Sargasso Sea
MGRPKKNKKKSRRFKYYNLMKIIAGVDEVGRGSLVGPVYAAAVILKKSINTKLLKDSKSISSSKRKVLFSHIKKNSIWAIGKASLKEIEQLNILNASLLAMKRAIKKLKKKPSHVLIDGNKLPELKNYKLKSIIKGDQKIPSISAASIIAKVTRDKMISNLSKKFKGYSWQKNFGYGTSQHLKAIKVLGITKHHRKNFSPINRLK

SEQ ID NO: 139041 - protein, 193 aa, Unknown
  Bacterial polypetide isolated from the Sargasso Sea
MKKVIAGVDEVGRGSLVGPVFAATVIFKKNIDKKKIKDSKQLSRNQRNLLEKYIKKNSVWAVGSASLIEIEKLNILNASLLAMKRSIKKLKSKPSLIMIDGNRLPIMSGYKLKSIIKGDQKVPEISAASIIAKVSRDRFISKMSENFKKYAWNKNSGYGTKQHLSAIKKFGVTKYHRKTFSPIHNILSLKNTS

SEQ ID NO: 139042 - protein, 190 aa, Unknown
  Bacterial polypetide isolated from the Sargasso Sea
MKKIKLIAGVDEVGRGCLAGPVVSCAVIFKGKFKKSEIKDSKTLTFKKRAELSKYIKKNSYYGIGLASVNEIEKYNILGATLISMERAINKLSVKPHKILIDGLFAPKNITNCKTIIRGDKKFKCISAASILAKVFRDKLMIKLSKKYKNYNFEHNFGYGTKKHLSGIKKFGITTIHRKTFQPIHNILMK

SEQ ID NO: 139043 - protein, 92 aa, Unknown
  Bacterial polypetide isolated from the Sargasso Sea
VKPKKILVDGTHIFETSIEIESMWEGDNLIPSISAASIVAKVYRDKLMMAYSEEFPDYGFHKHKGYPTKFHKEMLKRYGLTRIHRKTFKGVN

SEQ ID NO: 139044 - protein, 197 aa, Unknown
  Bacterial polypetide isolated from the Sargasso Sea
MKKLVAGVDEVGRGSLIGPVCAAAVVFKKGFNKKMVKDSKKLSPKKREYLENYIKKNSYWAIGTASTKEIEKINILNASLLAMERSILKLKVKPKMIKVDGNKKPSINNLEIRTVIKGDQKIPEISAASIIAKVSRDRLIKKISRKFQGYFWEKNAGYGTKDHMLAIRKLGITKHHRKTFKPIHNILSLKVVQDTNS

SEQ ID NO: 139045 - protein, 142 aa, Unknown
  Bacterial polypetide isolated from the Sargasso Sea
MRYKIYTDGACSGNPGPGGWAAIILVDDKIQDEISGSEKNTTNNKMELLAPIRAIQKFKKKSEILIYTDSTYVKDGITTWIKKWEKNGWKTASKKSVKNIELWKKLKNLSSKHSIKWIWVKGHAQNKYNNLVDEIAQGAIKR

SEQ ID NO: 139046 - protein, 142 aa, Unknown
  Bacterial polypetide isolated from the Sargasso Sea
MITIYTDGACSGNPGVGGWGVVIIDDNKNETFLNGGDNHTTNNKMELTAAIQALKAFEKERTITLITDSKYVKDGIQSWIQNWKINGWKTAAKKPVKNKELWIELNELIAKHNITWEWVKGHAGNTHNEKADYLARRYIEEM

SEQ ID NO: 139047 - protein, 143 aa, Unknown
  Bacterial polypetide isolated from the Sargasso Sea
MKTVNIYTDGACRGNPGIGGWGVLIEFGDISKQHFGGENNTTNNKMELKAAIEGLKLLKEPCNVNLTTDSKYVMQGITTWIDNWKKNNWKNASKKDVKNKDLWVELDKYVSKHNVKWHWVKGHAGHEKNEIADALANKGIDSL

SEQ ID NO: 139048 - protein, 186 aa, Unknown
  Bacterial polypetide isolated from the Sargasso Sea
MKVIAGVDEVGRGSLIGPVFAAAVILNKSINKKLLKDSKSLTKLKREKLSKYIKKNCEWSVGKASVKEIEKINILQASLLAMKRAIKKLRIKPSLVLIDGNNLPEIKNYNLKAITKGDQKIPSISAASIIAKVSRDKMITNLGKKFKGYYLHQNFGYGTKQHLKAIKNLGITIHHRKTFSPNNKTK

SEQ ID NO: 139049 - protein, 186 aa, Unknown
  Bacterial polypetide isolated from the Sargasso Sea
MKIIAGVDEVGRGSLIGPVYASAVILKKSINPKLLKDSKSLSKKEREYLCTYIKKNSTWSIGKASVKEIEKLNILQASLLAMKRAIKKLKKKPTHVLIDGNKTPELENYNLKSVIKGDKKIPSISAASIIAKVSRDKFITTLSKKNKGYNWDKNFGYGTKQHLKALKKLGITKHHRKTFSPISKIN

SEQ ID NO: 139050 - protein, 152 aa, Unknown
  Bacterial polypetide isolated from the Sargasso Sea
KIISKIKRELLSNYIKKNSIWVIGKASVKEIDKINILQASLLAMKRAIKKLKKKPTQILIDGNKVPDLKNYNLKAIIKGDQKIPSISAASIIAKVARDKFITSLAKTNKGYHWDQNFGYGTKQHLKAIKKLGISKHHRKTFSPINNYKTYNI

SEQ ID NO: 139051 - protein, 143 aa, Unknown
  Bacterial polypetide isolated from the Sargasso Sea
MKTVNIYTDGACRGNPGLGGWGVLIEYENISKEYFGGEKDTTNNQMELKAAIEGLKILKEPCEVNLTTDSKYVMDGITSWIENWKKNNWKNSAKKDVKNKVLWMELDELVCKHNIKWNWVKGHSGHKKNEIADALANKGIDNL

SEQ ID NO: 139052 - protein, 113 aa, Unknown
  Bacterial polypetide isolated from the Sargasso Sea
MKSKLLALSKNEEFQNLIKKKKISNKYATIFFGILDNKNTNKLNISFVTKKKIGNAVVRNKIKRRLRNILNDAVKKIPIKFDYSYLVIAKPTMLNSSFKDIKETLFQEFKKIK

SEQ ID NO: 139053 - protein, 113 aa, Unknown
  Bacterial polypetide isolated from the Sargasso Sea
MKNKIVSLSKNEDFKSILSGKKVSNKYLTIFFKKLSDKNNNRLNISFVAKKKIGNAVTRNKIKRRLRNIMNEAVKSININLNYCYLLIARISVSKDPYEAIKKTTLEDFKKIK

SEQ ID NO: 139054 - protein, 113 aa, Unknown
  Bacterial polypetide isolated from the Sargasso Sea
MSIKLLSLSKNQDFKSLLAGKKISNKYITIFFKNLSNKSNKYLNISFVTQKKIGNAVKRNKVKRRLKNIMSQILKISKVNCNNSYLFIAKKSIINAKFIDIKETIIKDYKKIK

SEQ ID NO: 139055 - protein, 113 aa, Unknown
  Bacterial polypetide isolated from the Sargasso Sea
MKNKIVSLSKNEDFKSILSGKKISNKYLTIFFKKLSDKNNNRLNISFVAKKKIGNAVTRNRIKRRLRNIMNEAVKSININLNYCYLLIARISVSKDPYETIKNATLEDFKKIK

SEQ ID NO: 139056 - protein, 113 aa, Unknown
  Bacterial polypetide isolated from the Sargasso Sea
MRSKIVSLSKNEDFKSILNGRKISNKYSTIFFKKLSKKDIKKLNISFITKKKIGNAVTRNKIKRRLRNIMNEASKKISLKYNYCYLILAKRLILNDKYEIIKETLFSDFKKIK

SEQ ID NO: 139057 - protein, 113 aa, Unknown; identical to SEQ ID NO: 139055
  Bacterial polypetide isolated from the Sargasso Sea

SEQ ID NO: 139058 - protein, 124 aa, Unknown
  Bacterial polypetide isolated from the Sargasso Sea
MRTIPSRAIFLAARTNGEKALSRGLVIQAIENEERHWRIGFTATKKIGNAVTRNRARRRMRALARNYLVPLAQPGTDYVLIARYDTVNADWQDMAKGLQKAIRYLHRSINRSGTRQTVKVSDQK

SEQ ID NO: 139059 - protein, 87 aa, Unknown
  Bacterial polypetide isolated from the Sargasso Sea
MKNKIVSLSKNEDFESILSGKKISNKYLTIFFKKLSDKNNNRLNISFVAKKKIGNAVTRNRIKRRLRNIMNEAVKSINVNLNYCYLL

SEQ ID NO: 139060 - protein, 113 aa, Unknown
  Bacterial polypetide isolated from the Sargasso Sea
MKNKIVSLSKNEDFKSILSGKKISNKYLTIFFKKLSDKNNNRLNISFVAKKKIGNAVTRNKIKRRLRNIMNEAVKSININFNYCYLLIARISVSKDPYEAIKNATLEDFKKIK

SEQ ID NO: 139061 - protein, 113 aa, Unknown; identical to SEQ ID NO: 139055
  Bacterial polypetide isolated from the Sargasso Sea

SEQ ID NO: 139062 - protein, 118 aa, Unknown
  Bacterial polypetide isolated from the Sargasso Sea
KQKKLLKTTDFNDVRKRGRSWSDRNLILVVAKRESFNSNEHTRIGFIVSKKIGNAVVRNKCKRRLRELLSKIEIAYGFDLVFICRKSMVASKYEEIQFSVLSLLSRAQLIKSMATNVD

SEQ ID NO: 139063 - protein, 113 aa, Unknown
  Bacterial polypetide isolated from the Sargasso Sea
MKKKIVSLSKNEDFKSILSGKKISNKYSTIFFKKLSDKNNNRLNISFVAKKKIGNAVTRNRIKRRLRNIMNEAVKSININLNYCYLLIARISVSKDPYETIKNATLEDFKKIK

SEQ ID NO: 139064 - protein, 118 aa, Unknown
  Bacterial polypetide isolated from the Sargasso Sea
MTSYTFTRELRLLTPAQFKSVFSNPIKASSAEITLLAIPNSEQHPRLGLTVAKRYVKRANQRNRIKRVIRDSFRLNQHNIPHLDIVVLVRNGVMEMENAELNKLIEKLWRKLSRRYNG

SEQ ID NO: 139065 - protein, 118 aa, Unknown
  Bacterial polypetide isolated from the Sargasso Sea
MTSYTFTRELRLLTPAQFKSVFSNPIKASSAEITLLAIPNSEQHPRLGLTVAKRYVKRANQRNRIKRVIRDSFRLNQHDIPHLDIVVLVRNGVMEMENAEINKLIEKLWRKLSRRYNG

SEQ ID NO: 139066 - protein, 129 aa, Unknown
  Bacterial polypetide isolated from the Sargasso Sea
FSREKRLLTPRQFKAVFDSPSGKAPGKSVLLLARDNQLDHPRLGLVIGKKSVKLAVERNRIKRQIRESFRLNQDNLTGWDIVVVARKGLGDLENGELAQQFGKLWKRLARSRPSRDADLSPGTSDNPHA

SEQ ID NO: 139067 - protein, 119 aa, Unknown
  Bacterial polypetide isolated from the Sargasso Sea
MPTQHAFSRELRLLTPEHFKRVFAEPVRAASPQITLLACPNTLEHPRLGLAVPKKALKRAVWRNRVKRVVRESFRLNQANLPAIDIVVIAKAGVKEMDNEELFKLLEKLWRTLSRRCNG

SEQ ID NO: 139068 - protein, 116 aa, Unknown
  Bacterial polypetide isolated from the Sargasso Sea
MIKEKGQWSIHGLWPQIGTTAYPTFCRKVTYDHNLLQPILADLHECWHSNRGSDDTFWKHEWEKHGSCMYTEMTELEYFQKTLTLFEWCVNENCIWDYATGTKALIPFDLDFKLMK

SEQ ID NO: 139069 - protein, 128 aa, Unknown
  Bacterial polypetide isolated from the Sargasso Sea
MSNNKFYYLSLIFENSCWNIHGLWPQFNKTSYPQYCKNVTFNPSLLNPIKSDLEKYWSSDRESDNKFWEHEWKKHGSCMFTNMNEFNYFNKALTLFKKVSSMGIIEKYRQDDKAMIPFDLNFKIINKL

SEQ ID NO: 139070 - protein, 381 aa, Unknown
  Bacterial polypetide isolated from the Sargasso Sea
MTALFSLPLHNRAGICRHCYGLLGLLLIALTPIALQAVPASGEFVANKRCELFQSKNKQTNPDDWQSNIGERYPVAEILGNSTNPDWLRVRTNATSSPLRWIKGDCGQYNASSAVTGAYQPASNAEPAQTTTASDIKAIDSESLKEQGIPEKRQGNMCQIEDNYDSNVLALSWQSTFCELYGSRKAECRILSQTSDAPQWQHFSLHGLWPNRQQCGTRYGFCSSVKQQPSDFCDYPEVQLNASVQKNLEEVMPSARYGSCLERHEWWKHGTCRNQDPNDYFLLATQLTQEVNASAWVQQFIHDRIGKKVTQQELNQSFDASFGQGAHTKVTLDCAKGLLSEIRISLPQVINSSDSLPSLLAKAPKAKKTNCPDLLLIDMPN

SEQ ID NO: 139071 - protein, 357 aa, Unknown
  Bacterial polypetide isolated from the Sargasso Sea
MLLIGFTPIALQAAPASGEFVANKRCELFQSKNKQTNPDDWQSNIGERYPVAEILGNSTNPDWLRVRTNANSSPLRWIKGDCGQYNASSAVTGTYEAASNAEPAQTTTASDIKAINSESLKEQGTPEKRQGNMCQIEDNYDSNVLALSWQSTFCELYGSRKAECRALSQTSNAPQWQHFSLHGLWPNRQQCGSRYGFCSSVKQQPSDFCDYPEVPLNASVQKNLEEVMPSARYGSCLERHEWWKHGTCRNQDPNDYFLLATQLTQEVNASAWVQQFIHERIGKKVTQQELNQSFDASFGQGAHTKVTLDCAKGLLSEIRISLPQVINSSDSLPSLLAKAPKAKKTNCPATLLIDNPN

SEQ ID NO: 139072 - protein, 215 aa, Unknown
  Bacterial polypetide isolated from the Sargasso Sea
MKKIVVLLGMLLAPWFSSAVQAKGEAGEFDYYAMALSWSPEHCAIKPADRDQCSRQLGFVLHGLWPQYQRGYPSSCSRERLDPAMELQFAGLYPSRFLYRHEWEKHGTCSGLSQRGFHQLASDLRQKVKIPAAYQSSAEPLRKSRFQLKADLASANDWLAPDSITVACADGGRFLREVYICINKEGTAAVTCSDEMQKRELRSCGQPDFLLRSVR

SEQ ID NO: 139073 - protein, 352 aa, Unknown
  Bacterial polypetide isolated from the Sargasso Sea
MSAAPAYAVPATGEFIANKRCELFQSKNKQTNPDDWQSNIGERYPVTEILGNSVNPDWIRVRTNAISSPLRWIKGDCGQYNTNVAAAETYQPNSTKEPAQTTTASDIKAINRESLKERGTPEKRQGHVCQIEDNYDSHVLALSWQSTFCELYGGRKAECRALSQTRDAPQWQHFSLHGLWPNRQQCGTRYGFCSSVKQQPSDFCDYPEVPLNASVQKNLEEVMPSARYSTCLERHEWWKHGTCRNQDPNDYFLLATQLTQEVNASTWVQQFIHERIGKKVTQQELNQSFDTSFGKGAHTKITLDCAKGLLSEIRINLPQEIKLSDSIPSLLAKAPKAKKTNCPDPLSIDKPN

SEQ ID NO: 139074 - protein, 180 aa, Unknown
  Bacterial polypetide isolated from the Sargasso Sea
MYIFSMCFYYLSRFIDYINPFKECPINIFDKKNNFYYLALKRENTDHSWSIHGLWPQYNDKTYPKYCQNIKFDPSKIELIVDELNKFWYSTEEKNEQFWCHEWEKHGTCMFDQSDEFDYFKKALSLFVEVHQSGCIKDYPLEKDGLQVKIPFDNEYNIIKPDKDLENDNSDIELDMVKIV

SEQ ID NO: 139075 - protein, 123 aa, Unknown
  Bacterial polypetide isolated from the Sargasso Sea
MILEEDNSWSIHGLWPQYSINRYPKFCRDIDFNVKKIEPIKADLEKYWYSNKGTDDNFWKHEYLKHGTCNFNDLNELEYFKTTLDLYLNVIDLNYPERFYNENTKKCLIPINRSLKVFEIDFD

SEQ ID NO: 139076 - protein, 219 aa, Unknown
  Bacterial polypetide isolated from the Sargasso Sea
MNYRLKKISGDASFREFYRLKKGNRTSIIVKANKEKYKNLIAYTIINKILKQNIIIAPKLLNNYYQHNMIEISDLGQKTFFDMILKKKKKLNYYKNLIKIIFKLQKIKIKKKYFFEKYKFKFQKYSLKNLHKESDLFFDWYLKFSSKNLKINKIKKILKFELNKMYKKLYFNNNTFVHRDFHASNIMINKKTFGLIDSQDAIKGNPLYDVVSLIDDVRI

SEQ ID NO: 139077 - protein, 230 aa, Unknown
  Bacterial polypetide isolated from the Sargasso Sea
MKYKLKKISGDASYREFYRLKKNNKTSIIVTAKKEKFKNLAVYAVINNVLNNNRINAPKLLSNHYKNDMIEISDLGEKSFYDYVISKKNKLNSYKSLIKLIIKIQKIKVKKLYKFKNFKITIPKYTLSNLHKESDLFFDWYLKYALKNKKITNIKKIFKSELNKVYKKLNYQNNTFVHRDFHISNIMINKKKLGIIDSQDAIIGNPLYDVASLVDDVRIKLPHQLQNKLL

SEQ ID NO: 139078 - protein, 174 aa, Unknown
  Bacterial polypetide isolated from the Sargasso Sea
MLGTPKNFLFLFLFIFNNLTANELSDDQDLRDAHNKSLKALKEFDQAIENNPYNFIDSNAQQMVLVLTKNAELFESDREAYENKIKDIFEPMIDFRRVAASVMGKKYYLLATKEQRAEFVEIFKDSLLDTYAETLAQWGDSTISTKFEEDYSFIEKNAVEVKQTLDTGSSKYPI

SEQ ID NO: 139079 - protein, 272 aa, Unknown
  Bacterial polypetide isolated from the Sargasso Sea
MNYKLKKISGDASFREFYRLKKGNKTSIIVQANKEKFKNLITYVIINNILNKNKINAPKLISNHYKHNMIEISDLGKKTFFDIIIKKKNKLNYYKDLIKIILKLQKIRLKKKYNLGKYKITFQKYTLQNLHKESDLFFNWYLKFNSKNLEIRKIKKILKKELNMIYKNLYFKNNTFVHRDFHASNIMINKKTFGLVDSQDAIIGNPLYDVVSLIDDVRIKLPISLQNKLLKFYYSKSKLKRESYNNLKNDYDILSVQRNLKILGIFVRLSKR

SEQ ID NO: 139080 - protein, 232 aa, Unknown
  Bacterial polypetide isolated from the Sargasso Sea
MLDLKNVYLYLFSVKKITLKTLKEFFFLTRIYNKTLNSEIPSKLFFQPNPYLLSPLFNHESFVFKISQQSIYNFWNKKLSLREKNSIHNFLWLNLIDRKNEKEIIQSIIKDWIQKYNNYKKDIWTENIIPKRIIAWLSNSDIILSSKKKDFERDFLNCLIRQINFVKKNLNTFVHEANKISSVSAIILSGLVFKEYYTNYLFGLKELKKIIENSFDNDGFPKNRNPENLVTF

SEQ ID NO: 139081 - protein, 307 aa, Unknown
  Bacterial polypetide isolated from the Sargasso Sea
FREFYRLKKNNKTSIIVSAKKEKFKNLAVYTVINNILNSNRINAPKLLSNHYKNEMIEISDLGEKSFYDHVISKKNKLNSYKLVVKLLIKIQKIKVKKLYRFEKLKITIPKYTLSNLHKESDLFFDWYLKYVLKNKKITNIKKILRHELNKVYKKLNYQNNTFVHRDFHISNIMIHKKKLGIIDSQDAIIGNPLYDIASLIDDVRIKLPSQLQNKLFDFYHKNSKLKNDHIQKLKNDFDILSVQRNLKILGIFVRLFKRDNKNHYLKFLPYTWMLIEKRLQNPVLKNFKLLFYKHLPIKNLKKINKI

SEQ ID NO: 139082 - protein, 208 aa, Unknown
  Bacterial polypetide isolated from the Sargasso Sea
MLSTPKNFLFLFLFVFNNLTANEFSDDQDLRDALNESLKALKEFNQAIENNPYNFIDSNAQQMVLVLTKDAQLFESDREAYENKIKDIFEPMIDFRRVAASVMGRKYYLLATKEQRAEFVEIFKDSLLDTYAETLAQWGDSTISTKFEEDYSFAEKNTVEVKQTLDTGSSKYPISYKLRKHEEGWKIINIIINGVNLGLTFRNQFQAL

SEQ ID NO: 139083 - protein, 250 aa, Unknown
  Bacterial polypetide isolated from the Sargasso Sea
MKYNLKKISGDASFREFYRLKKNNKTSIIVSAKKEKFKNLAVYAVINNVLNNNMINAPKLLSNHYKNDMIEISDLGEKSFYDHVISKKNKLNSYKLLINLLIKIQKIKVKKYYKFEKLKIKIPKYTISNLHKESDLFFDWYLKYFISNKKISKIKKILRSELNKVYKKLSYKNNTFVHRDFHISNVMINKNKLGIIDSQDAIIGNPLYDVSSLIDDVRIKLSNKLQNQLFNFYHKNSKLKDDQIKKLKND

SEQ ID NO: 139084 - protein, 69 aa, Unknown
  Bacterial polypetide isolated from the Sargasso Sea
MNTGSSKYPISYKLRKSQEGWKIVNIIINGVNLGLTFRNQFEALAISNNDDIESTLNNWVSDAGDAGIS

SEQ ID NO: 139085 - protein, 476 aa, Unknown
  Bacterial polypetide isolated from the Sargasso Sea
MKEVKFRWVDRYLIHLTISEKFLITFWCPLLFIAFLSWYLLADGHQQQMQLRLDQLKQRVELSAQLSSQHAGLTLPAELTLSPTGSTGLTQQGDIYRYGASAGQAGIVTGTLDASRYSMWDGQGTTLTIIAVLAALLALVTHYLMTFVSGALYSTNKALQTVADGDLTFRLNFFPVRDEFSILAGSIDRFTDRQHKIVQLVEESAEALTLAADEFRDHASEGESMARSQRQHMDSLAAAMEQMSAAIREVARNANDTLQQTRQSSEEAANGAARVSRTIAAIRTLADEIGNASGAVERLTHNANRINEVVNVINAISQQTNLLALNAAIEAARAGEQGRGFAVVADEVRTLASRTQQATVEIQQMIEELQAGTGALNDIMEKTVGRAASSQALISEVGLDIGKLSNHSDAVLEMSTQIATSSEQQSSVAEEITRNLDQVRHEAGQVEESASASVAGTAGLKATATELAQALKGLKI

SEQ ID NO: 139086 - protein, 317 aa, Unknown
  Bacterial polypetide isolated from the Sargasso Sea
SNLKLDSEGESVISQTSESSESSESSESLQVDQTVELTTKQESVASQSFEIDTVNDLDHESKSSEAVTKNTLESDDLDSSENDFSNMLEASVKDYKEGDIVKGIVRGIEKTGVLVDIKYKSDGFITNTEFSHDPDETPKKVLNLGDEIDVYIERLESKEGYIILSRKRAQYELAWTELHKFAKINEEVDVRITSKVGGGLVVDYFGIKGFMPASQVVDGKDEANLESYINTKMKVSVLKADRRRRKVIFTNKSIGAGPSNDMRSKLIEELEVGQIREGKVTSIKDFGVFIDLGGIEGLVHISEISWTRVQHPSDILN

SEQ ID NO: 139087 - protein, 274 aa, Unknown
  Bacterial polypetide isolated from the Sargasso Sea
MSIINLNDARILITNDDGISAEGIKILRGIANEFSNDVWVVAPEFEKSGASHALSFQNELTLKKYEEKSYSLNGTPSDCVAIGISNVLKDKRPDLILSGINSGCNVGEDVTYSGTIAAAMEGLIRQIPSIAISQNYEAGKKNQISWDSSKTYLKDLLVDLTKNGWGKNVFMNINFPYCSADLVESIQITTQGNRESDDLIIREVEKSKFRFGLRRRLEDNAKLTIAPINEVIEGYMSDVEAIANKHISVTPLHLDLTDHKSLEVLKKGLKLNLN

SEQ ID NO: 139088 - protein, 274 aa, Unknown
  Bacterial polypetide isolated from the Sargasso Sea
MSFINLNEARILITNDDGISAEGIKILISIANEFSEDVWVVAPEFEKSGASHALSFQSELTLKKYEEKTFSVNGTPSDCVAIGISSVLKDKRPDLILSGINSGCNVGEDVTYSGTIAAAMEGLIRRIPSIAISQNYEAGKKNQISWDSSKTYLKDLLVDLTKNGWGKNVFMNINFPYCSADLVESIQITTQGNRESDDLIIREVEKSKFRFGLRRRLEDNAKLTIAPINEVIEGYMSDVEAIANKHISVTPLHLDLTHHKSLEVLKKGLKLNLN

SEQ ID NO: 139089 - protein, 99 aa, Unknown
  Bacterial polypetide isolated from the Sargasso Sea
MRRRTRTVTRRKTRAVPSDASVASTTASESSESSESSFDWFQAWYPLRPTSFLDADEPNEVRVLGKKLVAYLDKTRGEWCVLEDSCPHRRAPLSLGYGK

SEQ ID NO: 139090 - protein, 216 aa, Unknown
  Bacterial polypetide isolated from the Sargasso Sea
MRYKNNKNLCLFFTLLLLTVPISAQETAESWYEEGRAVVERNLSYRYPNAEIPIAKNVILFVGDGMGVSTVTAARILEGQINGNYGEENELFFETFPNVALSKTYNTDAQVPDSAGTMSAMVTGIKTDRGVLSVNQQVTRSNCNSSLGNEVPTFLEIAEQKGMSTGIVSTARITHATPAANYAHSVERDHEDDRDATRLTNPENCRDIASQLIELN

SEQ ID NO: 139091 - protein, 477 aa, Unknown
  Bacterial polypetide isolated from the Sargasso Sea
MNRIKLAALLCAGAFALAGCGSDDGPTSTAPGPVQAAARNVIFFLGDGMGITTMTAARIYAVGEDGALTIDTLPETAFVKTYSNDAQVTDSAPSMSAYMTGVKTNNEVISMTPDTKAIEPTASLTGNCGANNGKSATTLLEIAKAKGLATGVVTTTRVTHATPAATYAHVCHRDAENDIAAQLVPGGAGYNGALGDGVDVVLGGGTQFFVPKDGGGKRTDGRNLVNELKAKGYAVAQNRDDLLAADATKGGKLVGLFSSSHMSYDLDRGATKEPSLTDMATRALDVLQKNPNGYFLMVEGGRIDHALHDTNAKRALQDTVAFDNAIKATIDKVRQTDPDLKNTLIVVTADHDHTLVLNGYAARTGKTEAGKPGVLGVLRSYQTGSVAKDADGAPYTIIGFGNGENRVQGSRAGTALTDAVTGADDYRQEAVVRMDKGSETHGGTDVFLGAIGRGADAFHGVIENNKVFELVRNAVQL

SEQ ID NO: 139092 - protein, 498 aa, Unknown
  Bacterial polypetide isolated from the Sargasso Sea
MKHNINRNLYSFFTALVITVPISAQETAESWYEEGRAVVERNLSYRYPNADIPIAKNVILFVGDGMGVSTVTAARILEGQINGDYGEENELFFETFPNVALSKTYNTDAQVPDSAGTMSAMVTGIKTDRGVLSVNQQVTRSNCNSSLGNEVPTFLEIAEQKGMSTGIVSTARITHATPAANYAHSVERDHEDDRDVARLTNPENCRDIASQLIELNANITNSDGLEVALGGGRRSFLQRIDGADPETGEQGERLDGRDLTQEWLDAHQNSAYVWNKRDFENIDINATDHLLGLFQPSHMQYAYDNQSDKGGEPTLSEMTSKAIDLLSKNDKGFYLNVEGGRIDHAHHALNPFRALMDTIEFSKAVKTAFEKVDLSETLIIVTADHSHTLTIAGYPARGNPILGKVNAGDEPRLAGDGLPYTTLGYINGRGQRTDLTDVDTADESYRSEALIPLGSETHGGEDVPIYAAGAGSDLVRGVMEQHVIFHVMMEASKMTTRE

SEQ ID NO: 139093 - protein, 534 aa, Unknown
  Bacterial polypetide isolated from the Sargasso Sea
MLGLAACGSDGDNGAAGTPGSNGSNGSNGSDGKDWTAVNQWYVDAQARVTKADGLSVNNDVGAAKNVILFVGDGMGVSTITAARILEGQLKGKTGEENSLSFETLPYVGLSKTYNVDGQTPDSAGTMSAMMTGVKTDVGVISQAEGVVRANCASTKDQNLVTSLELAAMAGMSTGVVTTARLTHATPAATYAHVPERDWEADSNLPAEAVTNGCKDIAAQMLDFNYGNGLNVMMGGGRRSFIPKTLIDPEGKAGKRNDGRDLTAEWLAKYTNAAYVQDRDAFLNVDVASTDHLLGLFNSSHMEYDYDRTEAGVKGEPSLAEMTAKSIDILKKNTKGYVLIVEAGRIDHAHHAGNAARALYDTVALSEAVRVAMEKTSANDTLLMVTADHSHVFTIAGYPTRGNPILGLVKSNDANGIAEVTNSTDANGLPYTTVGYANGMGYASLTTGGDERYNFPVDAGRKDLNFVDTQDVGFHQEALVPLSDETHAGEDVAIFARGPSSDLVQGTVEQNHIFHVMNRAANLVAKAEAAMAAK

SEQ ID NO: 139094 - protein, 244 aa, Unknown
  Bacterial polypetide isolated from the Sargasso Sea
MPLAPSVLSAFTPTGKLRASINLGNRILANRDPATGEPFGVSIDLARAFTERLSAELELVVFDTAGQSVQALTDERADFGFFAVDPLRGETVAFTAPYVLIEGFYLVRDASPIRTNADVDRPDNRVTVGKGSAYDLFLTRELKAAQIVRAPTSQAVVQTFLEQQLEVAAGVKQQLEADAAKTPGLRLLYERFMVIRQAMGVPKSRGEAAAAALNAFVEEMKASGFVADSLRRHGISGASVAPQA

SEQ ID NO: 139095 - protein, 329 aa, Unknown
  Bacterial polypetide isolated from the Sargasso Sea
DLDSDLVKTVDNFAKVACHLSYLISIGSLSSVSSNKNTSTNSDGDEQKALDVYADESYLAEFKNSPVKFYASEEQDEVIDLESDGRLALAIDPLDGSSNIDTNVSIGSIFSIRSIPNKQTRDKKDIFLAAGSEQIAAGYIIFGPQTMFVATFGNGVKSYILDRNKNLFIDAKIETSIPADTREYAVNASNARHWEKRMKNYIDDSIAGKSGPRGIDFNMRWVASLVAETHRILSRGGIFIYPADSRKGYEKGRLRMVYECAPIAFLIEQAGGAATDSFNRILDLEVDELHQRTPFAFGSKNEIARLQAYNDLPEAEVSPLFGKRGLFSN

SEQ ID NO: 139096 - protein, 170 aa, Unknown
  Bacterial polypetide isolated from the Sargasso Sea
HDETIAEMQKLGVRVFAIPDGDVAASILTCMPDSEVDVLYGIGGAPEGVVSAAVIRALDGDMQGRLLARHDVKGDSEENRRIGEQELARCAAMGIEAGKALRLDEMARSDNVIFSATGITKGDLLEGISRKGNIATTETLLIRGKSRTIRRIQSIHYLDRKDPDVQAHIL

SEQ ID NO: 139097 - protein, 164 aa, Unknown
  Bacterial polypetide isolated from the Sargasso Sea
MKNVTVGEFIVDTQNNFPGSSGELSKILSAIKLASKIVSHEINKAGLAADIIGSVGNENVQGEEQQKLDLYANDKFINALSARGVICGVASEENESYIAFNSEVNSTAKYVVLIDPLDGSSNIDVNVSVGTIFSVFKRKTHESEPVDISDFLQKGDEQVASGYI

SEQ ID NO: 139098 - protein, 105 aa, Unknown
  Bacterial polypetide isolated from the Sargasso Sea
MNKNPIGPAVKSTILCLSDASKIIAHSLSKNGLPNNQMGTRVGDLNSDGDSQKVLDLIADQAIINAITNKHVAAYFSEEQEKVLLLEPDGNLIGCADPLDGSSNI

SEQ ID NO: 139099 - protein, 198 aa, Unknown
  Bacterial polypetide isolated from the Sargasso Sea
MAKSISLTRYLFEQQRVDGLIPSQLRLLLEVVARACKSISHAVNKGALGGVLGTASSENVQGEIQKKLDIIANEVLIEANEWGGHLAAMASEEMDGIYLVPNRYPQGEYLLLFDPLDGSSNIDVNVSIGTIFSVLKKPDGDRGVEEGDFLQPGTQQVAAGYCIYGPQTTLVLTVGDGVAMFTLDREQGSFVLTEENIR

SEQ ID NO: 139100 - protein, 212 aa, Unknown
  Bacterial polypetide isolated from the Sargasso Sea
MIPVTIERHFLDKVDQSPKINQDIANILYDINVAAKLIRQQVIRSGLTDAALKGSSGTTNTSGEDVQALDLYANNIIKDILTSHQRFSYLGSEEEPDVVQTDTYETSDYVILFDPLDGSSNIDVNVSVGTIFSIFKKNKDAKTLADHCCQKGSEQVVAGYVIYGSSVVMVYTAGNGVHGFTYDPTIGEFLLSHENIRIPSNPMYYSVNESLY

SEQ ID NO: 139101 - protein, 131 aa, Unknown
  Bacterial polypetide isolated from the Sargasso Sea
MLQSIAEESTERAAAASAVEALALAAVDITTVIRQSNSNVALSAVCGSANKDGDEQKALDVLADQKILNALRNVSAVASYLSEEQDEEVSFHDDGIIIVASDPLDGSSNIDTNVSVGTIFSILPAAGGLLQ

SEQ ID NO: 139102 - protein, 157 aa, Unknown
  Bacterial polypetide isolated from the Sargasso Sea
MRRLAPALRLDGADADLIDLIKSIVAACKEISFRVGQGELSDVLGSTLNENVQGETQKKLDIISNELLKDLILETGSVMAISSEEEESTVAGNPQGKYLVTFDPLDGSSNTDINSLIGTIFSILPAPKGADPADPSIFLQPGTAQIAAGYILYGPST

SEQ ID NO: 139103 - protein, 202 aa, Unknown
  Bacterial polypetide isolated from the Sargasso Sea
MHLEKYLELQYKDKKNTLNYNSNNLIQIFNLLSISAIEISKIISNPEKSYLSNKCGAINSDGDETKNLDLKADSIIRQNLSSSDIKWYASEEEKDCVFLNKNGSFTICIDPLDGSSNIETNAPIGTIFGIYKSRNKPNETILQSGDNLIASGFFIYGPRLKLIFSVGNGTSVFQLNQSDEFVLFQEAIKIPQNANELSINFS

SEQ ID NO: 139104 - protein, 136 aa, Unknown
  Bacterial polypetide isolated from the Sargasso Sea
MNLEKFLELQYKDKKNNFNYNSNNLIQIFNLLSISAIEISKIISNPEQSELSNKSGTTNSDGDETKNLDLKADSIIRQNLSSADIKWYASEEEKDFVFLNKNGSFSICVDPLDGSSNIETNAPIGTVFGIFKSKKT

SEQ ID NO: 139105 - protein, 246 aa, Unknown
  Bacterial polypetide isolated from the Sargasso Sea
MEISKFLNTYSNNKKINKIILKLCKSAKLISKTIKYKIKNTKDFTNITNKNADGDIQKPIDLFSDEVLLKYLNIPEVSAYCSEEQKGIVKFNNDGDFIVLSDPLDGSSNIEANVSVGTIFSIMPRNNFKIEDAIFQIGENQISSGFFVYGPVTSLFFTFRKGTHYFYLNESGFFELISKDLKIPSKTNEYSINSSYRRFWTKKTKNYIINCEQGKKGPIKRDFNMRWVGSLVADASRIFNRGGIFL

SEQ ID NO: 139106 - protein, 190 aa, Unknown
  Bacterial polypetide isolated from the Sargasso Sea
IGNQANIEDFLQKGNAQVAAGYVIYGSSTMLVYTTGNGVNGFTLDPSIGEFCLSHPDIQVPENGSIYSINEGNLEAFPDAIRSYVAHCKETHDDKKPYSLRYIGSMVADLHRNLIKGGIFIYPSSALAPNGKLRLLYECNPMAFIVEQAGGIASDGAMPIMEAELNSLHQRIPVIMGSKKMVEKALSFNS

SEQ ID NO: 139107 - protein, 191 aa, Unknown
  Bacterial polypetide isolated from the Sargasso Sea
MKSVTVGEFIVETQNTFPGSSGELSKILSAIKLASKIVSHHINKAGLAKEILGSSGAENIQGEDQQKLHVFANDTFINALSPRGVICGVASEENDSYIAFDDRVNDEAKYIVLIDPLDGSSNIDVNVSVGTIFSVFRRKTSKGDPVQLEDFLQKGAEQVAAGYLIYGSSTMLVYTTGNGVNGFTFDPGIGV

SEQ ID NO: 139108 - protein, 142 aa, Unknown
  Bacterial polypetide isolated from the Sargasso Sea
MQNPNTDLIRLEEHIISSGVEDEIVQILSEIALSSKMINSKILKAGLNDILGATGQKNVQGEEVQKLDEFANSLLKDKFEAKELVGAIASEEMDNIHPIAKDKNYLLLFDPLDGSSNIDVNVSIGTIFSILKRESTQRSVSL

SEQ ID NO: 139109 - protein, 323 aa, Unknown
  Bacterial polypetide isolated from the Sargasso Sea
MRRLAPALRLDGADADLIDLIKSIVAACKEISFRVGQGELSDVLGSTLNENVQGETQKKLDVISNELLKDLILETGSVMAISSEEEDSTVAGNPQGKYLVTFDPLDGSSNTDINSLIGTIFSILPAPKGADPADPAIFLQPGTAQIAAGYILYGPSTMMALTTGKGTRMYTLDKTYGGFLLTQEKVTVPGVTAEFAINMSNQRYWQAPMQNYVADLLKGKEGPRGKNFNMRWIAAMVGDVHRILCRGGIFAYPRDLKDPTKPDKLRLMYEANPMSFLVEQAGGASTTGFERIMDIQPVDIHQRVAVILGSKHEVESCLQYHQA

SEQ ID NO: 139110 - protein, 241 aa, Unknown
  Bacterial polypetide isolated from the Sargasso Sea
MSRLITIERHLMGLPEDMLASSGDITRILYDISVAAKMIRRQVVVAGFETEREAGITNVHGEDVATLDVFANTCIKEILSSHGRFSYLGSEEEEEIITVDTAKTDGYAIFFDPLDGSSNIDVNVSVGTIFSIYKTDETWKSSKVRPGAEQVASGYVIYGSSVMMVYTMGNGVHGFTYDPSIGEFLLSHYDIKIPDKPKYYSMNESLYPRLDADARNIWANFKKENEDLSLRYVGSLVADFH

SEQ ID NO: 139111 - protein, 348 aa, Unknown
  Bacterial polypetide isolated from the Sargasso Sea
MSAPKFSEVIDLPKSIEGDVSKAIVSIAEVAIMMSEIISLGDIQSNLGREVGENSDGDNQKALDVLADEAFMKKLYSSSVSWYASEEQEEVVELNKNGSVLLAIDPLDGSSNISINVSIGTIFSLRSARGVHSKKHAREALLSPGENQLAAGYVIYGPQTTIVLTAGSGVSEYILDKKAKAFTLSKSNINIPKDSSEYSINSSNYRHWSKPMKAYVDDLNLGIEGPAGKNFNMRWVASLVAETHRILSRGGIFIYPGDNRKGYEKGRLRMVYECAPIAFIIAQAGGGATDIYNNILSVEVEDLHGRTPFVFGSINEVNRVKVYHDLPGSEVSPLFGKRGLFSAQGGVE

SEQ ID NO: 139112 - protein, 278 aa, Unknown
  Bacterial polypetide isolated from the Sargasso Sea
MRRLAPALRLDGADAELIDLIKSIVAACKEISFRVGQGELSDVLGSTLNENVQGETQKKLDVISNELLKDLILETGSVMAISSEEEESTVAGNPEGRYLVTFDPLDGSSNTDINSLIGTIFSILPAPKGADPADPAIFLQPGTAQIAAGYILYGPSTLMALTTGKGTKMYTLDKTYGGFLLTTEQVTIPGVTAEFAINMSNQRYWQPAMQSYIADLLKGKEGPRGKNFNMRWIAAMVGDVHRILCRGGIFAYPRDVKDPSKPDKLRLMYEANPMSFLV

SEQ ID NO: 139113 - protein, 124 aa, Unknown
  Bacterial polypetide isolated from the Sargasso Sea
MNLEKFLEIQYKDKKNNLNYNSNNLIQIFNLLSISAIEISKIISNPEQSELSNKSGATNSDGDETNNLDLKADSIIRKNLSSTDIKWYASEEEKDFVFLNKNGSFTICIDPLDGSSNIETNAPM

SEQ ID NO: 139114 - protein, 130 aa, Unknown
  Bacterial polypetide isolated from the Sargasso Sea
MVNKNQNLSEYLNNLDIESDLKKIISVISSTCYEISEAIRLSNINNLVGKTGEINIQGEQVEKLDELANNLLIKNLSETGKVFLMGSEEIESVIIPNPNNKNAEFIVVFDPLDGSSNIDVSVTIGTIFAI

SEQ ID NO: 139115 - protein, 248 aa, Unknown
  Bacterial polypetide isolated from the Sargasso Sea
MSFLNEFSKDQNLNNVILKLCSSAIKISKSIHDDDYEIEKTSLNEDGDVQKPLDIFSDKTLLDKLRTPEVAAYCSEEQKGIVNLDENGNFIVLTDPLDGSSNIEANVSIGTIFSIIPKNGKCVNEAIFQNGNKQACAGFFVFGPRTTLFLTYKNGTHSFFLNNKSNTFELLQKNISIPEYTSEYAINSSYRRFWHKNVLNYIENCLKGKDGPRKKDFNMRWVGSLVADASRIFTRGGIFLYPDDKRKK

SEQ ID NO: 139116 - protein, 86 aa, Unknown
  Bacterial polypetide isolated from the Sargasso Sea
MDVERQIETLKQCKIIPEADVTALCVKAKEILMEEENVHHVPIPATVVGDIHGQFYDLLELFDVGGQVPSVNYVFMGDFVDRGYYS

SEQ ID NO: 139117 - protein, 212 aa, Unknown
  Bacterial polypetide isolated from the Sargasso Sea
GRPDNIYQRIDGTQWRHVWVVGDIHGCFSILMAKLRQYRFDPWQDLLVSVGDVIDRGPDSLRCLKLLRKRWIVAVRGNHEQMALDALATGDQFMWLMNGGSWFAQAEQPAAKFALEECWQLPWILELHCQNGIHVIAHADYPDDDYQWLKKIDLQRVLWDRSRLMNNGCGIRGADHFWFGHTPLRHRLDRENLHYIDTGAVFGGELTLVQLQ

SEQ ID NO: 139118 - protein, 211 aa, Unknown
  Bacterial polypetide isolated from the Sargasso Sea
MPSPVTAGNPSTRNPVANFWVCSDSTSHVDQTSRAQSCLVKETPLRHWVIGDVHGCHTSLLDLLAVLPVQDHLIFCGDVICRRGGIDACMHLIWDLVCCGRATWLRGNHEQALIHALQDIGEGSQTASTRQWLHRLNQLPLLYRADGWCATHAGFNSDGDPDLSIREPFWETYDGRYGRVVIGHTPRPAVERHQRIVLIDTGAVYGGLLSA

SEQ ID NO: 139119 - protein, 247 aa, Unknown
  Bacterial polypetide isolated from the Sargasso Sea
MGDYIDRGNYDIEGLLIPLLRFLLHDPMHFVMLRGNHEAVSTATGYGLMDEIAGRGSCGESETIDAKKVLAENFGPVFAALPLVAGLESNQPHIEPVWGGFDPFPSVPAGQEQTTTYTPTKTYSVVFLHAGHPASAPNMQQFLEQPFSRLYSFDLWENSQSWMKDAGGWSMNIRQRQRIATSTDAEPLQQIIWNDYREGATTEGPGLVTARSHRNIGMVVGRPKVDEFFRNNPGLLLVVRGHDPLSG

SEQ ID NO: 139120 - protein, 276 aa, Unknown
  Bacterial polypetide isolated from the Sargasso Sea
MDRFNSITDPDNLQPAVTNYFTPDTNYSVVDQYHKFGFGNYTYDSEGNIVFDTNDNGIYADDWGSNGLDDDDDWGPFKDDLGNAYDIPFEPFVDLNGNGVYDSDVAEGYAEIFGTFVLLDFGLDGIPADDANGDGDYDDEGDIAPDYGEGNGVWDGETFENLNGNSEIIDGVSTPIWDTFVNNDLDGDGRPSLGENGVDEFDEKDFSLNYGGLSRAYKDANDDGIEDYPEFNVRNYRYDLRLDWEPNSDISFNLSHGFAWARNINITGIARYLADG

SEQ ID NO: 139121 - protein, 225 aa, Unknown
  Bacterial polypetide isolated from the Sargasso Sea
MPAPRQHHWVIGDVHGCDRSLVSLLEVLPSDDHLVFCGDVINRGGGIEAAMDLVWTLVRLGRATWLRGNHEQDLIDALESSGDGSAEALFSQDTVCQLGERRTRSWLDRLQQLPLKYSAEGWSATHAGFNSDGQPDLSIREPFWESYDGRHGRVVIGHTPRPTVERHQRIVLVDTGAVYGGLLSAYCPETDAVVQVQGSGDGCLLPRPDDPHRVTDIMAGDATSC

SEQ ID NO: 139122 - protein, 197 aa, Unknown
  Bacterial polypetide isolated from the Sargasso Sea
MTKWTESEAFTWYKNQDWIVGCNYLPSNAINQLEMFQPETFDIEINKRELSWANDLGFNSVRVYLHDLLWSDPETFKNILDQFLDICAQNKIRPMLVLFDDCHRPYPKLGVQPKPVKGVHNSGWKQSPGMALVSEIHDNDSHPEIPRLKSFVQEILGHFSSDQRILLWDIYNEPGQFGIGDKSLALLKLVWEWALEV

SEQ ID NO: 139123 - protein, 356 aa, Unknown
  Bacterial polypetide isolated from the Sargasso Sea
AQAQERSADRGDAALHGQFHDLHRAVRAHRRRAGQRHHLPQPDPDANGHRPVRSGPGRGVLAGVLPDHPAGVLVVLHRHDPRRQNPLRPTMTLRKRLVLLIYFLFLLVPIYWLLNMSFKSNTEILGGLSLWPQSFTLDNYRVIFTDRSWYEGYLNSLYYVSLNTLISLSVALPAAYAFSRYRFLGDKHLFFWLLTNRMAPPAVFLLPFFQLYSSIGLFDTHIAVALAHCLFNVPLAVWILEGFMSSVPKEIDETAYIDGYSFPKFFVKIFIPLIRSGIGVTAFFCFMFSWVELLLARTLTSVDAKPIAAVMTRTVSASGIDWGVLAAAGVLTILPGMLVIWFVRNHVAKGFALGRV

SEQ ID NO: 139124 - protein, 78 aa, Unknown
  Bacterial polypetide isolated from the Sargasso Sea
MGAFLEKPKTEKYNESRSGAGLRYGLSSMQGWRLEMEDAHSAVIGIPDIADNVSWFAVFDGHAGSRVSYHCSHHLLKV

SEQ ID NO: 139125 - protein, 102 aa, Unknown
  Bacterial polypetide isolated from the Sargasso Sea
MQSIETVGLLMALRLKYPASVFLLRGNHECASINRMYGFFDECKRRYSVKLYKAFINAFNCMPAAAVVGEKVFCCHGGLSPEMDKVKQVLAIKRPSEVPEKG

SEQ ID NO: 139126 - protein, 78 aa, Unknown
  Bacterial polypetide isolated from the Sargasso Sea
LNLICRAHQLVQEGLKYMFPDKNLVTVWSAPNYCYRCGNVASILAFDDNLDREVKYFTETTENSTMMAPRASLPGYFL

SEQ ID NO: 139127 - protein, 324 aa, Unknown
  Bacterial polypetide isolated from the Sargasso Sea
MCDAAEHCFKSEETVLRVNGPAKIFGDLHGQFGDLMRLFAEYGAPSTAGDIAYIDYVFLGDYVDRGAYSLETISLLLALKIEHPNAVHLLRGNHEEPDINALFGFRIECVERLGETAGDAVWRRFNDLFEWLPLAAVIEDRICCMHGGIGRSLTHISQINDLKRPLNMENGGVELMDILWSDPTENDGVEGLRPNARGPGLVTFGPDRVKAFCETNGIHMIIRAHECVMDGFERFAQGQLLTVFSATNYCGTANNAGAILVLGRDLTLYPKLIHPLPPIAMESLSPSDRIDDNLWLQDVNRDRPPTPPRGRLGQTQPIGLINPT

SEQ ID NO: 139128 - protein, 109 aa, Unknown
  Bacterial polypetide isolated from the Sargasso Sea
MEEIQLYAFDLDGTLLDTAHDFFYAVNKLRELNGLEPGDFLQVRCRVSQGAASLARYALDIDENQKEEIEKARLELLKIYENCCLGAKPFEGVHELLLNIKERNKNWGI

SEQ ID NO: 139129 - protein, 121 aa, Unknown
  Bacterial polypetide isolated from the Sargasso Sea
MKIELFAFDLDGTLLDTAPDFLYAVNLLRKKYKFGEADYEQVRSRVSQGAASLATYALNLQGESNQIIESHRQELLDIYEDCCLTNTKMFDGVEEILNELNEKKIKWGIVTNKPEKILPKV

SEQ ID NO: 139130 - protein, 149 aa, Unknown
  Bacterial polypetide isolated from the Sargasso Sea
MADPLRLVAFDLDGTLIDSADSIVNGVLACWEACGFPAPEKENIRRIIGLPWEESICELLPGAGKTEFDKIKAYHAEVASGKRPRPSRKEDLFPGINDVLNQVEDAGYLLSIITSRSSGRLQELLEANGIGRRFVTLKTTDNGPGKPNP

SEQ ID NO: 139131 - protein, 139 aa, Unknown
  Bacterial polypetide isolated from the Sargasso Sea
MNKNVNILIAFDLDGTLIDSARDFHNCLNLLTKKHNEEEIEYREVRERVSEGSFSLIKHAFKGASEKRTNLLREELLDLYEENCLLKTIKFEGTDNLIQYLESEKIKWCIVTNKPRRFAERIVKYFFPSLDHKKMLFCP

SEQ ID NO: 139132 - protein, 87 aa, Unknown
  Bacterial polypetide isolated from the Sargasso Sea
MEYKKVFKIAAFDLDGTLLDSADDLIDSLNLLLKEKNQSPMKKSNVYRLVGNGALAMIREAYKLNNNNEKDIDWKFLQKRFLEIYKT

SEQ ID NO: 139133 - protein, 140 aa, Unknown
  Bacterial polypetide isolated from the Sargasso Sea
MGHWANIKAIAFDLDGTLIDSVPDLAAATNATLVEFNLPPVSEDLVRSWVGNGAQILMQRALSFVCAQAQDSQEIQVKLEQTMPRFMHHYGEHLQQHSLLYSDVLAVLQQLKQAGYKLAVVTNKPYRFTIPLLHSFGLDG

SEQ ID NO: 139134 - protein, 220 aa, Unknown
  Bacterial polypetide isolated from the Sargasso Sea
MKSIELFAFDLDGTLLDTAPDFLHAVNVLRERYNLEEADSDQVRSRVSQGAASLASYALGLESESDEKIEFHRQELLDIYEDCCLKNTRVFDGIEDVLDKLNSTKIKWGIITNKPRRFAEVIVQDKLNKFRTPFLICPDDVGVRKPDPDGLNLALKVSESNPKNSIYIGDHKIDIKAGEQANMMTGAAAYGYVPMEDAAEEWEADFIFYHPRDINNLLDQ

SEQ ID NO: 139135 - protein, 221 aa, Unknown
  Bacterial polypetide isolated from the Sargasso Sea
MNKNVTTLVAFDLDGTLIDSAKDFHNCLNLLTKKHNEEEIEYTEVRERVSEGSFSLIKHAFKGSSEKRTNLLREELLDLYEENCLVKTIKFEGADSLIQYLESEKIKWCIVTNKPRRFAEKIVKHFFPSLDHKKMLFCPDEFIEPKPSPRGLNLACKNTNSDPSSSFFVGDHAIDIEAGRRAGIHTIAVDYGYRKIDDLVENWNANFTVGNLCEIKNLIHE

SEQ ID NO: 139136 - protein, 220 aa, Unknown
  Bacterial polypetide isolated from the Sargasso Sea
MEEIQLYAFDLDGTLLDTAPDFFSAVNKLRKANGLESGDFLQVRSRVSQGAASLARYSLNLKENQKEEIEKSRLELLAIYEKCCLNAKLFEGINQVLDSLNEKNKNWGIVTNKPRRFAERIVNEKFSSLKPDFLICPDDVGVRKPSPKGLKLACKLVKVSSKNSIYIGDHFIDINSGKSAKMRTAAAAYGYIPEGDIVSNWGADFIINHPREINRIIESY

SEQ ID NO: 139137 - protein, 227 aa, Unknown
  Bacterial polypetide isolated from the Sargasso Sea
MREQIKAIAFDLDGTLIDSVPDLAVATQAALAELGLATCTEAQVRTWVGNGAEMLMRRAMSHALGTDVEQTALDAAMPIFMHHYQENLEKHSALYADVHQVLQILFDAGFKLAVVTNKPYRFTLPLLEAFKINDFFSLVLGGDSLAKMKPDPLPLQHLLAEWQLDKSELLMVGDSKNDILAAKAAGVASIGLTYGYNYGEDIGLTGPDAVCEQFAEILRWLNLAQPV

SEQ ID NO: 139138 - protein, 148 aa, Unknown
  Bacterial polypetide isolated from the Sargasso Sea
RSNACRTGRSELVRPFQFIAFDLDGTLVDSAPDILPALNQMLAKLGKEQVSLTQVQHWLGNGMAMLIKRALTGELHPAQWDAVLFEQAQQLFIGFYQQSNGCATRLFDQVPEVLAQLSQFYPLALVTNKPRQFTEPLLQHLGIKHLFN

SEQ ID NO: 139139 - protein, 227 aa, Unknown
  Bacterial polypetide isolated from the Sargasso Sea
MRKQIKAIAFDLDGTLIDSVPDLAVATQAALAELGLATCTEAQVRTWVGNGAEMLMRRAMSHALGVDVEQTALDAAMPIFMHHYQENLEKHSALYADVHQVLQTLFDAGFKLAVVTNKPYRFTLPLLEAFKINDFFSLVLGGDSLAKMKPDPLPLEHLLAQWQLDKSELLMVGDSKNDILAAKAAGVASIGLTYGYNYGEDIGLTGPDAVCEQFAEILSWLNVGQAV

SEQ ID NO: 139140 - protein, 227 aa, Unknown
  Bacterial polypetide isolated from the Sargasso Sea
MREQIKAIAFDLDGTLIDSVPDLAVATQAALAELGLARCTEAQVRTWVGNGAEMLMRRAMSHALGTDVEQTALDAAMPIFMHHYQENLEKHSALYADVHQVLQILFDAGFKLAVVTNKPYRFTLPLLEAFKINGFFSLVLGGDSLAKMKPDPLPLQHLLAEWQLDKSELLMVGDSKNDILAAKAAGVASIGLTYGYNYGEDIGLTGPDAVCEQFAEILRWLNLAQPV

SEQ ID NO: 139141 - protein, 202 aa, Unknown
  Bacterial polypetide isolated from the Sargasso Sea
MFCGGFHGFRCRHGAGSAPCFLHVTSRIMSLSPRFALLASLVAASLTLPAVAVEAPASPAGVTAVTLAQQAPIHWVSVTQIARSLDGLPPMAVGFDIDDTLLFSSPGFYRGKQEFSPNDESYLKNPAFWEKMNNGWDAFSVPKEVGKALIAMHLQRGDHIYFVTGRSATKTETVSKTLQQTMNIPADQLNPVIFAGDQPGQN

SEQ ID NO: 139142 - protein, 295 aa, Unknown
  Bacterial polypetide isolated from the Sargasso Sea
MGRAAGMRSIGVGVGWNSNLICGDMSIQTTLRNQLNGITQGFQQIMSNVIQSATSAVASLPALIIQRADPGLYNLLTNGVLQARLDFDRSKLTCRAMAEKMAETAGGQLGWSQLAEGMALRQAVSSTDAVSAVQQAENNRGNNGVPWVGGSNAGGVGQTAIRVVGDVTRAGYNLVNGRGVTDTSSIAAASCASLSCQTWTAPQQAVEWATRVLGEKVQRTCDSCTKTETVPGVGLTPLIQEEYEAKLEALQELISGTRNTTFENLRGAGSTSLPITRGVIEALRDEPDQDLLARR

SEQ ID NO: 139143 - protein, 188 aa, Unknown
  Bacterial polypetide isolated from the Sargasso Sea
MDDLNPYLELALKAVDKASAFIRQESEKTLEVGYKGDTDLVTHVDLGSEKIIKELLKSKFPEHQILAEEGGVEQGKSEFLWVIDPLDGTTNFVHGYPFYAVSIALYRENLPLVGVVSHITSKEVYTATSGGGAFCNGKALKVSKTKDLGQSLLATGFPYTHDELWSRNIEHFKLLTDRTQGVRRAGAA

SEQ ID NO: 139144 - protein, 204 aa, Unknown
  Bacterial polypetide isolated from the Sargasso Sea
MIQSPKNEFLDTALKAAKSAAHLIQNSTENYVTNYKSKTDLVTKTDIKSERIISDVIKSKFPYHGILAEESGLDDDKTTDYVWVIDPLDGTTNFVHNYPSYGVSIALLEKGAPIIGVVVELPAMNVYHATVDTDSYCNGEKIHVSSNKELIHSLLVTGFGYEHGSNWEKNMRLFQEFTDITQGVRRLGAAAVDLCHVACGKVDG

SEQ ID NO: 139145 - protein, 254 aa, Unknown
  Bacterial polypetide isolated from the Sargasso Sea
MHPMLNIAVRAARAAGTIIVRGFEKHNEVATESKGANDFVTQIDKEAEQAIIAKIQQSFPNHCFMGEESGETAGADTDFQWIIDPLDGTTNFIKGIPHFAVSIALLHKGRLDQAVVFDPIRSELFTASRGQGAQLNGYRIRASKPRDLTETILATGMPFKNKAKFGEYALSLNKIFHECGDIRRAGSAALDLAYVAAGRHDGYWERGIKTWDIAAGELIVREAGGLVTDFKGGNDPLYSGEIVAGSAKVVQGLV

SEQ ID NO: 139146 - protein, 238 aa, Unknown
  Bacterial polypetide isolated from the Sargasso Sea
EKTLEVGYKGDTDLVTHVDLGSEKIIKELLKSKFPEHQILAEEGGAEQGKSEYLWVIDPLDGTTNFVHGYQFYAVSIALYRENLPLVGVVSHITSKEVYTATSGGGAFCNGKALKVSKTEDLGKSLLATGFPYTHDELWSRNIEHFKLLTDRTQGVRRAGAAALDFCHVARGWLDGFWELELGAWDMAAGVLIVEEAGGQVSKLNNDPFSLMEREVVASNGLIHQPLLELLNREGDSP

SEQ ID NO: 139147 - protein, 241 aa, Unknown
  Bacterial polypetide isolated from the Sargasso Sea
MIQSPNNEFLDTALKAAKSAAHLIQHSTKNYVTNYKSETDLVTKTDIESEKIISDIIRSKFPGHGILAEESGLDDDKTTNYVWVIDPLDGTTNFVHNYPSYGVSIALLEKNIPIVGVVVELPTMNVYYATVDTDSYCNGEKIHVSSNKELIHSLLVTGFGYEHGSNWKKNMRLFQEFTDITQGVRRLGAAAVDLCHVACGKVDGFWEFDLNPWDVSAGILIVERAGGKIRKMNGDKYAIYD

SEQ ID NO: 139148 - protein, 242 aa, Unknown
  Bacterial polypetide isolated from the Sargasso Sea
KLESINNKSSKIDLVSKADIESNQYIVSEIQKKYPQHSILSEEMGEYSGNSNYQWVIDPLDGTTNFVHNLPIFACSIGLRKDNQTILGVVYNPAAEKCFYAEKDKGAFLNNKQISSTSCKTLSESLLATGFPYEHDDKYDMSFRIFKEFYDKTRGLRRLGAASLDLCFVGMGRFDGFYEYGLKPWDICAGKIIAKESGAIVTDWDKEKDAPQSGIRILAANKHIHKYMVEILTKEEYSIFID

SEQ ID NO: 139149 - protein, 173 aa, Unknown
  Bacterial polypetide isolated from the Sargasso Sea
MDDLNQYLDLALEAADKASAFIRQESEKTLEVGYKGDTDLVTHVDLGSEKIIKEMLKSKFPEHQILAEEGGAEQGKSEYLWVIDPLDGTTNFVHGYPFYAVSIALYRENLPLVGVVSHITSKEVYTATSGGGAFCNGKALKVSKTEDLGKSLLATGFPYTHDELWSRNIEHFK

SEQ ID NO: 139150 - protein, 198 aa, Unknown
  Bacterial polypetide isolated from the Sargasso Sea
AEEGGEEQGKSEFLWVIDPLDGTTNFVHGYPFYAVSIALYRENLPLVGVVSHITSKEVYTATSGGGAFYNGKALKVSKTKDLGKSLLATGFPYTHDELWSRNIEHFKHFTDRTQGVRRAGAAALDFCHLARGWLDGFWELELGAWDMAAGVLIVEEAGGQVSKLNNDPFNLMEREVVASNGLIHQPLLEQLNREGDSP

SEQ ID NO: 139151 - protein, 163 aa, Unknown
  Bacterial polypetide isolated from the Sargasso Sea
MHTAAREMADAVDYDLCLSEALAAATAAGEEILSAWHAERDVEYKGAVDLVTATDKKCEDIIFDRLRAAFPTHDFVGEESVAANDGTIPPLTDRPTWFVDPLDGTTNFVHGFPFTCVSVGLAVNQIPVVGVVLNPTLKETFAAARGRGATLNGAPIRASDVAD

SEQ ID NO: 139152 - protein, 218 aa, Unknown
  Bacterial polypetide isolated from the Sargasso Sea
MQPMLNIALRAARSASELIFRSIERLDSIKVDEKEAKDYVSEVDRAAEQSIVNALRKAYPNHSIQGEETGLHAGSGEEGKDYLWIIDPLDGTTNFLRGIPHFAVSIACKYRGRLEHAVIVDPVRQEEFTASRGRGAQLNGRRLRVSSRTSLEGALLGTGFPFRDGQMADMDNYLGMLRALTGQTAGIRRAGSASLDLAYVAAGRFDAFWESGLSEWDM

SEQ ID NO: 139153 - protein, 209 aa, Unknown
  Bacterial polypetide isolated from the Sargasso Sea
AIIRSFYKDHTILAEETGQDTNVSDYLWIIDPLDGTTNFVHGYPSFAISIGLFYKNEPLVAVVVEMPNMRMYTAIKGQGAWCEGKEINCSDTKTLERSLLVTGFGYEHGENWDNNMNLFKQFTDDTQGVRRLGAAAVDICHVAKGAADGFWEYDLKPWDTAAGILIAKEAGCMVTDLSGNQFDINDNNILITNGHIHQNMVNNIERYLN

SEQ ID NO: 139154 - protein, 193 aa, Unknown
  Bacterial polypetide isolated from the Sargasso Sea
NNSDYQWIIDPLDGTTNFIKGIPHFAVSIALRHQGKLDQAVVFDPLRGEVFTASRGAGAQLNGRRIRTTNLPDLGGAILATGFPFKHKHHLDAYTETFKTLMIQAADVRRTGSAALDLCYVAAGRFDGFWEIGLKPWDFAAGELILREAGGLISDFAGGNNYLRSGNIVAASPKVLGAMLKGMRPHLTESLLK

SEQ ID NO: 139155 - protein, 267 aa, Unknown
  Bacterial polypetide isolated from the Sargasso Sea
MHPMLNIAVRAARSAGNVIARACGQLDMVQKQQKGTNDFVTNVDKEAEQAIVQVLKKSFPTHGIVGEEHGDYGNNDSEFQWIIDPLDGTTNFIKGIPHFAVSIALKHQGKLDQAVVFDPLRGELFTASRGRGAQLNGTRIRVNNLPDMGGTILATGFPFKNKTHIPAHSAMLTGLLAEAADIRRTGSAALDLAYVAAGRFDGFFEIGLKPWDIAAGELIVREAGGLVCDFVGGNNHLRSGNVVAAAPKVLAGMLKGIRPHLTESLSR

SEQ ID NO: 139156 - protein, 256 aa, Unknown
  Bacterial polypetide isolated from the Sargasso Sea
MHPMLNIAIRAARAAGDSIVREMDRACDIPIEDKGKNDFVTEVDKNAEEIIISTIQKSYPDHAFLAEESGQRGESDYLWVIDPLDGTTNFLHSFPHFAVSIALKQKGILNQAVVYDPLKQELFTATKGKGAQLNNRKIRVSSKKELDGALLGTGFPYSDEKAMLKFIESYKALFPKVAGIRRAGVASLDLAYVASGRLDGFWEFNLKPWDIAAGVLLIQEAGGISAELSGGLDYLESGNIISANPKLLKAMLKIVS

SEQ ID NO: 139157 - protein, 202 aa, Unknown
  Bacterial polypetide isolated from the Sargasso Sea
MKKELASFAENIALSAGKIILESINNIEVDFKGKTDLITNIDLESERSIIDKIINSYPSHNILSEEHGLTNNNSDYLWVIDPLDGTTNFVHNYPSYGVSIGLLYKNNPEIGVVLELPSKNLYSAIKGSGAYKNGQKISVSKVPKLTNSLHVTGFGYEHGEKWEINMKLFKHFTDITQGVRRLGAASIDLCHLASGVVDGFWE

SEQ ID NO: 139158 - protein, 252 aa, Unknown
  Bacterial polypetide isolated from the Sargasso Sea
EAAEKASAFIRQESEKTLEVGYKGDTDLVTHVDLGSEKIIKELLKSKFPEHQILAEEGGAEQGKSEYLWVIDPLDGTTNFVHGYPFYAVSIALYREILPLVGVVSHITSKEVYTATSGGGAFCNGKALKVSKTEHLGKSLLATGFPYTHDELWSRNIEHFKLLTDRTQGVRRAGAAALDFCHVARGWLDGFWELELGAWDMAAGVLIVEEAGGLVSKLNNDPFNLMEREVVASNGPIHQPLLDQLNREGDSP

SEQ ID NO: 139159 - protein, 234 aa, Unknown
  Bacterial polypetide isolated from the Sargasso Sea
MDDLNQYLELALEAAEKASAFIWQESEKTLEVGYKGDTDLVTHVDLGSEKIIKELLKSKFPEHQILAEEGGAEQGKSEFLWVIDPLDGTTNFVHGYPFYAVSIALYRENLPLVGVVSHITSKEVYTATSSGGTFCNGKALKVSKTEDLGQSLLATGFPYTHDELWSRNIEHFKLLTDRTQGVRRAGAAALDFCHVARGWLDGFWELELGAWDMAAGVLIVQEAGGQVSKLNNDP

SEQ ID NO: 139160 - protein, 210 aa, Unknown
  Bacterial polypetide isolated from the Sargasso Sea
MNQKDKDEFLKTAIYAANEASKVILRSNQKTVKTYKAKTDLVTSTDHESEEVIIDIIRSKYPDHSVLAEESGNFKKHLDYNWIIDPLDGTTNFVHSYPLFGVSIALSHKDKIIVGVVMELPSLNVYSAIQNGPAYCNDKIIKVSNNNKLIDSLLVTGFGYEHGYLWEDNMKLFKIFTDLTQGVRRSGAAAIDICHAASGKTDAYWEFDIK

SEQ ID NO: 139161 - protein, 170 aa, Unknown
  Bacterial polypetide isolated from the Sargasso Sea
MLSVAKAAARDASDLILYANETDRKSSNKSTITDLVTETDKKAEQVIIDDILAKFPDHNILAEETGETTSNSEYLWVIDPLDGTTNFVHGLSPYCVSIALLKNDKPFLSVISELPSENLFWAIKGHGAFCNGDKISVSKRSSIRDSLLITGFPYQHDSKWETNMKLFKHF

SEQ ID NO: 139162 - protein, 234 aa, Unknown
  Bacterial polypetide isolated from the Sargasso Sea
PKVSSKKGKTDLVTETDLLSEKVIKSTIRSEFDDHSIMAEESGKELTQSDYLWIIDPLDGTTNFVHGYPSYGISIGLYYKRKPLLGIVMEMPNVKLYTAVIGSGAFCEGQKINPSETETLNESLLVTGFGYEHLENWERNMKLFKHFTDITQGVRRLGAAAIDICHVASGLVDGYWEYDLKQWDMAAGLIIASEAGCRVTDIRGKKHQLEVDNVVVTNKLIHDELISESSSYLN

SEQ ID NO: 139163 - protein, 140 aa, Unknown
  Bacterial polypetide isolated from the Sargasso Sea
MHPMLTIAVRAARKAGNVIAKHYETPDSVETSQKGSNDFVTNVDKAAEAIIIETIRKSYPQHTIITEESGEHAGEDQDVQWVIDPLDGTTNFVKRLPHFAVSIAVRIKGRTEVAVVYDPMRNELFTATRGQGAQLNGYRL

SEQ ID NO: 139164 - protein, 261 aa, Unknown
  Bacterial polypetide isolated from the Sargasso Sea
MIQSPKNEFLDTALKAAKSAAHLIQHSTKNYVTNYKSETDLVTKTDIDSEKIISDIIRSKFPGHGILAEESGLDDNKTTNYVWVIDPLDGTTNFVHNYPSYGVSIALLEKGSPIVGVVVELPAMNIYHATFDTDSYCNGEKIHVSSNKKLIKSLLVTGFGYEHGPNWKKNMRLFQEFTDITQGVRRLGAAAVDLCHVACGKVDGFWEFDLNPWDVSAGILIVEKAGGKIRKMNGDKYSIYDNQIMAANGHIDEEMIKVSKI

SEQ ID NO: 139165 - protein, 263 aa, Unknown
  Bacterial polypetide isolated from the Sargasso Sea
MIQSPKNDFLDTALKAAKSAAHLIQHSTKNYVTNYKSETDLVTKTDIESEKIISDIIRSKFPGHGILAEESGLDDDKTTDFVWVVDPLDGTTNFVHNYPSYGVSIALLEKGSPIIGVVVELPAMNVYHATDETHSYCNDEKIHVSTNKKLIQSLLVTGFGYEHGSNWKKNMRLFQEFTDVTQGVRRLGAAAVDLCHVACGKVDGFWEFDLNPWDVSAGILIVERAGGKIRKMNGDKYSIYDNQIMAANSHIDEEMIKVFKDII

SEQ ID NO: 139166 - protein, 264 aa, Unknown
  Bacterial polypetide isolated from the Sargasso Sea
MSPINKDELLNVAIEAALAASNLVMEASDRPRVANHKGITDLVTETDLKSEKTIKAIIRSFYKDHTILAEETGQDTNISDYLWIIDPLDGTTNFVHGYPSFAISIGLFYKNEPLVAVVVEMPNMRMYTAIKGQGAWCEGKNINCSDTKSLERSLLVTGFGYEHGENWDNNMNLFKQFTDDTQGVRRLGAAAVDICHVAKGVADGFWEYDLKPWDTAAGILIAKEAGCMVTDLSGNQFDINNNNILITNGHIHQNMVNNIERYLN

SEQ ID NO: 139167 - protein, 197 aa, Unknown
  Bacterial polypetide isolated from the Sargasso Sea
MLDGKNYYASMCPTPDEFYLFWTLIIERKIETIVNLTGFVEKTIQKCHKYFSTEKKNMPIKDPSNNASEQINIKTIKIKSIKMENSEEYQKYGTEYTIEIYKNNQLHTLKIIHCDTWPDHGVPTPESNLLYNIYELLMKNKKKNILVHCSAGIGRTGTLLSYITTRNVIQKQVEKYNNITYEHMLKICNICFQVIRS

SEQ ID NO: 139168 - protein, 206 aa, Unknown
  Bacterial polypetide isolated from the Sargasso Sea
MKILLTNDDGYDAPNIVSLYKKLSKKHDVWIVAPEKNCSGMSAAISFLKEIEVRKVADKIFAVDGTPADCTYLGLLSIVDFEFDIVISGVNHGANIGNDVIYSGTVGAAVGGRKLKYPPIAISVASYSTLNIDFIVNKSSELIDKIIKLPAIFDGKVFNINFPDLNEKKCKGIKVTGVAKRDIPAKPIEVESENDNKRYRYNLSGK

SEQ ID NO: 139169 - protein, 206 aa, Unknown
  Bacterial polypetide isolated from the Sargasso Sea
RLAKNRYSINGTPTDCVVMAINKIIQDKPPDIVLSGINNGSNIGEDLTYSGTIAVAIEATLAGIPAIALSQGCNEKDPNSKIDWSAAEIHAGNIIKRLLSTAWPKNVLINVNFPPVPSKRVKGIEITRMGYRKIGDEIIEGSDPKGKSYFWIGAQKLSNNNPPGTDLGAIQNDLISISPLSINLTHQAMMRKLREAFKEQGFSQDG

SEQ ID NO: 139170 - protein, 104 aa, Unknown
  Bacterial polypetide isolated from the Sargasso Sea
MDKKRPLILVTNDDGITAPGIRCLIDVMNEIGEVVVIAPDSPQSAMGHAITINSTLHCQKVVMDTGPQIEYSCSGTPADCVKLGINEILDRKPDLCVSGVNHGS

SEQ ID NO: 139171 - protein, 140 aa, Unknown
  Bacterial polypetide isolated from the Sargasso Sea
ILLISGINEGVNLGYDLLYSGTVAVAREGALNNIKSIAISIDKSNKKINWNALEYFAPKIFHEFIKIKLSNNLFFNVNFPSCDKEQIKGIKIVKMSKRKLGKLKKIDNNNYIMPSERKIIRSAKPNEDEFELRQGFITIT

SEQ ID NO: 139172 - protein, 86 aa, Unknown
  Bacterial polypetide isolated from the Sargasso Sea
MRILITNDDGINAPGLKVAKKIAKSIIGNNKGEITIIAPSSEKSGVSHSISFVRPSLIQKINKSKYSLEGTPADCILAGIKLCYEK

SEQ ID NO: 139173 - protein, 171 aa, Unknown
  Bacterial polypetide isolated from the Sargasso Sea
MKDRNIDLVVSGINHGSNTSISVLYSGTMSAAIEGAIEGTPAIGFSLCDFNPKADLSHVDEYVEKIASEALIKGLPKATALNVNIPHKQNESIQGIKICRQANARWEEEFDQRRDPNGRDYFWMVGNFVNHDKGEDNDEWAIANNYVSIVPCQFDLTAHHAITRLNDEWDF

SEQ ID NO: 139174 - protein, 70 aa, Unknown
  Bacterial polypetide isolated from the Sargasso Sea
RHRAESVIRTEDPRGQPVYWIGPPGNQQDAGEGTDFAAIEQGYVSITPLTIDMTAYGSLSTLGAWLDLQG

SEQ ID NO: 139175 - protein, 225 aa, Unknown
  Bacterial polypetide isolated from the Sargasso Sea
ETTVVAPKSEHSGAGHAITISRPLQSENISLSCGLSGYAVNGTPADSVKFAMSVVMKTKPDILVSGINPGSNVGQSILYSGTVSAAREGTFRGINSIALSIDGDSQFNYQGAKEVSKTLVNSVINNNLPNHILLNVNIPNIPLSSIKGYKITKQGSMSFNDKFEKFNNSRGSSYYWLTAEQEDPDKTNKSDRIAVKNGFVSITPIHSVQTDFEFMDELNSWKIDQ

SEQ ID NO: 139176 - protein, 138 aa, Unknown
  Bacterial polypetide isolated from the Sargasso Sea
MRILITNDDGINAPGLKILTKIALQLTDEVNVFTVAPSSERSGVGHCISYTSPMMISEIEQNRFSVDGYPADCVLAGIYHVFDGQKPDLVLSGVNRGNNSAENVLYSGTIGAALEGALQGIKSIALSQYYGPQNLNLE

SEQ ID NO: 139177 - protein, 42 aa, Unknown
  Bacterial polypetide isolated from the Sargasso Sea
QRDSVHIALTGMAEASPDLVVSGINNGQNMGEDTLYSGTVRP

SEQ ID NO: 139178 - protein, 307 aa, Unknown
  Bacterial polypetide isolated from the Sargasso Sea
YQKYPFEWIIGVDFSQLKESNLTNDDGIYGDPSDLYSPYISKSSILRNYKSKNLSIFGNVDYFLNEQYKLAFGMRWENWNSKYNDSNNESFNPSNYMNGGKLSLIKNMNTKSNMFLSIAHGYKHGGFNLGLDALDNSINKNLIYDPEFLTNYEFGINSTFNNRDLNLSAVIFYSKRKDQQVLISRQVDPADPNTFSYLTQNAADGKNYGFEINSNFLLRDRMLLYLNLGILKTQINNWESREDLENRAQAHAPERTLSAGINFDMNHNKYFKIEINGKSDFYYSESHNNKSKSYQLINLTLEKIKAP

SEQ ID NO: 139179 - protein, 129 aa, Unknown
  Bacterial polypetide isolated from the Sargasso Sea
VQEIERENGFKGYAVSGTPADCAKIAIRSLMILQPDILISGINQGANLGTTLIYSGTVSAAAEGAMLGISSIAISLASFISDDYGTAKKVATDVVKHVMKNNLPRGTLLNVNVPDCNEKMINGFRITRQ

SEQ ID NO: 139180 - protein, 171 aa, Unknown
  Bacterial polypetide isolated from the Sargasso Sea
MIFALNKIFTNKPPDFIFSGINNGTNIGDEISYSGTVAAAFEGALRGIPSIALSLARNNNNQKNFKVVEKFFPQVMSKINEIRFLDSSFFNVNFPNCDIKKVKEIIVTKICHTKISDEIHVNMKNNYFEIGKMNVKTTHDINSDFYAIKQNFISITPISTNMTNNKYFDDI

SEQ ID NO: 139181 - protein, 57 aa, Unknown
  Bacterial polypetide isolated from the Sargasso Sea
MKPLNILISNDDGVFAAGIRALAKSAQKRGHKVKVVCPDQERSATGHGLTLQSPLRV

SEQ ID NO: 139182 - protein, 123 aa, Unknown
  Bacterial polypetide isolated from the Sargasso Sea
MRILITNDDGINAAGIKSLKKIALEMSTKENVFVVAPSANQSAKGRSISYKTTFEIIKKNVNEYSVNGTPTDCIIFALEHLMKNKKPDIVLSGINWGYNLSEDLFYSGTIAAALESADRGICR

SEQ ID NO: 139183 - protein, 227 aa, Unknown
  Bacterial polypetide isolated from the Sargasso Sea
VVAPEINNSGAGCSITTNKPLKVTHHENGFMSVNGKPADCVHLGIHELTPWKPDLVISGINLGANMGEDLLYSGTVGAALEGRGLKYPSIAISAAAFKQPGSENSLEPNNQTAALVIKEIIENYESIELDSSVILNINTPNVEYSDSLNKRITIIGSWGKRNPPNKKIKSNGTEEFWTSHRDKFLLNDENTDINCLLDKEVSISPIIPNFSNQDNLAEVTKWIEQWN

SEQ ID NO: 139184 - protein, 128 aa, Unknown
  Bacterial polypetide isolated from the Sargasso Sea
MRILITNDDGINAPGLKILTNIALQLTDEESVFTVAPSSERSGVGHCISYTSPMMITEIEKNLFSVDGYPADCVLAGIYHVFDGRKPDLVLSGVNRGNNSAENVLYSGTIGAALEGALQGIKSIALSQ

SEQ ID NO: 139185 - protein, 196 aa, Unknown
  Bacterial polypetide isolated from the Sargasso Sea
FFSVRGRPADCVYLGINELAPWKPDIVISGINLGANMGEDLLYSGTVGAALEARGLDYPSIAISAAAFHQPGSENFMEPNYQTSADVILDLLKNYELDAIDPSLVLNINTPNVDFSKDLGYVITSVGTWGARNPPGVERDLKGNKTYWTTHRDKFPQNIKNSDIATLQDSKVSISPINPSFTIDEVSTGSFTLKMK

SEQ ID NO: 139186 - protein, 144 aa, Unknown
  Bacterial polypetide isolated from the Sargasso Sea
NVPSMAISVASFKWKNFEFASEIAMNIAEQAINDSWPKSLLLNLNIPPCERNKIKELSWTRLSIRKYKNQFSKREDPRGDDYYWLAGEAVLDLKSKGDGPKNWPSDVSQIQENKISLTPVEPDLFWRGSLDVLPKINASFINAS

SEQ ID NO: 139187 - protein, 242 aa, Unknown
  Bacterial polypetide isolated from the Sargasso Sea
MRILLTNDDGINAPGLQVLEAIARNLTNEENIFIIAPNSERSGVGHCVSYNAPTQIERISDNRYSVSGYPADCVIAGIHHVMKDDPPSLILSGVNRGNNSAENVLYSGTIGAALEGALQSITSIALSQYLGPESKKMSNPFNPSITHGLNVIQKILDNDKHTNGGYKVFYNVNFPPTENIKGVAVVPQGLRPNTTFGVNPFTTPNGKEFLFIKGGNQHIQVSQKSDVAANLSGYIIFNANES

SEQ ID NO: 139188 - protein, 177 aa, Unknown
  Bacterial polypetide isolated from the Sargasso Sea
MIFALNYLFKKNKPDLILSGINAGSNIGDEVSYSGTVAAAWEGAVRGIDSIALSQHGGDNKINSYECSKTNGFKIINYLLNINAKMPKFYNVNFPYIISTSFKNVRSSFTILASQKIADEIFFDDDFSSFTIGRMINDHRSSINTDLECLQKNKISITPLSLNLSNNEVFNKINHDI

SEQ ID NO: 139189 - protein, 242 aa, Unknown
  Bacterial polypetide isolated from the Sargasso Sea
MSTPTILIVNDDSIFSSGIKALWEAMSEIGNTTVVAPKSEHSGAGHAITISQPLDAEKIDLKCGLSGYGVNGTPADSVKFAVNLLMDKKPDILVSGINSGSNVGQSILYSGTVSVAREGTFRGISSVAISLDGDSENDYTPSKIISQEIVKSVLKYGLPNDTLLNVNIPNLPKKEIKGFKITKQGSMYFSDIFKKIENNRSLEGYWLTAKHNDPDLSNDNDSIAVKDGYVSVTPLHCEQTNF

SEQ ID NO: 139190 - protein, 83 aa, Unknown
  Bacterial polypetide isolated from the Sargasso Sea
MNILLTNDDGFDADGIQAIRTALEKSHNVYVVAPEKNCSGLSASISYMKEIEIKKESERLYIVKGTPADCAYIGLLNLLNDEI

SEQ ID NO: 139191 - protein, 221 aa, Unknown
  Bacterial polypetide isolated from the Sargasso Sea
MEFINVYPWLSVLTQFNSKTFEKEIILFSIRDRSTIKSISLQPNAQILFIDASDINYESYLDDDISQRIRDYEFSVFTRDGEINFPVYGSFKPSDLLRFSGIDLENYSNLGIYSSPYEDLIIKKEISQLSLSAKRSNSLTLLAEKEKTISVKILGAVEYPGEFEVSSNSSIQDFYSLIGGFQKDADLDAVVLQRKNIKERQIAALNKARDELNNLIVTNSI

SEQ ID NO: 139192 - protein, 255 aa, Unknown
  Bacterial polypetide isolated from the Sargasso Sea
MKILLSNDDGYDAPGLEVLFETLKDFAELCVVAPEENNSGAGCSITTNKPMHVTKQKNGFFSVSGRPADCVYLGINELAPWKPDIVISGINLGANMGEDLLYSGTVGAALEARGLEYPSIAISAAAFHQPGSEDFMEPNYQTSANVILDLLQNYELAKIDPSLVLNINTPNVEFSKDLGYVITSVGTWGARNPPSVERDLKGNQTYWTTHRDKFPENIKNSDIATLQDSKVSISPINPSFTLDEESNGSFTLKMK

SEQ ID NO: 139193 - protein, 77 aa, Unknown
  Bacterial polypetide isolated from the Sargasso Sea
MKILLTNDDGYFSKGIVMLDEMLSEVGDVTIVAPENNHSGASSSLTLKNPLRIRKYKDNGFYVNGTPADCVFMALTR

SEQ ID NO: 139194 - protein, 196 aa, Unknown
  Bacterial polypetide isolated from the Sargasso Sea
MTFEELNKDTFVISGTPADCSYFGLHGSKKFDFKQLVSGINLGSNLGTDIFYSGTVGAAIAGLKLRYPPIAFSVASYQPKDLDFIAKKCVEICLYVRNTNIANRYLVNVNFPDINENNYIGSKLTTLAEREKPESPIENNSDGLKFRFNASGKMKEDQLSSDIDAINNGFVSISLFDYDLTRNIDLKKINWNIDGA

SEQ ID NO: 139195 - protein, 143 aa, Unknown
  Bacterial polypetide isolated from the Sargasso Sea
MRILVTNDDGIDSEGMHALARSARSLGHEVTIVAPNFDASGTGASLGPLSRKEDIVYETHEIPDFDGDAYSINGPPALCVIVSHLEAFGPVPDLVLSGVNPGLNTGRSTLHSGTVGAVLTAQNFGTKGIAVSLHSEDESLPWL

SEQ ID NO: 139196 - protein, 235 aa, Unknown
  Bacterial polypetide isolated from the Sargasso Sea
MRILLTNDDGINAPGLQVLEAIARNLTNEKNIFIIAPNGERSGVGHCVSYNAPTQIERISENRYSISGYPADCVLAGIHHVMKDDPPSLILSGVNRGNNSAENVLYSGTIGAALEGALQSITSIALSQYLGPESKKMSNPFNPSITHGLNVIQKILDNDKHTDGGYKVFYNVNFPPTENINGVAVVPQGLRPNTNFGVNPFTTQNGKEFLFIKGGNQHVQVSQKSDVAANLSGYI

SEQ ID NO: 139197 - protein, 221 aa, Unknown
  Bacterial polypetide isolated from the Sargasso Sea
SGAGSSLTANQPIQISEKENGFYAVSGTPVDCVFLGVRELCPFKPDMVVSGINKGANMAEDLRYSGTVGAAFEGEELDLPSIAVSAAILKGGEGPEQEPNYESAALVARNLVLKIRDLKIDSKLTLNVNVPNLPYDQIKGIKTTSIGTWGPRNPPERTENPQEYLVTHRDKRPFNDESTDIATVYRGEVSISAIKPNFLHREEIEKEQNKFDLEISRWLEK

SEQ ID NO: 139198 - protein, 193 aa, Unknown
  Bacterial polypetide isolated from the Sargasso Sea
SKNIFSVDGTPADCSYLGLLSVIPDSIEMIVSGINLGANLGEDIFYSGTVGAAIAGRRLSYAPVAFSVTAFNPKNLSFISEQASLIVNQVSKLPNDKNIIVNVNFPDLSSSELNGTKLTMLGKRGTPDTPDLIGSNNSSKFYSFGPSGKLLPNQVDTDIQAIDDNYISISILDYNLSVDASNWNFYREVFNCE

SEQ ID NO: 139199 - protein, 308 aa, Unknown
  Bacterial polypetide isolated from the Sargasso Sea
MSRFPILLTNDDGINSPGLQHLASSLHSLGHPIAILAPLTEQSAVGMKLTLRDDMAFEEHTDIAEKIRTDETVPLRAFSLDGSPCDCVIVAIDGGLRSWAPEIRPWLCISGINRGPNLSVDVLHSGTVSAAREASLYGLPSLSVSLATYSHQDYSQSIEATLALVERLSELVTVEPSNILRPEGSRTRPIEGTGPNSLRSWFMQGNMFLNLNIPEDWNGTFQTVPLGARWYHNATDMIDQKSMGVAFEVGAARIVDEEIEMTDCHAIASGSASITPLASWPQNHPLGVPQSIMQASTVMDVDGMPSWI

SEQ ID NO: 139200 - protein, 255 aa, Unknown
  Bacterial polypetide isolated from the Sargasso Sea
MNKPNILITNDDGIYSEGIYALWEAMGEVGNPFVVAPNTEQSGSGHGITLNNPLRVNKITRLNGFKGYAVTGSPADCTKIGIRSLMKSDPDILISGINQGANLGTNLIYSGTVSAATEGAVLGIPSIAISLASFKTSDFDLAKTVAIDTVKHVLRYSLPKGTLLNVNVPCCDKDQINGTRITKQGNQYFVDEYEKRTDPSHKDYYWIKGEIIDDDSSIDYDGKAISENYISITPIHFKLTNEQYLKELVSQFTDE

SEQ ID NO: 139201 - protein, 56 aa, Unknown
  Bacterial polypetide isolated from the Sargasso Sea
MKPLNILISNDDGVFAAGIRALAKSAQKRGHNVKVVCPDQERSATGHGLTLQSPLR

SEQ ID NO: 139202 - protein, 435 aa, Unknown
  Bacterial polypetide isolated from the Sargasso Sea
MGGPTKNKNLKYRFVIRTDYADGFRKNIFLNKKDTSRKDELTLRYKLDWDIDNATKIKFLVSQVDINDPADIWTIDGSLNTLSDRPGMDSQKTNTYGIKIFKNYKNFDLQSYTSTTKTDVIFSYDADWGNQDSHFPYTYDYFSETLRNRDTFSQEIRFLSKNGSFLSKMPLEWVIGVDFTQLKETNLTNDDGIYGDPSDLYSPYVSKSSILRNYKSQNLSIFGNIDYFLNKQYKLAIGMRWENWDSKYNDSNNESFNPSNYMNGGKLSLIKNMNTKSNMYLSIARGYKQGGFNLGLDALDNSLNKNLIYDPEFLTNYEFGMNSKFDNKDLNLSAVIFFSKRKDQQVLISRQVDPADPNTFSYLTQNAANGKNYGFEFNSNFLLKERILIYLNLGILKTQINNWESREDLENRSQAHAPERTFSAGINFDMSNNKY

SEQ ID NO: 139203 - protein, 77 aa, Unknown
  Bacterial polypetide isolated from the Sargasso Sea
MKPLNILISNDDGVFAAGIRALAKSAQKRGHKVKVVCPDQERSATGHGLTLQSPLRVERKDELFEEGIEAWGCSGTP

SEQ ID NO: 139204 - protein, 108 aa, Unknown
  Bacterial polypetide isolated from the Sargasso Sea
MKILLTNDDGFEAPGILQLYESLKDKYEVFFLAPKENMSGKGSAITVWDQPSFQNHGNGIHSLNGTPVDCVKYAINFYCPFTPDLVVSGINHRAQTLEQISYFQGLWS

SEQ ID NO: 139205 - protein, 405 aa, Unknown
  Bacterial polypetide isolated from the Sargasso Sea
TDVVFSYDADWGNPESHYPYTYDYFSETFRKRDTLRQELRILSKSKDFSSKSRLKWVFGVDFNNLKETNLTNDDGIYGDPSDPFSPYLSESSISRDYEADNFSLFGNIDYFLSENYLFTFGLRRENWDSKYNDSNKESFNPSDSMNGGKASLIKNYDDSSNIYFSIARGYKQGGFNLNLDALDIDSNNSLIYDPEFLTNYEIGFNSNINLSLNYSAILFFSQRDDQQVLISRQVDPNDPNTFSFLTQNAAEGENYGFEFSSKFMFTNDIILFANLGLLKTKIKNWESRPDLEGRAQAHSPERSYSIGMNANLTPNINFKINFNGKSSFYYSDSHDNKSDSYVLTNITLSYKKQNSSINIWARNIFNKYYSTRGFYFGNEAPNFVDTLYKRQGDPKIVGISIRHNF

SEQ ID NO: 139206 - protein, 290 aa, Unknown
  Bacterial polypetide isolated from the Sargasso Sea
MRASSKLKVFLIIFFIAIFAIIAARHFIGLHFKKKFSVRPAPGVIVEKVERSLFYKSIETFGTALAQNSKTYRIKTNEVAGKLNIDNRFVKKGEIILRLTSGEEVIADFAGKLGKREIAQGVLGSESLIVTLDDLKKIVIDIKVPENYVSVLKPGLKAEITSSAFKKAFKGKIQTISSRIDPSTRSILSRVLVDNSNFEIIPGQLMTVKIIYDEINQIGVPESAVTIQGSTAFVYTVRDETAEKKNIEIGKRNFGKVSVVSGINEGDLVIIEGVSKVRNNAKIKIINPNN

SEQ ID NO: 139207 - protein, 251 aa, Unknown
  Bacterial polypetide isolated from the Sargasso Sea
MRILLTNDDGYDADNLKNLYEKLSKNHEVWIVAPKNNCSGMSAAISYLKEIEVIKIDERIYAVDGTPADCSYLGLLSIVDFEFDIVISGINHGANIGNDVIYSGTVGAAVGGRNLKYPPIAISVASYDAKDIDFISKKSIEIINKIVTFHDSFKGKVININFPDISENEFKGIRATGMSKRDVPARPIKLENTSENENVSKYRYAYSGEPIKDNFITDAEAIKDGYVSVSVLDYSLNSKEFINDLSDLINE

SEQ ID NO: 139208 - protein, 246 aa, Unknown
  Bacterial polypetide isolated from the Sargasso Sea
MNILLTNDDGFDADGIKAIRTALEKSHNVYVVAPEKNCSGLSASISYMKEIEIKKESERLYIVKGTPADCAYIGLLNLLNDEIDVLVSGINLGANIGNDVLYSGTVGAALGGRKLKYPPIAISSCEYKPKSLEFIANKSCELVELITSFEKQEILNKVVNINFPDIDEKSYKGIKVVPIAKRDVPPTPDILKNNSDIQSFKYAASGAPIKEDFLTDAEAVKLGYVSISILDYELLDPNFNSLEFEN

SEQ ID NO: 139209 - protein, 245 aa, Unknown
  Bacterial polypetide isolated from the Sargasso Sea
MKRPLILVTNDDGINAPGIRTLISVIKDLGDVIVVAPDSPQSGMGHAITINSTLHSSRITPKNSEITEYSCSGTPADCVKLAINELMPRKPDLCVSGINHGSNSSINVIYSGTMSAAIEAGIEGVPAIGFSLLDYSWNADFSQSKDFIKKITLNALNNGIPKGVVLNANIPAVKKSDIKGVKICRQANAYWVEEFDKRKNPLGQEYYWLTGKFVNKDQGEDTDEWAIKNNYISIVPVEFDLTAHP

SEQ ID NO: 139210 - protein, 124 aa, Unknown
  Bacterial polypetide isolated from the Sargasso Sea
MKILLTNDDGYKAHNIQCMYDELSKDHDVWIVAPKNNCSGMSAAISYLSEIEVMKVDDKIYAVDGTPADCTYLGLLSIVDFEFDIVISGINHGANIGNDVLYSGTVGAAVGGRNLKYPPIAISV

SEQ ID NO: 139211 - protein, 140 aa, Unknown
  Bacterial polypetide isolated from the Sargasso Sea
MKRPLILVTNDDGINAPGIRTLISVIKDIGDVIVVAPDSPQSGMGHAITINSTLHSSRITPKNSEIIEYSCSGTPADCVKLAINELMPRKPDLCVSGINHGSNSSINVIYSGTMSAAIEAGIEGVPAVGFSLLDYSWNAD

SEQ ID NO: 139212 - protein, 104 aa, Unknown
  Bacterial polypetide isolated from the Sargasso Sea
MKILLTNDDGIESEITRALFESLKEKHEVTLIAPEKDKSGQGAAITLRTSVGVNKLDDNVYSVGGTPADCIFMGLMAIMKELPDMVISGINKGANMGDDVIHSG

SEQ ID NO: 139213 - protein, 232 aa, Unknown
  Bacterial polypetide isolated from the Sargasso Sea
MFALLSNDDGIYAPGLAALEDIVKDEFQTLVVAPSTEQSGVGHGITFLSPLTAKEVFRGEKRRGWAVDGSPADAVKLGVSEICPQRPDLIISGINAGLNAGINVLYSGTVAAAIEGSFFGITSIAVSLEWDEHMNFEQAAAMAGGLVKGLVSLHPPAGSLFNINIPTAALVGRPDVRVVPMSIDRYGEAFERRVDPRGRIIIGRVTIHRHHHLFEEAMSQHSLRVHYDYSAS

SEQ ID NO: 139214 - protein, 227 aa, Unknown
  Bacterial polypetide isolated from the Sargasso Sea
MAKPLILVTNDDGINAPGIRTLINVMKDVGDIIVVAPDSPQSGMGHAITINSTLHSSRITPKDSEIIEYSCSGTPADCVKLAINELMPRKPDLCVSGINHGSNSSINVIYSGTMSAAIEAGIEGVPAIGFSLLDYRWNANFSESKDFIKKITENALKNGIPKGVVLNVNIPSVEKSKIKGVKVCRQANASWVEEFDKRKNPLGQEYYWLTGKFVNKDNGEDTDEWAL

SEQ ID NO: 139215 - protein, 94 aa, Unknown
  Bacterial polypetide isolated from the Sargasso Sea
MKPLNILISNDDGVFAAGIRALAKSAQKRGHKVKVVCPDQERSATGHGLTLQSPLRVERANELFEEGIEAWGCSGTPADCVKLALSELLDINLI

SEQ ID NO: 139216 - protein, 114 aa, Unknown
  Bacterial polypetide isolated from the Sargasso Sea
AAVYARRIVQGLLAHPIASDQILNINVPDLPLDEIKGIRVTRLGARHKAEGIVRTQDPAGKEIFWLGPPGVEQDASEGTDFHAVAHGYVSITPLTVDLTAYRQLSVLQDWVDKI

SEQ ID NO: 139217 - protein, 150 aa, Unknown
  Bacterial polypetide isolated from the Sargasso Sea
MSWILLTNDDGIDATSLQILVDRLHERGHKLIVFAPSENNSAVSMKISLGIPLTVVNRKDPRENVHQYEIGGTPCDCVIAALDGGLKKLLPGIIPKLVVSGINLGPNMSQDAYHSGTMAAAREAGMYGVPTIASSWSSFDPEGYGNISRC

SEQ ID NO: 139218 - protein, 165 aa, Unknown
  Bacterial polypetide isolated from the Sargasso Sea
MKKIKKILITNDDGFDAIGLEILKDIANMFSEVVYTVSPKNNQSAKSKSITINKEIHFDKITDYIWVVDGTPTDCIIFALNHIMKTDKPDLILSGINAGSNVGDEVSYSGTVAAAWEGAVRGINSISLSQYGGDNTIESYTCSKNYSFDIINHLINLKTHSPFFF

SEQ ID NO: 139219 - protein, 237 aa, Unknown
  Bacterial polypetide isolated from the Sargasso Sea
MNILLTNDDGFDAVGIKAIRTALEKSHNVYVVAPEKNCSGLSASISYMKEIEIKKESERLYIVKGTPADCAYIGLLNLLNDEIDVLVSGINLGANIGNDVLYSGTVGAALGGRKLKFPPIAISSCEYKPKCLEFIANKSCELVELITSFEKQEILNKVVNINFPDIDEKSYKGIKVVPIAKRDVPPTPDILKDNSDIQSFRYAASGEPIKEDFLTDAEAVKLGYVSVSILDYELLDP

SEQ ID NO: 139220 - protein, 201 aa, Unknown
  Bacterial polypetide isolated from the Sargasso Sea
MLNILISNDDGVLAEGLKLLVNALQEIPEVNVDVIAPEINASGLSNAITLRTPLRAKQLDNGFWYINGTPTDCIKLGLSNFFDHTHDLVISGINHGPNLGDDVIYSGTVGAAAEGRYLKHPPIAISSIGTDTNSLKQAAKVAANLIKNLIQKPITHKAESPYILNINVPESLTDPSAPYAITQQGMRYFAPALPPISDPKG

SEQ ID NO: 139221 - protein, 190 aa, Unknown
  Bacterial polypetide isolated from the Sargasso Sea
IEYSCSGTPADCVKLAINELMPRKPDLCVSGINHGSNSSINVIYSGTMSAAIEAGIEGVPSIGFSLLDYRWNADFSQSTDFISKITLNTLNNGIPKGVVLNVNIPSVKKSNIMGIKICRQAKAYWVEEFDKRKNPFGQEYYWLTGKFINEDQGEDTDEWALNNNYISIVPVKFDLTAHDAIQGLNEWDFK

SEQ ID NO: 139222 - protein, 245 aa, Unknown
  Bacterial polypetide isolated from the Sargasso Sea
MAKRPLILVTNDDGISAPGLKYLVNFMSMIGDVIIVAPDSPKSATSQAITINSPLYVSRSYNHSNAKLEYQLSGTPADCVKFGINEILKKKPDICVSGINHGSNSSVNVLYSGTVGAAIEAGIKGVPSIGFSVLDYRWNAKFDHIEKFIISITLNVIKNKLPSDIVLNVNFPKSKVNGVKVCRQANTHWEEKFCKRENPMGKEYYWLTGDFIDNDKSNETDEYALKKGYASIVPIKFDLTAKELY

SEQ ID NO: 139223 - protein, 254 aa, Unknown
  Bacterial polypetide isolated from the Sargasso Sea
MKPRILIVNDDGIYSPGIKALSDAMIQIGEVTIVAPDKEQSAKSHSISLTNPIRIKSVKLKNGLEGWSVDGTPADCTKIALQELLNQKPDLIISGINQGANLGHNLVYSGTISAAYEGSILDIPSAAISLDTLEGKNFSGSKYVATTIAKHLLNHAPPKGTMLNVNVPNVSKKDLKGFVITRQGNQIFKDTFEKRIDPRGHDYFWIKGEMVNQDSSIDYDGKAVSSGYVSITPIHYNITNKSFLDDLRLQFLDA

SEQ ID NO: 139224 - protein, 192 aa, Unknown
  Bacterial polypetide isolated from the Sargasso Sea
MSKNFWIVDGTPTDCMIFALNHLFNKNKPDLILSGINAGSNIGDEVSYSGTVAAAWEGAVRGIDSIALSQYGGDDKINSYECSIAKGFDIINYLLKIKSQTPRFYNVNFPFIISSNVENVRSSFTTLASQKIADEILFDDDFSSFMIGRMINDHSSLINTDLECLKKNKISITPLSLNLSNNEFLKKMNHDI

SEQ ID NO: 139225 - protein, 245 aa, Unknown
  Bacterial polypetide isolated from the Sargasso Sea
TNDDGIYSSGIFALWDVAKEFGEVNVIAPINEKSAVGHGITISNPLYVKEIEREDGFKGFAVSGTPADCVKLGMKSLLPFNPDLILSGINIGSNLGNNIIYSGTVAAAIEGATLDIPSIAISIDSYKPGSFSTSKIVVRKVINFMENNTIPSGTILNVNIPDCEPSDLKGYKITSQGHQYFNDNFEKRTDPRGRDYYWMTGEIIDNDKEFRYDGFAVSNGYASITPIHFMMTNTNCLDELEGSII

SEQ ID NO: 139226 - protein, 244 aa, Unknown
  Bacterial polypetide isolated from the Sargasso Sea
MKILLTNDDGYKAHNIQNMYEELSKDHDVWIVAPKNNCSGMSAAISYLSEIEVMKVDDKIYAVDGTPADCTYLGLLSIVDFEFDIVISGINHGANIGNDVLYSGTVGAAVGGRNLKYPPIAISVASYDAKDISFITKKSLELINKIIKFSETYSGKVININFPDISEDEYKGAKATGLSKRDVPAKPIEIEDQSLSKETYRYRYNLSGEPIKGDYVTDAEAVMDGYVSISVLDYSLGSSEFIDN

SEQ ID NO: 139227 - protein, 240 aa, Unknown
  Bacterial polypetide isolated from the Sargasso Sea
MNILLTNDDGFDADGIKAIRTALEKSHNVYVVAPEKNCSGLSASISYMKEIEIKKESERLYIVKGTPADCAYIGLLNLLNDEIDVLVSGINLGANIGNDVLYSGTVGAALGGRKLKYPPIAISSCEYKPKSLEFIANKSCELVELITSFEKQEILNKVVNINFPDIDEKSYKGIKVVPIAKRDVPPTPDILKNNSDIQSFKYAASGAPIKEDFLTDAEAVKLGYVSISILDYELLDPNFN

SEQ ID NO: 139228 - protein, 156 aa, Unknown
  Bacterial polypetide isolated from the Sargasso Sea
GANLGEDILYSGTVAAAIEGRVLDMPSIAVSSLGNTERDFKVAARVTIELIQRLKKYPLPKDTILNVNVPAINYDEINGFCITRLGNRHRSHPIKKVSKDKSEKVFQIGLPGKGRDAGPGTDFYAIQHNSVSISPLHIDMTHHAIFNNTERWLSKK

SEQ ID NO: 139229 - protein, 196 aa, Unknown
  Bacterial polypetide isolated from the Sargasso Sea
MEKPLILVTNDDGINAPGIRCLIDVMSEIGEVIVVAPDSPQSGMGHAITINSTLHCSKISPKSSKRLEYSCSGTPADCVKLAVNELMPRKPDLCVSGINHGSNSSINVIYSGTMSAAIEAGIEGIPAIGFSLLDYRWNANFSDSKKFIKKITLNALKNKIPKDVVLNVNIPTLKESEIKGIKICRQAKSYWVEEFD

SEQ ID NO: 139230 - protein, 236 aa, Unknown
  Bacterial polypetide isolated from the Sargasso Sea
MSNKKPRILLTNDDGIYSKGIYALWEAMCEIGEVTVLAPNTEKSAVGHAVTISDPIRIEPCSRHGSFEGYAVNGTPADCVKIAIGSFLDKKPNIIVSGINAGSNMGTNILYSGTVSAAAEGTMLGVPSIAFSLNTFNTDNYDLSKEVAIKMTKNVLNHGLPTGTLLNVNIPKCEISECQGYKVTSQGDEYFLDDLEKREDPRGRFYYWMSGKIVNNDTSNEQDGYAIANNWVSVTP

SEQ ID NO: 139231 - protein, 129 aa, Unknown
  Bacterial polypetide isolated from the Sargasso Sea
MVILVVNDDGVHAPGIGCLARFLEPLGEVYIVAPDRDRSGASRSLTLNMPIRLRWLTPRTCSIQGSPADCVHLAMTGLLPQKPDLVVSGINAGANLGQDVEYSGTVAAAIEGQLSTYSPIAVSLNSHDG

SEQ ID NO: 139232 - protein, 225 aa, Unknown
  Bacterial polypetide isolated from the Sargasso Sea
IFKEVWVIAPETEQSAASHSLTLRRPLRVRRLATRRFAVDGTPTDSVLIGVQEVMKSARPDVILSGINRGGNLGEDITYSGTVAAAMEGTLLGLPSLALSQHYKDRQKVSWTTAEAWTARVLRTLLKEDWPAGVLMNVNFPDVPLDAVTGIEVSRQGRRKIGGTLTEGQDPRGEKYFWIGPQRDKDEFKNGTDVGVVTAGGIAVTPLSLDLTHKSMLQKMKAAIG

SEQ ID NO: 139233 - protein, 173 aa, Unknown
  Bacterial polypetide isolated from the Sargasso Sea
LSGINHGPNLGTDIFCSGTVAAAMEGTLENVPSMAISVASFKWKNFEFAGEIAMNIAEQAIKDSWPTSLLLNLNIPPCDKNKIKELSWTRLSVRKYKNQFSKREDPRGDDYYWLAGEVVLDLKSKGYGPKNWPSDVSQIQENKISLTPVEPDLFWRGNLEDLPNINNSFIDPS

SEQ ID NO: 139234 - protein, 156 aa, Unknown
  Bacterial polypetide isolated from the Sargasso Sea
MKEHLNSLRVLLTNDDGISASGLVLLEELLGPLVNELWVVAPQTDQSGTSHSLTLRQPLRVREMGSKRFSVSGTPADCVLLAVNQIMKDCKPDLVISGINRGKNVGEDVNYSGTIAAAKEASAFGIPAIALSQVIDPVDYFSENKEVDLIYSASKT

SEQ ID NO: 139235 - protein, 178 aa, Unknown
  Bacterial polypetide isolated from the Sargasso Sea
MNQKKILITNDDGINAPGIELLINAAKRISSDITIIAPEREQSGRSQAMSLSDIIRLREIDVNIFSISGTPTDCVMLAIKQLMKDNKPDLILSGVNRGQNLADDVNYSGTIGAAMEGAIHNIKSIALSQVFNIHNKGLDAFQATKKNLDRTLDFVLDLDYPDNIVLNINFPDIVEDNL

SEQ ID NO: 139236 - protein, 136 aa, Unknown
  Bacterial polypetide isolated from the Sargasso Sea
AISYLSEIEVTKIEDRIYAVDGTPADCTYLGLLSIVDFEFDIVISGINHGANIGNDVLYSGTVGAAIGGRNLKFPPVALSVASYDAKDLNFLTKKSVELIEKVFKYGENFKGKVININFPDISEEEYKGYVASGFI

SEQ ID NO: 139237 - protein, 254 aa, Unknown
  Bacterial polypetide isolated from the Sargasso Sea
MKPEILIVNDDGIHSPGIQALADAMVKIGNVTIIAPDKEQSGKSHSITLNNPIRLESVNLKKGIKGWSLTGTPVDCAKVAIKKLFNKKPDLVISGINLGANLGKNLIYSGTISAAYEGTLIGISSAAISLDSFKTRNFKGAKYVATLIANHLLQYKLPKGTMLNVNVPNIGKKDLKGLIVTKQGNQSFSDTFEKRIDPRGNSYFWIKGKMINNDNSIEYDGEAVSNGYVSITPIHFNITNESYINDLKKKISYE

SEQ ID NO: 139238 - protein, 122 aa, Unknown
  Bacterial polypetide isolated from the Sargasso Sea
KALKHYHTAAVYARRIVQGLLAHPIASDQILNINVPDLPLDEIKGIRVTRLGARHKAEGIVRTQDPAGKEIFWLGPPGVEQDASEGTDFHAVAHGYVSITPLTVDLTAYRQLSVLQDWVDKI

SEQ ID NO: 139239 - protein, 209 aa, Unknown
  Bacterial polypetide isolated from the Sargasso Sea
MSSPNILVTNDDGIDSPGIYALWQAMSEIGSPTVIAPNIEQSAASHSISLNKPLFIKHISRNCGFKGWSVDGTPADCTKIGIKRVLDQKPDLIISGINRGANLGINLIYSGTISAASEGALLGIPSIAISLASFKTDNYMASKVIAIEIAEYVLENNIPKGTLLNVNVPYGDPEDIKGKLITRQGNQFFKDDLKREPIQEEIHIIDKGE

SEQ ID NO: 139240 - protein, 239 aa, Unknown
  Bacterial polypetide isolated from the Sargasso Sea
MSNKKPRILLTNDDGIYSKGIYALWEAMCEIGEVTVLAPNTEKSAVGHAVTISDPIRIEPCSRHGSFEGYAVNGTPADCVKIAIGSFLDKKPNIIVSGINAGSNMGTNILYSGTVSAAAEGTMLGVPSIAFSLNTFNTDNYDLSKEVAIKMTKNVLNHGLPTGTLLNVNIPKCEISECQGYKVTSQGDEYFLDDLEKREDPRGRFYYWMSGKIVNNDTSNEQDGYAIANNWVSVTPIQY

SEQ ID NO: 139241 - protein, 156 aa, Unknown
  Bacterial polypetide isolated from the Sargasso Sea
MKKKLNNILITNDDGFDAIGIKILLEIAEKLGKNVYVISPKKNQSAKSKSITIRNNIYYKKISNYSWIVDGTPTDCMIFALNHIFNSDKPDLILSGINAGSNIGDEVSYSGTVAAAWEGAVRGINSIALSQFGGDNSKYSYKNSKNNALNVINYLL

SEQ ID NO: 139242 - protein, 97 aa, Unknown
  Bacterial polypetide isolated from the Sargasso Sea
MKPLNILISNDDGVFAAGIRALAKSAQKRGHKVKVVCPDQERSATGHGLTLQSPLRVEKADELFGEGIEAWGCSGTPADCVKLALSELLDHKPDLIL

SEQ ID NO: 139243 - protein, 180 aa, Unknown
  Bacterial polypetide isolated from the Sargasso Sea
MELPIDPAGKRILLVNDDGITAPGLRVLEKIARQFSNDVWIFAPEVEHSGAGHSITLNGAIRVAKVGRQRYSVAGSPTDCVLIAISEFMKDTPPDFVLSGVNLGSNIAEDVTYSGTVAAAMEAALLGFPAIALSQAAGYGKTVRWHVAQKFGPDIVRKLLSIGWRKDVYVNVNFPELCAR

SEQ ID NO: 139244 - protein, 226 aa, Unknown
  Bacterial polypetide isolated from the Sargasso Sea
GDTLIAAPSVEKSASSHSLTLSDPLRVSNIQRKNGFKGWSISGTPVDCVKLAVRNLMDDRPDILISGINHGANLGSNIMYSGTVSAAAEGMIMGIPSIAISLASYETDNYNVAKKFVKKIVKKVIVNGIPKDILLNVNVPYCNEEEVKGVRITKQGSQYFVDEFEERIDPRNGNYFWIKGEMIDEDKSIEFDGAAVKENYVSITPIHYKLTHEPFLNDLRNQYSDD

SEQ ID NO: 139245 - protein, 176 aa, Unknown
  Bacterial polypetide isolated from the Sargasso Sea
MKILLTNDDGYKSQGIKYLHNCLLKYGDVIQAAPSKNMSACSSSLSVHHRVLIRNPSKNYYIINGTPSDCVHIASKGILNKLPDIVFSGINFGSNLGDDVIYSGTVAGAIEGRHCKSSPVSISITSREPKYLMDINDKLDFILSHIFQQNYKSKNIFNINIPDIPYNKIKGIKYTK

SEQ ID NO: 139246 - protein, 193 aa, Unknown
  Bacterial polypetide isolated from the Sargasso Sea
NGFKGYSVNGTPVDCVKIAIRSLSNTMPDLIVSGINHGANLGRNIIYSGTVAAASEGTILGIPSIAISLASSKSHKFDAAKQAAIEIVEYVMKNTLPSGTFLNVNIPYCSINEIRGKKITKQGNQCFVDEYEERIDPRKRLYYWIKGEMVDKDISIDYDGKAVRENYISITPIHFNITDKKYIQKMKNHFPDE

SEQ ID NO: 139247 - protein, 255 aa, Unknown
  Bacterial polypetide isolated from the Sargasso Sea
MKPLILVTNDDGIDSRGIRHLVEIINLFGEVVIVAPDSPQSGMGHAITVGDKLSLVKSDIFNNESTYKCSGTPADCVKIAKHHLLKNRKIDLIVSGINHGSNSSISVLYSGTMSAAIEGAIENTPSIGFSLCDYDPNADLSHTGPFIKKIVQNALENGIPDSIALNVNIPAISKEKIKGIKICKQANAIWEEKFDKRYDPYGREYFWMVGNFVNHDNDPYNDESAINSNYVSIVPCKFDLSSKKGQDYLKKNWKI

SEQ ID NO: 139248 - protein, 211 aa, Unknown
  Bacterial polypetide isolated from the Sargasso Sea
HAITINSTLHCSKISSKSSERLEYSCSGTPADCVKLAVNELMPRKPDLCVSGINHGSNSSINVIYSGTMSAAIEAGIEGIPAIGFSLLDYRWNANFSDSKKFIKKITLNALKNKIPKDVVLNVNIPALKESEIKGIKICRQAKSYWLEEFDKRKNPLGQEYYWLTGKFIDKDKGEDTDEWALKNGFISIVPVEFDLTAHSAIKDLNQWNFK

SEQ ID NO: 139249 - protein, 116 aa, Unknown
  Bacterial polypetide isolated from the Sargasso Sea
MNILLTNDDGYKASGINQLFKTLCTEHKVFLIAPRENCSGMSAAISLRKEIKVEEISENIFSVLGTPADCSYLGLLSVIPEPIEMIVSGINLGANLGEDIFYSGTVGAAIAGRRLN

SEQ ID NO: 139250 - protein, 225 aa, Unknown
  Bacterial polypetide isolated from the Sargasso Sea
MQILITNDDGINAPGLEVAKKIAKSIIGNKKGKITIIAPSSEKSGVSHSISFVRPSLIQKINKNKYSLEGTPADCVLAGVNYVMKHKKPDLIISGVNLGRNISDDILYSGTVGAAMEGALNGIKSIALSQQYSKKTYESDNPFKCALKYGTDICNKILNDNPFSNPKFTGFYNVNFPACSPKEVNGQKICNIGQRKKPTFTMVAQSNTKGRNFLWVKHNLQKSEL

SEQ ID NO: 139251 - protein, 238 aa, Unknown
  Bacterial polypetide isolated from the Sargasso Sea
IRTLISVIKDIGDVIVVAPDSPQSGMGHAITINSTLHSSRITPKNSEIIEYSCSGTPADCVKLAINELMPRKPDLCVSGINHGSNSSINVIYSGTMSAAIEAGIEGVPAVGFSLLDYSWNADFSQSKDLIRKITLNALNNGIPKGVVLNVNIPAVKRSDIKGVKICRQAKAYWVEEFDKRKNPLGQEYYWLTGKFVNKDQGEDTDEWALKNNYISIVPVEFDLTAHHAIQGLNEWDFK

SEQ ID NO: 139252 - protein, 258 aa, Unknown
  Bacterial polypetide isolated from the Sargasso Sea
MSLKPLILVTNDDGITAPGIRSLVEIMNSIGEVVVVAPDSPKSAMSHAITVNSTLHCSRIKIDSGPQKEYSCSGTPADCVKIAVNELLSRKPDICVSGINHGSNSSINVIYSGTMSAAIEAGIQGIPSLGFSLLDYKWSANFEPFTNYVKSITLNVLKNKISNNIILNVNMPRVNSNQEIKGVRICRQAKANWIEKFDKRKNPIGKEYYWLTGEFIDKDTKNDTDEWALKNNYISIVPVQFDFTAYDIIQELNTWDFE

SEQ ID NO: 139253 - protein, 256 aa, Unknown
  Bacterial polypetide isolated from the Sargasso Sea
MAKKPLILVTNDDGISAPGIRTLISVMNEIGDVVVVAPDSPQSAMGHAITINSTLQCHKIKIDDGPQEEYTCSGTPADCVKLGINEILNRKPDLCVSGINHGSNASINVIYSGTMSAAIEASVEGVPAIGFSLLDYSWKANFNPIKKIVKKITLKALKEGIPERTALNVNFPNLNENEIKGIKICNQANTYWIEKFDKRTNPQGRQYYWLTGEFINNDESKESDEWALENGYVSVVPVKHDLTNYEVISKIKSWNL

SEQ ID NO: 139254 - protein, 244 aa, Unknown
  Bacterial polypetide isolated from the Sargasso Sea
MLVNDDGIDAPGFKILKSIAEEISDEIWVFAPKNDKSGAGRSITLRNDIKVKKRSNREFEVDGTPTDCVILGLNHFMKGNLPDLVLSGVNAGRNAADDVTYSGTVGAAWEATVLGVQGIALSQMYDKRFGMNFSASKSYGSSVLKKIIPKISKLNSVININFPPVDEVNVKGLKTVELDSHKLSDNIEYSENSENFRIGSMITRDHQVKGSDLYYLKKGYISITPLALNVTDYKVLKQLRENIL

SEQ ID NO: 139255 - protein, 249 aa, Unknown
  Bacterial polypetide isolated from the Sargasso Sea
MKILLTNDDGYEAENIKYLYEKLSQDHEVWIIAPKDNCSGMSAAISYLKEIPVDKISDRVYAVDGTPADCSYLGLLSIVDFEFDIVISGINHGANIGNDVLYSGTVGAAVGGRNLKYPPIAISVASYDAKDIDFISLKSIEIIERIIQKSDVYTGKVININFPDINSDEFKGVKATVISKRDVPPKPILVSEDGENQSIYRYNYSGEPLEEDFLTDAIAVQEGYVSVSVLDYSLNSKIYIDQLNRILNE

SEQ ID NO: 139256 - protein, 258 aa, Unknown
  Bacterial polypetide isolated from the Sargasso Sea
MLKILISNDDGYDSPGLEVLVEHLKEVAELFVVAPEINNSGAGCSITTNRPLKATIHDNGFVSVNGRPADCVHLGIHELSPWKPDLVLSGINLGANMGEDLLYSGTVGAALEGRGLKYPSIAVSAAAFNQPGSENFLEPNNLTAALVIKEIIENYESIELDSSVVLNVNVPNVAYSKSLNKRVTRIGSWGKRNPPHKETKDNGTEQFWTTHRDKFPSNDKNTDISCLMDEEVSISPIVPNFSNQARFKEVIKWIEQWD

SEQ ID NO: 139257 - protein, 233 aa, Unknown
  Bacterial polypetide isolated from the Sargasso Sea
MKILLTNDDGYDADNLKNLYEKLSKDHEVWIVAPKTNCSGMSAAISYLKEIEVIKIDERIYAVDGTPADCSYLGLLSIVDFEFDIVISGINHGANIGNDVIYSGTVGAAVGGRNLKYPPIAISVASYDAKDIDFISKKSIEIINKIVTFHDSFKGKVININFPDISENEFKGIRATGMSKRDVPARPIKLENTSEKENVSKFRYAYSGEPIKDNFITDAEAIKDGYVSVSVLD

SEQ ID NO: 139258 - protein, 247 aa, Unknown
  Bacterial polypetide isolated from the Sargasso Sea
MKILLTNDDGIESNITRALFDKLRENHDVSLIAPKKDKSGQGAAITLRTSVQIEKQDDNIYAVDGTPADCVFMGLMAIMKDIPDIIISGINKGANMGDDVIHSGTLGAAFTGRKLKYPPIATSISGRSFEHFESAVLATELMLNYVSDNYLENEHTGLVFNVNIPNLPFNEIEGFTFTRLGNRGVPLAPEFDGDDKTVSYKIGKSGDPDGDLTGTDFEAIANKNISVTPLFWDMTNLEKVKGKLPSV

SEQ ID NO: 139259 - protein, 248 aa, Unknown
  Bacterial polypetide isolated from the Sargasso Sea
MKILLTNDDGYDAENIKSLCKELSKNHEVWIIAPKHNCSGMSAAISYLNEIEVTKLEDKIYAVDGTPADCSYLGLLSIVDFEFDIVISGINHGANIGNDVLYSGTVGAAIGGRNLNYPPIAISVASYNAKDINFISKKSVELIEKLISINAFVGKVININFPDIDQSEFKGVLATGLSKRDVPAKPIRVDDSSLNTYRYRYNLSGEPLEDKYMTDAEAVKNGYVSISVLDYSLNSGNFIEEITQVLDE

SEQ ID NO: 139260 - protein, 118 aa, Unknown
  Bacterial polypetide isolated from the Sargasso Sea
MNILITNDDGINAPGLWTSVNHLKKLANITVVAPDRDQSGTGTSMTLRNVVRLHEKPHNDPKVKVYSVEGTPADCVILACEKLMNSSPDLIVSGINLGANLGFDVMLSGTVGAAIHGY

SEQ ID NO: 139261 - protein, 248 aa, Unknown
  Bacterial polypetide isolated from the Sargasso Sea
MKVLLTNDDGYDAENIKSLCKELSKNHEVWIVAPKNNCSGMSAAISYLNEIEVTKLEDKIYAVDGTPADCSYLGLLSIVDFEFDIVISGINHGANIGNDVLYSGTVGAAIGGRNLKYPPIAISVASYNAKDINFISKKSVELIEKLISSNAFVGKVININFPDINQNEFKGVLATGLSKRDVPAKPIRVDDSSSNIYRYKYNISGEPLEDKYMTDAEAVKNGYVSLTVLDYSLNSGNFIDEITQVLNE

SEQ ID NO: 139262 - protein, 135 aa, Unknown
  Bacterial polypetide isolated from the Sargasso Sea
MKILLTNDDGYKAHNIQNMYEELSKDHDVWIVAPKNNCSGMSAAISYLSEIEVMKVDDKIYAVDGTPADCTYLGLLSIVDFEFDIVISGINHGANIGNDVLYSGTVGAAVGGRNLKYPPIAISVASYDAKDISFI

SEQ ID NO: 139263 - protein, 187 aa, Unknown
  Bacterial polypetide isolated from the Sargasso Sea
GTPADCSILGLLSIIDFEFDIVISGINHGANIGNDVLYSGTVGAAVGGRNLKYPPIAISVSTYEAKDIEFISKKSIELINMIVKSGEIFMGKIININFPDITENEFKGCLATGLSKRDVPAEPIKIDESSSPKESYKYRYNLSGEPLSDSFLTDAEAVKDGYVSISVLDYSLGSSSYIDDIKKILDD

SEQ ID NO: 139264 - protein, 263 aa, Unknown
  Bacterial polypetide isolated from the Sargasso Sea
MITNDDGISAEGIKILRAIASEFSDDVWVVAPEHEKSGASHALSFQNELTLKKYEEKTFSVNGTPSDCVAIGISNVLKDKRPDLILSGINSGCNVGEDVTYSGTIAAAMEGLIRRIPSIAISQNYEAGKKNQIVWDASKKFLKNILLELTILGWPNNVFMNINFPYCTADLVKSIQITTQGNRETDDLIINEVQKSKFRFGLRRRLEENVNLSIPPLNETVEGYMSDVEALADHHISITPLHLDLTHHKSLSDLKKGLKTDLN

SEQ ID NO: 139265 - protein, 251 aa, Unknown
  Bacterial polypetide isolated from the Sargasso Sea
MKILLTNDDGYKAHNIQKMYEELSKDHDVWIVAPKNNCSGMSAAISYLSEIEVTKVDDKIYAVDGTPADCTYLGLLSIVDFEFDIVISGINHGANIGNDVLYSGTVGAAVGGRNLKYPPIAISVASYDAKDISFITKKSVELINKIIKSSETYIGKVININFPDISEEEYKGVKATGLSKRDVPAKPIKIEDQSLSKETYKYRYNLSGEPIKGDYVTDAEAVVDGYVSISVLDYSLGSSKFIENLSEIINE

SEQ ID NO: 139266 - protein, 256 aa, Unknown
  Bacterial polypetide isolated from the Sargasso Sea
MADKPLILVTNDDGITAPGIRTLISVMNEIGDVVVVAPDSPQSAMGHAITINSTLQCHKIKIDDGPQIEYSCSGTPADCVKLGINEILQKKPDLCVSGINHGSNASINVIYSGTMSAAIEASIEGVPAIGFSLLDYSWKANFERIKDIAKKITIKALSEGIPSRTALNVNIPNLEKKEIKGIKVCNQANAYWIEKFDKRTNPQGREYYWLTGEFINNDKSTESDEWALKNGFVSVVPVKFDLTNYEVIDKIKSWNL

SEQ ID NO: 139267 - protein, 250 aa, Unknown
  Bacterial polypetide isolated from the Sargasso Sea
MNILLTNDDGFDADGIKAIRTTLEKSHNVYVVAPEKNCSGLSASISYMKEIEIKKESERLYIVKGTPADCAYIGLLNLLNDEIDVLVSGINLGANIGNDVLYSGTVGAALGGRKLKYPPIAISSCEYKPKSLEFIANKSCELVELITSFEKQEILNKVVNINFPDIDEKSYKGIKVVPIAKRDVPPTPDILKNNSDIQSFRYAASGAPIKEDFLTDAEAVKLGYVSISILDYELLDPNFNSLEFENFINE

SEQ ID NO: 139268 - protein, 258 aa, Unknown
  Bacterial polypetide isolated from the Sargasso Sea
MLKVLVSNDDGYDAPGLEVLVEHLKEVAEIFVVAPEINNSGAGCSITTNRPLEVIRHDNGFVSVNGRPADCVHLGIHELCPWSPDLVVSGINLGANMGEDLLYSGTVGAALEGRGLKYPSIAISAAAFNQPGSENSLEPNNLTAALFIKEIIQNYDSIKLDSSAILNINVPNVEYSNSLEKKVTKIGTWGDRNPPNIVIKNDGTEEYWTSHRDKFPSNDENTDIFCLMNKVVSITPILPDFSRENDFKGVEKWIERWD

SEQ ID NO: 139269 - protein, 259 aa, Unknown
  Bacterial polypetide isolated from the Sargasso Sea
MNSPTILITNDDGIYSAGIFALWRAMKEIGNPIVVAPDKERSSVSHAITITSPLRLKKINRAEGFEGYAVSGTPADCVKLSIKSLYKKKPPDIIISGINRGGNMGENIIYSGTVSAAAEGANFGIPSIAISLASDKTDYFDLSKTSAKKIVRHVIKNGMPKGTLLNVNVPYCKQKEILGFKFTRQGNQYFKDKYIERVDPQNQKYYWIKGEVYDEDESIEQDGKAVSKNYVSISPIHFKVTNEAYLAELKNKFIDEQFK

SEQ ID NO: 139270 - protein, 256 aa, Unknown
  Bacterial polypetide isolated from the Sargasso Sea
MADKPLILVTNDDGITAPGIRTLISVMNEIGDVVVVAPDSPQSAMGHAITINSTLQCHKIKVDNGPQIEYSCSGTPADCVKLGINEILQKKPDLCVSGINHGSNASINVIYSGTMSAAIEASIEGVPAIGFSLLDYSWKANFERIKDIVKKITIKALSEGIPSGTALNVNIPNLEKKEIKGIKVCNQANAYWIEKFDKRTNPQGREYYWLTGEFINNDKSTESDEWALKNDFVSVVPVKFDLTNYEVIDKIKSWNL

SEQ ID NO: 139271 - protein, 206 aa, Unknown
  Bacterial polypetide isolated from the Sargasso Sea
SYLSEIEVTKVDDKIYAVDGTPADCTYLGLLSIVDFEFDIVISGINHGANIGNDVLYSGTVGAAVGGRNLKYPPIAISVASYDAKDISFITKKSLELINKIIKSSETYIGKVININFPDISEEEYKGVKATGLSKRDVPAKPIKIEDQSLSKETYRYRYNLSGEPIKGDYVTDAEAVVDGYVSISVLDYSLGSSEFIDNLSEIINE

SEQ ID NO: 139272 - protein, 247 aa, Unknown
  Bacterial polypetide isolated from the Sargasso Sea
MKILLTNDDGIESEITRALFESLKEKHEVTLIAPEKDKSGQGAAITLRTSVEVNKLDDNVYSVGGTPADCIFMGLMAIMKELPDIVVSGINRGANMGDDVIHSGTLGAALTARKLRYPPIAVSISGKSFENFQSSIIATELMLDYIVQNYSDEHHGGLVFNMNVPNLEFVDIVNFSFTSLGTRGMPLAPEFNGSGDKLSYKIGKAGKPAGDLTGTDFEAIRANKISVTPLYWDMTDLSKKKGKLPDV

SEQ ID NO: 139273 - protein, 197 aa, Unknown
  Bacterial polypetide isolated from the Sargasso Sea
MNILLTNDDGYKASGITELYKALSKEHNVFLIAPKENCSGMSAAISLRKEIEVKEISKNIFSVDGTPADCSYLGLLSVIPDSIEMIVSGINLGANLGEDIFYSGTVGAAIAGRRLNYVPVAFSVTSFNPKNLSFISEQANLIVNQVSKLPNDKNLLVNVNFPDLSNSKLNGTKLTVIGKRGTPDIPDFIRSNNSSKF

SEQ ID NO: 139274 - protein, 249 aa, Unknown
  Bacterial polypetide isolated from the Sargasso Sea
MKILLTNDDGYEAENIKNLYEKLSQDHEVWIIAPKDNCSGMSAAISYLKEIPVVKISDRVYAVDGTPADCSYLGLLSIVDFEFDIVISGINHGANIGNDVLYSGTVGAAVGGRNLKYPPIAISVASYDAKDIDFISLKSIEIIETIIQKSDVYKGKVININFPDINSDEFKGVKATVISKRDVPPKPILISEDGDNQSIYRYNYSGEPLEEDFLTDAIAVQKGYVSVSVLDYSLNSKIFIDQLNRILNE

SEQ ID NO: 139275 - protein, 250 aa, Unknown
  Bacterial polypetide isolated from the Sargasso Sea
MNILLTNDDGFDADGIKAIRTALEKSHNVYVVAPEKNCSGLSASISYMKEIEIKKESERLYIVKGTPADCAYIGLLNLLNDEIDVLVSGINLGANIGNDVLYSGTVGAALGGRKLKFPPIAISSCEYKPKSLEFIANKSCELVELITSFEKQEILNKVVNINFPDIDEKSYKGIKVVPIAKRDVPPTPDILKDNSDIQSFRYAASGAPIKEDFLTDAEAVKLGYVSVSILDYELLDPNFNSLEFENFINE

SEQ ID NO: 139276 - protein, 247 aa, Unknown
  Bacterial polypetide isolated from the Sargasso Sea
MKILLTNDDGIESEITRALFESLKEKHEVTLIAPEKDKSGQGAAITLRTSVEVNKLDDNVYSVGGTPADCIFMGLMAIMKELPDIVVSGINRGANMGDDVIHSGTLGAALTARKLRYPPIAVSISGKSFENFQSSIIATELMLDYIVQNYSDEHHGGLVFNMNVPNLEFVDIVDFSFTSLGTRGMPLAPEFNGSGDKLSYKIGKAGKPAGDLAGTDFEAIRANKISVTPLYWDMTNLSKKKGELPDV

SEQ ID NO: 139277 - protein, 245 aa, Unknown
  Bacterial polypetide isolated from the Sargasso Sea
NNIGVSHDNFYRETDIVNNNEVESVIKKLKDGNFVYEGKIKAPEGEDNSKWVERNQLLFKSTNFGDDKDRALQKEDKTWTYFAGDVAYHNNKLNRKFDVLINILGADHSGYTKRISSAVEALSGNKNKIICKVSQLVKLIKNGKPFKMSKRKGDYITVEDLVNEVGKDATRFIMLSRSNESEMDFDFDKVKEKTKDNPLYYVQYCYARISSVFRNINKKVTDGVKINKFNFIYTESEIKILRKIS

SEQ ID NO: 139278 - protein, 310 aa, Unknown
  Bacterial polypetide isolated from the Sargasso Sea
MCRWLITVRNNYRDVTYHNWRHAFNVTQAAFTMISSPSLRRSLRPKERLAILVAAICHDLDHRGTNNSYEGLLGSQLAKLYSTSTMERHHFDTCITILSAPENNILCNLPVEDYKEVVRLMEHAILSTDLSRYLATRAQYSELVDGRTFDWNNDAHRRLLQAMIMTASDLSAVARPFKVQHQVAEMVYSEFYEQGDLERELGAAPGELYDRNNLNKLPKMQVGFIDFICAPVYNSLAKQFPDLAEIAEAVALNRKEWAAKAAEIGASGKPYRLSVAVKPKTTVTNPGNSTILKRLGGPPGGPDGPGGPGG

SEQ ID NO: 139279 - protein, 291 aa, Unknown
  Bacterial polypetide isolated from the Sargasso Sea
GVRGTIADLLNRRLQERPPTVRRTSAGFSRLLCEEANSIFDPKRSAKVYQDMTRPISQYWVASSHNTYLEGDQLTGNSSVDQYVEVFLRGCRCVEIDLWDGVDGEPVVTHGHTLTTKIRFVDVIRACRDFGFQASPYPLILSLENHCSPPQKVRIGEILNQILGDQLMRLPEGGLESEEATLCSPEEAKYKVLVKAGLHKIKEDEEEKEEEEVIQGEVDSSSDEDAAGTEHQKEGGAAASTGLGSALLNALRGGKQPQADNVVKKSKKDSLVVGGAASRKMSVVRKPKGGG

SEQ ID NO: 139280 - protein, 130 aa, Unknown
  Bacterial polypetide isolated from the Sargasso Sea
MANILVLKSSILGQYSQSNALIDGFLADHQSDTVTVRDLAALNLPVLDGELASGLRGGENLNERQLAVLAQSDELVAELKASDLVVIAAPMYNFNIPTQLKNWIDLVARAGVTFRYTETGPVGLVENTRA

SEQ ID NO: 139281 - protein, 198 aa, Unknown
  Bacterial polypetide isolated from the Sargasso Sea
MSKVLVLKSSILGGYSQSALLVDHLIGKWEDQGATITVRDLAGKDVLPMVDGEIASGLRGGAELTARQQEMLDLSNALVEELKANDTIVITAPMYNFNIPTQLKNWIDFVARAGVTFTYTENGPKGLVEGKRAVLITTRGGAHKDGPTDHIVPFLKTFLGFIGITDVEVVYGEALNMGPEANQKGISEAKQSLDALTV

SEQ ID NO: 139282 - protein, 198 aa, Unknown
  Bacterial polypetide isolated from the Sargasso Sea
MSKVLVLKSSILGGYSQSALLVDHLIGKWENQGAAITVRDLAGKDVLPMVDGEIASGLRGGAELTARQQEMLGLSNALVEELKANDTIVITAPMYNFNIPTQLKNWIDFVARAGVTFTYTENGPKGLVEGKRAVLITTRGGAHKDGPTDHIVPFLKTFLGFIGITDVEVVYAEALNMGPEANQKGISEAKASIDKLAV

SEQ ID NO: 139283 - protein, 202 aa, Unknown
  Bacterial polypetide isolated from the Sargasso Sea
MEPDMTTILQINSAARSQGAQSTLLANELTAKLQQSNPGANVVVRDLLADALPHLDESVLGAFFTPADKRTAEQNAIVAKSDALIAELQAADIIVIGAPMYNFGISSQLKTYFDWIARAGVTFRYTENGPEGLIKGKKVHVVTARGGKYAGTPNDSQTPYLRTFLGFVGMTDVNFIFAEGLNLGADAQSAALAGAREAIAAA

SEQ ID NO: 139284 - protein, 234 aa, Unknown
  Bacterial polypetide isolated from the Sargasso Sea
MPSPSRLGLASFSSSPAPYPVKHTPPAPPPQVLAAIAHDADHDGRNNAFHVSTGSELAIRCTPGAPPAPAHPEAPRPRRHDLARSPPRYNDASVLENHHLATCFALLSCPECALLAKLAPEARRRLRSQIISLVLATDLAHNFTTINTYKTMLDEHHISRPPPAPWSPSAPATPPGSVRSSTPPASARSGASVRGASVRGGAALAGASRVDLSSLRPEEVAAASASACSSCSSC

SEQ ID NO: 139285 - protein, 594 aa, Unknown
  Bacterial polypetide isolated from the Sargasso Sea
REATKVSNFSSSGSNLVDSSGSFDGNRIYADVSNNGLILDASVSGDSALEWPKGTGVHSIYASALWMGALVNGSIRTIVGDYTQDMGPGPWGGDPLAAVHRIYKVEKSMLASPLDFADFQEWPVEFGAPWVDVDGDGVYTPLPGGTDHPEFLGDQVLWFVSNDGDPAYKLNFGTSPMNVEIQTTMFGFDRPDVFGDMVFLKQLVINKGSDDLVDTYMGLWSDPDLGYAGDDFVGCDVALGMGYVWNDGSDQYYDPLDTGTPAAGYDFFQGPMVPCEDGDSEEVCPTEGAKMFGTRHPGMKNLKMSSFAFYINGDATYTDPSDETEGYFYLQGLRKDGSAYPAEIAGDLYDQRFCFYGDPNDSAGHSTANPVDGNYAASADRRFLMSVGPFTMAAGDSQEVVFGIFHAAGGDALSSVAYLKEVDALAQTAYDIDFALPDSPPSPNVTASAFADQVILVWDDTAEDYVATSEVDLDANGNPTSFVFEGYNVYQYETASGAGAKKRLATYDIVNGVTEIYDTVFNAELGENINIRTQFGSDSGLAQFHSITTDGLNGNSKLITNRAYYYAVTAYGYNADGIPKTLESSLVYLTVRPE

SEQ ID NO: 139286 - protein, 348 aa, Unknown
  Bacterial polypetide isolated from the Sargasso Sea
MTIDFSKKITPARMYRTTSNLQMALESDRGRIMNSAAIRRLQQKTQVFPLERNAAVRSRLTHSLEVQQVGRFIVQRIFANLSFEQQKDYGLTDLERPLESLVEMACLMHDIGNPPFGHFGEAAINHWFNTNLTSVTPERCREPNTGIGVIFKHLAQDICNFEGNAQGIRIIHSLQTLNLTYSQSAGILKYTRPAGLDVKDIPQNKNYLMKKVGYYYSEKAFIEALQNELTIEPYCRHPASYIMEAADDISYCLADIEDAVEKGIITIELLCTVLKNHYQKVLINLTIDDTEHQDFVSKAVNYALERGKAQPYNFNSEFFIYLRVALLHPLVNHAAKRFIENIEPIYHG

SEQ ID NO: 139287 - protein, 274 aa, Unknown
  Bacterial polypetide isolated from the Sargasso Sea
MRTILLTLFGVWAIHAAAAAPNYVLIFCDDLGYGDLGCYGSAKNRTPRIDAMAKEGMRFTSFLSSSPVCTPSRASLLTGCYARRVGMHEDFTGHWVLIPRSRRGMHADEWTLPEILKAKGYATACIGKWHLGDQPPHLPTAHGFDEYYGIPYSNDMASARRGDPPLPLVQDTKVIEAPANQATLTKRYTREAIQFIERNKSKPFFLYLPHTFPHLPLFASKEFHGKSANGRYGDSVEEIDWSTGKILDALKQHGLDKNTLVIFTSDNGSNGRNG

SEQ ID NO: 139288 - protein, 183 aa, Unknown
  Bacterial polypetide isolated from the Sargasso Sea
MAHEGVRFTRAYAHAVCCPSRAMLLTGRYPQRCNVNMWTQGNAKGPKGRNLLLSEVTLAEALQAVGYQTALFGKWHLGADKDHGPTRQGFDEFFGLRGGFIDNYNHFYLHENGFHDLYEGAREVFAQGKYFPDLITRRALSFIDENHSSPFFLLLAFNTPHYPEQSDARFDDRYKDMKMPRQS

SEQ ID NO: 139289 - protein, 440 aa, Unknown
  Bacterial polypetide isolated from the Sargasso Sea
STTLDTSGLHGNPLSLMENFDHYAVEGTHLYNSFTCQPVCGPARASLQSGMYATKTGCFKNRIPLKKNIKTLAKYLSKEGYATGYIGKWHLGSSEPVKKEDRGGYDYWLGSNLLEFTSDAYETYVYDGQNKKVFLPGYRVDAITDAAINFIKLNQKKPFFLFVSLIEPHHQNNTDDYPPPIGYREKYTGKWSPPDLSSLVGSSPRHLGGYYGMVKRIDEAYGRMIDVIKSLKLFDDSAIIFTSDHGNNFKTRNKEYKRSCHESSIRVPTSLIGNVFQQGGRIKELINILDIHATILDLANVKNTSHCDGRSVLPLVNKISKKWDNEIFIQISESQLARSLRTEKWKYCIADQDSNGSDKPSSNQYTETNLYDLDADPYELNNLIGISTYDEIVNSLRKKIKSKIRKVENITTKITKAKNVNNPGQMGLNPDSFHRLKKKL

SEQ ID NO: 139290 - protein, 357 aa, Unknown
  Bacterial polypetide isolated from the Sargasso Sea
MKKIIFLFLAIIISFIIWQNRVNVVIWSIPKILNIIKPISSEGSSNWEQGPIEKNNSDQRPNIILILADDLGFNDISFYNGGAGSGSLMTPNIDQIATDGVIFENGYAANAMCAQSRASIMTGRYSTRFGFEFTPLFPGANKLMEWIINIEDPELKVKFQKDAYADLENVFSAGVPSSEITIAEVLKNSGYYTAHVGKWHLGRVDGSHPNDQGFDDSLLMEGGLYLPENDKSVVNAKFDNPVDNMVWARSQFSVSFNKGPIFKPGGYLTDYYTDEAIKVIEKNKNRPFFLYLAHWAVHNPLQALKKDVDAISHHTKPHNLQVYSAMIRALDRSVGRILDTLDQNDLSENTLIILTSD

SEQ ID NO: 139291 - protein, 533 aa, Unknown
  Bacterial polypetide isolated from the Sargasso Sea
MLWQFKVNIIIWALPTVVNFINPVQDNIPTNWPEGPLERLDQNDSRPNIILILADDMGYNDISLHNGGAADGTLKTPHIDSLAKNGVWFNKGYAANATCAPSRASIMTGRYATRFGFEFTPVPDLGQLVVRWLAEEDDDDLRARIDNEIARNLPSFMDQGMPSDQITIAEILKSQGYYTAHIGKWHLGHSAGMSPLDQGFDDSLSLAGAYYLPEDHPDVVNAKFETSIDKMVWSGSQYAARFNGGDYFAPDKYVTDYYTDEAIKVIEKNKNRPFFLYLSHWAIHNPLQAIRSDVDQMSHMSGHNLKVYSGMIRALDRSVGEIIKTLKELNIYGRTLIFFTSDNGGANYIELQDINKPFRGWKISFFEGGIRVPFILSWPDQIDPGLKFDKPVHHFDIFSTIASAANVKIPMDRKIDGVDLMPYIKGEKIANPHQTLFWRSGNHQAVLHENWKYLVSKKEGTKWLFNTELDPLERNNLININPKKTSQIENLLVTFNSEQADPLYPSSTELPVLIDKYDGQVIEDADEYIYWSN

SEQ ID NO: 139292 - protein, 122 aa, Unknown
  Bacterial polypetide isolated from the Sargasso Sea
MNQSQQSAWWKESVIYQVYPKSFYDSNNDGVGDIPGIIAKLPYLKTLGITLIWVSPFYRSPGADNGYDIADYYAVNPDLGQMQDVDNLIKQAGELGIEVMVDLVVNHTSDEHPWFQAALADP

SEQ ID NO: 139293 - protein, 296 aa, Unknown
  Bacterial polypetide isolated from the Sargasso Sea
SPYRDYYIWADEPDDFMEPIFPTVEDSIWTWDEEASQYYRHLFYKHEPDLDLTNPKVIHEIERIMSFWLRLGVSGFRIDAAVHMVRQAGGGELEKGYWLLEHMRDFVTMRRPETVLLGEIDTDPEKYVEYFGDEADRVTLLLDFWTNNHLFLALARQQAEPLVHALNSQPLPPSHSQYALWIRNHDELSLDRLEEDERNEVMETFAPDENMRAYNRGIRRRLAPMLDGDERRIAATHALLFSLPGTPIIRYGEEIGMGDDLDRPERLAVRTPMQWSNEPNAGFSCTKGELAAPVID

SEQ ID NO: 139294 - protein, 260 aa, Unknown
  Bacterial polypetide isolated from the Sargasso Sea
GEFSDSKYNGKGTYTYTNGEKWSGKWKDGEKVTGKGVVNYSDGSKYKGSLEDGKRIGSGELHLIDGKRYIGEFVNNEYSGQGELRYPDSSKYVGEFSDSKYNGKGTYTYTNGEKWSGKWKDGEKVTGKGVVNYSDGSKYKGSLEDGKRIGSGELHLIDGKRYIGEFVNNEYSGQGELRYPDSSKYVGEFSDSKYNGKGTYTYTNGEKWSGKWKDGEKVTGKGVVNYSDGSKYKGSLEDGKRIGSGELHLIDGKRYIGEFV

SEQ ID NO: 139295 - protein, 110 aa, Unknown
  Bacterial polypetide isolated from the Sargasso Sea
MSFDAVKHQERIQKIEEFAAQKKDVIKKHPWREHYHFQAPVGWMNDPHGLIQFNGKYHLFYQHHPFSGKWGTMHWGHAVSENLIHWQHLPEALAPSESYDGWDGGGIFSW

SEQ ID NO: 139296 - protein, 51 aa, Unknown
  Bacterial polypetide isolated from the Sargasso Sea
MRPQVHFTPKRMWMNDPNGMIFQNGLYHLFYQFHPDSMIWGAYALGSCYKS

SEQ ID NO: 139297 - protein, 302 aa, Unknown
  Bacterial polypetide isolated from the Sargasso Sea
RLIAWTRIFPNGDEQHPNEAGLAFYDRLFDELAAHNITPLVTLSHYEMPWGLVKQYGGWGSRQTIGFFERYARTVFARYKEKVKLWLTFNEINMSLHAPMTGVGLPETSSKGEVYQAIHHQLVASALAVKACHEIIPDARIGNMLLGGLMYPLTCKPEDVLETLQENRAWQFFGDVQCRGAYPGYMQRFFRDNGIQLEVTDADHEALKSTVDFISFSYYMTGCVTADDALNQQARGNILSMVPNPHLASSEWGWQIDPIGLRTLLNVLWDRYQKPLFIVENGLGAKDKPDADGTVQDDYRIS

SEQ ID NO: 139298 - protein, 138 aa, Unknown
  Bacterial polypetide isolated from the Sargasso Sea
MQTRKVAIFTGNRAEYGLQFPVLKAIAEHSCLDYYLIVSGAHLDKKFGQTLEEIKTDGFRIDAEIKIEMDASSTFASTQAIGSGILEISKVLGKLNPDFNLVYGDRFESLAAVIASSQMNIPTAHIEGGDLTERWGTG

SEQ ID NO: 139299 - protein, 155 aa, Unknown
  Bacterial polypetide isolated from the Sargasso Sea
TPTPTPTPTPTTTTTTTTTTTTTTTTTTTTTTTTTTVLLLQYYYYYCYCYCYCYCYCYCYCYCYCYCYCYCYCYCYCYCYCYCYCYCYCYCYCYCYCYCYCYCYCYCYCYCYCYCYCYCCCCCCCCCCCCCCCCCCCYYYYYYYYYYYYYYYYWY

SEQ ID NO: 139300 - protein, 320 aa, Unknown
  Bacterial polypetide isolated from the Sargasso Sea
DAFVEYSYHTSKHLGDRVRHWITHNEPWCVSHIGYVAGHKPPGLKNNWAKSLSAAHHLLLSHGMALPEIRNNVENANVGITLNLNTAIPASPSEQDKKACNFFDNMFNKLFLEPLYNKEYPTELFDELQHRRDITNEDLNFIKNGDLEIIARETDFLGVNYYSRGVIRNEEISEDENMQKNVEMGPNTDFGWEVYPPGIYDLLMKLKTKYGVGTIYITENGCSYSDGPDKENKIHDQRRIDYHHTHLIEIQKAINNGVDCRGYFAWSLMDNFEWAQGFSQRFGLVWVDFDSLERIPKESYHWYKNYISNNKIRENANEFI

SEQ ID NO: 139301 - protein, 129 aa, Unknown
  Bacterial polypetide isolated from the Sargasso Sea
MSLPSRLPAILQAVMQGQPRALADSHYPRWHHAPVTGLMNDPNGFVEFAGRYHLFYQWNPLACDHKFKCWAHWSSEDLLHWRHEPIALMPDEEYDRNGCYSGSAVDNNGTLTLCYTGNVKFDDGGRTAW

SEQ ID NO: 139302 - protein, 92 aa, Unknown
  Bacterial polypetide isolated from the Sargasso Sea
MDEIFPKDFLWGTATASYQIEGAANEDGKGKSIWDIFSHTPGKIKNNENGDVATDHYHRYKEDISLMNDIKLNAYRFSIAWTRIFPNGKGKV

SEQ ID NO: 139303 - protein, 163 aa, Unknown
  Bacterial polypetide isolated from the Sargasso Sea
PTPTPTPTPTQGLSLLEQAAAQRQQRQQDLDARALELEPTPTPTPISPPVQTAEVSDEPSLGDFDEDFTWSAEVLAAQGRRVDDISLEEIDWLGRLRRGLEKTRQGFVSGLLENLGDDPLTPEVLDDLETLLLRADAGVQATDQVLDALRQRMNVEVVDPAEG

SEQ ID NO: 139304 - protein, 147 aa, Unknown
  Bacterial polypetide isolated from the Sargasso Sea
MNHQLNFMKKFLISISLLLISCADTITTKNLALTNSIPSKWQHDIPNSTEIAGKWWEAFEDSTLNNVFQEFHSNSPDLKSIASRLEAAKQVYKISSSTRLPSMNLGLTGSSRKQNLTAFGLSEDFFGGGQNGDQNSGESDVTSFSSQ

SEQ ID NO: 139305 - protein, 438 aa, Unknown
  Bacterial polypetide isolated from the Sargasso Sea
YWDVTNPEVREWWAGKFSLSSYAGSTKDLYIWNDMNEPSVFNGPEITMQKDLIHHGGVEHRDVHNAFGMYYHMATAEGIKRRNDKRPFVLSRAFFAGTQRVGPIWTGDNAADWKHLAVSLPMVLTLGVSGLTFSGADVGGFFGNPDAELMTRWYQVGTYYPFFRGHAHLETKRREPWLFGEESTAIIRMAIRERYALLPYIYTLFEESHRVGAPVLRPLWYEFPNDQSAFKRQDSFMLGSAILVQPVLTQGATSVSVYLPAGVWYEQKSGARHVGPKTMNVAVTLEDVPVFLRGGTIFVRKERARRSSTAMRGDPLTVIVALDENGRASGTYYADDGESYEYASARSAFARRSLSFENNRFAVSGASAADGGSGNAKAFTDDSVIERVSVYGLSSKHTGATCSTGDELDIARIGRDAAAHIRQPNQAISKDFTISVRR

SEQ ID NO: 139306 - protein, 451 aa, Unknown
  Bacterial polypetide isolated from the Sargasso Sea
MTNSIPSRWQHDIPDSTEIAGKWWEAFEDSTLNKVFQEFHSNSPDLKSIASRLEAAKQVYKISSSTRLPSMNLGLTGSSRKQNLTAFGLSEDFFGGGQNGDQNSGGSDVTSFSSSNFGLNLSMQWEIDLWRRVFNQTKATEKDYEAVKYDLSYITFSMQVQVAKLYFSAVESYEQLKLAEETLESVSELADMVSARYEKGLRSSLDVRLTQSSVSSSKALLENRRLGHTFLLRRLEAMLGEYPDGNFLVSSNLPTIIPTVQPNIPADILDRRPDIKSAIAKAQAAAYRTAESISSYFPGLILTSTAGTSSSDLKDILNEDYQVWSQGVSLGLPIFQGGRIRANKKMNEELQKVAEQDIIKIIISAFSEVEQSLFSEKSNTVLLEAYSDAAGQAEAAFKLSRERYDSGLVGLIAVLDSQQRWFQARSQVLMAKKTKIDTRLNLILALGGEFK

SEQ ID NO: 139307 - protein, 450 aa, Unknown
  Bacterial polypetide isolated from the Sargasso Sea
LAAVNRLQINAGSRQPVAPTPTPTPTPTEVQQEAQATATATKPAQQHEVLAKAAVDLTGLHGPRPGSKAVPEFSSHFDGSSIGIENELTGLVVALPKNSAQKFGYVHDAAGNPLFMLTKDMNQGGYTNPAGISDVKGINQWQTHTIELVTYPSEMQDQQAVEARKEAMLWLAREFTQHISQTNHTRLSDLVSEDGRFTLVISNANHVIAAGNGAARDGQGQTIGMTPSGQQATVAVSAKAFGSGSSQEIRLLESAPWYHPELKDLLLSNTANVQWEDAATAQNVFAYLTSIYGKTADLAREYGIHINDWDPLAEGITPNAQGLTDPKVKNAWEILPRTKPVAMLALLSAHDRKLVSEQILATLKSAYSAALAQNIYDYFKFGGEVAGHGINNATTGDSKHPEPAILFEFRQVPNELSQFVPKSESTARVEVKTLDQFDPVSRRTIVAAGT

SEQ ID NO: 139308 - protein, 486 aa, Unknown
  Bacterial polypetide isolated from the Sargasso Sea
MGCSDTEIESTNVVENNILPTQTPLDRVSDISVPNEIIPEIKKQENSQNKNFERKIVPTIDRSSNSSKYNEEYVYKTSTPTATPVSPDVYIPDSSLEQLIRFEINKSEGNITEKDMQGLNYILSKGELEPISDLTGLEYAYNLTSIEILEGAVANLTPISNLTKISRLNLYQNNVRSIEPISGLFNLEYLDLGSNMISDISSLENINSLEFLDISENKISNIYPISDKPLLHTLYADDNNIGDARPIVTLKDLSLLTIQDNPINDIRALGPMCWSGRVSCDIIIPTPTPTPTMTPTPTMTPTPTPTSTPTPTATPTMTPTPTPTPTMTPTPKPNSTATATPTLVPTPTMTPTPTMTPMIHNWAYTTFSQTLLDPSIGDTNEFNLEDGHPVRDFDNDGDINDEVYVFICPVGTDTEDITWSKSSYKSNENSFTTPYEYGTNGIGYGFADCEGMREVDIDIVSVANGNSHANANISPGCNNNFSRTRY

SEQ ID NO: 139309 - protein, 671 aa, Unknown
  Bacterial polypetide isolated from the Sargasso Sea
RSDVEDILLMKQFNVNPFRTSHYPNHPRWYELCNEYGLYVMDEANLESHAFWSKFTLDPVWRPAFVDRAKRMVLRDVNHPSIIFWSLGNEAGYGPNHDAMAEWIRNYDPSRLIHYEGKEPGYGPLPNHYDIIANMYASVDLMKELHDENPSRPVILCEYSHAMGNSNGNIFKYWDAIYKYPRLQGAFIWDWVDQGLTRKDSHGEYFVYGGDFGEKLHDGNFCLNGVISPDRKPHPALYEVKFHQQNIKVTWDGIDKNIFMIENRNFFVDLSHVYGKWELIENGKIISSGSINTDYIGPQSKQIYELPPFDLSHTNREYAVNFRFALKNDHSWAESGHIVASDQVIIQRYDGPRYRKGGKQNNKKVQVKENGDRVVVSAVGRDFDFDLSTGQLAQVTKANESFIVNPIIHNIWRAPTDNDEGGDGKSFASRWLKSGYNDLKRQVVNVNSSFTDDGLFQISVDEKYSSDSANILVNLVYTILQDGDLHITGNTNIPEGLPVVPKIGLSFQIDKKYSNLQWYGRGPHESYIDRKHSAFFGRYSGTVRDQYYPYIRPQENGNKTDIRWASISDDKGSGILIYGLPTFNLSVHQYSLDNLTKATHTHMIKDDGPTTVNLDHLVMGLGGDDSWNPRTHKEYLIPPGTYSYSFTLRFSDNIKADERRVLDNRVSKLSS

SEQ ID NO: 139310 - protein, 194 aa, Unknown
  Bacterial polypetide isolated from the Sargasso Sea
TPLPEPTSTPSPEPTSTPAPEPTPTPTPTPTPATEPTSTPLPEPTSTPSPEPTSTPAPEPTPTPTPTPTPISSLEKIKISGFKFIDNEISINVGSSIIWTNNDTSMHTATSIDSKFDSGYLYENQTYEFKFLNAGIYTYRCSLHSGMIGKINVFAENGLLIDPTPTPSPTSTPTPKSNNQSDQISPPSSPRSYY

SEQ ID NO: 139311 - protein, 241 aa, Unknown
  Bacterial polypetide isolated from the Sargasso Sea
MNQISPLPENSTLVVEAARNEAFRPQIHFSPKEKWMNDPNGMFYLDGEYHLFFQHNPDASTWGPMHWGHAVSKDLMHWEELPIALYPDELGTIFSGSAVVDVENTSGLGSKDNPPIVALYTYHNASMEKQGKIDYQTQALAYSLDKGRTWEKYVNNPVIDNPGIKDFRDPKVMWHEPSGKWVMVLAQKDHIGFYSSDNLIDWSLESTFGEEIGSHGGVWECPELLLLPVEGTDESRYVLLV

SEQ ID NO: 139312 - protein, 159 aa, Unknown
  Bacterial polypetide isolated from the Sargasso Sea
MLFACQPTSETTSSTPDVGDGERFRPNFHFTPPSAWMNDPNGMVYFEGEYHLFYQHYPDDNVWGPMHWGHAVSSDLVTWEHFPIALYPDSLGYIFSGSAVVDWDNTTGFGDGKTPPMVAIFTHHESEMEAAGFDLFQYQSLAYSLDKKRTWVKYDGNPV

SEQ ID NO: 139313 - protein, 245 aa, Unknown
  Bacterial polypetide isolated from the Sargasso Sea
MKNFIIILIVLFSSCNAVENDIQNSYKEKYRPQFHFSPPSGWMNDPNGMFYLNGNYHLFYQHYPDDNVWGPMHWAHAVSKDLIHWENKPIAIYPDGNNYIFSGSAIVDKNNKSGLGDGNNPPILAFYTNHDMFLERMWNETKEDRYIHVETQHIAYSQDLGKTWTKYDKNPIIDNPGFRDYRDPKVTWSEEYKKWFITLAARDRIIFYSSENLIDWEFISEFTGIGEMNGVWECPDLFPLVDEEG

SEQ ID NO: 139314 - protein, 42 aa, Unknown
  Bacterial polypetide isolated from the Sargasso Sea
TPTPTPTLTPTPTPTPTPTPTPTLPRSFAPSFPPSIPSLPPS

SEQ ID NO: 139315 - protein, 206 aa, Unknown
  Bacterial polypetide isolated from the Sargasso Sea
MFIKQSFRISAVAAALVLAGCGGDINISEGDVIDNSDNSVNNPAPTPTPTPTPTPTPTDANNPFTQGLATDVSAEFPSITDKPVYRLNDGTTFVEDVTFTADAHWVLQGRTAVGGDNVDSAVLSIEAGTTIIGESGEDFLVVRRGSQIEAEGRADAPIVFTSVQDVTGQETDIGQWGGLVVLGRAPANSCGDPVGETQKTNFATVV

SEQ ID NO: 139316 - protein, 161 aa, Unknown
  Bacterial polypetide isolated from the Sargasso Sea
MSTFPHGFLWGGALAANQSEGGYLEGGKGLTTVDTLPHGANRMPVKLGLEKRFQLRDDEFYPSHEAIDFYHRYKEDIALMAEMGFSVFRTSIAWSRLYPNGDELEPNQEGIAFYRSLFEECKKYGIEPLVTLCHFDVPMHLVIEYGSWRNRKMVEFFTRYA

SEQ ID NO: 139317 - protein, 259 aa, Unknown
  Bacterial polypetide isolated from the Sargasso Sea
PTPIPTPTPTPTPIPTPTPTPTPTPIPPTPTPTTYIYVERLDKWIDWADCEADDDTDGVANCNDYFPTDPDKWDPPTEEAEDVATTDDTPPVEPTPEPEATPVPTPEPPTPKKTPTPEPEPVPEPEPEPEPEPEPEPEPEPEDDEEVAVEEKGDGIGPATSDDDGDSGGNGSAIAIGILLPLFALLAIAAPAIPWWRRFRSLFAALGGASAPLNYVAWKPAWFCQHCDAKYTKKQWKKNLKTCTECGGDLSEETGLELK

SEQ ID NO: 139318 - protein, 313 aa, Unknown
  Bacterial polypetide isolated from the Sargasso Sea
VVDKASPYRQFYIWRDGEPTTPPNNWRSKFGGNAWQWHAESGQYYLHLFAAEQADLNWENPAVRAELKKVCEFWADRGVDGLRLDVVNLISKDQTFPSDTQGDGRRFYTDGPRVHEFLQEMSRDIFTPRNLMTVGEMSSTSLEHCQQYAAQDGRELSMTFNFHHLKVDYPGGEKWTLARPDYVALKALFSHWQQGMHNRAWNALFWCNHDQPRIVSRFGDEGEYRVPAAKMLAMVLHGMQGTPYIYQGEEIGMTNPHFSQIGDYRDVESHNMFIERSVQGQAPDELLAILASKSRDNSRTPMQWDARDQGGFT

SEQ ID NO: 139319 - protein, 319 aa, Unknown
  Bacterial polypetide isolated from the Sargasso Sea
MSFDAVKHQERIQIVEEFTAQKKDSIKKHPWREHYHFQAPVGWMNDPHGLIQFNGKYHLFYQHHPFSGKWGTMHWGHAVSENLIHWEHLPEALAPSETYDGWDGGGIFTGSAIEHNRELILFYTGCAKDRQVQCMASSKDGVNFIKSDHNPILSKAPNGINPHDFRDPKVWKQGELFYMVTGVTDGVSNLIEPSNYDINGFGKVCLHRSTDLKNWEFVNYLVESKGELGTMLECPNFFPLDGKWVLLYSPMGLLERQVIYLTGDFDEVTGKFHWTTMGSVDWGFDYYAPQHFQDNQGRNLIMAWIGSWPFMPWCRGEYD

SEQ ID NO: 139320 - protein, 236 aa, Unknown
  Bacterial polypetide isolated from the Sargasso Sea
MSDDAQRWKDKYLSSLEQQEKLDRRWESRLDLLRRGLVRSSLAAEGADKAVDQCMQEMREILRRDDMDAALGGLIPRLEKAVLDSEQRRQQRAGEAAAALAALIEQLQRLQPPREVRKALKSLGKQLEDATTHQYLLPALLSQLSNLQGQALTVLQAPVQEQPGLLQRLFGSRGETSESTAQAPGSVAETTGVTEEPAAELTPTPTPTPTPTPTPVAVANEPPPSVSNMASVPARH

SEQ ID NO: 139321 - protein, 219 aa, Unknown
  Bacterial polypetide isolated from the Sargasso Sea
PNGLVMLLPHGYEGMGSEHSSARIERFLQLCAEDNFQVVNCTNPANYFHLLRRQMVRSFRKPLIVFTPKKLLRYPRAVSSISEMSNGNFQEVIDDANAIPSKINKVVICSGKFYYDLIEEYEKNTLDNIAFVRLEQLYPFPEKQLKSIVKKYGQDSHFIWAQEEPENMGPWSYILRKWKLSNIICFSRNESGSPASGSPKVHEIRHQEIINKVMSYSKK

SEQ ID NO: 139322 - protein, 299 aa, Unknown
  Bacterial polypetide isolated from the Sargasso Sea
QPVSNWWDNGNNQIAFGRGDKGFVAINNESSSLVASLQTALPAGEYCNLLGGNDYCSGGYVTVDGSGKASLNVPGMKAAAIIAGCTKASPCGGSALPGNKFSSMNLRGTHNAWGNTPMTVDANRVWSATLTLTGNGDATGAQRFKFDVFGNWAENYGDNEGDGIADKGSSKDILVSGAGSYRITLNESDLRYTVTPLTSNQAPVAALSPKTLSVKAGESVVFDASASRDDEGVVSYSWSSGGTAATETVRFDTPGTHTVTVTVTDAEGLTASASATVTVTDDKGTYASVLPTLNFRGTP

SEQ ID NO: 139323 - protein, 250 aa, Unknown
  Bacterial polypetide isolated from the Sargasso Sea
VYRNGSVEVNDIYEIYTTSSFWNAFPRSPMVMDINFMGENYFLINNHFKCCGDGIIDHDDISDEESRRYIAINLIKEYIDNNLSDKNVIVLGDLNDDIAEPLLNNVFQEVIDDSNNYRFADIGIAQGNSSDWSFPDWPSHLDHILITDELFNGINTLEVETIKIDQFLDGGWNEYDQNISDHRPVAIKFIFSLTSPYDINDDGIVNDSDLLMLLSFILENIEPIDLVDINLDLEVNIFDLLLLSDYIQEL

SEQ ID NO: 139324 - protein, 111 aa, Unknown
  Bacterial polypetide isolated from the Sargasso Sea
PRSPHLALDIAAPTGTKIISPEFGKVILLGDFFYSGNYVVIDHGHGLITSYSHLSKVIVKEGQLIDKGQKIGEVGSTGRVTGPHLHWTVYLNQVRINPEITIDEDYLDGIL

SEQ ID NO: 139325 - protein, 506 aa, Unknown
  Bacterial polypetide isolated from the Sargasso Sea
MALTHNQYAVAAITATLCLAGLYTVVGAGLSSTDRGGFESAVEDLELKEGNQRVCPPDVPTIGCDWDGDGIADRMESTLYGTNWQEADTDGDGLDDGWEIENGLDPLDTGEPCITIGEGLTEVECEDIPVATVDTERETGEQNETFPNPDNGPLGDPDRDGLTNLDEAELGTNPRLKDTDGDGLNDRWESEHTHEVTTPSGIVVLLDPLDGNWNCPLLTPSVKAEIKLDIGDDLWEEMGSQFGHSCDAILDLEQPEPDTLRNFVEEKYDTNPRAADSDGDLIDDLVEISTHLVDLKSFCGRPTFGTLTLPAPHLRAFASEIVFTAQELPNGGVQTTLQKKNPLDNPNWFNEDMDGDGRLNGPGDWDTDGDGMPDGFEFCYSFNSDYNWFLNPANSTDAYGDNDGDGLNNVEEFSVSYDWGPSNFTNPLDHDTDQDGMPDGWEFQSGIHPNDGSNADEDPDFDGYDADGDGAVTYKDMIGATTIERIDVEPGQYVQANNTILWVRTV

SEQ ID NO: 139326 - protein, 643 aa, Unknown
  Bacterial polypetide isolated from the Sargasso Sea
MSFRKILISTSRFNKKLLVLLNDFFCICVASLFALVISDVNFGSIHFEQFLRLIWLPLFCVTSFWFLGVYSSVVRYIDFSVVIIIARAICIVFLANLLIQFLYGTFLNFYNFSYSEPIISLIGWLVGLVTFSFLIIISRLIASLYLSETDSEQKVVIYGAGSAGIQLARALRVSKEIQPVAFIDNNVSLHGTYLGGIKVLHPKKLERLASRGKVDEVLIAMPSVSRSALRSLLKEIEVYSVRVRILPGLAELAQGKVLVSELKAVDTVDLLGRSEVEADPDLLHKNIKNKVVLITGAGGSIGSEIARQAVKGQPNHLIILDSNEYALYLLKMEIESKNYDVNLHSIIANVTNEKRIKDICKTFKVDTIYHSAAYKHVPLVEENPFEGVSNNIFGTISCLRAAIDSEVETFVLVSTDKAVRPTNIMGATKRFAEMILQSYSEDSARRKNTRMTMVRFGNVLGSSGSAIPLFQEQIRQGGPVTVTDPEVTRYFMSIPEAAELVIQAGAMGKGGDVFVLDMGEPVKIVDLAKRLISLSGLEHLDENNPDGDIEIIFTGLRPGEKLYEELLIGENVSETDHKQILRAEESFLSIKEIELCVEKLKEVKNQNNVVALKQIFQEVIDGYEPEEEVVDVITMREQENLDS

SEQ ID NO: 139327 - protein, 211 aa, Unknown
  Bacterial polypetide isolated from the Sargasso Sea
QFAVGEYWDALAYNMDAPDYNQDAHRQRIVNWMNAAGGLAGAFDVTTKGILHAVFERQEYWRLSDQSGKPPGVMGWWPSRAVTFIENHDTGSTQGHWRFPRGKELQGYAYILTHPGTPTVFWDHLFDNDWGYLQQPIQDMIRVRKQCGIHCRSEVKIVKCEQSVYAAVIDDVLLMKIGPGEFHADGHWECVLSGQDYAIWRKKGANAALTR

SEQ ID NO: 139328 - protein, 298 aa, Unknown
  Bacterial polypetide isolated from the Sargasso Sea
QLASGSGTATGGGSYNAGQYQYPQFGYNDFHHSGDITNYGDSNNVWNGALYGMPDLNTGSPYVQDQIATYMKTLLGWGVAGFRIDAAKHMAPTDVKAILDKAGSPKAYLEVIGAGGESADIQPGRYTYIDTVTDFKYGTDLAANFNGQIKNLKTLGESWGLLPSAKAFVFVVNHDRERGHGGGGMLTFMSGARYDLANTFMMAWPYGWKQVMSGYRFENMSTYETDKGAPGSTPCSDSQWNCEQRRPTIMNMALFHNRTEGQPVSNWWDNGNNQIAFGRGDKGFVAINNESGSLVASL

SEQ ID NO: 139329 - protein, 328 aa, Unknown
  Bacterial polypetide isolated from the Sargasso Sea
PRVSANLISNCREYDVLPVLDAVLNHRCATHQGAGGKWNRWEGTGMDWGEWAIDNRNPDFAGQGSHPTGDEFSGAPNIDHTNQRVREDLSQWFQWLRNDIGFGGVRFDFSKGYGGQFAGEYINAMGPEFAVGEYWDTLAYGAGLEYDQDAHRQRIVDWIDASGGNCTAFDFTTKGILQEACGRGEFWRLVDGQGRAPGVLGLWPARAVTFIDNHDTGSTQSHWPFPHDKVAMGYAYILTHPGTPCVFWDHYFDWGEHLSSHIKTLMQTRESCGIHSRSKLEIIAATDGLYAAVIDKKVAIKLGGDSWSPQGDGWSHVCGEHDWSVWRR

SEQ ID NO: 139330 - protein, 255 aa, Unknown
  Bacterial polypetide isolated from the Sargasso Sea
MKKFSVVIAGGGSTFTPGIVLMLLENQHRFPLREIKFYDNDGARQEVIAEACRILLREQAPDIAFSYGTDPKAAFSGVDFVMAHIRVGKYPMRELDEKIPLRHGVVGQETCGPGGIAYGMRSIGGVLELVDYMEQYSPDAWMLNYSNPAAIVAEATRRLRPHARILNICDMPIGIEGRMAQIAGLPSRKEMRVRYYGLNHFGWWTRIEDLAGNDLMPAIKAHVAKHGYVPKQAGHAEASWNDTFAKARDVWALDP

SEQ ID NO: 139331 - protein, 234 aa, Unknown
  Bacterial polypetide isolated from the Sargasso Sea
SWLNLASAIWFFLTPQAPKPAMLHVIDRTWVPSQREIAAGIGYGFGTTINVINGGIECGEQNKNKGQPVNRIRYWEGLAEHYQIPVKADEKNTCWQQTPYGSLNLNGATDVLYTNWDGNWKYYPDRPGGYSFECELVGFQTAYSALVPGDYEKCVTNFYGSHANWPKVRVVAKLDPAPVDPTDPPVGDVAAWSASKVYTAGNKVSYKGAIYQAKWWTQGNEPGKGDPWVLVPAK

SEQ ID NO: 139332 - protein, 166 aa, Unknown
  Bacterial polypetide isolated from the Sargasso Sea
NKDRSFISLMKTFETSFKTIIECSECGNLDTVDPCNICTNHNRDRSSICIIEDVSDLWTFERIGFYKGLYQVLGGSLSAINGIGTEELSIDKLLDRIKKNKINEVILALSTTMEGQTTSHVIAEKLDQIKNLNVTRLAQGIPIGGEVHYLDENTLNTAFQLRKKII

SEQ ID NO: 139333 - protein, 237 aa, Unknown
  Bacterial polypetide isolated from the Sargasso Sea
DQAQPRRLAGVHGMNDSLDELASEYVLGTLPAEQRAEVQQRLAHDAALRAAVDAWEQRLLPLVALAQPVPPSAQLWRRIERRIKAPETSVAWWNLLAFWRGLSAAGLMASVVLAALLLTRPPMPAPSFVVVLMAPQSQAPGWVVQASDNQQIQLIPLGVIEIPADKALEFWTKGDGWQGPVSLGLVKPGQTLSVPLDKLPPLAPNQLFELTLEGPNGSPTGKPTGPIHGIGRAVKVL

SEQ ID NO: 139334 - protein, 955 aa, Unknown
  Bacterial polypetide isolated from the Sargasso Sea
MLLRFLSIFSLFLIVSCGGGGDTSIDSPGELGQVSAPTAADQQVVVGGSVLTGTCPSSSNIDVDDSIGGNTVCAISGTITGDLTLTDDVIYRLSGTVNVGADMGGDGTKAGGSAGVLNIPAGVTIVSKTSADYLVVQRGSKIEAKGTASKPIVFTHSSVLDGSLTNPDTASGLWGGLVILGKAPINKCSNDVRGTASCEKLVEGATDALMGGATPNDNSGTLRFVRVEYAGYEIFPGNELNGITFGGVGSGTTVDYVQVHNNQDDCVEFFGGTVNVTHLVCTGAGDDNLDIDWGYTGKMQYVVVKQSRGAGDHIVESDNTNADASVGYLTTPRSQPKIANFTFLSTGRDEALKYKEGVSGMYMNGIVVSSGDKGCIEHTKAETLQDAPGYDKIAHHSVFMDCGTGGVYNAGDDSATVAELQASIESRATNLVTDKTNTLVGQMFLGTNESGVVSAFTNQTAVCAVGSHASGTSTLCPSDATQIDGFFAKTNYVGAFAPGSDEDNNWAAGWTKGLFTAPECPVGTFESEQLEGKKVCSVQGTLTSDVTLTRGNFYKLVGKVQVGEDMGGDGTKDGGASATLTIEPGVTVFGESGSDYLIVMRGSKLMANGTKSAPIIMTGRDDVTGQATQFSRGLWGGLVLLGQAPINKCSNDVRGTAACEKVVEGSSDALMGGNTPDDSSGSLKYLRVQYAGYEIFPGNELNGITFGGVGSGTTVEYVQVHNNQDDCVEFFGGTVNVKYLICTGAGDDNLDIDWGYQGKLQFVIVKQSSDAGDHIVESDNTNADASVGYLTEPRSQPIISNFTFISNGKDDVIKLKEGVSGIYTNGIVIDASNSKACIETTKAETFQDAATTPKVTFNSVAFDCKALAALGDDAGTLAQAEALITVGSNNLYSVDSGGGSYVPTVSGVINGTAENAMTVADKSADAFFTTTDYVGAVKDSTDTWYKDWTVAGSLN

SEQ ID NO: 139335 - protein, 955 aa, Unknown
  Bacterial polypetide isolated from the Sargasso Sea
MLLRFSSIFSLFLIVSCGGGGDTSIDSPGELGQVSAPTAADQQVVVGGSVLTGTCPSSSNIDVDDSIGGNTVCAISGTITGDLTLTDDVIYRLSGTVNVGADMGGDGTKAGGSAGVLNIPAGVTIVSKTSADYLVVQRGSKIEAKGTASKPIVFTHSSVLDGSLSNPDTASGLWGGLVILGKAPINKCSNDVRGTASCEKLVEGATDALMGGATPNDNSGTLRFVRVEYAGYEIFPGNELNGITFGGVGSGTTVDYVQVHNNQDDCVEFFGGTVNVTHLVCTGAGDDNLDIDWGYTGKMQYVVVKQSRGAGDHIVESDNTNADASVGYLTTPRSQPKIANFTFLSTGRDEALKYKEGVSGMYMNGVVVSSGDKGCIEHTKAETLQDAPGYDKIAHHSVFMDCGTGGVYNAGDDSATVAELQASIESRATNLVTDQTNTLVGQMFLGTNESDVVSAFTNQTAVCAVGSHASGTSTLCPSDATQIDGFFAKTNYIGAFAPGSDEDNNWAAGWTKGLFTAPECPAGTFESEQLEGKKVCSVQGTITSDVTLTRGNFYKLVGKVQVGEDMGGDGTKDGGVSATLTIEPGVTVFGESGSDYLIVMRGSQLMANGTKSAPIIMTGRDDVTGQATQFSRGLWGGLVLLGQAPINKCSNDVRGTAACEKVVEGSSDALMGGNTSDDSSGSLKYLRVQYAGYEIFPGNELNGITFGGVGSGTTVEYVQVHNNQDDCVEFFGGTVNVKYLICTGAGDDNLDIDWGYQGKLQFVIVKQSSDAGDHIVESDNTNADASVGYLTEPRSQPIISNFTFISNGKDDVIKLKEGVSGIYTNGIVIDASNSKACIETTKAETFQDAATTPKVTFNSVAFDCKALAALGDDAGTLAQAEALITVGSNNLYSADSGGGSYVPTVSGVINGTAENAMTVADKSADSFFTTTDYVGAVKDSTDTWYKDWTVAGSLN

SEQ ID NO: 139336 - protein, 286 aa, Unknown
  Bacterial polypetide isolated from the Sargasso Sea
GGNGNDSLIGDSGNDTLTGGAGNDLIDGGSYGTDIAVFSGNLSDYRFTETTNGRITAEDLRTGSTDGTDTLVDIEQVQFADQTVSIADALRLTGTFTTVESQGSVELQKDANGMGWVQLADGSLDDITQAGRRVGDSSWMGWSPVAAETINGQNKVIWSHNSGTMMEWNLDSNWSQTSQQFHSAGSNGFFAAESAFNMDFNGDSIIGRSNTTVESQGSVELQKDANGMGWVQLADGSLDDITQAGRRVGDSSWMGWSPVAAETINGQNKVIWSHNSGTMMEWNLDS

SEQ ID NO: 139337 - protein, 150 aa, Unknown
  Bacterial polypetide isolated from the Sargasso Sea
MLYFAYGSNLNWHQMKKERCPGSKYIQPYILKGYKLVFSHRNPNNKYGHANIEKNKNFTVPGAIWSLSKLHEKILDEYEATNYNPPYYYKEYFSWKGKKVLVYIQKIYTKRKPSSSYLHTILEGYKDCNLDINYLKKRISNYTLNYTVHW

SEQ ID NO: 139338 - protein, 578 aa, Unknown
  Bacterial polypetide isolated from the Sargasso Sea
MATPKVVLTADRTLMSPYRGISLATFFGCAPAIDPNRDKNSFWYKILKNQVTPKVLFDFICNWSPDINGVAKFAPYGLRKVEAGLLRDGYARKDVVVAHPNHIEKFIGPETEVVGTYEMDPLGMGPVTMTFTFGRKQTSYDEYYNAELHRRINAAKKKNGSHAKVIAGASGTWQYNYAPEKIEEYGLYAILEGEMGGIAPEIDGHAGRFFDYLIDGQFENMDPFRKRKDFKVDIKEFKRGDKTHHGRFVNFWDRPELDEIPEIVEPSMHGMVEVMRGCGRGCKFCDVTLRSLRYYSPEKVQKEIEVNIKKTGLDRAWLHSDDIFVYGMDIRTAKNMEPNRDALEDLFKAVMATGIRHTNPTHGTLSGAIADERLVPNISKIINAGPDNLTGIQCGFETGSTRLIEKYADRKLAPYSPDEWHWVVKEGVKTLNENYWIPAFTLIMGLDNDEQPEDGWETIRLISELEREQPEAMFTATPLTFVPIGLLEKSEFYDMGQDNDPTQLGVMYKTWQHNFKYGIQKFMTKTGKHGSAGRIKAAAFNGLARSLGGVPLGAMERYARRKGREHERVIEKIKAEYW

SEQ ID NO: 139339 - protein, 104 aa, Unknown
  Bacterial polypetide isolated from the Sargasso Sea
MLNILVIGSGAREHAIVRSLSRSSKKKEIYCLATNYNPGIAEVCKDMAVADINDLETVKIYAKKKKIDFTIIGPENPLANGVADALSDIGIESVGPKKDLAQIE

SEQ ID NO: 139340 - protein, 701 aa, Unknown
  Bacterial polypetide isolated from the Sargasso Sea
MDESATNYNPAATEDDGTCEYDDDETSTDFAGISGFDSSSIECGPTGDISIAGSSTVFPVANLWAEAYQKYCNGIAITLEGGGSGAGAGRVCDNSEKGTAVDIGDMSRGWKTSEASVRSDGYTYDCLKGDTSRSAVQISIAADGLSVVVKKGGAAETCISGLPGGGLSVDQARWIWSDYTAAELTASGWDSSALANSDNDDSTHLWSELDASCPASEIKISGADSESGTYEFFMDAMLSDAGNGETFDLNRPDGYTNSAEDEVVVNYLESNADSIGYFGYAYYKANQDKLTAIAIENSDGDYVAPSPHSVADGSYNPLGRFIYMNLHNDAQSLQKTAPFLAFGLSASGAALVENVGYVPMTPTLVTVMLSRAGADGGVDLTSVNCGPTGAISVAGSSTVFPVANLWAEIYQTACDTTLTIEGGGSGAGAGRVCDNSEKGTAVMIGDMSRGWKSSEASVRPNGWVYDCLKGDTSRAAGQFPIAADGLSVVVKKGGAAETCVNSMGGLTPDQVRWIYSDFTAAQLAAAGWDTNSLANSDNDDSTHLWSELDASCPASEIKISGADSESGTYEFFMDAMLNGGDGGETFDLQRPDGYTNSAEDEVVVNYLTSNGDSIGYFGYAYYKANQDTLTAVAIMNDAGEYVAPTPSTVADGSYNPLGRFIYMNLHLDSNDLALTLPFLEFGFSSAGDALVNQVGYVPLQQ

SEQ ID NO: 139341 - protein, 288 aa, Unknown
  Bacterial polypetide isolated from the Sargasso Sea
LILGGIVFYINETGESGLVAAMEDLEGDYEWGCMGADVEGADGLSIGTGYLNTIDIVNQGCLTENGGITAAQAASDAEINGYSDWYLPSKDELFEVYSTIGQGGPEGNLGGFENNWYWSSSEYYTNFAWDVGFECASPSVSSKYISYYSVRPIRSFGNMVIGCTDSTAFNYDSLANSDDGSCIAVLVGCTDSTAFNYDSLANSDDGSCIAVLVGCTDSTAFNYNNQANVDDGTCIAVLVGCTDSTAFNYNPLANSDDDSCEPVVEGCIFSFATNYNPDANTDDGSCSF

SEQ ID NO: 139342 - protein, 288 aa, Unknown
  Bacterial polypetide isolated from the Sargasso Sea
ASRLAGYEFAGELSLSGELRPVRGALATSLALQTQQIDAQLVLPPGSAEEAALVPAARVVRARHLLDVVRAFLPPGSTAGGDADVANDGWTRLQATALAASTTGPDMADVKGQAGAKRALEIAAAGGHSVLMAGPPGSGKSMLAQRFAGLLPAMTVDEALESAAIASLAGRFRPEAFGVRPTGQPHHTASAVALVGGGSPPRPGEISLAHQGVLFLDELPEFPRAALEALREPLETGHITIARAAQRAEFPARFQMIAAMNPCPCGFLGSTQRACRCTPDQVHRTRPS

SEQ ID NO: 139343 - protein, 224 aa, Unknown
  Bacterial polypetide isolated from the Sargasso Sea
MFDVIAFDADDTLWHNEHIFLNAQEKFSEVFDSDQSSMVQNALSKKHIENIKIYGYGVKGFILSMIETFLEIRKVQFSNNEVQQILDFGREMLSTPVDLVPNVFEVLNQLHRDYILMIITKGDLLEQEKKISRSGLTNFFKKIEIVSDKTVETYKKILTRYEIEAHRFLMVGNSMRSDIVPVVKIGANAVHVPYKTTWEHEKEHPHLDEDKYYVLENIGLLPDF

SEQ ID NO: 139344 - protein, 208 aa, Unknown
  Bacterial polypetide isolated from the Sargasso Sea
FHKAQMKFIELHSHIKDPEEVIYQIEKKNIKFYGYGVKGFILSLLEVSVRFSNNQTDFQNIAKIIKIGKDMLAHPIQLLPNVKDTLRHLSEHYTLIMITKGDLLDQQRKVKESGLLKYFSSIEIVSEKDDQTYLEILQKNNTVPKDFLMIGNSLKSDILPVTKIGGTGIYIPHKFTWRQEKVDSTYDLKSFVKLKTISALKVWLKNQI

SEQ ID NO: 139345 - protein, 177 aa, Unknown
  Bacterial polypetide isolated from the Sargasso Sea
MFALIGGLILNLMPCVFPVLSLKIFNFIEKSDSPKEVKAHGLIFASGAILTFLLICSLILLFKYFGVQVGWGFQLQSPIFLTLLIFLFIFLSGFFISSLNLNVAFSGNAVSGSSGYSGSFFTGFLAVIVATPCTAPFMGSALGLALLQPSYQTYPIFLSLALGFCLPYLVLSFNPRL

SEQ ID NO: 139346 - protein, 300 aa, Unknown
  Bacterial polypetide isolated from the Sargasso Sea
VGVGQRGVIVVSDDHGHNWRQVPSPVQSDLTAVSFPTPSQGWAVGHDGVILHTSNGGTSWSKQLDGRISNERFVAYYRDAAAHGDAHAAAYQKQEENNAKAGPSLPYLDVWFDNAMQGYAVGSFGAFAMTTDGGKTWQPGLEHIDNPDFLNLNAIRGIGGEVYIAGERGTLFRLDRASGQFKRLQSGYSGSFFGIVGSGQRLFAFGLRGTVYQSTDQGASWQKTDTGTDSTLNGATVLGDGRIVICGSRAMLLVADPVSGAFQRVSADTPMLFAGIAADGADRVALGGSSGMSVEAIGPR

SEQ ID NO: 139347 - protein, 259 aa, Unknown
  Bacterial polypetide isolated from the Sargasso Sea
MTKNHFYEKKGPYPLNEIVKIISCDNTFINKNNIEIHGLESLNNATVKDITFLNSQKYKEFSLKTKAAACITTSNLSKFLPDKCIKLNVKNVLFAVTQTSKMFYPYADVDSLDETLKDFSKFKDIYPGVKFGKNVLVGNNVKIGKNSHIGSNSIIESNVNLGENCLIGSFVTIKNSLISDNVHIQDGCKIGVKGFGFIPKKDKNIRTPHIGKVILEEGVEIGANSTIDRGSLSDTVIGKNTFLDNQVHVAHNVKIGKNC

SEQ ID NO: 139348 - protein, 180 aa, Unknown
  Bacterial polypetide isolated from the Sargasso Sea
MFYPNADIDYPDENLKKSDEVKNLYPNVFFGKNVLVGKNVKIGKNSIVNSNCIIESNVAIGEKCIIGSFVTIKNSLIYNNVHIQDGSKIGVKGFGFIPNKNKNIRSPHIGKVILNDGVEIGANSTIDRGSISDTIIGTNTFLDNQVHVAHNVQIGKNCMIAGQVGFAGSTIIGDNVVIGG

SEQ ID NO: 139349 - protein, 268 aa, Unknown
  Bacterial polypetide isolated from the Sargasso Sea
INTKAAACITKENLKTLLPKNCIKILVKNVLFSTAQISKKFYPSADLDYPDDSVVDSSSISSKYSSVTFGKNILIGKNVKIGSKTIIGSNTIIEKNVFIGKNCLIGSNITLKNTIIGDNVVVQDGCKVGVKGFGFVPFKDKNFRFPHIGRVLLNNNVELGANCTIDRGSIGDTVIGENTFLDNQVHMAHNVKIGKNCMIAGQVGFAGSTTVGNNVSIGGQAGISGHLTIGNNVKIGGGSGVVKDIPDNVTVMGYPAVNLKEFLKKDKI

SEQ ID NO: 139350 - protein, 292 aa, Unknown
  Bacterial polypetide isolated from the Sargasso Sea
NDKILIKDLKTLDKANKNHISFLNSPDYIDLAKKTKASACLTTFNLKQYLPKSCLVIVVKNVLFSVAEISKKFYPNADVDYPDQSLQEIDEINSDFKTVIFGKNIFLGKNVKIGSNTNVGSNTVIEHNVQIGKNCIIGANVTIRNSLIGNDVVIQDGSKVGVKGFGFIPLKDKNFRFPHIGRVLINDNVEIGANCTIDRGSVGDTIIGKNTFLDNQVHVAHNVRIGQNCMIAGQVGFAGSTSIGNNVSIGGQAGVSGHLKIGNNVRIGGGSGVVKDIADGTTVMGYPASATK

SEQ ID NO: 139351 - protein, 281 aa, Unknown
  Bacterial polypetide isolated from the Sargasso Sea
MSDISFFVPTGPYNINELSKDFVAYKDKILIKDLKTLDKANKNHISFLNSPDYINSAKKTKASVCLTTKNLKKYLPKKCLVIIVKNVLFSVAEISKKFYPNADIDFPDQSLQETGKISSKFKSVTFGKNIFLGKNVKIGSNTIVGSNTVIEHDVQINKNCVIGANVTIRNSIIGNDVVIQDGSKIGVKGFGFIPVKGKNFRFPHIGRVLINDNVEIGANCTIDRGSIGDTVIGKNTFLDNQVHVAHNVRIGENCMIAGQVGFAGSTSIGNNVSIGGQAGIS

SEQ ID NO: 139352 - protein, 271 aa, Unknown
  Bacterial polypetide isolated from the Sargasso Sea
KDSSGNGIGDIYGIIEKLDYIKSLGVNMIWICPIYSSPNDDNGYDISDYRKISEEFGGNKAFDILLDEMHKRDLRLIMDLVANHSSDEHMWFQESKKGEDNPYHDYYFWKKGKPDRAPNNWLSVFSGSVWEWDSNLNKYYLHSFTKKQPDLNWENPKVREEIYDILNFWFSKGVDGFRMDVISFISKKLDFPPAKQGATLSEMMENIYANGPRIHEFLKEMNKKVLSKYDIVTVGEGPGVNLKTGLKYVDENEKELDMVFHFDHLQIDLDQ

SEQ ID NO: 139353 - protein, 241 aa, Unknown
  Bacterial polypetide isolated from the Sargasso Sea
MSGFDSDFLWGSATSAYQIEGGTAEGGRTDSIWDAFCRKPGAIRDQSSGEVACEHLKYWKQDVDLMSQIGLQAYRFSISWSRIMPNGYGAINQEGIDFYDRLIDALLEKNIEPFITLFHWDLPQVLQEKGGWLNPEIAKWFGEYSGILSDRFSDRVSNWFTLNEPQCFIGLGHYAGHKAPGLKLGVKDSLLALHHSLLAHGHSVRALRDNAKKPIKVGPVPTGSVAYPTVDTPENRDAAYK

SEQ ID NO: 139354 - protein, 280 aa, Unknown
  Bacterial polypetide isolated from the Sargasso Sea
MRKIKNNDNGDIATDHYHKYKEDISLMNNMNLGAYRFSIAWTRILPNGKGEINQKGLDFYSRLIDVLLKYNIKPFITLYHWDLPQALQDEGGWANKDISKIFSDYSQIIARKFGDRCDNFITLNEPAVFSIFGYLDGYMAPGYRNKKKYLNAMHNINLSHGRSVLAIKSISSKIKVGCTLNMAPCIPSSKKDADINATKIYDTYWNRSYADPMYLGKYPKILIKDLDGIIGQNDMNIIYQKNDFIGLNHYQQIRVKADKNNLLGARGVIKDELPFKLQKK

SEQ ID NO: 139355 - protein, 94 aa, Unknown
  Bacterial polypetide isolated from the Sargasso Sea
MDIQFPKNFLWGAATSSYQIEGAHTMHDKGKSIWDTFTHTPGKIKNNDNGDIAIDHFHKFKEDINLMAEINMSAYRFSISWTRILPRGKGEIIQ

SEQ ID NO: 139356 - protein, 228 aa, Unknown
  Bacterial polypetide isolated from the Sargasso Sea
TSSFQIEGDRSGRLDSIWDTFCSQNNTIEDNSNGDIACQHVEKWQEDVALIAGLGVDAYRLSISWPRVVNSDGTINHIGMQFYVNLVDELVKRNIKVFVTLYHWDLPQYLEEKGGWLNRETATAFAHYTDIVVSALGDKVYSYATLNEPFCSAYLGYELGIHAPGKTGVANGRKSAHHLLLAHGLGMKVLREKCPNSLNGIVLNFSTCHSATESPADKLAAKLADEYH

SEQ ID NO: 139357 - protein, 193 aa, Unknown
  Bacterial polypetide isolated from the Sargasso Sea
MLEHFSADPTFEGKAIDFIKDGDNTAISVDTDFLGINYYSRGIIAADPEAQTPGKIPNPGPEMRTDMDWEVYPTGLYDLLKRIHDDYGPKELYITENGAAYSEGPDHDGRVRDHRRTSYIHNHLLAVKRAIADGVPVGGYFVWSLMDNFEWSFGYTKRFGIVYVDYETQKRYPKDSAYWLKSIMNDPNNLLMD

SEQ ID NO: 139358 - protein, 310 aa, Unknown
  Bacterial polypetide isolated from the Sargasso Sea
PKGKGQTIQKGLDFYSKLIDELLSKNIKPLVTLYHWDLPQSLQDEGGWSNKDISKIFADYAYIIIKELGDRISFVSTFNEPAVFTIHGLADGYMAPGISDFDHFISSVHNVNLAHGLSMQAMRSIRSDLELGCVLNLGPCIPCTNKKDDIDASKIYDMYWNRIFLDPMYKGEYPKDFLEQIGKYFRDGDMQIINQKNDYIGLNHYQHTRVKADPTHLLKARGAYGNEKPFNLENVELTSMNWEIAPESYYKQIMELKNEYNNPIIYLTENGCSYTDKIENGKINDFKRIEFYKKYLTAVKKAINNGADVR

SEQ ID NO: 139359 - protein, 100 aa, Unknown
  Bacterial polypetide isolated from the Sargasso Sea
MQLGLPIHITENGMANQDIISENQVIDNERISYFSLHLDQIYKLLNEGLPIKSYFAWSLLDNFEWSYGYSKRFGIIYVDYKTQKRIPKSSWFAFKNELNE

SEQ ID NO: 139360 - protein, 117 aa, Unknown
  Bacterial polypetide isolated from the Sargasso Sea
HINNWKQDLDLIEKAGFSAYRFSFSWPRILPNGKSLENPNGLDFYDRLIDGMLERNLWPFATLYHWDLPQALAEAGGWRNEETADYFAKYAELVMKYFGDRLHSVATINEPWCVAWL

SEQ ID NO: 139361 - protein, 145 aa, Unknown
  Bacterial polypetide isolated from the Sargasso Sea
NYYTTVMLEAGGQDFPFVKAIDRSLPKTDMGWEIEPKGLTDAINLVSHYAPELPLYITENGMASANTITDEDRIEYYRDHLNEVAKATRNLPIKGYFAWSLLDNFEWAFGYTKRFGIVHVDYKTQRRTKKDSFKWWQSELVRPSA

SEQ ID NO: 139362 - protein, 277 aa, Unknown
  Bacterial polypetide isolated from the Sargasso Sea
TPGKIKNDENGDIAADHYHLFKEDIKLMADIKMSAYRFSIAWARIYPEGKGSLNQKGIDFYNKLIDELLNKDIKPLVTLYHWDLPQKLQDDGGWSNRDTSKIFCDYATTFVKKFSDRVNFISTLNEPAVFSIHGHADGYMAPGISDKNIFFSSIHNINLAHGYAIQSMRSIKPNLELGCVLNLSPSLPCSNSDEDTKATKIFDMYWNRAFLDPMYTGSYPAALEYKLKKYIQNDDLKNIHQKCDYIGLNHYQHSRVKADKDYLLGARVAYKDERPFG

SEQ ID NO: 139363 - protein, 81 aa, Unknown
  Bacterial polypetide isolated from the Sargasso Sea
VQDPLRTQYLRDYLTVGLEAMEQRVDLRGWFFWSLLDNFEWAEGYTKRFGLIYVDYETQQRIPKDSYRFIQKLIQENTLQD

SEQ ID NO: 139364 - protein, 315 aa, Unknown
  Bacterial polypetide isolated from the Sargasso Sea
YQTFLSHYIHWDLPQKIQDSGGWSNRDITKYFSDYSYLIAKKFGDKCKNIITLNEPAVFSTFGYLDGYMAPGLRNKKQYFSSIHNINLAHGFAYKSIKSISSKINVGCTLNMAPCLAVSNSRKNENAKIIYDTFWNRAYADPMYLGIYPKIIEKKIQHLIKQNDMKIISQKNDFIGLNHYQHIRVISDKNNLLGARSVNLNELPKKINKKKLTSMNWEIVPNAYYNQIMELKNRYNNPIIHLTENGCSYPDVKNKKGKIIDTKRISFLKKYLKAVKKALKDGARIKSYFVWSLLDNFEWSLGYEKRFGIIHVDFK

SEQ ID NO: 139365 - protein, 263 aa, Unknown
  Bacterial polypetide isolated from the Sargasso Sea
MKITLADSSPLLNPEFVFGVATASFQIEGAADSREPCIWDTFCAQPGRIKDGSDGLKACDHVARWREDVELIAALGVDAYRFSVAWGRVIRADGSINQAGLDFYIQLLDALKARNIKAFVTLYHWDLPQYLQDEGGWLNRATAYKFAEYADIVSRAFGDRVHSYATLNEPFCSAYLSYEAGIHAPGVQNRQHGRQVAHHLLLAHGLAMPVLQKNAPAALNGIVLNFSPCHPASDSEADIRAADMADQYHNQWYIQPLMEARYP

SEQ ID NO: 139366 - protein, 98 aa, Unknown
  Bacterial polypetide isolated from the Sargasso Sea
MNSNKFPKDFFWGTATSSYQIEGAADLDGKGPSVWDTFSHKKDTIKNGDTGDVACDHYHLWPKDLELLENLGVNSYRFSISWPRILPSGRESKPNQAG

SEQ ID NO: 139367 - protein, 152 aa, Unknown
  Bacterial polypetide isolated from the Sargasso Sea
MLPANSKMQSKAFTYGVATASFQIEGAADTRLACIWDTFCATPGKIRDGSNGEQACEHVKLWRQDIDLIESLGVDAYRLSISWPRVLHKDGSLNDQGVKFYIDLLDELNRRDIKPFVTLYHWDLPQHIEDNGGWLNHETAYLFADYADKITQ

SEQ ID NO: 139368 - protein, 256 aa, Unknown
  Bacterial polypetide isolated from the Sargasso Sea
TGRGEVNEAGLAFYEKLIDTLLAHQIEPVLTLYHWDLPQALQDEYGGWEDRRIIEDFERYCVTLYQRFAGKVKYWVSLNEQNYNLTNAYQLGTHPPAVQDRKRFFAANHIAFLANARVIKAFRQHVPGGLIGPSFAYSPAYPASCDPKDMLAFENAEEFTNLWWLDAYCFGRYPQAALAYLRETGEAPDILPGDLELLREGTPDYIGVNYYYTLTFTDNPLGGQTLQRINTTGQKGTTPSSGIPGLYKTAPNPHLE

SEQ ID NO: 139369 - protein, 440 aa, Unknown
  Bacterial polypetide isolated from the Sargasso Sea
MINLSFLQDFPKDFNFGVATSSYQIEGTMYGNCGKSIWDDFAERKLNGIDGKLACNHIEYFKEDIKLIKDAGFKAYRFSFAWPRLFPDNNKDVNLKGVDFYKQLLEEINNCDLEAFPTIYHWDLPIRFQKIKGWEDQETCKHFGELSFFISKTFGDQFEKISTINEPWCVSWLSHYLGEHAPGIKNIQSAAKTMHNILFAHSQSVEALRSCNDHQIGIVLNNQFGQPIDSNEENIQATKLFDEIHNRWFSDAIFKGKYPELALSILEKFLPENYKTQLELISSPIDWIGLNYYTRSLIKYKKSDDGVNYECNSGTLKKTDMGWEFYPEGLSYFIKRINKEYDNNIPIYITENGMANNDKLSLGNSIKDHDRIEFFNIHLKEVLDCVNEKLPVKGYFAWSLLDNYEWAFGYSKRFGLIFTDFQNFKRIPKNSYYEFQKYLK

SEQ ID NO: 139370 - protein, 295 aa, Unknown
  Bacterial polypetide isolated from the Sargasso Sea
MQEINLPSNSMMLSKDFLFGVATSSFQIEGDRKGRLDCIWDTFCEKKNAITDATNGDIACNHIDLWKQDVELIDSLGVDAYRLSISWPRVMKQDGSVNEVGMRFYVNLVNEVIKRGMKVFVTLYHWDLPQHLEDNGGWLNRNTAYAFEKYAEAVANALGEKVHSYATLNEPFCSAYLGYEAGIHAPGKTGMANGRKAAHHLLLAHGLALKVLNRVCPKSQNGIVLNFSNCHTKSDSQEDIHAAKLADDYQNQWYLKPIIEGKYPDIIDKLAPDVKPDIAEGDMAIICQPIDYLGI

SEQ ID NO: 139371 - protein, 477 aa, Unknown
  Bacterial polypetide isolated from the Sargasso Sea
MHHHKFNDFPADFLWGAASAAYQVEGAWNADGKGPSVWDLFTKLPGKTFEGSNGDVAVDHYHRMEEDVALMAEMGLKAYRFSVSWPRIYPTGRGEVNEAGLAFYEKLIDTLLAHQIEPVLTLYHWDLPQALQDEYGGWEDRRIIEDFERYCVTLYQRFAGKVKYWVSLNEQNYNLTNAYQLGTHPPAVQDRKRFFAANHIAFLANARVIKAFRQHVPSGLIGPSFAYSPAYPASCDPKDMLAFENAEEFTNLWWLDAYCFGRYPQAALAYLRETGEAPDILPGDLELLREGTPDYIGVNYYYTLTFTDNPLGGQTLQRINTTGQKGTTPSSGIPGLYKTAPNPHLETSNWDWAIDPTGMRIALRRLSSRYGLPLMITENGLGEFDKLAEGDRVHDDYRIDYLRSHVKACQEAMQDGVELLGYCAWSFTDILSWLNGYQKRYGFVFVERDEQGGSLRRLKKDSFYWYQTVISSGGKTL

SEQ ID NO: 139372 - protein, 64 aa, Unknown
  Bacterial polypetide isolated from the Sargasso Sea
YEVAKAARNLPIKGYFAWSLLDNFEWALGYKKRFGIVHVDYKTQRRTKKDSFKWWQSELVRSSP

SEQ ID NO: 139373 - protein, 341 aa, Unknown
  Bacterial polypetide isolated from the Sargasso Sea
MKQLSLPSGSPLLAKHFTYGVATASFQIEGGAADRLPCIWDTFCSKEGKIADNSNGDVACEHYTRWQDDIDLIESLGVDAYRLSISWPRVMTKAGHLNPKGVKFYTDILDELKRRNIKAFVTLYHWDLPQHIEDEGGWLNRNTAYEFAHYTDLITQAFGERVHSYATLNEPFCSSYLGYEIGVHAPGIVGREHGRKAAHHLLLGHGLAMQVLAKNSPNSLNGIVLNFTPCYSVTQCEEDLNATAFADDYINQWYMQPVMQGQYPDIINQLPKAQRPDILPGDMEIIAQPLDYLGVNFYTRMHYQASETDFYHELPHKAPMTDIGWEIYPKALTELLVSLNE

SEQ ID NO: 139374 - protein, 89 aa, Unknown
  Bacterial polypetide isolated from the Sargasso Sea
DGEVWDNGRTAYFHTHLNAVNEAIEKGVDIRGYFAWSLMDNFEWALGYSKRFGIVYVDYATQKRTPKQSALAYSKLVKSRINGYISGIK

SEQ ID NO: 139375 - protein, 49 aa, Unknown
  Bacterial polypetide isolated from the Sargasso Sea
LKGYFAWSLLDNFEWAFGYSKRFGIVYVDFNNLERIPKLSWKEFRKHLK

SEQ ID NO: 139376 - protein, 111 aa, Unknown
  Bacterial polypetide isolated from the Sargasso Sea
LTYVISKLKKNYSRMIPIYITENGMAHSDSLEQGRVDDQERVSFYAKHLLQIKKLLIKGAPIKGFFAWSLLDNFEWSYGYSKRFGLIYVDFKNQKRVPKSSWFEFKKALKK

SEQ ID NO: 139377 - protein, 186 aa, Unknown
  Bacterial polypetide isolated from the Sargasso Sea
MGVYPSQTLDLFSQYMPINYEKDLAQISQPLDWVGINYYTRSLIKIDPSESFLGYKSVNGDLDITDMGWEIFPKGLRILIERLHKEYSKKIPIYITENGMANNDVIVDGKINDSKRIKFYSDHLVECFKLLENGIPLKGYFAWSLLDNFEWAFGYSKRFGLVYVDFDNLKRVPKLSWEEFRRYLKS

SEQ ID NO: 139378 - protein, 181 aa, Unknown
  Bacterial polypetide isolated from the Sargasso Sea
NLLNILRPYMPDNYSNDLKIISKKIDWIGINYYTRTIVKKDNNEKYFGFKTLKGRLPKTDMGWEIFPEGLTHVINKFTENFSKSTPIYITENGMAHNDKIKKGIINDQERISFYKRHLKEIINLLKGGVLLKGFFAWSLLDNFEWAFGYSKRFGLIYVDFKTQKRIPKNSWLEFKKNLKNN

SEQ ID NO: 139379 - protein, 286 aa, Unknown
  Bacterial polypetide isolated from the Sargasso Sea
INLMAEINMSAYRFSISWTRILPKGKGQTIQKGLDFYSKLIDELLSKNIKPLVTLYHWDLPQSLQDEGGWSNKDISKIFADYAYIIIKELGDRISFVSTFNEPAVFTIHGLADGYMAPGISDFDHFISSVHNVNLAHGLSMQAMRSIRSDLELGCVLNLGPCIPCTNKKDDIDASKIYDMYWNRIFLDPMYKGEYPKDFLEQIDKYFRDGDMQIINQKNDYIGLNHYQHTRVKADPTHLLKARGAYGNEKPFNLENVELTSMNWEIAPESYYKQIMELKNKYNNPN

SEQ ID NO: 139380 - protein, 310 aa, Unknown
  Bacterial polypetide isolated from the Sargasso Sea
SDGKGESIWDTFAHTPGKIKNNENGDVAVNHYYQFKEDIKLMADIKMSAYRFSIAWTRIFPDGAGYLNQKGLDFYKKLIDELLKNNIKPMVTLYHWDLPQKLQDKGGWANRDTSKLFADYAYTFAKKFSDKVNFISTLNEPAVFSIHGHADGYMAPGISDNEIFLATIHNINLAHGYAMQSMRSINDKLELGCVLNLSPSFPCSNSKEDIEAAKIFDMYWNRAFLEPMYTGSYPIELEYKLKKHILTNDLKDIFQKCDYIGLNHYQHSRVKADKNYLLGARTAYKDEKPFGLNENEDLTFMGWEIAPNSY

SEQ ID NO: 139381 - protein, 280 aa, Unknown
  Bacterial polypetide isolated from the Sargasso Sea
IPHNEPNVLSILGHGVGIHAPGLQDASACFASAHHLNLSHGLVSRELKICRSDLQLGPVVSLQPVIELDRDQNASERLDALWNKMFLDPVFFGTYPEILEEELKPWIHEGDSEILQYKPDFFGLNHYTVMRAQSSGKSALGVRIMETPEGLPVTDSGWEIRPEAMLEQLLEFRDQYGDIPIYITENGCSSPDQPDASGEVKDLLRTQYLRDYLAAGLEAMEKGVDLRGWFFWSLLDNFEWAEGYTKRFGLIYLDYETQQRIPKDSYRFVQKLIQENTLPD

SEQ ID NO: 139382 - protein, 265 aa, Unknown
  Bacterial polypetide isolated from the Sargasso Sea
MLPDSSLLKPEFTFGVATASFQIEGARDKRLDCIWDTFCEKPGTIADNSHGDVACDHVARWQQDIEMIADLAVDAYRLSISWPRVMQQDGSVNEQGMAFYAQLLSALKARNIKTYVTLYHWDLPQYLEDNGGWLNRDTAYKFKEYTELVTQHLGHLVDSFATLNEPFCSAYLGYEVGVHAPGIKSQQAGRQAAHHLLLAHGLAMQVLRKNCPDTEAGIVLNFSPTYPLTADDKKAAELADQYHNQWYIKAVLEGAYPSLLDDLAD

SEQ ID NO: 139383 - protein, 156 aa, Unknown
  Bacterial polypetide isolated from the Sargasso Sea
MDIQFPKNFLWGAATSSYQIEGAHTKNNKGKSIWDTFAHTSGKIKNNHNGDIAIDHFHKFKEDINLMAEINMSTYRFSISWTRILPKGKGQTIQKGLDFYSKLIDELLSKNIKPLVTLYHWDLPQSLQDEGGWSNRDISKIFAEYAYIIIKELGDR

SEQ ID NO: 139384 - protein, 68 aa, Unknown
  Bacterial polypetide isolated from the Sargasso Sea
YKKHLAEIRNLLKDGILLKGFFAWSLLDNFEWAFGYSKRFGLIYVDFKTQKRVPKNSWFEFKKYLKNN

SEQ ID NO: 139385 - protein, 190 aa, Unknown
  Bacterial polypetide isolated from the Sargasso Sea
MDIQFPKNFLWGAATSSYQIEGAHIKNNKGKSIWDTFAHTSGKIKNNDNGDIAIDHFHKFKEDINLMAEINMSAYRFSISWTRILPKGKGQIIQKGLDFYSKLIDELLSKNIKPLVTLYHWDLPQYLQDEGGWSNRDISKIFADYAYIIVKELGDRINFVSTFNEPAVFTIHGLVDGYMAPGISDFDHFI

SEQ ID NO: 139386 - protein, 395 aa, Unknown
  Bacterial polypetide isolated from the Sargasso Sea
KVKDGSNGDIACDHYHLWREDIALISSLGVDAYRLSIAWARVMNQDGSLNQQGVDFYINILDELKAKNIKSFVTLYHWDLPQHIEDQGGWLNRNTAYLFQDYADKLSKAFGDRVYSYATLNEPFCSSYLGYEAGIHAPGLTKKAYGRQSAHHLLLAHGLAMQVLQKNSPNSMNGLVLNFTPAYPLTDSAADQRAAQLADEYFNQWYIKPVFDGAYPDSFALLADEDKPVIEPGDFDIIKAPLDFLGVNFYTRTVYKAAEGRDFIEVDMADAPKTDIGWEIYPQAFTDLLVSLHQKYTLPPVYITENGAAAADQLHNGEVDDQLRLSYYQLHLNAVHQAVEQGVDIQGYFAWSLMDNFEWAEGYLKRFGIVYVDYNSQQRTVKNSGLAYRNLISNR

SEQ ID NO: 139387 - protein, 231 aa, Unknown
  Bacterial polypetide isolated from the Sargasso Sea
MSETFPKNFLWGAATASYQIEGGAYKDGKGKSIWDTFAHTEGKIKNNENGDIATDHYHRYKEDISLMNDIKLNAYRFSIAWTRIMPDGKGKINQKGIDFYSRLIDELLKYNIKPFITLYHWDLPQKLQDKGGWANRDITKIFADYSELVAKKFGDRCEYFITFNEPAVFSIHGYLDGYMAPGYKNKDKYFPSVHNINVSHGLSVQAIRSVLSKVKIGCTLNMAPCIASSNK

SEQ ID NO: 139388 - protein, 450 aa, Unknown
  Bacterial polypetide isolated from the Sargasso Sea
MSNKFPDNFIWGAATSSYQIEGASKIDGKGKSIWDTFSHTKGKVFKNQNADIATDHYNRYKEDVALMNNIKLKAYRFSISWPRIFPNGKGKFNKKGVDFYSKLLDELLKKNIKPFITLYHWDLPQKIQNSGGWSNREITKYFSDYSYLIAKKFGDRCKNFITLNEPAVFSTFGYLDGYMAPGLKNKKKYLSCIHNINLAHGFAFKSIKSVSSNIKVGCTLNMAPCLAFSNDSKDINAKITYDTFWNRAYADPMYLGSYPKIIEKKIQNLIKKNDMKIIKQKNDFIGLNHYQHIRVISDKKNLLGARSVSLKELSKKININKNLTTMNWEIVPDAYYRQIMELKNRYNNPNIHLTENGCSFSDNVNNNGKILDVKRINFLKKYLKAVHKAIKNGAKIKSYFVWSFLDNFEWALGYGKRFGIVHVDFKTLKRIPKKSYYFFGELIKKNSIPN

SEQ ID NO: 139389 - protein, 343 aa, Unknown
  Bacterial polypetide isolated from the Sargasso Sea
QFYSRLVDGLLSRGIEPWLCLNHWDLPQALQEKGGWTNRDTVMRFVEYGWKVLEELGDRVKHVIPHNEPNVLSILGHGIGIHAPGLQDASACFASAHHLNLSHGLVSRELKICRSDLQLGPVVSLQPVIEQERDQNASERLDALWNKMFLDPVFFGTYPEILEEELKPWIHEGDSEILQYKPDFFGLNHYTVIRAQSSGKSALGVRIMETPAGLPVTDSGWEIRPEAMLEQLLEFKERYGDVPIYITENGCSSPDQPDASGEVQDPLRTQYLRDYLAAGLEAMEKGVDLRGWFFWSLLDNFEWAEGYTKRFGLIYVDYETQQRIPKDSYRFVQQLIQENTLPD

SEQ ID NO: 139390 - protein, 442 aa, Unknown
  Bacterial polypetide isolated from the Sargasso Sea
MDNLSVLKEFPDNFTFGAATSSYQIEGNSYGRCGKSIWDEFAQKKLKGIDGLKACNHYEYFREDIKLIKDLGFKAYRFSFAWPRLFPENNSNINKEGVDFYNRLLDEILNNDLEPFPTLYHWDLPIRFSRMGGWENQDTCKHFADYSYFVSQRFGDKFEKVATINEPWCVSWLSHYLGEHAPGKKDLKSAVLTMHNILLAHGLSLQALKSNRPHKIGIVLNNQYAEPFNQESDNLNALQLFDEIHNRWFSDAIFKGSYPKLALEVLGSNLSKNFNEDLKIISHPLEWVGLNYYTRSIIKHKKSEDGIDYETLRGSLKKTDMDWEFYPTGLSYFIKRISNEYSNQIPIYITENGMANNDELNARNEVNDLDRVEYFHLHLQEILNCLKEGLNVKGYFAWSLLDNYEWAFGYSKRFGLVFVDFENFKRIPKKSYYEFSKFLNRN

SEQ ID NO: 139391 - protein, 453 aa, Unknown
  Bacterial polypetide isolated from the Sargasso Sea
MKNKFPNDFFWGTATASYQIEGATDKDGKSKSIWDTFTHTPGKVKNNENGDTAVDHYHRYEEDIELMANINLNSYRFSLAWTRIIPEGIGKINPKGVDFYSRLIDKCLEKNIEPFITLYHWDLPQSLQDKGGWANRDITNIFSDYSEAIVKNFGDRCNHFITFNEPQVFTIHGYVDGYMAPGYKDLEKYFASIHNVNVAHGKAFQAMKSLNNNIKIGCTFNMAPCIPATKSSGDLHATKLFDTYWNRSFADPMYLGRYPELLINDVSKHIQQDDMKTIFQKNDFIGLNHYQHIRIKADNKNLLKARGAFNDELPFGLDDKDAKLTLMGWEIVPDAYYDQIMDLKNNYGNPDIYLTENGAAYPDLIEKNGEINDNDRIDYFKKYLSAVKKSIDNGAKVKSYFAWTFMDNFEWALGFEKRFGIVHVDFKTLKRTPKKSYYFFKKLVEQNSIPLDF

SEQ ID NO: 139392 - protein, 397 aa, Unknown
  Bacterial polypetide isolated from the Sargasso Sea
PGKVKDGSNGDLACDHYHLWREDIALISSLGVDAYRLSIAWARVMNQDGSLNQRGVDFYINILDELKAKNIKSFVTLYHWDLPQHIEDQGGWLNRNTAYLFQDYADKLSKAFGDRVYSYATLNEPFCSSYLGYEAGIHAPGLTKKAYGRQSAHHLLLAHGLAMQVLQKNSPNSMNGIVLNFTPAYPLTDSPADQRAAQLADDYFNQWYIKPVFDGAYPDSFALLADEDKPKIEVGDFDIIKAPLDFLGVNFYTRTVYKASEGRDFIEVDMVDAPKTDIGWEIYPQAFTDLLVSLHQKYKLPPVYITENGAAAADQLHNGAVDDQLRLSYYQSHLNAVHQAVEQGVDIQGYFAWSLMDNFEWAEGYLKRFGIVYVDYDSQQRTVKNSGLAYKNLISNR

SEQ ID NO: 139393 - protein, 351 aa, Unknown
  Bacterial polypetide isolated from the Sargasso Sea
GNNEISVEVFRWSDAAYIEDQDFWRLSGIYRDVYLMHTPDTHIRHFKAISELVDNYQHGALNLTTHIKNYGSKTEKLVLKNTVYHNGGIVVKELDPISIELLGSNEKVLQQEIIIKEVSPWSAETPNLYTLVLAIFNLDGDLIETVSTKIGFRSVELKNGQMLVNGEPIIIKGVNRHEHDPVMGRTVDENLMVKDILLMKQFNVNAVRTSHYPNHPRWYELCNEYGLYVMDEANLESHAFWSKFTLDPVWRPAFVDRAKRMVLRDVNHPSIIFWSLGNEAGYGPNHDAMAEWIRDYDPSRLIHYEGKEPGYGPLPNHYDIIANMYASVDLMKELHDKNPSRPVILCEYSHA

SEQ ID NO: 139394 - protein, 342 aa, Unknown
  Bacterial polypetide isolated from the Sargasso Sea
GIERDVFLYAQPKLAVRDFFCKNRLNDELDKANLDFEIDLKNYNNSSIKYTVKTKIFNDDKVIYQNESNGDIDKNQTKKITLDGIIDSPKLWSAEIPNLYNVKLELVDSDGSYQLIDFKTGFRKIELKNGQFLINNKPILFKGVNRHEHDEFTGHVVSRESMLKDIEIMKNNNINSVRTSHYPNDPYWYELCDEYGLYVIDEANVESHGFGYKKEDTPAFKPEFDDMHMDRWVRMVERDKNYPSIVVWSLGNEAGDGPIFVEGYKWLKNFDDTRLTFYERTSEQPRMQRGKKEMNGIDLEPHTDFFGWMYYYMNDIKKDYLGKFPERPFIWAEYSHAMGNSN

SEQ ID NO: 139395 - protein, 297 aa, Unknown
  Bacterial polypetide isolated from the Sargasso Sea
QVFLHFDGVKSAFFVWVNGQKVGYSQGSMTPAEFNITNYITNETNVISVEVFRWSDAAYIEDQDFWRLSGIYRDVYLMHTPDTHIRHFKAISELVDNYQHGALNLTTHIKNYGSQTEELVLKNTVYYNDGIVVKDLQPISFELSGSNEKVLQQEIMIKEVNPWSAETPNLYTLVLSIFNLDGDLIETVSTKLGFRSVELKNGQMLVNGEPIIIKGVNRHEHDPNIGRTVDENLMVKDILLMKQFNVNAVRTSHYPNHPRWYELCNEYGLYVMDEANLESHAFWSKFTLDPVWRPAFV

SEQ ID NO: 139396 - protein, 415 aa, Unknown
  Bacterial polypetide isolated from the Sargasso Sea
MKDAILRIFLIFSVLFSSAQYKEWEDLSTFKINTEEPHSFFIPKDINGDSITKYLNGTWNFKLFKNDELVPKDFFKTDFGKDDWQKIPVPSNWQFHTDDFPLYTNIVYPYEINPPYMPKEYNPVGLYHREFTVDNDWNDKQIFIHFGAVNSAFYLWINGDFVGYSEGSKTPAEFDISKYLNGSVNQLVMKVIRWSDGTYIEDQDFWRLSGIERDIFLYAQPKLAVRDYFLKSSLSNNLDKADLNFEVDLKNYNSLSKKYTLKTKIFNDQDVVYQNEKDGTIESNQSKKITLNGVVSSPELWSAEIPNLYNVLIELVDSDGFYQKIDFQTGFRRIELKDGQFLINNQPILFKGVNRHEHDEFTGHVVSRESMIKDIEIMKKNNINSVRTSHYPNDPYWYELCDKYGLYVIDEANVE

SEQ ID NO: 139397 - protein, 1054 aa, Unknown
  Bacterial polypetide isolated from the Sargasso Sea
MSANIPPEIEDPSIVETNKEPARSTFFNFESKKLAKINEPSASGRYLSLNGMWKFNWVRDPLDRPMDSYQIDFDDSRWDEIEVPSNWELSGYGVPIYLNHPYEFSYDPDPPNIPDGYNPVGSYRKEFIMPEDWEGQRTVIHFGAVKSAFFIWINGKKVGYSQGSKLPAEFDVSEYVKAGNNVVALQVYRWSDGTYLECQDFWRISGIERDVYLYTEPSIRVADLWAKTPLDEDFKNGLFELEIDIRNDQLTDEKISIQTELFKPNGRRVYNKTDIVTVPGDTLIKHIFKKQILDVHAWTAETPSLYTIRVTLKKGYRVITSLSDEIGFRTIEVSGGQLLVNGQPILIKGVNRHEHDPDKGHIISRELMEQDIKLMKEFNINTVRTSHYPADPYWYDLCDRYGLYVIDEANIESHGMGYHPDRTLGNKPEWYLAHLTRIQRMVERDKNHPSIIMWSMGNEGGDGVNFIACSNWLRTKDPSRPVHYERAGDRDHVDIYTPMYPGVEWLKKWASKKHERPLIMCEYMHAMGNSLGGMSDYWELIREEPQLQGGCIWDWVDQGLRKTSEDGKQFFAYGGDYGPPDTPSDGNFLINGLVQPDRRPNPHFYEAKKAYQNFLVRSVGLDDFLIEIMNEHFFISSKEYLISWKLRADGSTIQSGDLAGLIIKPQESKRIKVPVEEFKMEALTEYFLEIEFRLKKDNGLLKAGHLAAWEQLPIVNYATIKTADKIAHSSYIDNIPILDNVVESDKDIIIVGNAFRVVFSKVKGTLASWSKNGKEYLVNGPMPNFWRTPTDNDFGNNMPERAAVWRKASQDQQVNDIQVTNNRYFVGIQVGFTYPDLNSNGKITYSIYGDGRILVTHSINLNSADLPDLPKFGTRMTIPKEYDNMTWFGRGPHESYIDRKASTRVDIFSGKISEQYHPYVRPQENGNKTDVRWATFTDQDGNGIIVSGFLSLNASHFIPEDFDDGFTIDDQGKPLNVRGNKRGMHTTDLVKRDLVHLDIDHKQMGVGGEDSWGAQPLKKYKIEPKRYNYHFIMAPINANDDPMSIYKYGLLDHE

SEQ ID NO: 139398 - protein, 967 aa, Unknown
  Bacterial polypetide isolated from the Sargasso Sea
MEKENNIDQLDWENPSVIGINKENARAHFFDFESKELANTNKFENSNYYKSLNGKWKFYYSLNPDVRPKEFMKNDYDVSSWDDIEVPGSWEMQGWSVPVYVNVQYPFPANPPFVPHEYNRVGSYRNSFELPSSWLDRDIFIQFDGVRSAFYLWINGKYIGYSQDSKTPAEFNITDFIIDGKNTVSVEVYRFSDGSYLEGQDTWRISGIERSVFISAKPKIRLTDFSIISDLDSLYKNGHFELIMDLINNSNDSSDITVQGELHKLDKSVEPILSFDKKMTVSNKDTIHYKSIINNVEVWSAETPNLYRLMITIIDNDENVIQSFTQQVGFRKIEMVPGNLLINGKAIIFRGVNRHEWDYKTGRSITEKQMIDDIKLMKKFNINAVRTSHYPNQMRWYELCNEYGLYVIDEANIEAHGMEFHKEKYGFISDSDEWKKAWIQRGRSMVERDKNQPCIIMWSMGNEAGDGENFKRLYKWIKAKDNTRPVAYEPSREANHTDVVFPMYSSIETISKYAEKNPERPLILCEYAHAMGNSLGNLQDYWDTFEKYNVLQGGFIWDWADQVILKTDTSGKEYWAYGGDFGDEFTINDSNFCSNGLVAADRTPNPHFFEVKKVYQPIKFIAEDITRGQVRISNRYDFINLDHIDFSWFISEDGKTVESGKLGVIDLEPNASTVLSFNLSSVVPKPGSEYFLTIIGRLNRNMPLLNKKHVVAWEQFTLPIDRPSIKTDISNFPDIRLVETDTTVNVLGDNFQITFNKQTGFLNDYVFSKRHIIQSELIPHFWRAPTDNDRGNMMHIRTAIWKDIGKELNIKFFQRSLSKNVAKIKMVANHDPTGSVITIKYNIFGNGLIDIEQEIVTEKESLPELPRFGMKMTLPKDFNKVSWYGRGPHESYWDRKTSAPVKVYSGTVWEQTYPYVRPQETGNKTDVRWMALDNGTIGLLAIGQKLFDGSVHQYPYRDLENIPGTSV

SEQ ID NO: 139399 - protein, 666 aa, Unknown
  Bacterial polypetide isolated from the Sargasso Sea
MKNTVYHNGGIVVKELDPISIELLGSNEKVLQQEIIIKEVSPWSAETPNLYKLVLAIFNLDGDLIETVSTKIGFRSVELKNGQMLVNGEPIIIKGVNRHEHDPVMGRTVDEDLMVKDILLMKQFNVNAVRTSHYPNHPRWYELCNEYGLYVMDEANLESHAFWSKFTLDPVWRPAFLDRAKRMVLRDVNHPSIIFWSLGNEAGYGPNHDAMAEWIRNYDPSRLIHYEGKEPGYGPLPNHYDIIANMYASVDLMKELHDENPSRPVILCEYSHAMGNSNGNIFKYWDAIYKYPRLQGAFIWDWVDQGLTRKDSHGEYFVYGGDFGETLHDGNFCLNGVISPDRKPHPALYEVKFHQQNIKVTWDGIDKNIFMIENRNFFVDLSYVFGKWELIEDGKIISSGSINTDYIGPQSKQIYELPPFNLSHKNREYAVNFRFALKNDHSWAESGHIVASDQVIIKRYDGPRYRKGGKQNNKKVQVKENGDRVVVSAVGRDFDFDLSTGQLAQVTKANESFIVNPIIHNIWRAPTDNDEGGDGKSFASRWLKSGYNDMKRQVVNVNSSFTDDGLFQISVDEKYSSDSANILVNLLYTILQDGDLHITGNTNIPEGLPVVPKIGLSFQIDKKYSNLQWYGRGPHESYIDRKHSAFFGRYSGTVRDQYYPYIRPQE

SEQ ID NO: 139400 - protein, 259 aa, Unknown
  Bacterial polypetide isolated from the Sargasso Sea
GNVKFDDGSRTAWQCLATENADGTFTKLGPVLPLPEGYTGHVRDPKVWQHEGRWYMVLGAQDLQKRGKVLLFSSADLHEWTSQGEIAGYGINGLDDAGYMWECPDLFALGDQHVLICCPQGVPREKERYLNTYPAVWMSGDFDYHRAAFEHGELHELDAGFEFYAPQTMLTSDGRRLLVGWMGVPEGEEMLQPTLTNGWIHQMTCLRELEFIDGQLYQRPLRELSALRGEAHGWAGNSLPLAPMEIVLQTTGDDILSLD

SEQ ID NO: 139401 - protein, 259 aa, Unknown
  Bacterial polypetide isolated from the Sargasso Sea
EFGYMWECPDLFPLGDRHVLISCPQGIAPRGEDYRNLYQCGWLAGDFDGEHFAHGAFHELDRGFEFYAPQTTQDSQGRRLLFGWLGLPEENEMSQPTIPYGWLHQMSCPRELFWQGDWLSQRPVAELAALKGEQTRFEGTLGEFPGLAIDSAWLDLALCGEGSLWFGAVAELCWRPGRLVLRRLNWQSGEWEERCCPWQGGSITVLCDRSSLECFVDGGRHTLSARYFPGPGPQLAPGKPVAGGKICLDHWPLAACLVQ

SEQ ID NO: 139402 - protein, 530 aa, Unknown
  Bacterial polypetide isolated from the Sargasso Sea
MLACVACTQVAAAPCNAAAEQGTPQWRPALHYTPQRNWMNDPNGLVYDNGRYHLFYQYNPLGNDWGNMSWGHATSTDLVHWREQPVAMRANATEEIFSGSIVADTLNTSGLGTPGHTPLVALYTSVYKAGSGHAPGVQAQSLAYSLDHGATWQPYAHNPVLTLDPESKQFRDPKVSWYAPGGYWLMTTVVADAHVVKLYRSDDLIHWSFLSDFTRPGVPHDGTLWEMPDLVPLPLDGDPARIRWVMIVNVNPWSIAGGSGAMYFVGDFDGRTFTPDRVAPAGSDPAQFRWVDHGADFYAAGTFSGAPGSRPVAIAWMSNWDYAAKVPTTPWRGATTLPRELSLKTIDGEPTLVGEPAAAFDAWADGRPAVHEGDLTVDSATRALSAATRGVVQRITVTIAPQHAARAGLIVRRSADGSIGTRIVYDTAKRTLTLDRSMSGATNFADTFSREHIVDLPLEHGQLRLEIVVDRGSVEVFANGGRVALTDLIFPPRDADRVAVFAEHGRATFSGLTVTQLEAGSDGHGACAAR

SEQ ID NO: 139403 - protein, 97 aa, Unknown
  Bacterial polypetide isolated from the Sargasso Sea
GAEGAALARDVARRWLKSVAQILRRSGFMHEKYDARTIGGAVGGGGEYAPQRGFGWTNGVALVFLEKYCYDGKSKLGRGPPDVGGWGWGRPEDSIKR

SEQ ID NO: 139404 - protein, 293 aa, Unknown
  Bacterial polypetide isolated from the Sargasso Sea
MLADDSPIQPQPAPSPTPTPQPQPQPEPEPAPEPPPAPKPVADYSEALGLSLLFYDANRSGDLDESTNRVPWRGDSGLRDGQDGIYFGDATAENLQVGLNLDLTGGYHDAGDHVKFGLPLASTLSTLAWSGISFADGYANSNQMDALLNTVRWGTDYLLKAQGTNAIGETTYFIAQVGDGQADHALWSAPEQQTIERPALAVTPDNPGSDVAAASAAALASASVLFRETGDSGYADTLLEASESLFTFADRYRGRYSDSIKSVQSFYNSWSGYNDELAYGAAWLARAVDAQGG

SEQ ID NO: 139405 - protein, 230 aa, Unknown
  Bacterial polypetide isolated from the Sargasso Sea
VSSELIATGIDINFAPVLDIDQSTSSIIGNRSFSDNPDEVISMASDYIDGMHQAGMSSTGKHFPGHGGVAEDSHIELPEDIRQLDDLMNFDMKPYIKLANKLDAIMCAHILFPNVDKSIPSFSKYWMKEILRNKMNYDGLIFSDDLTMLGAGGEPCSEKARKSIQAGCDMVLVCNNRKEIEGIINIFDEIGVEPSERLSIMKQNTNIEWNELNNSDRKRNINIKLEKIRS

SEQ ID NO: 139406 - protein, 142 aa, Unknown
  Bacterial polypetide isolated from the Sargasso Sea
MYGRIMIDVEGTSLSQQDRELISNGNVGGIILFSKNFNSFEQISDLVNEIHAIKENILIAVDQEGGRVQRFSKDFTQLPSLKDLAKYSEINNDPDICKEVAWLTSSELIAAGIDLNFAPVLDIDESDSAIIGDRSFSSKTDE

SEQ ID NO: 139407 - protein, 111 aa, Unknown
  Bacterial polypetide isolated from the Sargasso Sea
MLDCQAEELLPEEKEKLTHPVVGGVILFSRNYHDKRQLSALVQDIRRFAKRPVLIAVDHEGGRVQRFREGFTAIPAMGDILRQSEHQDESAAYAKACGLVLAYELKTLDID

SEQ ID NO: 139408 - protein, 244 aa, Unknown
  Bacterial polypetide isolated from the Sargasso Sea
MKLGPIMMDVSGFTLTETEKTQIDKPSIGGVILFTRNYQDIHQIKKLIGEIRTINPDLLIAVDHEGGRVQRFREGFTHLPAMAKLGEVYDQFPEHALEQAFSCGWILATELLAIDVDFSFTPVLDLDYGNSSAIGDRAFHSKPEVVIELAGALIKGLHEAGMKCVGKHFPGHGHVEIDSHLGLPIDERTMNEIEYDINCFKGLINKGLDAAMPAHVLYPQVDDKPSGFSSKWIKEILKTQLGFG

SEQ ID NO: 139409 - protein, 217 aa, Unknown
  Bacterial polypetide isolated from the Sargasso Sea
NYAPSVDLSINLENPVIYKLERSFGRKPSLVLSHAKSFINAHRENNIISVLKHFPGHGSSNEDSHLGLTDVSDTWMIEELYPYKSMIDSGFVDAIMSAHVVNKRLDDKMLPGTLSTKIISGLLRNFMGFNGVVFSDDMQMQAITNHYGLDLAIEKSINSGIDVLLFCNNQLEENKVSTDKVISIIKDKIQSGEIEYSRIEESFNRIKKLKQSFDITN

SEQ ID NO: 139410 - protein, 225 aa, Unknown
  Bacterial polypetide isolated from the Sargasso Sea
LDISFAPVLDLDDSRSSVIGDRSIGDNPEKVIAIASAFIKGMNQAGMQATGKHFPGHGGIFADSHLTFSQDTRSLLELESHDLRPFDALKLKLGGIMTAHISFSSIDKEIATFSKFWLQDILRDKMEFTGTIFSDDLSMKGSDYVGGIEAKVSKALESGCNMVLVCNDRPAALEAINFLEKEKISQSEKVTKLKASGSIAWADLENDARRIDIIDKLNTTEKLKL

SEQ ID NO: 139411 - protein, 73 aa, Unknown
  Bacterial polypetide isolated from the Sargasso Sea
MTLGPIIVSIEGKKLSEDDRHTLRNDLIGGVILFSENYQNREQLMELVRSIKNVKSPELIVCVDQEGGRVQRF

SEQ ID NO: 139412 - protein, 139 aa, Unknown
  Bacterial polypetide isolated from the Sargasso Sea
MEDLFGPLMVDVDGKYLSEEDKNILNNKYIGGIILFSKNFESFEQLQKLIKEIKKVKKNILIAVDQEGGRVQRFHNEFTKIPSMQNISKYAIKYNHTRVFQEIGWLISSELIASGVDLNFSPVLDLNENTSSIISDRAF

SEQ ID NO: 139413 - protein, 279 aa, Unknown
  Bacterial polypetide isolated from the Sargasso Sea
MKSTYGRLMFDIDGKSLSIEDKKLISNKHVGGLIFFSKNFESFQQISNLVKEVREIKENILIAVDQEGGRVQRLNNEFTKIPSMQEIARFAKDHNDSSICKDIGWLISSELIATGIDINFAPVLDIDESTSSIIGNRAFSNNSDEVTSMASDYIDGMHEAGMSSTGKHFPGHGGVAEDSHKELPEDIRQLEDLMDFDMKPYIKLANKLDAIMCAHILFPNIDKSIPSFSQHWIKKILRNKIKYDGLIFSDDLTMLGAGGEPCSEKLEINFSRMRYGVSL

SEQ ID NO: 139414 - protein, 244 aa, Unknown
  Bacterial polypetide isolated from the Sargasso Sea
ENNDKEFIKDLAWLISSELIAAGIDVNFAPVLDINRNISSIIGNRSFSNDILEVINNASDYIDGMHEAGMKSTGKHFPGHGSVIEDSHLELPVDERELDELLNEDLKPYIKLNDKLDVIMCAHILFSKVDSKIPSFSVTWINNVLRDKLNYKGLIFSDDLSMLGSGNESLNNKVEMSLDAGCDMVIICNDRSGVKEVIEHLDKTDIEQTSGISEIKSSKKIKWNDLLNNNRAMAIKEKLKNMRN

SEQ ID NO: 139415 - protein, 328 aa, Unknown
  Bacterial polypetide isolated from the Sargasso Sea
MKLGPIMMDVAGFKLAEKEKTQLDKPSIGGVILFTRNYQDIHQIKKLIGEIRMINPDLLIAVDHEGGRVQRFREGFTHLPAMAKLGEVYDQFPELALEQAFSCGWILAAELLAIDVDFSFTPVLDLDYGNSSAIGDRAFHSNPEVVIELAGALIKGLHEAGMKCVGKHFPGHGHVEIDSHLDLPIDERTMNEIEYDILCFKGLINQGLDAAMPAHVLYPEVDDKPSSFSSKWIKEILKKQLGFGGVVFTDDLSMQGAHFIKNIAERVHVSLESGCDMAVICNHPELVTEVIDLDWPESEKLQLMKGIKTQKIDKIVLNHHIDNIQKLL

SEQ ID NO: 139416 - protein, 626 aa, Unknown
  Bacterial polypetide isolated from the Sargasso Sea
MFTASATAQSGSANASNNPKPSADAETIRAVKNMLGQKIILDFRYFCEDNTPSSRCRTPMTVIPPSLLNVLSMHNIGGVILFSENIQNTEQLITLNYTMQQHMVKAGRQPLFIAVDQEGGRVARLPSDMLSPFAGNMAIGATFHQRGSAFAQSVASHIGQTLLPLGINTNFAPSVDVNSEPKNPVINVRSFSENPEQVAALGQTFVSAMQSTGVMSAIKHFPGHGDTHVDSHSGLPQVTHSKAQAMAGDILPFANIINSATPPAMVMSAHIQYPSLDDTTIIDKHGKSQIVPATLSKKILSNLLRNQLGYQGLIVTDALDMAGITQFFSHEEALVSAFSAGADIALMPFTIRTQDDIKKFALLLDNAANRMSESAFLKASHNRIIKAKQRFALQSFISKPMSWWLNEAKENASMNNPNSLKNRGIQIEKALSKSSVSVLFGKDELPITSNRWLALMPDAARCLAFEAALTRARSNFNNKTLEFACLPLTALPKTQLAMNLLKQADVLVVGNISPLHANYELGGVDLPVHVKRRASETEVMAFSKKIMVAAKAQNKTVVFAPLRMPYKAHDVKELADVAIATFSYAVNITQQSDKENQHVTSYSLNALVDVLLGSALAEGRSPVSLK

SEQ ID NO: 139417 - protein, 336 aa, Unknown
  Bacterial polypetide isolated from the Sargasso Sea
MNIPDGVILSISSYDIKNDEVEFLGQTNPLGFVLFKRNFSTKKQLLNLIKKLKTLTMNKSALIFIDQEGGRVQRLNNHEFIKFPPQKIFGELFLKDKILSLDLAYKTSFLLGYELKQVGIDVNFSPVCDIYYDYGHSVIGDRSFGNNPNAVKILSKQYCKGLRESGIIPVLKHFPGHGRSYTDTHNDKSIVSTDHSELKKTDLVPFSFLKEESLVMLSHIIYSDIDNEVSTYSKKINKILRLKNKFNGLILTDDISMKALKDKLENIVEKSYDAGCDVVLYCKGNLREMKAFYPFTKKLKKEYYTFFLNDMLKMKTVKHKIDDLKEELMRKELIKI

SEQ ID NO: 139418 - protein, 155 aa, Unknown
  Bacterial polypetide isolated from the Sargasso Sea
MTNLFGRLMIDIDGYSLSNEDKTILSSKHVGGLILFSRNFDSYNQLYNLIEEVHLIKENIIIAVDQEGGRVQRFQKEFTNIPSMQEASLFAKKNEDHGFIKDLAWLISSELIAVGIDINFAPVLDINRNLSTIIGNRSFSDDILEVINNASNYID

SEQ ID NO: 139419 - protein, 299 aa, Unknown
  Bacterial polypetide isolated from the Sargasso Sea
MKDLYGRLMIDINGKNLSEEDKFIISNKHVGGLILFSRNFESFEQLQNLISEINSIKENIVIAVDQEGGRVQRFKNEFLLIPSMQEISLYAKENDDMEIFSDLAWLVSSELMAVGIDINFAPVLDVDEKTSSIIGDRAFSNSVSEVITYASKYIDGMHDAGMKSTGKHFPGHGGVYEDSHLHLPIDNRSKEDLMISDIKPYIELKDKLDIVMCGHILFPEIDPNIPSFSSAWIKDILKKELNYQGLIISDDLSMEGAKGENCSIKTRDSFQAGCDMAIICKYRDEVKKVLSFLDDIKIE

SEQ ID NO: 139420 - protein, 100 aa, Unknown
  Bacterial polypetide isolated from the Sargasso Sea
MKNLFGKVMLDISGKKLSVDDKQIISNKHVGGLILFSRNFDSFTQLKNLTDEVFHIKENIIIAVDQEGGRVQRFKNEFTEIPSMQQLANFARDEEDINIF

SEQ ID NO: 139421 - protein, 226 aa, Unknown
  Bacterial polypetide isolated from the Sargasso Sea
MYGRIMIDVEGISLSKQDRELISNVNVGGIILFSKNFNSFEQISDLVNEIHATKENILLAVDQEGGRVQRFSKDFTQLPSLQDLAKYSEINNDPDICKEVAWLTSSELIAAGIDLNFAPVLDIDESNSAIIGDRSFSSKTDEVIKHAEKYIEGMHEAGMQATAKHFPGHGGVSEDSHVILPEDKRSLELLMRSDIQPYIKLNKKIDAIMCAHILYSLIDDKIPSYS

SEQ ID NO: 139422 - protein, 289 aa, Unknown
  Bacterial polypetide isolated from the Sargasso Sea
NIIFAVDHEGGRVQRFKNEFTKIPSMQEISLYAKKNSNSKIFKEVAWLSSSELISAGIDINFAPVLDLDKNSSSIIGDRAFSNEAQEVIKNASFFIDGMNEAGMSSTGKHFPGHGGVVEDSHKEMPTDNRSFDELDSENNDLEPFRRLSKKLDAVMCAHILFPKIDEYIPSFSNYWLKDFLRNELNYRGLVLSDDLTMLGAGNDSCHEKVEKSLNAGCDMVLICNDRNGAKQAIDFMVKKDIDKSVEIAKLKSSSKCEWSDLDSSLRAKEIKSIIKEIGDKHEKNSNGS

SEQ ID NO: 139423 - protein, 138 aa, Unknown
  Bacterial polypetide isolated from the Sargasso Sea
MSNSLLGRLMLDLDGTSLTQEENKLLHNPHVGGVILFERNISSRDQVQELCGIIRKINPKLLIAVDQEGGRVQRLKEGYTILPTMQKLAAFLNSDSDKNFLFATDLGWLMASEVIASGLDISFAPVLDLDDSRSSVIG

SEQ ID NO: 139424 - protein, 193 aa, Unknown
  Bacterial polypetide isolated from the Sargasso Sea
MNPIKPSVGVLMLDIEGKSLTKLEEDLIERDSVGGVILFTRNYESPAQLRELVASIRAINCDILIAVDQEGGRVQRFDKDFVSLPSLGDIGKIYKKEPELGESLAKTCAWVMATELISYDIDLSFAPVIDLQNTRSEVIGDRSFSSDPDSVIALAKSYISGLSEAGMSACGKHYPGHGTVRADSHIELPVDDR

SEQ ID NO: 139425 - protein, 265 aa, Unknown
  Bacterial polypetide isolated from the Sargasso Sea
MTESSVSSTDSYAVSDALAQAVGVITDIEGTALTDEDRDFLTQPEIAGLIFFARNYESPQQLKALTGELNALRPDLLITVDQEGGRVQRFRSGFTLFEPMMRYEAIFVESPEKALELARLGGQLLASELIAHGVDLTFAPVLDIERDLSRVIGDRAFGHSADTVTALARAWCEGLSSAGMLSVGKHFPGHGAVEADSHLELPVDPRNAEALEAESVPFKTLISEGVIQGIMPAHVVYPAIDANHTAGFSSVWLQDVLRKQLGFSG

SEQ ID NO: 139426 - protein, 212 aa, Unknown
  Bacterial polypetide isolated from the Sargasso Sea
MKLGPIMMDVSGFTLTETEKIQIDKPSIGGVILFTRNYQDIHQIKKLIGEIRMINPDLLIAVDHEGGRVQRFREGFTRLPAMAKLGEVYDQFPEHALEQAFSCGWILAAELLAIDVDFSFTPVLDLDYGNSSAIGDRAFHSNPEVVIELAGALIKGLHEAGMKCVGKHFPGHGHVEIDSHLDLPIDDRTMNEIEYDILCFKGLINPGFRCCY

SEQ ID NO: 139427 - protein, 249 aa, Unknown
  Bacterial polypetide isolated from the Sargasso Sea
MGRGFIMTDIGGRELTSADRQLLLEENVGGVILFSRNYESPQQIIELVQEIRNLKSPPLLVAVDQEGGRVQRLRDGFTLIPAMRKIGRLYEMNAKTALKVSETAGWIIGAELRSVGIDLSFAPCVDLDWGVSSVIGDRSFHKNKFAVENLAYHFSKGMRESGMSPVAKHFPGHGAVATDSHEDLPVDRREFSELLDDIYPYESLIRKNTVPAVMMAHIIYKEADNLPASISEYWMKNHLRHQLNFNGVI

SEQ ID NO: 139428 - protein, 289 aa, Unknown
  Bacterial polypetide isolated from the Sargasso Sea
MIDIDGFNLSDEDKSLLSSKHIGGLILFSKNFNSYDQLYNLIKEVRSIKDNIIIAVDQEGGRVQRFQKEFTNIPSMQEVSLFAKKNEDHDFIKDLAWLISSELIAVGIDMNFAPVLDINKNLSTIIGNRSFSDDILEVINNASDYIDGMHEAGMKSLGKHFPGHGNVIEDSHLELPEDERELCELMNEDIKPYIELKDKIDVIMCAHILFPKVDNKIPSFSDTWVNNILRNKLNYKGLIFSDDLSMLGSGNDSLTNKVKMSLDAGCDMLIICNDRSGVKEVIEYLDKTD

SEQ ID NO: 139429 - protein, 285 aa, Unknown
  Bacterial polypetide isolated from the Sargasso Sea
MKLGPIMMDVSGFTLTEAEKTQLVKPSIGGVILFTRNYQNIHQIKTLIGAIHILNPDLLIAVDHEGGRVQRFREGFTRLPAMAKLGKVYDQNPEKALEQSFSCGWILATELLEIDVDFSFTPVLDLDYGHSSAIGDRAFHSNPEVVIKLAGALIEGLHEAGMKCVGKHFPGHGHVAIDSHVDLPIDERPMNEISQDILCFKGLINQGLDAAMPAHVMYPQVDDKPSGFSSKWIKEILQTQLGFGGVVISDDLSMQGAHFIKNIVERVQVSLESGCDMALIAIILS

SEQ ID NO: 139430 - protein, 258 aa, Unknown
  Bacterial polypetide isolated from the Sargasso Sea
MDNQYGRLMLDISGTILSDDDKALIRNEHVGGLIFFSRNFESFYQIKDLVAEIRSIKENIIIAVDQEGGRVQRFNKNFTNIPSMQKVTKFAYLNNDINFLKEIGWLISSELIAADIDINFAPVLDIDESTSSIIGDRAFANNISDVVSAASEFIDGMHEAGMRSTGKHFPGHGGIFEDSHIELAEDKRNLEELLIKDIRPYIELSNKLDAVMCAHVLFSNIDEEIPSYSKYWLRNILKGEIKYDGLIFSDDLSMLGAG

SEQ ID NO: 139431 - protein, 336 aa, Unknown
  Bacterial polypetide isolated from the Sargasso Sea
MKNSYGRLMLDIAGKSLSQEDKTLISNHHVGGLILFSNNFESFKQISELVKEVKAIKDNILIAVDQEGGRVQRFNNEFTKIPSMQEISNFVKKYNDSSLFKEIGWLISSELIAAGIDINFAPVLDIDDSYSTIIGSRAFSNNADEVISMASSYIDGMHEAGMKSTGKHFPGHGSVSADSHKEQPEDLRSLDELIKKDIKPYIELSNKLDAIMCAHILFPNIEKEIPSFSNYWIDEIIKNEINFNGIIFSDDLTMQGAGNDSYPDKAKKSIQSGCDMILVCNNRKEIENIINEFDEIGVKPIKKLSEMKKSMDIDWHELNKSNRKKQIKIKLEAIRS

SEQ ID NO: 139432 - protein, 274 aa, Unknown
  Bacterial polypetide isolated from the Sargasso Sea
MYGRIMIDVEGTSLSQQDRELISNGNVGGIILFSKNFNSFEQISDLVNEIHAIKENILLAVDQEGGRVQRFSKDFTQLPSLQDLAKYSEINNDPDICKEVAWLTSSELIAAGIDLNFAPVLDIDESDSAIIGDRSFSSKTDEVIKHAEKYIEGMHEAGMQATAKHFPGHGGVSEDSHVILPEDQRSLELLMRSDIQPYIKLNKKIDAIMCAHILYSLIDDKIPSYSKFWIRDIIRKELNFEGVIFSDDLSMAGAGEESCRVKAAKSIEAGCDMV

SEQ ID NO: 139433 - protein, 336 aa, Unknown
  Bacterial polypetide isolated from the Sargasso Sea
MTDLFGRLIIDIDGKNLSNDDKTILSSKHIGGLILFSRNFDSYDQLDNLIKEVHLIKENIIIAVDQEGGRVQRFEKEYTKIPSMQDASLFAKENDDKEFIKDLAWLISSELIAVGIDINFAPVLDINRNISSIIGNRSFSNDILEVIDNASDYIDGMHEAGMKSTGKHFPGHGNVVEDSHIELPVDERELHELLNEDLKPYIKLSDKLDVIMCAHILFSKVDSKIPSFSDTWINNVLRNKLNYKGLILSDDLSMLGSGNDSLINKVKMSLNAGCDMVIICNDRSGVKEVIEYLDKTDVEQTSGISEIKSSKKINWNDLLNNNRALAIKEKLKNMRN

SEQ ID NO: 139434 - protein, 332 aa, Unknown
  Bacterial polypetide isolated from the Sargasso Sea
MINEFGRIMLDIESTSLTDEDKFVITNKHVGGIIFFSRNFESYEQIKNLVIEIKNIKENIIFAVDHEGGRVQRFKNEFTKIPSMQEISLYAKKNSNSKIFKEIAWLSSSELISAGIDINFAPVLDLDKNYSSIIGDRAFSNEAQEVIKNASFFIDGMNEAGMSSTGKHFPGHGGVVEDSHKEMPTDNRSFDELDSENNDLEPYRKLSKKLDAVMCAHILFPKIDEYIPSFSNYWLKDFLRNELNYRGLVLSDDLTMLGAGNDLCHEKVEKSLKAGCDMVLICNDRNGAKQAIDFMENKDIDRSIEIAKLKSSSKCEWSDIDSSLRAKEIKDI

SEQ ID NO: 139435 - protein, 297 aa, Unknown
  Bacterial polypetide isolated from the Sargasso Sea
TEIKTIKENIIFAVDHEGGRVQRFKNEFTKIPSMQAISLYAKKNDNYEIFKEIAWLASSELVSVGIDINFAPVLDLDIDSSSIIGDRAFSNQAQEVIKNASFFIDGMNEAGMCSTGKHFPGHGGVVEDSHLEMPTDNRSFNELDSGNNDLEPYRRLSKKLDAVMCAHILFPKIDEHIPSFSKYWLKDFLRNELEYKGLILSDDLTMLGAGNDLCHEKVEKSLMAGCDMVLICNDRNGAKQAIDILENKDIDRSIEIANLKSRTKCEWSDLNSSSRAKEIKSTIKEIGDKYEKNSNGA

SEQ ID NO: 139436 - protein, 343 aa, Unknown
  Bacterial polypetide isolated from the Sargasso Sea
MSKSYLGRLMLDLDGTSLTQEENKILLNSHVGGVILFARNISSRDQVQELCGAIRNINPKLLIAVDQEGGRVQRLKEGYTILPTMQKLAAFLKSESDKNFSFATDLGWLMASEVIASGLDISFAPVLDLDDSRSSVIGDRSIGDNPEKVIAIASAFIKGMNQAGMQATGKHFPGHGGIFADSHLTFSQDTRSLLELENHDLRPFDALKLKLGGIMTAHISFSSIDKEIATFSKFWLQDVLRNKIEFTGAIFSDDLSMKGSDYVGGIEAKVSKALESGCNMVLVCNDRPAALKAINFLEKEKISQSEKVTKLKASGSIAWADLENDARRIDIIDKLNTIEKLKL

SEQ ID NO: 139437 - protein, 333 aa, Unknown
  Bacterial polypetide isolated from the Sargasso Sea
MYGRIMIDVEGISLSQQDRELISNGNVGGIILFSKNFNSFEQISDLVNEIHAIKENILLAVDQEGGRVQRFSKDFTQLPSLQDLAKYSEINNDPDICKEVAWLTSSELIAAGIDLNFAPVLDIDESNSAIIGDRSFSSKIDEVIKHAEKYIDGMHEAGMQATAKHFPGHGGVSEDSHVIMPEDKRSLELLMRSDIQPYIKLNKKIDAIMCAHILYSLIDDKIPSYSKFWIRDIIRKELNFEGVIFSDDLSMAGAGEESCKVKAAKSIEAGCDMVLICNNRKDAISTINYFDKLGIKPSKKISNLKKTTNVDWDELVNFERTVNIKHTLKNMRS

SEQ ID NO: 139438 - protein, 101 aa, Unknown
  Bacterial polypetide isolated from the Sargasso Sea
MNPLKPSYGVLMLDIEGKSLTKLEEDLIERDSVGGLILFTRNYESPTQLTELVSSIRAINRDILIAVDQEGGRVQRFDKDFVSLPSLGDIGKIYKKEPVLG

SEQ ID NO: 139439 - protein, 336 aa, Unknown
  Bacterial polypetide isolated from the Sargasso Sea
MTDLFGRLMIDIDGFNLTNEDKSILASKHIGGLILFSRNFDSYNQLCNLIKEVRSIKENIIIAVDQEGGRVQRFEKEFTKIPSMQEASLFAKKNKDKGFIKDLAWLISSELIAAGIDINFAPVLDINRNISTIIGDRSFSDDIFEVISNASDYIDGMNEAGMKSSGKHFPGHGNVIEDSHIELPEDARALRELMDEDIKPYIELRDKIDVIMCAHILFSKVDNKIPSFSDTWINNILRNKLNYKGLIFSDDLSMLGSGNENLTNKVKMSLDAGCDMLIICNYRSGVKEVIEYLDKNGYEQTSRIFKIKGFKKINWNDLLNNNRALATKEKLKSMRN

SEQ ID NO: 139440 - protein, 278 aa, Unknown
  Bacterial polypetide isolated from the Sargasso Sea
MTDSYGRLMIDLEGITLSDDDIALISNKHIGGIILFSRNFETLEQLKSLIIKIFAIKKNVIIAVDQEGGRVQRFYKDFTVIPSMQSLAVYAKEENDMEIFAETAWLISSELVAIGIDLNFAPVLDVDEETSSVIGDRAFSNKVDEVIEFSSNFIDGMHEAGMSATGKHFPGHGGIFEDSHLSHVEDKRTFSDLLNLDIKPYIKLKNKLDAIMCAHVFFPNVDEKLPSFSKTWLQDILKNKLEFTGLIFSDDLSMKGSGDENCYIKTMQSFNAGCDMAI

SEQ ID NO: 139441 - protein, 220 aa, Unknown
  Bacterial polypetide isolated from the Sargasso Sea
MKNLKVQPLGPIMCDLNSTELGFDEIELLQHPLIGGVILFSRNYESQEQLSELTLKIHQLRRPSLLIAVDHEGGRVQRFKNGFSQLPACGLIGKCEPLAKAKQLAENTGWLMAIELLSVGVDFSFAPVLDIGGEISEVIGDRAFHIEPDKISKLANSYMLGMRKAGMSAVGKHFPGHGSVIEDSHISIPLDNRQFDDILLQDIIPFKALIEAGIPGLMPA

SEQ ID NO: 139442 - protein, 336 aa, Unknown
  Bacterial polypetide isolated from the Sargasso Sea
MKSTYGRLMLDIDGKSLSIEDKTLISNKHVGGLIFFSKNFESFQQISNLVKEVREIKENILIAVDQEGGRVQRFNNEFTNIPSMQEIGRFAKEHNDSSMCKDIGWLTSSELIATGIDINFAPVLDVDESTSSIIGNRAFSNNPDEVISMASDYIDGMHQAGMSSTGKHFPGHGGVVEDSHKELPEDIRQLDDLMSFDMTPYIKLANKLDAIMCAHILFPNVDKDIPSFSKRWVKEILRNKINYDGLIFSDDLTMLGAGVEPCSEKARKSIQAGCDMVLVCNNRKEIDGVINLFDELGIEPSERLSKMKKSTNIDWNELNNSNRKNNINIKLEKIRS

SEQ ID NO: 139443 - protein, 142 aa, Unknown
  Bacterial polypetide isolated from the Sargasso Sea
MHGSLMLDIAGTWLTAEDRQLLRQPEVGGLILFARNIEHSRQVDELCRSIRAVRPDLLLAVDQEGGRVQRLRQGFVRLPPMRELASCADAPRLAEACGWVMATEVLAAGLDFSFAPVLDLDHQRSAVVGTRAFEGDPQAAVC

SEQ ID NO: 139444 - protein, 342 aa, Unknown
  Bacterial polypetide isolated from the Sargasso Sea
MKTTPGPVMLDVVGTTLSRDDARRLAHPNTGGVILFARHFQNRAQLTALTDAIRAVREDILIAVDHEGGRVQRFRTDGFTVLPAMRRLGELWDRDVLLATKVATAVGYILAAELRACGIDMSFTPVLDLDYGHSKVIGDRAFHRDPRVVTLLAKSLNQGLSLAGMANCGKHFPGHGFAEADSHVALPTDDRPLDAILKQDVAPYDWLGLSLSAVIPAHVIYTQVDKRPAGFSRVWLQDILRGRLGFTGAIFSDDLSMEAAREGGTLTQAADAALAAGCDMVLVCNQPDAAEVVLNGLKARATDESVRRFKRMRARGKAFKWDKLIVQPEYLQAQALLSSALA

SEQ ID NO: 139445 - protein, 95 aa, Unknown
  Bacterial polypetide isolated from the Sargasso Sea
MKKAKIYKPTKTAMQSGKRNTKKWLLEFDTLNTGISHLMGWETSKDTMSEVKLEFSNKDEAINYAKKNNIEYYIVEPQKQKLIKKSYADNFLKDK

SEQ ID NO: 139446 - protein, 275 aa, Unknown
  Bacterial polypetide isolated from the Sargasso Sea
MNKKFLVFLTFLISLNFYSNVNAKLYRSGTIFENQIKFSKKFTLPLTEGKWEVINQYEFNYFFQFKGNSIVRLKNNEVMEFIWIERANLSSYQNAYIDNAMNEIVFKDQYDGCYKRPEYYIVEVYSKGSTHNCLVIRHIDSNKELFSPDDPGAVNAKLKKSLRDRSIIIPPIMFDSYHSYFSRLIRGEWYVIQYMANPKLFNSPKINYLTEESSEFHKANISRYPEHKLTMDKWISVSAKRHREIEKLLKAKEHHLLNLDKYILKNDNDYLNSEG

SEQ ID NO: 139447 - protein, 126 aa, Unknown
  Bacterial polypetide isolated from the Sargasso Sea
MKVGIIGAMEQEVALLRSQMSNPTTLQLGGCEFYQGTLAGKEVILTRSGIGKVAASVATSLLLEKFAPDYVINTGSAGGFAQDLHIGDVVIASEMRFHDVDVTAFGYEMGQMAQQPAAFPCDETLI

SEQ ID NO: 139448 - protein, 178 aa, Unknown
  Bacterial polypetide isolated from the Sargasso Sea
TVGATQLMTHYQPDAVINTGSAGGFGAAMEVGDVVISSEVRHHDVDVTAFGYEMGQVPGMPAGFAPDPGLIETARACIESLGDLRVHEGLICTGDSFMADPTRVDTVRGHFPQMLAVEMEAAAIAQTCHLFACPFVVIRALSDIAGKQSELSFDAFLERAATHSAKMVDAILARLAGQ

SEQ ID NO: 139449 - protein, 221 aa, Unknown
  Bacterial polypetide isolated from the Sargasso Sea
LKAQLSDMTTVKLADYEFYQGRLADTDVVLVQSGIGKVASAVATTLLISQFKPDCVINTGSAGGFDPELNVGDVVISSEVRHHDVDVTAFGYEIGQVPRMPAGFTAHPALISAAEQSINTLGFCKTKKGLITTGDVFMCQPERIAQTRAQFPTMLAVEMEGAAIAQACYQLNTPFVVIRSLSDIAGKESPSSFEAYLEIASKNSSAMVLELLKNLKTVQLS

SEQ ID NO: 139450 - protein, 236 aa, Unknown
  Bacterial polypetide isolated from the Sargasso Sea
MKIGIIGAMEPEVAHLIAAMTNASSQTIAGIEFIAGTLAGKDVVVTRSGIGKVAASIATTLLIEKYAPDAVINTGSAGGFVDSLSIGDIVISSEVRHHDVDVTAFGYEIGQMAQQPAAFIPAPYLVEAANKAIAQLGEVKAIEGLICTGDSFICDPVRTKTMLEHFPTMAACEMEGAAIAQVCHQFGVPFVVIRSLSDNANNDSPVDFDSYIVKAGYHSALMVMLLLEQLDPNSVK

SEQ ID NO: 139451 - protein, 236 aa, Unknown
  Bacterial polypetide isolated from the Sargasso Sea
MKIGIIGAMEPEVAHLIAAMTNATSQTIAGIEFIAGTLAGKDVVVTRSGIGKVAASIATTLLIEKYAPDAVINTGSAGGFADSLSIGDIVISSEVRHHDVDVTAFGYEIGQMAQQPAAFIPAPYLVEAANKAIAQLGEVKAIEGLICTGDSFICDPVRTKTMLEHFPTMAACEMEGAAIAQVCHQFGVPFVVIRSLSDNANNDSPVDFDSYIVKAGYHSALMVMLLLEQLDPNSVK

SEQ ID NO: 139452 - protein, 80 aa, Unknown
  Bacterial polypetide isolated from the Sargasso Sea
MKIGIIGAMEEEVTLLRDKIENRQTITIGGSEIYTGQLNGVDVALLKSGIGKVAAAMGAALLLERCQPDVIINTGSAGGL

SEQ ID NO: 139453 - protein, 60 aa, Unknown
  Bacterial polypetide isolated from the Sargasso Sea
MVTKNEKISKIGTDYKVADISLAEFGKKEIKIAETEMPGLMAIREEYKNQKPLKGANILG

SEQ ID NO: 139454 - protein, 41 aa, Unknown
  Bacterial polypetide isolated from the Sargasso Sea
MKSKVKTTPKPKFKVKDISLANWGRKEILLAESEMPGLMSL

SEQ ID NO: 139455 - protein, 52 aa, Unknown
  Bacterial polypetide isolated from the Sargasso Sea
IASMGIPVYAWQGMNEEEFNWCIEQTLFFGEKREPLNMILDDGGDLTNMVLD

SEQ ID NO: 139456 - protein, 263 aa, Unknown
  Bacterial polypetide isolated from the Sargasso Sea
LLEKGANTEATDNHGRTALHEAVSYNRDTVVRMLLGKGANIEATDKDGRTALHLAAKYGCDAVVRTLLEQGAKIEATYKDGRTALHLAAKYGCDAVVRTLLEKGANTEATDNHGRTALHEAVSYNRDTVVRMLLGKGANIEATDKDGRTALHLAAKYGCDEVVRTLLEQGAKIEATDKDGRTALHLAAGNGENAAVCMLLEKGTNIEASDKDGHTALHLAAMFREDTFNKYWWCTVVRTLLEQGANIEATDKDGHTALHHARD

SEQ ID NO: 139457 - protein, 321 aa, Unknown
  Bacterial polypetide isolated from the Sargasso Sea
KDSKLAKIGHEEVSWASRQMQVLEEIKNEFSSTKPLNGLSIGACMHVTKETANLMLTLKEAGANVALCASNPLSTKDSVAAYLVENDVEVHAVHGVSNEEFFKHLNSVLDTKPDITMDDGADLVTLLLTDRSDIPIMGSMEETTTGVIRLKSMEKNNKLRFPVVAVNDSDTKHLFDNRFGTGQSAMDGVVRATDLLIAGLNVVVVGFGDCGKGVAERAYGMGAKVTVVEPNSVRALEALMHGYEVKNSINAAKIADVVVSVTGNMHALDKQHFDVMKDGVVLANAGHFDVEINLERLKEDSSEVDRVREHVESYKYDEKKY

SEQ ID NO: 139458 - protein, 46 aa, Unknown
  Bacterial polypetide isolated from the Sargasso Sea
MSSVEDYVVTDISLADWGRKELDIAETKMPGLMSLREEYSKSQDLK

SEQ ID NO: 139459 - protein, 28 aa, Unknown
  Bacterial polypetide isolated from the Sargasso Sea
EITLPSNKRIILLAEGRLVNLVLCNRTP

SEQ ID NO: 139460 - protein, 65 aa, Unknown
  Bacterial polypetide isolated from the Sargasso Sea
MKEDYKVADITLAEFGRREVSLAENEMPALMALREKYKEEQPLSGAKIMGCIHMTIQTAVLMETL

SEQ ID NO: 139461 - protein, 252 aa, Unknown
  Bacterial polypetide isolated from the Sargasso Sea
MEAYYWWCTGLMIIIHVGFLMYEVGATRMQNAVSSGVKNLLAFAFMIPTFWLFGWWIYLAFPGGFVPIDLEGYGAPWNVSMGPMLSDQATGVFWAAFTLFACTTASIFSGAVIERIRISAFVFLAVVLGSVVWILAASWGWHPDGWLVTGFGFHDVAAAGCVHTVAGLFAFGVLLNLGPRVGKYNDDGSRNELEGHSLVLSFVGLLTLIVGFFGFLGACLIWAGSDFGGWVNIYGAPATLSSFAYNTLMGLA

SEQ ID NO: 139462 - protein, 236 aa, Unknown
  Bacterial polypetide isolated from the Sargasso Sea
MEAYYWWCTGLMIIIHVGFLMYEVGATRMKNAVSSGVKNLLAFAFMIPTFWLFGWWIYLAFPGGFVPIDLEGYGVPWNVSMGPMLSDQATGVFWAAFTLFACTTASIFSGAVIERIRISAFVFLAVILGSVVWILAASWGWHPDGWLVTGFGFHDVAAAGCVHTVAGLFAFGVLLNLGPRVGKYNDDGSANELEGHSLVLSFVGLLTLIVGFFGFLGACFIWAGSDLGGWVNIYGA

SEQ ID NO: 139463 - protein, 251 aa, Unknown
  Bacterial polypetide isolated from the Sargasso Sea
GKSIKKFKKNKLITIVGKTSEETYKLNKFFFKSLKSRRPFTKVKMATTLDEKVARKDYSSKWISNKASRNYGHKLRFESQAILTTSKTVIKDDPHFTIRKKNKIIRYMPVIIIDRFLNTPIDSKIIKNISKRRVIIFTHVRNQKTIKFKKIGCEVFFIKLNSKKLFNLKEILKKVFKLNINNILVEAGGILFTNLLNSNLVDEIHLFRSNKKFGLEGKPLLHKKSFKNLKLKLTFERNFGKDIYRYYSLGK

SEQ ID NO: 139464 - protein, 46 aa, Unknown
  Bacterial polypetide isolated from the Sargasso Sea
MAQDFKVKDINLADFGRKEISIAESEMPGLMALRKEYKGKKPLNGA

SEQ ID NO: 139465 - protein, 40 aa, Unknown
  Bacterial polypetide isolated from the Sargasso Sea
AAAAIAKAGIQYLQWKGETEEEYWWCVKQTIEGKKDWIQI

SEQ ID NO: 139466 - protein, 265 aa, Unknown
  Bacterial polypetide isolated from the Sargasso Sea
MADEFKVKKGPIRAIKLIPIEGIPLIKPGDDLPAIIIKSANSYKINWFEGDILVIAQKIVSKAEGRLVNLKQIKPSKRAFELGLVTQKDPRLVELILQESTKVIRYRKGVLVVQNDHGVILANAGIDRSNLEQDQEQDWVLLLPKDPDLSAKIIHQELLAKTGLHLGVIINDSIGRAWRNGTLGTAIGVAGLPAIVDLRGRKDLFGNLLRVSEEAVADELASAASLLQGQADEALPVVLIQGFQSQTSNIPASGLIRPPETDLFQ

SEQ ID NO: 139467 - protein, 278 aa, Unknown
  Bacterial polypetide isolated from the Sargasso Sea
GKIAYEWARTHMDILDNTLNRLKKSKPLKGVTVAFCLHITKETSVLVMGAKELGANVAVCGGNPLTTQDHIAAFLATQGIHIYAWNGQTNKEYDWCLDQVLSHKPSLICDDGADMNVKVHFDKKFKSLQVLGSTEETTAGVTRVEAIEKQGKLKYPVIIVNDADTKHMFDNRYGTGQSTIDGYLRAMGLLFTSKKIVVVGYGWVGRGVAERSRGMGGKVIVTEVDPVKALEAHMDGYDVMPMSQAAKIGQIFITTTGMTSVIRKEHLLAMKDGAVVET

SEQ ID NO: 139468 - protein, 36 aa, Unknown
  Bacterial polypetide isolated from the Sargasso Sea
MVEREISLAETEMPGLMALRKEYKRKHPLKGARILG

SEQ ID NO: 139469 - protein, 87 aa, Unknown
  Bacterial polypetide isolated from the Sargasso Sea
SRIMDGSFANQVLAQIHLYKQGFANINDEDKKAEMITVEVLPKKLDEEVASLMVEGFGGMVTKLTQDQADYINVPKDGPFKEETYKY

SEQ ID NO: 139470 - protein, 74 aa, Unknown
  Bacterial polypetide isolated from the Sargasso Sea
MKKHNKNVVEILPYLVKDIKLAKLGRDKIDISEKEMPGLMSLRKKYSKNKPLKGFKLTGSLHMTIETAILIETL

SEQ ID NO: 139471 - protein, 52 aa, Unknown
  Bacterial polypetide isolated from the Sargasso Sea
QTAVLIETLTKLGAEVSLVLVQYFFNSRSCRCSYCRYRNTSICVERYERRRI

SEQ ID NO: 139472 - protein, 94 aa, Unknown
  Bacterial polypetide isolated from the Sargasso Sea
VNLALATGHPSRVMDGSFFNQVLAQIALFEDGFADQSDDQKELYVKVLPKKLDEEVASLMVKGFGGTLTKLTKEQEEYISVSKEGPFKDDSYTY

SEQ ID NO: 139473 - protein, 286 aa, Unknown
  Bacterial polypetide isolated from the Sargasso Sea
MSKVKNPKLAKQGKIAYEWARTHMDILDNTLNRLKKSKPLKGVTVAFCLHITKETSVLVMGAKELGANVAVCGGNPLTTQDHIAAFLATQGINIYAWNGQTNKEYDWCIDQVLSHKPSLICDDGADMNVKVHFDKKFKSLQVLGSTEETTAGVTRVKAMEKQGKLKYPVIIVNDADTKHMFDNRYGTGQSTIDGYLRAMGLLFTSKKIVVVGYGWVGRGVAERSRGMGGKVIVTEVDPVKALEAHMDGFDVMPMSQAAKIGQIFITTTGMTSVIRKEHLLAMKDGA

SEQ ID NO: 139474 - protein, 157 aa, Unknown
  Bacterial polypetide isolated from the Sargasso Sea
MTLEELNTFVTTQANVGMEAYYWWCTGFMIIIHVGFLMYEVGATRMKNAVSSGVKNLLAFAFMIPTFWLFGWYIYLAFPGGFVPIDLEGYGTPWNVSMGPMLSDQATGVFWAAFTLFACTTASIFSGAVIERIRISAFTFLAVILGSVVWIIGAAWG

SEQ ID NO: 139475 - protein, 48 aa, Unknown
  Bacterial polypetide isolated from the Sargasso Sea
MTDYKVKDINEAEFGRKEISLAETEMPGLMALRKEYKGKNPLKGARIL

SEQ ID NO: 139476 - protein, 168 aa, Unknown
  Bacterial polypetide isolated from the Sargasso Sea
GFQVMTGTEAFRKADFICSVTGNINVIDKHHFKIMKDGVIISNAGHFNVEINIEALRKMASKNKKIRSDIEEFTVGKKKICLLSDGRLVNLSAAEGHPSSVMDMSFANQALCTEYMVKNHKKLSNKVYDVPSDIDNKVAEIKLKSMDVKIDKLTKIQDDYLNSWESGT

SEQ ID NO: 139477 - protein, 38 aa, Unknown
  Bacterial polypetide isolated from the Sargasso Sea
MSEDFKVKDINLADFGRKEISIAESEMPGLMALRKEYG

SEQ ID NO: 139478 - protein, 136 aa, Unknown
  Bacterial polypetide isolated from the Sargasso Sea
MTLEELNVFVTTQANVGMEAYYWWCTGLMIIIHVGFLMYEVGATRMKNAVSSGVKNLLAFAFMIPTFWLFGWWIYLAFPGGFVPIDLEGYGVPWNVSMGPMLSDQATGVFWAAFTLFACTTASIFSGAVMKELELV

SEQ ID NO: 139479 - protein, 136 aa, Unknown
  Bacterial polypetide isolated from the Sargasso Sea
MEAYYWWCTGLMIIIHVGFLMYEVGATRMKNAVSSGVKNLLAFAFMIPTFWLFGWWLYLVMYNGFIPADSGYGPTYGLPWDVSMGPMLSDQATGVFWAAFTLFACTTASIFSGAVIERIRISAFVFLAVILGSVVW

SEQ ID NO: 139480 - protein, 242 aa, Unknown
  Bacterial polypetide isolated from the Sargasso Sea
MISSVAWLTKHTLKDGKYSDSIPAKTLLFLAKVPSTSKQVFGCHILDHQNDCKGLGGKEFLLNEDSDLGFTYFNNNEFLSGYLLISRYFVDEKQSKVQLIRIKSGEVIHEWSPDIESIHAISKIDRKLAPLEKDKGKERYLYFHPFVTTTGNLIFKTYSPLVKINSCSELVWQIDELFHHSTEADQENNIWVPTLKKPGRYINIDNNYHDDEITKVSIKDGKIIYQKSVTEILEENDLLHLV

SEQ ID NO: 139481 - protein, 300 aa, Unknown
  Bacterial polypetide isolated from the Sargasso Sea
MVSACGGSGGSEPAVTPPTSGNPPPVVIPPPVTNAPTFTNVAVHDPSVIKVGSDFYIFGSHLAAAKSTDLQNWTLVADGVNANNKLMPNAATEIKETFDWAQTSTLWAADVIEIGGKFYMYYNACKGDSPRSALGIAVADSVEGPYKNQQLLLKSGMWGEPSEDGSIYDATIHPNVVDPDVFFDKTGRLWMLYGSYSGGLFILELDKATGIPLPDQGYGKHLVGGNHSRIEGGYVLYSPDSDYYYLFVSFGGLDANGGYNIRVARSSNPEGPYFDALGNSMADVKSNPALPLFDDASIAP

SEQ ID NO: 139482 - protein, 66 aa, Unknown
  Bacterial polypetide isolated from the Sargasso Sea
MVLFANQVLAQIHLYKQGFANINDEDTRAEMITVEVLPKKLDEEVASLMVEGFGGTVYKLTKDQAD

SEQ ID NO: 139483 - protein, 168 aa, Unknown
  Bacterial polypetide isolated from the Sargasso Sea
MHENIVAAPELAGKGLQKIEWVRRNMPILRKIQSEFEKEQPFAGKRITVCIHLEAKTAFLALVLRSGGAKVSVTGSNPESTKDDVVAAIAEEGLRVYARHGAEPSEMRKYMEMALDLKPHLVIDDGGDLVEILHETRTDLLKGMLGACEETTTGVIRAQARAKAAQLQ

SEQ ID NO: 139484 - protein, 179 aa, Unknown
  Bacterial polypetide isolated from the Sargasso Sea
MTLEELNTFVTTQANVGMEAYYWWCTGFMIIIHVGFLMYEVGATRMKNAVSSGVKNLLAFAFMIPTFWLFGWYIYLAFPGGFVPIDLEGYGAPWDVSMGPMLSDQATGIFWAAFTLFACTTASIFSGAVIERIRISAFVFLAIILGSVVWILGASWGWHPDGWLVTGWGYHDVAAAGVS

SEQ ID NO: 139485 - protein, 193 aa, Unknown
  Bacterial polypetide isolated from the Sargasso Sea
MADGFCVKKATFKEIKLIPIDGIPLVKPGDDLPGIIIRTANASKIEWIEGDILVIAQKIISKAEGRLVNLKEINPSKRALELGYLTQKDPRLVELILQESTKVIRHRKGVLVVQNHHGVILANAGIDRSNLEQDKEQDWVLLLPKDSDHSAKKIHQELLSKTGVHLGVIINDSIGRAWRNGTLGTAIGVAGIP

SEQ ID NO: 139486 - protein, 170 aa, Unknown
  Bacterial polypetide isolated from the Sargasso Sea
MAEGFCVKKATFKEIKLIPIDGIPLVKPGDDLPGIIIQTANASKIEWIEGDILVIAQKIISKAEGRLVNLKEINPSKRALELGSLTQKDPRLVELILQESTKMIRYRKGVLVVQNHHGVILANAGIDRSNLEQDKEQDWVLLLPKDSDLSAKKIHQELFSKTGVHLGVII

SEQ ID NO: 139487 - protein, 427 aa, Unknown
  Bacterial polypetide isolated from the Sargasso Sea
MTLEELNTLVTTQANVGMEAYYWWCTGFMIIIHVGFLMYEVGATRMKNAVSSGVKNLLAFAFMIPTFWLFGWYIYLAFPGGFVPIDLEGYGTPWNVSMGPMLSDQATGVFWAAFTLFACTTASIFSGAVIERIRISAFTFLAVILGSVVWILGAAWGWHPDGWLVTGWGYHDVAAAGVVHTIAGWFAFGVLLNLGPRIGKYNEDGSANEIEGHSLVSSFIGLLMLIVGFFGFLGACLIWAGADFGGWVNIYGAPATLSSFAFNTLMGLAGGMIGAFWWSKGNPFWMMSGGLAGIFICAGGLDIWYPGFAFVLGIIAGCVIIPANNWLHNTFKIDDCVGAVSIHGVAGVLGVLAVGIFAAGYPSAGDIPPTSFVGQLVGCIVMVLTGLIPGYVISFIMKSMGWLRVPDEVQAAGIDSAELNLRAYADK

SEQ ID NO: 139488 - protein, 46 aa, Unknown
  Bacterial polypetide isolated from the Sargasso Sea
MANEDYKVADINLADFGRKEISLAETEMPGLMALRSEYKGKKPLQG

SEQ ID NO: 139489 - protein, 39 aa, Unknown
  Bacterial polypetide isolated from the Sargasso Sea
MEDYKVKDISLADFGRKEISIAESEMPGLIALREEYQKR

SEQ ID NO: 139490 - protein, 291 aa, Unknown
  Bacterial polypetide isolated from the Sargasso Sea
MTLEELNVFVTTQANVGMEAYYWWCTGLMIIIHVGFLMYEVGATRMKNAVSSGVKNLLAFAFMIPTFWLFGWWIYLAFPGGFVPIDLEGYGAPWNVSMGPMLSDQATGVFWAAFTLFACTTASIFSGAVIERIRISAFVFLAVVLGSVVWILAASWGWHPDGWLVTGWGFHDVAAAGCVHTVAGLFAFGVLLNLGPRVGKYNDDGSMNDLEGHSLVLSFVGLLTLIVGFFGFLGACLIWAGSDFGGWINIYGAPATLSSFAFNTLMGLAGGMIGAFWWSKGNPFWMMSGGL

SEQ ID NO: 139491 - protein, 102 aa, Unknown
  Bacterial polypetide isolated from the Sargasso Sea
MTLEELESYVMMQANVSMEAYYWWCTALMIAIHVGFLMYEVGSSRFKNAVSSATKNLLAFAFMIPTFWLFGWYIYLAFPEGFTPIALDGYGTPWNVSMGPML

SEQ ID NO: 139492 - protein, 144 aa, Unknown
  Bacterial polypetide isolated from the Sargasso Sea
MTLEELESYVMMQANVSMEAYYWWCTALMIAIHVGFLMYEVGSSRFKNAVSSATKNLLAFAFMIPTFWLFGWYIYLAFPMGFTPIELEGYGTPWNVSMGPMLSDQATGVFWAAFTLFACTTASIFSGSVLERIRISSFTFLAVF

SEQ ID NO: 139493 - protein, 426 aa, Unknown
  Bacterial polypetide isolated from the Sargasso Sea
MTLEELNVFVTTQANVGMEAYYWWCTGLMIIIHVGFLMYEVGATRMQNAVSSGVKNLLAFAFMIPTFWLFGWWIYLAFPGGFVPIDLEGYGVPWNVSMGPMLSDQATGVFWAAFTLFACTTASIFSGAVIERIRISAFVFLAVVLGSVVWILAASWGWHPDGWLVTQWGFHDVAAAGCVHTVAGLFAFGVLLNLGPRVGKYNDDGSMNDLEGHSLVLSFVGLLTLIVGFFGFLGACLIWAGSDFGGWVNIYGAPATLSSFAFNTLMGLAGGMIGAFWWSKGNPFWMMSGGLAGIFICAGGLDIWYPGFAFILGTIAGCVIIPANNWLHNTFKIDDCVGAVSIHGVCGILGMLCVGLFASGFPAAGDIPASNLTGQIVGAIVMALTGFVPGYVISYIMKMAGWLRVPDHIQKAGIDKAELGLQAYNQ

SEQ ID NO: 139494 - protein, 103 aa, Unknown
  Bacterial polypetide isolated from the Sargasso Sea
LAEGRLVNLGNATGHPSRIMDGSFANQVLAQMHLYSAGFANVNDEDKKKELIQVEVLPKKLDEEVASLMVQGFGGVVTKLTEEQADYINVPQDGPFKEDSYKY

SEQ ID NO: 139495 - protein, 124 aa, Unknown
  Bacterial polypetide isolated from the Sargasso Sea
IKPQVHKIYRDSKDSSNYLILLSEGRLVNLGNATGHPSRIMDGSFANQVLAQKFLYEQAFASINDESVKEDMITVQVLPKELDEEVASYMVEGFGGVMTKLTKDQAEYIKVDEAGPYKPEYYKY

SEQ ID NO: 139496 - protein, 52 aa, Unknown
  Bacterial polypetide isolated from the Sargasso Sea
NQVITMPKSLDEKVARLHLDSLGVRLTELSQEQADYLGVPKEGPFKPEHYRY

SEQ ID NO: 139497 - protein, 175 aa, Unknown
  Bacterial polypetide isolated from the Sargasso Sea
LEAVMDGFTVMPGIEAASVGEVFITVTGGLHTLGKEHFAVMPDGAVLSNSGHFNVEIDIPALEDMAVAKRTVRDFVDEYEMPDGRTLYLLGEGRLINLAAAEGHPSAVMDMSFANQALSLEYLMANANTMENGVYVVPRDIDDEVGRLKLAALGVSIDTLSEEQEKYINSWEEGT

SEQ ID NO: 139498 - protein, 103 aa, Unknown
  Bacterial polypetide isolated from the Sargasso Sea
REHVESYKYDGKEILVLAEGRLVNLAAATGHPASVMDMSFANQALAAEWIKENHKTLEAKVYTLPSEVDLKIAATKLGLMGGELEILTKEQIEYLDSWEHGTS

SEQ ID NO: 139499 - protein, 25 aa, Unknown
  Bacterial polypetide isolated from the Sargasso Sea
MRLLFQNNKRLILLAEGRLVNLGCA

SEQ ID NO: 139500 - protein, 45 aa, Unknown
  Bacterial polypetide isolated from the Sargasso Sea
MHKDYKDLLKDIKGLSEETTTGVLALKKMEGQGTLLVPAINVNDS

SEQ ID NO: 139501 - protein, 134 aa, Unknown
  Bacterial polypetide isolated from the Sargasso Sea
MYIGHFDNEIQVDALNKSNVKKDQIKPQLDRYTFKNGKQIFLLAEGRLINLGCATGHASFVMSTSFSNQVLAQVFLAKNKPATGIYDLPRKLDEEVARIHLKHLDADLTKLSKDQARYIGVSVDGPFKKEEYRY

SEQ ID NO: 139502 - protein, 34 aa, Unknown
  Bacterial polypetide isolated from the Sargasso Sea
TTTGVKRLYQMQKDGELLFPAINVNDSATKSKFE

SEQ ID NO: 139503 - protein, 95 aa, Unknown
  Bacterial polypetide isolated from the Sargasso Sea
MLAKGRLVNLGCGTGHPSFVMSASFTNQVLAQMEIFNNTAAYENKVYTLPRKLDEKVAELHLAKVGATLTKLSDEQASYIGISSDSAFKSDEYRY

SEQ ID NO: 139504 - protein, 239 aa, Unknown
  Bacterial polypetide isolated from the Sargasso Sea
MSKVKNPKLAKQGKISYEWARTHMDILDNTLTRLKKSKPLKGVTIAFCLHITKETSVLLMGAKELGANVAVCGGNPLTTQDHIAAFLATQGIHIYAWNGQTNKEYDWCLDQVLNHKPDLICDDGADMNVKVHFDKKFKSLKILGSTEETTAGVTRVQAMEKQGKLKYPVVIVNDADTKHMFDNRYGTGQSTIDGYLRAMGLLFTSKKIVVVGYGWVGRGVAERSRGMGGKVIVTEIDPV

SEQ ID NO: 139505 - protein, 53 aa, Unknown
  Bacterial polypetide isolated from the Sargasso Sea
MLGGKRALVLGFGDVGKGSAAALRGSGSRVLVTEIDPINALQACMEGYQVTTI

SEQ ID NO: 139506 - protein, 60 aa, Unknown
  Bacterial polypetide isolated from the Sargasso Sea
WENYKNYENKVYVLPKKLDEKVAALHLKKVGAKLTELSEKQADYIGVSKVGPFKDETYRY

SEQ ID NO: 139507 - protein, 96 aa, Unknown
  Bacterial polypetide isolated from the Sargasso Sea
MYDGKEILVLAEGRLVNLAAATGHPASVMDMSFANQALAAEWIKDNHEDLEPKVYTLPNEVDLKIAATKLGLMGGELEILTKEQIEYLDSWEHGTS

SEQ ID NO: 139508 - protein, 46 aa, Unknown
  Bacterial polypetide isolated from the Sargasso Sea
PKHLFEKVATLHLKKVGAKLTKLSKDQADYISVKVEGPFKPDAYRY

SEQ ID NO: 139509 - protein, 32 aa, Unknown
  Bacterial polypetide isolated from the Sargasso Sea
MSDQDYVVADISLADFGRKEIAIAETEMPGLM

SEQ ID NO: 139510 - protein, 120 aa, Unknown
  Bacterial polypetide isolated from the Sargasso Sea
KEIKPGVHKIIRNKDEYIILLGEGRLVNLALATGHPSRVMDGSFCNQVLAQIALFEDGFADKSDDQKELYVKVLPKKLDEEVASLMVKGFGGTLTKLTKEQEEYISVSKEGPFKDDSYTY

SEQ ID NO: 139511 - protein, 66 aa, Unknown
  Bacterial polypetide isolated from the Sargasso Sea
MNAKVGTFTDYKVADISLANYGRSEIHIAETEMPALIAIREKYRAEQPLKGAKIIGCIHMTIQTAV

SEQ ID NO: 139512 - protein, 49 aa, Unknown
  Bacterial polypetide isolated from the Sargasso Sea
AGYGEVGKGSAESLRNAGCRVMVTEIDPICALQAAMEGYEVVTMEEGAA

SEQ ID NO: 139513 - protein, 78 aa, Unknown
  Bacterial polypetide isolated from the Sargasso Sea
MILKEIKMSKQDYKVKDISLAEYGRQEILLAQDEMPALMQLRKNYNDEQPLKGAKIMGCIHMTVQTAVLIETLIKLGA

SEQ ID NO: 139514 - protein, 243 aa, Unknown
  Bacterial polypetide isolated from the Sargasso Sea
CEETTTGVHRLKSMEAEGKLKYPVFAVNDTPMKRLFDNIHGTGESTILSIAVTTNFSWAGKTVVVAGYGYCGRGVAKKISGQNARVIITEVDPLRGLEAYMEGYEVMPMLQAAHRGDVFITTTGNCDILNKNHFELMRDGVILANAGHFDVEINIKELEKLSTSERIVRDGVREYQLKDGRRINVLASGRLVNLASPLSLGHPIEIMDQSFGMQAVCMREMVVNPTYDPGVHSVPMELDAQVA

SEQ ID NO: 139515 - protein, 28 aa, Unknown
  Bacterial polypetide isolated from the Sargasso Sea
ESGVPVFAWKGETLEEYWVVHYASFNMA

SEQ ID NO: 139516 - protein, 148 aa, Unknown
  Bacterial polypetide isolated from the Sargasso Sea
IGHFDTEIDTQFMRDEWEWEEIKPQVHKVYRSQSSDNENNDYLILLSEGRLVNLGNATGHPSRIMDGSFANQVLAQMYLFEKKFASLNDDESREEKIKVEVLPKKLDEEVASYMVSGFGGVITELSDEQADYINIDKQGPFKSDEYKY

SEQ ID NO: 139517 - protein, 56 aa, Unknown
  Bacterial polypetide isolated from the Sargasso Sea
MEDYKVKDITLAEFGRKEISLAETEMPGLMALRKEYKEKFPLKGAKILGCLHMTIQ

SEQ ID NO: 139518 - protein, 65 aa, Unknown
  Bacterial polypetide isolated from the Sargasso Sea
DKTIVCNIGHFDNEIDMAWLNENYGSTKDTINPKLISIILMAMISLCLLKEDLLIWAVLLDTHPL

SEQ ID NO: 139519 - protein, 75 aa, Unknown
  Bacterial polypetide isolated from the Sargasso Sea
MSASFSNQVLAQIEIWENYKKYENKVYVLPKKLDEMVAMFHLQKVGAKLTEMSKDQSDYLGVEQQGPFKKDTYRY

SEQ ID NO: 139520 - protein, 61 aa, Unknown
  Bacterial polypetide isolated from the Sargasso Sea
MNKNDFKIADLSLAEWGRKEITLAEKEMPGLISLREEYKDTKPLKGANIIGCLHMTIQTAV

SEQ ID NO: 139521 - protein, 79 aa, Unknown
  Bacterial polypetide isolated from the Sargasso Sea
PRSCSSTTQTLAQLELWKERDSGKYKTDQVYLLPKNLDEKVARLHLPALGAELTVLTKEQADYIDVPVGGPYKPDTYRY

SEQ ID NO: 139522 - protein, 56 aa, Unknown
  Bacterial polypetide isolated from the Sargasso Sea
VLIETLVDLGAEVRWSSCNIFQHKTMQLQLLPRQVYLYLLGKVKQKRNIGGALNRQ

SEQ ID NO: 139523 - protein, 374 aa, Unknown
  Bacterial polypetide isolated from the Sargasso Sea
MSKVKNPKLAKQGKTAYEWARTHMDILDNTLNRLKKSKPLKGVTVAFCLHITKETSVLVMGAKELGANVAVCGGNPLTTQDHIAAFLATQGIHIYAWNGQTNKEYDWCIEQVLSHKPSLICDDGADMNVKVHFDKKFKSLKVLGSTEETTAGVTRVRAMEKQGKLKYPVIIVNDADTKHMFDNRYGTGQSTIDGYLRAMGLLFTSKKIVVVGYGWVGRGVAERSRGMGGKVIVTEVDPVKALEAHMDGFDVMPMSQAAKVGQIFITTTGMTSVIRKEHLLAMKDGAVVGNVGHFDVEIDTKFLLEKSKSVREVRPSLDECILRNGKKIYLIGKGRLANLVAAEGHPPEVMAQSFSNQILSLLYILKNHKKMGTK

SEQ ID NO: 139524 - protein, 245 aa, Unknown
  Bacterial polypetide isolated from the Sargasso Sea
MLVNEARCKYLFDNVHGTGQSVWDAVMRSTNLVLAGKTVVVAGYGWCGRGCALRAQGMGASVIVCEVDPVKACDAMMNGCRVMPLMEACKEADVVLSVTGVRHTIRKEHFKVLKDNALLANAGHFWEEIDVEGLSGMSKDRKQMRTNVEGFLLQDGRWLNLLGNGNIVNIACADGHPAEIMDTSFALQALSAQHLVQQEKQLANRCYPVPERIDQRVAQIRLESSGVSFDTLTEDQQQYLSGWDA

SEQ ID NO: 139525 - protein, 90 aa, Unknown
  Bacterial polypetide isolated from the Sargasso Sea
MSETLTGQIVESLPYKVKNIDLFDDGRKALEIAEKEMPGLMATRKKYGPDLPLKGKKITGSLHMTVETAVLIETLVELGADVRWASCNIF

SEQ ID NO: 139526 - protein, 231 aa, Unknown
  Bacterial polypetide isolated from the Sargasso Sea
SATNTLIAGKNVIVVGYGWCGRGIANRLKGLGAKVFVVEATSSSADGSSGYHRALEAHYDGCWVGNLDEIVHLGDIFISATGNKHAIGIEHMKKMKNGAILANAGHFNNEIDIKGLESFSSSSKEILPNVDKYYLNDNKHLVLLSKGRLVNLSQPTGQGHPIEIMDASFAIQALCVEYLVENYQNLKPSIYDVPMSIDNEVAKIALEAQEIYLDDLSDDQKKYLQTWQEGT

SEQ ID NO: 139527 - protein, 103 aa, Unknown
  Bacterial polypetide isolated from the Sargasso Sea
IILLGEGRLVNLALATGHPSRVMDGSFCNQVLAQIALFKDGFADKSDDQKELYVKVLPKELDEEVASLMVKGFGGTLTKLTKEQEEYISVSKEGPFKDDSYTY

SEQ ID NO: 139528 - protein, 99 aa, Unknown
  Bacterial polypetide isolated from the Sargasso Sea
GEGRLVNLALATGHPSRVMDGSFCNQVLAQIALFEDGFADKSNDQKELYVKVLPKELDEEVASLMVKGFGGTLTKLTKEQEEYISVSKEGPFKDDSYTY

SEQ ID NO: 139529 - protein, 79 aa, Unknown
  Bacterial polypetide isolated from the Sargasso Sea
VDCPNMNYAENYKNYENKVYVLPKKLDEKVAALHLKKVGAKLTELSEKQADYIGVSKVGPFKDETYLLLERKNETLFFY

SEQ ID NO: 139530 - protein, 113 aa, Unknown
  Bacterial polypetide isolated from the Sargasso Sea
KNESTKVERVREHVESYKYKDKEILVLAEGRLVNLAAATGHPASVMDMSFANQALASEWIKDNHKKLESKVYTLPKEVDIKIAATKLSLMGGELEILSDEQIKYLDSWEHGTS

SEQ ID NO: 139531 - protein, 62 aa, Unknown
  Bacterial polypetide isolated from the Sargasso Sea
ELWNNSDKYEKKVYVLPKHLDEKVAMLHLEKVGAKLTKMSKEQADYISVKPSGPFKPDTYRY

SEQ ID NO: 139532 - protein, 170 aa, Unknown
  Bacterial polypetide isolated from the Sargasso Sea
ILLSLTVGKTVEILNTDAEGRLVLADALTYTEEKFKPKFIVDLATLTGAIIVSLGSEYAGLFSNNDKLSKQLIDAGENVEEKVWRMPLNKNFDKLINSKNADMQNINYVGGAGSTTAAQFLQRFILNKTPWAHLDIAGMAFSKYGGALNSGGATGYGVRLLNKLIEDHYE

SEQ ID NO: 139533 - protein, 279 aa, Unknown
  Bacterial polypetide isolated from the Sargasso Sea
LDFEKLGSKLFVFLKENKKENSFINVENNSFTNVQLEKFLHGAQLKSYNFNLYKTDKKKDVNINLSVVGSNTKQKNLLRNKLNALLEGVFLTRDLVSEPGNILNPDEYAKRIVKLRKFGLKVTVYDQKRLKKLGFNALLGVGQGSIRGSYMVTIEWNGNKNKSKPLAFVGKGVCFDTGGISLKPAKFMEDMTYDMAGSATVVGLMKTLALRKSKINAVGVVGLVENMPGANAQRPGDIVKSYSGQTIEVLNTDAEGRLVLADALTYTEEKFKHKSNYWT

SEQ ID NO: 139534 - protein, 158 aa, Unknown
  Bacterial polypetide isolated from the Sargasso Sea
ILNTDAEGRLVLADALTFTERKFKPKFMIDLATLTGAIIVSLGSEYAGLFSNNDKLSKQLINAGEKVEEKLWRMPLHKNYDKLINSKNADMQNINYVGGAGSTTAAQFLQRFILNKTPWAHLDIAGMAFSKYGGALNSGGATGYGVKLLNQLIEDNYE

SEQ ID NO: 139535 - protein, 314 aa, Unknown
  Bacterial polypetide isolated from the Sargasso Sea
RDLVSEPGNVLHPDEYAKRINSLKKIGLKINIYDEKKLQKLGMNALLGVGQGSIRGSYLVTMEWKGAKNNSAPLAFVGKGVCFDTGGYSLKPAKFMEDMTYDMAGSATVVGLMMNLALRKSKINAVGVVGLVENMVGGNAQRPGDIVKSYSGKTIEILNTDAEGRLVLADALTFTEEKFKPKFMVDLATLTGAIIVSLGSEYAGLFSNNDELSKKLLNAGEKVNEKLWRMPLHKNFDKLINSKNADMQNINYVGGAGSTTAAQFLQRFILNKTPWAHLDIAGMAFSKYGGALNSGGATGFGIRLLNQLIEDNYE

SEQ ID NO: 139536 - protein, 322 aa, Unknown
  Bacterial polypetide isolated from the Sargasso Sea
LLSQKVTKSKEIKQFIKSVFSNKLFTEQNFLAKDYNEKSYIFVNCTKSKVALDFEKLGSKLYVFLKENKKENSFINLDNNTFTNVQLEKFLHGAQLKSYSFNLYKTVNKKNFDINLSIIGKGIKQKKTLRDKLNALLQGVFLTRDLVSEPGNILHPDEYAKRITKLRKLGLKVTVYDQKRLKKLGFNSLLGVGQGSIRGSYMVTIEWNGNKNKSKPLAFVGKGVCFDTGGISLKPAKFMEDMTYDMAGSATVVGLMKTLALRKSKINAVGVVGLVENMPGANAQRPGDIVKSYSGQTIEVLNTDAEGRLVLADVLTYTEEKF

SEQ ID NO: 139537 - protein, 265 aa, Unknown
  Bacterial polypetide isolated from the Sargasso Sea
MKCTVFSKNEIKSKRLGGVTAVGQGSKNEPRFIILEYRNGKKEQKPILLVGKAVTFDTGGISLKPGEKMDEMKFDKCGGCTVLGVMKAISELKLPINVIAIVPSVENMPSGDAFRPGDIVKLFNGKTAEILNTDAEGRLILADGLAYGIKHFQPSSVMDFATLTGACIVALGTNVAGIVSNNTKLASKVKSSSAKTSEEVWELPINDDYMDMVKSKVADIRNLGMGRAAGTITAAAFLANAVGNVPWVHFDIAGTAWIQPSTKSK

SEQ ID NO: 139538 - protein, 265 aa, Unknown
  Bacterial polypetide isolated from the Sargasso Sea
IDATEKLYGDYRWGRYDLLILPPSFPFGGMENPVLSFITPTVVAGDGSLVNLIAHELAHSWSGNLVTNASWRDLWLNEGFTSYVENRIMEQVFGTDRAVMEQALSVQGLKDELAQMPANDSILHIDLQGRDPDDAFSGVPYTKGQLFLMFLEQKFGRDRFDPFVKQYFDDHAFQSLDTARFVGYLEQKLLNKYPGIVSLDEVKRWIYQPGLPEGTPEPQSDAFNQVLQQANAWLAGDTALSSLPTDNWTVHEWLYFINNLPLSIT

SEQ ID NO: 139539 - protein, 253 aa, Unknown
  Bacterial polypetide isolated from the Sargasso Sea
RLFQIIIQNLIKASIEYASISDGVFYARDLVNEPSNVLFPKAYAQRIQKLRQHGLKVEVLGESKMKSLKMHSLVGVGQGSQRESQLVIMHWNGNKTKKTKPICLVGKGVCFDSGGISIKPSNKMEEMIGDMGGSAAVVGTMLSLAKRKAKVNAVGIVGLVENMPDGKAQKPGDIIKSMSGQTIEIQNTDAEGRLVLADALWYAQKRFKPELMIDLATLTGAMVISLGSLIAGLFSNDDKLSSQLIDAGKERET

SEQ ID NO: 139540 - protein, 274 aa, Unknown
  Bacterial polypetide isolated from the Sargasso Sea
TKKNKEIINIHVTGKKIPSLKEQINFRSIEEGTFYTRDLVSEPGNILHPDEYAKRLSYLKKDGLKVNVYDEKKLKKLGMNSLLGVGQGSVRGSYLVTLEWNGLKTKSKPLAFVGKGVCFDTGGISLKPAKFMEDMTYDMAGSAVVVGLMKCLAKRKAKINAVGVVGLVENMPGGNAQRPGDIVKSYSGKTIEILNTDAEGRLVLADALTYTEEKYKPKFIVDLATLTGAIIVSLGSEYAGLFSNDDKLSKQLIDTGEKVEEKVWRMPLNKNFDK

SEQ ID NO: 139541 - protein, 219 aa, Unknown
  Bacterial polypetide isolated from the Sargasso Sea
MGFNALLGVGQGSIRGSYLVAIEWKGNKSNSKPLAFVGKGVCFDTGGISLKPAKFMEDMTYDMAGSAVVVGLMKNFALRKSKINAVGVVGLVENMPGSNAQRPGDIVKSYSGKTIEVLNTDAEGRLVLADALTYTEKKFKPELIVDLATLTGAIIVCLGSEYAGLFSNNDKLSKQIFEAGEKVDEKVWRLPLHKNYDKLLNSKNADMQNINYVGGAGST

SEQ ID NO: 139542 - protein, 287 aa, Unknown
  Bacterial polypetide isolated from the Sargasso Sea
IFVSNKTIKHSNYFNSFIHGAELKSYKFIIYKTKKNEKNIILNIDKKNSSNNTKKLNAILQGVNYTRDLVSEPGNILHPDEYAKRLLQLKKLGLKITIYDQKKLNKMGCNALLGVGQGSIRGSYLVTMEWNGDRSRSKPLAFVGKGVCFDTGGISLKPAKFMEDMTYDMAGSAVVAGLMKNFALRKAKINAVGVVGLVENMPGGNAQRPGDIVKSYSGKTIEVLNTDAEGRLVLADALTFTEKKFKPKFIIDLATLTGAIIVALGSEHAGLFSNNDNLSDQLYKTGN

SEQ ID NO: 139543 - protein, 256 aa, Unknown
  Bacterial polypetide isolated from the Sargasso Sea
MVTIEWNGNKNKSKPLAFVGKGVCFDTGGISLKPAKFMEDMTYDMAGSATVVGLMKTLALRKSKINAVGVVGLVENMPGANAQRPGDIVKSYSGQTIEVLNTDAEGRLVLADALTYTEEKFKPSLIIDLATLTGAIIVALGSEYAGLWSNNKKLSKQLFDAGEHVEEKVWEMPLHENYNKLMNSNNADMQNINYVGGAGSTTAAQFLQRFIINKTPWAHLDIAGMAFSKYAGALNSGGATGYGVRLLNKFIEENYE

SEQ ID NO: 139544 - protein, 286 aa, Unknown
  Bacterial polypetide isolated from the Sargasso Sea
IKNNRFTSLLEGTNFTKDLVSEPGNILHPDEYAKRILKLKKIGLKIKVYNEKELKKLGMGALLGVGQGSIRGSYLVTIEWNGDKSKSKPLAFVGKGVCFDTGGYSLKPAKFMEDMTYDMAGSAAVVGLMKTLALRKAKINAVGVVGLVENMVSGNAQRPGDIVKSYSGKTIEVLNTDAEGRLVLADALTFTEKKFKPKFIVDLATLTGAIIVSLGSEYAGLFSNDDKLSKQLIEAGEKVDEKLWRMPLHKNFDKLMNSKNADMQNINYVGGAGSTTAAQFLQTIYY

SEQ ID NO: 139545 - protein, 165 aa, Unknown
  Bacterial polypetide isolated from the Sargasso Sea
LSGQTIEVLNTDAEGRLVLADVLWYIKEKFKPRFMIDLATLTGAIIVALGDRYGGLFSNDDDLAEKLYASSKKTKELLWRLPIDEDFDKLLNCPVADMKNITGTRGAGSITAAQFLKRFVGDTSWAHLDIAGVTWSKKGTNFARPGGTGFGVRLLDEFIKNYYER

SEQ ID NO: 139546 - protein, 270 aa, Unknown
  Bacterial polypetide isolated from the Sargasso Sea
MEEGTFYARDLVSEPGNVLHPDEYAKRLSSLRKDGLKVNVYDEKKLKKLGMHSLIGVGMGSTRGSYLVTMEWNGAKNNSKPLAFVGKGVTFDTGGYSLKPARFMEDMTYDMAGSAAVVGLMKNFALRKAKINAVGVVGLVENMVSGNAQRPGDIVKSYSGKTIEVLNTDAEGRLVLADALTFTEKKFKPKFIVDLATLTGAIIVCLGSEYAGLFSNDDKLSKQIFNAGEKVEEKVWRMPLHKNYDKLMNSKNADVQNINYVGGAGSTTAA

SEQ ID NO: 139547 - protein, 317 aa, Unknown
  Bacterial polypetide isolated from the Sargasso Sea
LTKDYKDKSYVFVNCTKSKVSLDFEKLGSKLYAFLKENKKENSFINLANNSFTNVQLEKLLHGVQLKSYNFNLYKTDKKKNVSINLSIVGSSVKQKNLLRNKLNALLEGVFLTRDLVSEPGNILHPDEYAKRIVKLRKHGLKVTVYNKKRLKKLGFNALLGVGQGSIRGSYLVTIEWNGNKNKSKPLAFVGKGVCFDTGGISLKPAKFMEDMTYDMAGSATVVGLMKTLALRKSKINAVGVVGLVENMPGSNAQRPGDIVKSYSGQTIEVLNTDAEGRLVLADALTYTEEKFKPSLIIDLATLTGAIIVALGSEYAG

SEQ ID NO: 139548 - protein, 162 aa, Unknown
  Bacterial polypetide isolated from the Sargasso Sea
MAKPLEVLNTDAEGRLILADGLSYASKHYDPEYILDFATLTGAVLVSLGHVATGIMGTDDNLMKKVKKSSKSVAEKVWELPLWPEYCKQVQSNIADVKNTGAPMQAGSIAGGAFLKEFVKDNIPWIHFDIAGTAWGVKPDSINPKGSATGWGIRLVLDMMGI

SEQ ID NO: 139549 - protein, 223 aa, Unknown
  Bacterial polypetide isolated from the Sargasso Sea
MKSYEFNLYKTKRIHKDIILNVIKLKNQNDIKLRNRLKAILDGVNFTRDLVSEPGNVLHPDEYAKRIVKLRKFGLKVTVYDQNKLKKMGCNALLGVGQGSIRGSYLVTIEWKGSKNNSKPLAFVGKGVCFDTGGYSLKPAKFMEDMTYDMAGSAAVVGLMKTLALRKSKINAVGVVGLVENMVSGNAQRPGDIVKSYSGKTIEILNTDAEGRLVLADALTFTE

SEQ ID NO: 139550 - protein, 278 aa, Unknown
  Bacterial polypetide isolated from the Sargasso Sea
SSILEGIKYTKDLVSEPGNILHPDEYAKRLLKLKKIGLKVRVYNQKELKRLGMGALLGVGQGSVRGSYLVTLEWNGNRSKSKPLAFVGKGVCFDTGGYSLKPARFMEDMTYDMAGSAAVVGLMKTLALRKATVNAVGVVGLVENMVSGNAQRPGDIVKSYSGKTIEVLNTDAEGRLVLADALTFTEKKFRPKFIIDLATLTGAIIVSLGSEYGGLFSNNDKLSKELIDAGEKTDEKLWRMPLHRNFDKLMDSKNADMQNINYVGGAGSTTAAQFLQRF

SEQ ID NO: 139551 - protein, 213 aa, Unknown
  Bacterial polypetide isolated from the Sargasso Sea
MGGSGVVIGLMKTLALRKAKVNAIGVVGLVENHIGNMATRPSDVVKSYSGQTIEVLNTDAEGRLVLADALWYTQEQYKPELMVDLATLTGAIVIALGNEYAGIFSNNDKLSKQLEDAGKIEDEKLWRFPLHENFDKMINSPIADMQNISYGRGAGSITAAQFLQRFVNKVPWAHLDIAGTTWTKTALPTSPKGATAYGVKLLNRFVNKYYEGK

SEQ ID NO: 139552 - protein, 268 aa, Unknown
  Bacterial polypetide isolated from the Sargasso Sea
KVNIYDEKKLKKLGMHALLGVGMGSIRGSYLVTMEWNGAKDNSKPLAFVGKGVTFDTGGYSLKPARFMEDMTYDMAGSAAVVGLMKNLALRKAKINAVGVVGLVENMVSGVAQRPGDIVKSYSGKTVEVLNTDAEGRLVLADALTFTEKKFKPKFMVDLATLTGAIIVSLGSEYAGLFSNDDKLSKQILNAGEKVEEKLWRMPLHKNYDKLINSKNADMQNINYVGGAGSTTAAQFLQRFILNKTPWAHLDIAGMAFSKYGGALNSGG

SEQ ID NO: 139553 - protein, 219 aa, Unknown
  Bacterial polypetide isolated from the Sargasso Sea
MEDMTYDMAGSAAVVGLMKTLALRKAKINAVGVVGLVENMVSGNAQRPGDIVKSYSGKTIEVLNTDAEGRLVLADALTFTEKKFKPRFIVDLATLTGAIIVSLGSEYAGLFSNDDKLSKQLLDAGEKVDEKLWRMPLHKNFDKLMNSKNADMQNINYVGGAGSTTAAQFLQRFIINNTPWAHLDIAGMAFSKYGGALNSGGATAFGVRLLNKLIEDNYE

SEQ ID NO: 139554 - protein, 197 aa, Unknown
  Bacterial polypetide isolated from the Sargasso Sea
MALRKSKINAVLVVGLVENMPGANAQRPGDIVKSYSGQTIEVLNTDAEGRLVLADVLTYTEQKFKPSLIIDLATLTGAIIVALGSEYAGLWSNNKKMSKQLFDAGEQVEEKVWEMPLHENYNKLMNSNNADMQNINYVGGAGSTTAAQFLQRFIINKTPWAHLDIAGMAFSKYAGALNSGGATGYGVRLLNKFIEEN

SEQ ID NO: 139555 - protein, 180 aa, Unknown
  Bacterial polypetide isolated from the Sargasso Sea
MPGGNAQRPGDIVKSYSGKTIEVLNTDAEGRLVLADALTYTEKKFKPKLIVDLATLTGAIVVALGSEYAGLFSNDDKLSKQLFEAGEKVDEKVWRLPLHKNYNKLMDSKNADMQNINYVGGAGSTTAAQFLERFILNKTPWAHLDIAGMAFSKYAGALNSGGATGYGVRLLNKFVEENYE

SEQ ID NO: 139556 - protein, 258 aa, Unknown
  Bacterial polypetide isolated from the Sargasso Sea
FLSCTIEWKGNKSKSKPLSFVGKGVCFDTGGYSLKPARFMEDMTYDMAGSAAVVGLMKTLALRKAKINAVGVVGLVENMVSGNAQRPGDIVKSYSGKTIEVLNTDAEGRLVLADALTFTEKKFKPKFMIDLATLTGAIIVSLGSEYAGLFSNDDKLSKQLIEAGERVDEKLWRMPLHKNFDKLINSKNADMQNINYVGGAGSTTAAQFLQRFILNKTPWAHLDIAGMAFSKYAGALNSGGATGYGVRLLNKFVEENYE

SEQ ID NO: 139557 - protein, 301 aa, Unknown
  Bacterial polypetide isolated from the Sargasso Sea
KNFKINDFEILGAKLYEYLKNNSFKKVSISKNFININNFNHFIHGLKIKSYEFNLYKGSQKKNLFLVEALINRSKKDKINIQKFNSIEAGVNFARDLVSEPPNVLFPKEYVNRLLKLKKIGIKVTVYNEAKMKKLGMNSLLGVGKGSSKESYLVTLEYYGNKKNRSKLFSFVGKGVCFDTGGISLKPARFMEEMKYDMAGSAVVSGLMQSLALRKAKINVVGVVGLVENMPGGNAQRPGDIVKSYSGKTIEVLNTDAEGRLVLADALTFTEKKFKPKFIIDLATLTGAIIVSLEKNMQVYF

SEQ ID NO: 139558 - protein, 313 aa, Unknown
  Bacterial polypetide isolated from the Sargasso Sea
MTGNILHPDEYAKRLLKLKKTGLKVTVYDEKKLKKLGCNALLGVGQGSIRGSYLVTIEWKGNKSKSKPLAFVGKGVCFDTGGISLKPARFMEDMTYDMAGSAVVVGLMKNFALRKAKINAVGVVGLVENMPGSNAQRPGDIVKSYSGKTIEVLNTDAEGRLVLADAITFTEKKFKPNLIVDLATLTGAIIVCLGSEYAGLFSNDDKLSKQIFEAGEKVDEKVWRLPLHKNYDKLMDSKNADMQNINYVGGAGSTTAAQFLQRFIINKTPWAHLDIAGMAFSKYAGALNSGGATGYGVRLLNKFVEDIMSNLEQ

SEQ ID NO: 139559 - protein, 280 aa, Unknown
  Bacterial polypetide isolated from the Sargasso Sea
ISLTIIGKNNKSNLKTKLDALTAGVFLTRDLVSEPGNILHPDEYVKRIQNLKKYGIKVVVYDNKKLKKMGCGALLGVGQGSVRGSYLVTMEWRGTSSKIKPLAFVGKGVCFDTGGISLKPAKFMEDMTYDMAGSAVVVGLLKNFALRRAKINAVGVVGLVENMPGGNAQRPGDIVKSYSGKTIEVLNTDAEGRLVLADALTFTEEKFKPDLIIDLATLTGAIIVSLGSEYAGLFSNNDKLSKQLYEAGEKVEEKVWRMPLHTNYDKLINSKNADMQNINY

SEQ ID NO: 139560 - protein, 212 aa, Unknown
  Bacterial polypetide isolated from the Sargasso Sea
MAGAGTVVGLMKTSALRRAKVNAVGVVGLVENMADGNAQRPGDVVKSYSGKSIEIFNTDAEGRLVLADIISYTEKRFKPEFMINLATLTGAIIIALGNEYAGLFSNNDKLSNQLFESGKIDNEKVWRLPLSKEFDKLINSQIADVQNINYSGGAQSITAAQFLQRFVLKKTPWAHLDIAGMAWTKKGDDVTPSGATGYGVKLLNRLVTEYYE

SEQ ID NO: 139561 - protein, 255 aa, Unknown
  Bacterial polypetide isolated from the Sargasso Sea
VTMEWNGLKNKSKPLGFVGKGVCFDTGGISLKPAKFMEDMTYDMAGSAVVVGLMKSLALRKAKVNAVGVVGLVENMPGGNAQRPGDIVKSYSGKTVEILNTDAEGRLVLADALTFTEEKFKPKFIVDLATLTGAIIVSLGSEYAGLFSNDDKLSKQLIESGEHVEEKVWRMPLNKNYDKLMDSKNADMQNINYVGGAGSTTAAQFLQRFILNKTPWAHLDIAGMAFSKYGGALNSGGATGYGVRLLNKLIEDHYE

SEQ ID NO: 139562 - protein, 292 aa, Unknown
  Bacterial polypetide isolated from the Sargasso Sea
DFEKLGSKLYMFLKDNKIENSFININNNTLTKIQFEKILHGLQLKSYNFNIYKTDKKKKEININITVHGTNTNKTNLLRNKLNALLEGVFLTRDLVSEPGNVLHPDEYARRITKLRKLGLKITVYDQRRLKKLGFNALLGVGQGSIRGSYLVTMEWNGSKDKSKPLAFVGKGVCFDTGGISLKPAKFMEDMTYDMAGSATVVGLMKTLALRKSKINAVGVVGLVENMPGGNAQRPGDIVKSYSGQTIEVLNTDAEGRLVLADALTYTEKKFKPSLIIDLATLTGAIIVALGS

SEQ ID NO: 139563 - protein, 201 aa, Unknown
  Bacterial polypetide isolated from the Sargasso Sea
MLSLAKRKAKVNAIGIVGLVENMPDGKAQKPGDIIKSMSGQTIEIQNTDAEGRLVLADALWYAQKRFKPELMIDLATLTGAMVISLGSLIAGLFSNDDKLSSKLIDAGEESGDQVWRFPLSKSYDKLINSKFADMKNIGMGGAGSITAAQFLQRFVNKVPWAHLDIAGTATGMPKTSTNTSWATGFGVHLLDTFVKKFYEK

SEQ ID NO: 139564 - protein, 229 aa, Unknown
  Bacterial polypetide isolated from the Sargasso Sea
MNVGRGANTARNLGNRPANHATPTYISDQVKELAKEIGGFSVEVLEEKDMEKLGMGSLLSVSRGSVEPAKLVTMEYKGGKKGAKPIVLVGKGVTFDTGGISLKPSPKMDEMKWDMSGAGSVIGTMCAVAASKLPVNLVCTIALSENMPAGNATKPGDVVTSMSGQTIEVLNTDAEGRLVLCDALTYIGKYDPKFVVDTATLTGAVVVALGDIAAGVMGNDQKLVDKILD

SEQ ID NO: 139565 - protein, 201 aa, Unknown
  Bacterial polypetide isolated from the Sargasso Sea
KTLALRKAKINAVGVVGLVENMVSGNAQRPGDIVKSYSGKTIEVLNTDAEGRLVLADALTFTEKKFKPELMIDLATLTGAIIVSLGSEYAGLFSNDDKLSNQLIEAGERVEEKLWRMPLHKNFDKLMDSKNADMQNINYVGGAGSTTAAQFLQRFILNKTSWAHLDIAGMAFSKYGGAINPTGATGYGVRLLNKFVEDNYE

SEQ ID NO: 139566 - protein, 172 aa, Unknown
  Bacterial polypetide isolated from the Sargasso Sea
PGDIVKSYSGQTIEVLNTDAEGRLVLADALTYTEEKFKPSLIIDLATLTGAIIVALGSEYAGLWSNNQKLSDQLFNAGEKVEEKVWKMPLHENYNKLMNSKNADMQNINYVGGAGSTTAAQFLQRFIINKTPWAHLDIAGMAFSKYAGALNSGGATGYGVRLLNKFIEENYE

SEQ ID NO: 139567 - protein, 250 aa, Unknown
  Bacterial polypetide isolated from the Sargasso Sea
MVTMEYKGGKKGAKPIVLVGKGVTFDTGGISLKPSPKMDEMKWDMSGAGSVIGTMCAVAASKLPVNLVCTIALSENMPAGNATKPGDVVTSMSGQTIEVLNTDAEGRLVLCDALTYIGKYNPKFVVDTATLTGAVVVALGDVAAGVMGNDQKLVDKILDAGQATGEKAWQLPMWDEYQSYLDSNFADIANIAPGRAAGTIEGACFLSRFTEDYKWAHIDIAGVADIGAGKNKGSTGKPVGLLFELVNKNK

SEQ ID NO: 139568 - protein, 311 aa, Unknown
  Bacterial polypetide isolated from the Sargasso Sea
NKDFLSHFLHGLKLKSYEFKKYKTKKDSRNIAIHVLGNKNKPSVQNQLKFKALEEGTFYARDLVSEPGNILHPDEYAKRINSLKKDGLKINIYDERKLKKLGMNALLGVGRGSIRGSYLVTMEWNGAKNKSKPLAFVGKGVCFDTGGYSLKPARFMEDMTYDMAGSATVVGLMKSLALRKAKVNAVGVVGLVENMVSGNAQRPGDIVKSFSGKTIEVLNTDAEGRLVLADALTFTEKKYKPRFIVDLATLTGAIIVCLGSEYAGLFSNDDKLSKQIFESGEKVEEKVWRMPLHKNYDKLMNSKNADVQNIN

SEQ ID NO: 139569 - protein, 211 aa, Unknown
  Bacterial polypetide isolated from the Sargasso Sea
GSGVVIGLMKALALRKAKANVIGVVGLVENHIGSKAQRPSDVVKSYSGQTIEVLNTDAEGRLVLADALWYTQEQYKPELMVDLATLTGAIIVALGDEYAGLFSNSDKVSKQLSEAGDIEGEKLWRLPLNDKYDKMLNSPIADMQNITNGRGPGSITAAQFLQRFVNKVPWAHLDIAGTTWTKQPLPTSPKGATAFGVKLLNRFVSKYYEGK

SEQ ID NO: 139570 - protein, 285 aa, Unknown
  Bacterial polypetide isolated from the Sargasso Sea
YLIALAIGDLEFKAMGERTGVYAEPALLESAAKEFEDTEAMLEVTEETYGPYQWDRYDLLILPPSFPFGGMENPRLSFITPTVIAGDKSLVSLIAHELAHSWSGNTVTNATWRDLWLNEGFTTYLTYRIMEMIYGHDRFKKEAVLGYQDLENDVAALEENDEILAIDLRGRNPDDVFSNIPYEKGALFLREIEHKIGRENFDAFLMQYFKDFAFKSITTDTFIAYLDDTLLKQYPDKLDANRIHTWIFEPGIPEGAPHPESDAFTKIDDTRSAWLSGDVKAADMK

SEQ ID NO: 139571 - protein, 190 aa, Unknown
  Bacterial polypetide isolated from the Sargasso Sea
AIGVVGLVENMVSGNAQRPGDIVKSFSGKTIEVLNTDAEGRLVLADAITFTEKKYKPKFIIDLATLTGAIIVSLGSEYAGLFSNNDDLSKKIFNAGEKVDEKVWRMPLHKNYDKLMNSKNADMQNINYVGGAGSTTAAQFLQRFILNKTPWAHLDIAGMAFSKYGGALNSGGATGFGVRLLNELIEENYE

SEQ ID NO: 139572 - protein, 227 aa, Unknown
  Bacterial polypetide isolated from the Sargasso Sea
ISLKPAKFMEDMTYDMAGSAVVVGLMKSLALRKAKINAVGIVGLVENMPGGNAQRPGDIVKSYSGKTVEILNTDAEGRLVLADALTYTEEKFKPKFIVDLATLTGAIIVSLGSEYAGLFSNDDKLSNQLINAGENVEEKVWRMPLNKNFDKLIDSKNADMQNINYVGGAGSTTAAQFLQRFILNKTPWAHLDIAGMAFSKYGGALNSGGATGYGVRLLNKLIEDYYE

SEQ ID NO: 139573 - protein, 234 aa, Unknown
  Bacterial polypetide isolated from the Sargasso Sea
FVLILGGISLKPAKFMEDMTYDMAGSAVVVGLMKSLALRKAKINAVGVVGLVENMPGGNAQRPGDIVKSYSGKTVEILNTDAEGRLVLADALTFTEEKFKPKFIVDLATLTGAIIVSLGSEYAGLFSNDDKLSQQLIESGEHVEEKVWRMPLNKNYDKLIDSKNADMQNINYVGGAGSTTAAQFLQRFILNETPWAHLDIAGMAFSKYGGALNSGGATGYGVRLLNKLIEDHYE

SEQ ID NO: 139574 - protein, 274 aa, Unknown
  Bacterial polypetide isolated from the Sargasso Sea
SRKQIWTQGQGIDNRHWIPMFDERNDLITTELLIEFDEKFQVLSNGVKLKEKTLSNQKKLWHYKMSKPHAPYLIMLGIGEYGIKEITSSSNVPMKLYYYLDQEDQYAPTYRYTKKLIDYLEDEIGVPYPWQSYAQIPVQDFMYGAMENTTATIFGDFYLIDERGFLDRNYVRVNAHELAHQWFGDMVTARSAAHHWLQESFATHYDMNFQRVAFGQDHFDWVRRNYTEQALNATLTDLKPIAHSQAGTVRHYPKGAYVLEMLKYVLGREEFNAG

SEQ ID NO: 139575 - protein, 177 aa, Unknown
  Bacterial polypetide isolated from the Sargasso Sea
RVRIGNTDAEGRLVLADLLSHLREDAKTAVNPTLYSIATLTGHAARAVGPYSALVENGAARRVGLSADLALVGDLWADPSEISRSRREDFSFIKGRSSADDLLSCNNAPSSVTPRGHQFPMAFLVAAAGLDQHGLNTEQPLPYCHIDIAGSGVDGGDWQHGKPSAAPVAALAAYYCL

SEQ ID NO: 139576 - protein, 213 aa, Unknown
  Bacterial polypetide isolated from the Sargasso Sea
MDEMKWDMSGAGSVIGTMCAVAASKLPVNLVCTIALSENMPAGNATKPGDVVTSMSGQTIEVLNTDAEGRLVLCDALTYIGKYDPKFVVDTATLTGAVVVALGDIAAGVMGNDQKLVDKILDAGQATGEKAWQLPMWDEYQSYLDSNFADIANIAPGRAAGTIEGACFLSRFTEDYKWAHIDIAGVADIGAGKNKGSTGKPVGLLFELVNKNK

SEQ ID NO: 139577 - protein, 283 aa, Unknown
  Bacterial polypetide isolated from the Sargasso Sea
MGKKSSIHGNDFAIIGGKINQISSKSNKKIVSILVAKEFSTDDNLIQIGFGATLNTYKFDKYKTKKKTKKQINEVKIISNNASKLKNKLKNKNSVAEGIFLARDLVNEPSNVLNPEAYAKRIKELSKFGLKVEILNEAKMKRLGMWSLLGVGRGSQYESQLVIIRWEGNKSKKTKPLCFVGKGVCFDSGGISLKPGNKMEEMIGDMGGSAAVVGLMKTLALRKAKVNVIGVVGLVENMPDGTAQKPGDIVKSMSGQTIEIQNTDAEGRLVLADALWYAQDKYK

SEQ ID NO: 139578 - protein, 212 aa, Unknown
  Bacterial polypetide isolated from the Sargasso Sea
MAGSAVVVGLMKSLALRKAKVNAVGVVGLVENMPGGNAQRPGDIVKSYSGQTVEILNTDAEGRLVLADALTYTEKKFKPKFIVDLATLTGAIIVSLGSEYAGLFSNDDKLSKQLIDAGEHVEEKVWRMPLNKNFDKLIDSKNADMQNINYVGGAGSTTAAQFLQRFILNKTPWAHLDIAGMAFSKYGGSLNSGGATGYGVRLLNKLIEDNYE

SEQ ID NO: 139579 - protein, 274 aa, Unknown
  Bacterial polypetide isolated from the Sargasso Sea
ENLIAKNFPLIHTVGRASSQEPRLLEIKSGNLGPKVTLVGKGVCFDTGGLNIKPNRSMSLMKKDMGGAANVLALASMILSTSMNIQLRVLIPAVENSISGNSFRPGDILTARNGSTVEINNTDAEGRLVLADALSFASEGEPDLIISMATLTGAARVAVGADIAPFFSERNEVSDILKASGAQQNDPVWPLPFWDPYEKMIEPDTADLDNAPSGGYGGAITAALFLRRFVTKPNSYIHFDIYSWSDTNKPGLPKGGITQGPRAIFDALPKILDI

SEQ ID NO: 139580 - protein, 169 aa, Unknown
  Bacterial polypetide isolated from the Sargasso Sea
GSKATKPGDVVKTLSGQTVEILNTDAEGRLVLADALTYIKRFNPKTVTDVATLTGACIIALGHATSGLMSNNDRHANDLYEAGLKSQDKAWRLPIWDIYQKDLNSNFADIANIGGRAGTITAACFLSRFTKDYEWAHLDVAGTAHVGGLAKGASGRPVPLLSQFLIDKA

SEQ ID NO: 139581 - protein, 304 aa, Unknown
  Bacterial polypetide isolated from the Sargasso Sea
KNINLNIIGKQTSKSNILRKKLDAILEGVFFTRDLVSEPGNILHPDAYSKRLIKLKKIGLKVKVYNEKKLKKLGCNALLGVGQGSIRGSYLVTIEWKGNKSNSKPLAFVGKGVCFDTGGYSLKPARFMEDMTYDMAGSAAVVGLMKTLALRKSKINAVGVVGLVENMVSGNAQRPGDIVKSYSGKTIEVLNTDAEGRLVLADALTFTEKKFKPKFMVDLATLTGAIIVSLGSEYAGLFSNDDKLSKQLLEAGERVDEKLWRMPLHKNFDKLINSKNADMQNINYVGGAGSTTAAQFLQRFIITK

SEQ ID NO: 139582 - protein, 293 aa, Unknown
  Bacterial polypetide isolated from the Sargasso Sea
SLKKHGLNVKIYDKKKLKKLGMNALLGVGQGSIRGSYLVTIEWNGAKNNSKPLAFVGKGVCFDTGGYSLKPAKFMEDMTYDMAGSAVVVGLMKNLALRKAKINAVGVVGLVENMVSGNAQRPGDIVKSYSGKTIEVLNTDAEGRLVLADALTFTEKKFKPKFIVDLATLTGAIIVSLGSEYAGLFSNNDKLSKQLLEAGEKVEEKLWRMPLHKNFDKLINSKNADMQNINYVGGAGSTTAAQFLQRFILNKTPWAHLDIAGMAFSKYGGALNSGGATGYGVRLLNQLIEDNYE

SEQ ID NO: 139583 - protein, 276 aa, Unknown
  Bacterial polypetide isolated from the Sargasso Sea
ILSGINFTRDLVSEPGNILHPDEYTKRLIKLKKFGLKITVYDEKKLKKMGCNALLGVGQGSIRGSYLVTIEWKGNKSKSKPLAFVGKGVCFDTGGYSLKPARFMEDMTYDMAGSAAVVGLMKTLALRKAKINAVGVVGLVENMVSGNAQRPGDIVKSYSGKTIEVLNTDAEGRLVLADALTFTEKKFKPKFMVDLATLTGAIIVSLGSEYAGLFSNDDKLSKQLLEAGERVDEKLWRMPLHKNFDKLMDSKNADMQNINYVGGAGSTTAAQFYKDL

SEQ ID NO: 139584 - protein, 307 aa, Unknown
  Bacterial polypetide isolated from the Sargasso Sea
MFANLDKYAVENAVIYADTSHLSKDDNFLFDLAKTAEKASYRYTDTNPNTKKELILKNVSLAVGNATTAQKRVVELGYNVGSGANTARNLGDRPANHATPAYIAKAVKGLAKDIGGFSVEILEEKDMKKLGMGCLLSVSRGSIEPAKLVTMQYKGGKKGAKPIVLVGKGVTFDTGGISLKPPQKMDEMKWDMSGAGSVIGTMCAVAKSKLPVNLVCTVALSENMPGSKATKPGDVVTSMSGQTVEILNTDAEGRLVLSDALTYVGKYDPKVVINTATLTGAVVVALGSVAAGVMGNDQKLVDGDTEA

SEQ ID NO: 139585 - protein, 261 aa, Unknown
  Bacterial polypetide isolated from the Sargasso Sea
EEGTNFTKDLVSEPGNILHPDEYARRLLKLKKLGLKVTVYDKKKLKKLGMNALLGVGQGSIRGSYLVTMEWNGAKSKTKPLAFVGKGVCFDTGGISLKPARFMEDMTYDMAGSAVVAGLMKNFAIRKAKINAVGVVGLVENMPGGNAQRPGDIVKSYSGKTIEVLNTDAEGRLVLADALTFTEKKFKPNFIVDLATLTGAIIVCLGSEYAGLFSNDDKLSNQIFKAGEKVGEKVWRLPLHKNYDKLMDSKNADMQNINYVG

SEQ ID NO: 139586 - protein, 275 aa, Unknown
  Bacterial polypetide isolated from the Sargasso Sea
RLGCNALIGVGQGSIRGSYLVTIEWNGKKSKSKPLAFVGKGVCFDTGGISLKPARFMEDMTYDMAGSAVVVGLMKNFALRKAKINAVGVVGLVENMPGGNAQRPGDIVKSYSGKTIEVLNTDAEGRLVLADAITFTEKKFKPNLIIDLATLTGAIIVCLGSEYAGLFSNDDKLSKQIFEAGKKVDEKVWRLPLHKNFDKLMDSKTADIQNINYVGGAGSITAAQFLQRFIINKTPWAHLDIAGMAFSKYAGALNPGGATGFGVRLLNKFVEDNYE

SEQ ID NO: 139587 - protein, 302 aa, Unknown
  Bacterial polypetide isolated from the Sargasso Sea
KAIELGVNYTKDLVSEPGNILHPDEYAKRLTQLKKIGLKVSVYNEKQLKKMGCNALVGVGQGSIRGSYLVTLEWRGKKSNSKPLAFVGKGVCFDTGGISLKPARFMEDMTYDMAGSAVVVGLMKNLALRKSKVNAVGVVGLVENMPGGNAQRPGDIVKSYSGKTIEVLNTDAEGRLVLADAITFTEKKFKPSLIVDLATLTGAIVVALGSEYAGLFSNNDNLSKQIHEAGEKVEEKAWRLPLHSNYDKLMNSKNADMQNINYVGGAGSTTAAQFLQRFILNKTPWAHLDIAGMAFSKICWRS

SEQ ID NO: 139588 - protein, 294 aa, Unknown
  Bacterial polypetide isolated from the Sargasso Sea
MHGITLKSYSFEKYKTKKNKSTIRIFVDGKNIPSIKHQIKFKSIENGTFYARDLVSEPGNILHPDEYAKRLSLLRKEGLSINIYDEKKLKKLGMNTLLGVGQGSIRGSYLVTMEWKGLNDKSKPLAFVGKGVCFDTGGISLKPAKFMEDMTYDMAGSAVVVGLMKSLAQRKAKINAVGVVGLVENMPGGNAQRPGDIVKSYSGKTVEILNTDAEGRLVLADALTYTEEKYKPKFIVDLATLTGAIIISLGSEYAGLFSNDDKLSNQLIEAGEKVGEKVWRMPLNKNFDKLIDSK

SEQ ID NO: 139589 - protein, 206 aa, Unknown
  Bacterial polypetide isolated from the Sargasso Sea
VVGLMKSLALRKAKINAVGVVGLVENMVSGVAQRPGDIVKSYSGKTIEVLNTDAEGRLVLADALSFTEKKFKPKFIIDLATLTGAIIVSLGSEYAGLFSNDDKLSKQILDAGEKVEEKLWRMPLHKNYDKLMNSKNADMQNINYVGGAGSTTAAQFLQRFILNKTPWAHLDIAGMAFSKYGGALNSGGATGFGVRLLNQLIEENYE

SEQ ID NO: 139590 - protein, 297 aa, Unknown
  Bacterial polypetide isolated from the Sargasso Sea
ILHPDEYAKRIAKLRKIGLKVTIYDQKRLKKLGFNALLGVGQGSIRGSYMVTIEWNGNKNKSKPLAFVGKGVCFDTGGISLKPAKFMEDMTYDMAGSATVVGLMKTLALRKSKINAVGVVGLVENMPGANAQRPGDIVKSYSGQTIEVLNTDAEGRLVLADALTYTEEKFKPSIIIDLATLTGAIIVALGSEYAGLWSNNKKLSKQLFDAGEQVEEKVWEMPLHENYNKLMNSNNADMQNINYVGGAGSTTAAQFLQRFIINKTPWAHLDIAGMAFSKYADALNSGGATGYGVRLLN

SEQ ID NO: 139591 - protein, 272 aa, Unknown
  Bacterial polypetide isolated from the Sargasso Sea
AVKNAVIYADTSHLFKDDNFLFDLAKTAEKVSYRYTDTNPNTKKELILKNVSLAVENATAAQKRVVELGYNVGSGANTARNLGDRPANHATPAYIAKAVKGLAKDIGGFSVEILEEKDMKKLGMGCLLSVSRGSIEPAKLVTMQYKGGKKGAKPIVLVGKGVTFDTGGISLKPPQKMDEMKWDMSGAGSVIGTMCAVAKSKLPVNLVCTVALSENMPGSKATKPGDVVTSMSGQTVEILNTDAEGRLVLSDALTYVGKYDPKVVINTATLTG

SEQ ID NO: 139592 - protein, 249 aa, Unknown
  Bacterial polypetide isolated from the Sargasso Sea
GVKNNSKPLAFVGKGVCFDTGGYSLKPAKFMEDMTYDMAGSATVVGLMKNFALRKAKINAVGVVGLVENMVSGNAQRPGDIVKSYSGKTIEVLNTDAEGRLVLADALTFTERKFKPKFMVDLATLTGAIIVSLGSEYAGLFSNDDQLSKQLIEAGEKVNEKLWRMPLHKNFDKLIDSKNADMQNINYVGGAGSTTAAQFLQRFILKKTPWAHLDIAGMAFSKYGGALNSGGATGYGVRLLNQLTEDNYE

SEQ ID NO: 139593 - protein, 205 aa, Unknown
  Bacterial polypetide isolated from the Sargasso Sea
CWSDENLAIRKAKINAVVVVGLVENMPGGNAQRPGDIVKSYSGKTIEILNTDAEGRLVLADALTFTEKKYKPQFIIDLATLTGAIIVSLGSEYAGLFSNNDKLSKQIFDSGEKVGEKVWRMPLHKNYDKLIDSKNADVQNINYVGGAGSTTAAQFLQRFILNKTPWAHLDIAGMAFSKYGGALNSGGATGFGVRLLNKLIEDNYE

SEQ ID NO: 139594 - protein, 288 aa, Unknown
  Bacterial polypetide isolated from the Sargasso Sea
ATLKSYSFEIYKTKKNVKKFININIVGKSKKSILKTKLDALTAGVFLTRDLVSEPGNILHPDEYAKRIGQLRKIGIKVTVYDKKKLKKMGCGALLGVGQGSVRGSYLVVMEWKGGSSKSKPLAFVGKGVCFDTGGISLKPAKFMEDMTYDMAGSAVVVGLMKNFALRKAKINAVGVVGLVENMPGGNAQRPGDIVKSYSGKTIEVLNTDAEGRLVLADALTFTEEKFKPNLIIDLATLTGAIIVSLGSEYAGLFSNNDKLSKQLYEAGEQVEEKVWRMPLHKNYDKLI

SEQ ID NO: 139595 - protein, 289 aa, Unknown
  Bacterial polypetide isolated from the Sargasso Sea
NSLKKDGLKVNIYDEKKLKKLGMHALIGVGQGSIRGSYLVTMEWNGAKNNSKPLAFVGKGVCFDTGGYSLKPAKFMEDMTYDMAGSATVVGLMKNLALRKAKINAVGVVGLVENMVSGNAQRPGDIVKSYSGKTIEILNTDAEGRLVLADALTFTEKKFRPKFIIDLATLTGAIIVCLGSEYAGLFSNDDKLAKQIFNAGEKVEEKVWRMPLHKNYDKLMNSKNADVQNINYVGGAGSTTAAQFLQRFILNKTPWAHLDIAGMAFSKYGGALNPGGATGFGVRLLNQLS

SEQ ID NO: 139596 - protein, 263 aa, Unknown
  Bacterial polypetide isolated from the Sargasso Sea
TVFSKNEIKFKGFGGVTAVGQGSKNEPRFIILEYRNGKKEQKPILLVGKAVTFDTGGISLKPGEKMDEMKFDKCGGCTVLGVMKAISELKLPINVVAIVPSVENMPDGESFRPGDIIKLFNGKTAEILNTDAEGRLILADGLGYGIKHYQPSAVMDFATLTGACIVALGTNVAGIVSNNSKLSSKVKSASERTSEEVWELPLNDDYMDMVKSKVADIKNLGIGRAAGTITAAAFLANSVGSVPWVHFDIAGTAWIQPSTKSKS

SEQ ID NO: 139597 - protein, 246 aa, Unknown
  Bacterial polypetide isolated from the Sargasso Sea
AFIGKGVTFDSGGISIKPSSGMEEMKWDMGGAGTVVGLMCALAGRKAKVNAIGAVGLVENMPSATAQRPGDVVKALSGKTIEVINTDAEGRLVLADVLWYVQNRFKPSAMIDLATLTGAMIVALGHNYAGLFSNNDELSERLTDAGEATGERVWRMPLHESYEPDIKSQIADIKNVGAGRSAGSITAALFLQHFVNDVPWAHLDIAGMAWCYKATPTVPKGGSGYGVRLLDRLVADHYEAGSPRQK

SEQ ID NO: 139598 - protein, 224 aa, Unknown
  Bacterial polypetide isolated from the Sargasso Sea
GLSLKPAKSMEDMKWDMGGAATVTGIMEVAALSKLKHNLIGVIGLVENMPDGNAQRPGDVVKSYSGQTIEVLNTDAEGRLVLADILSWTEKKYKPKFMINFATLTGAMIVALGNIRAGLFSNNKEISEAIFKSGEITGEKVWVMPLDDEYDQLIKTEIADMKNIGGPGAGSITAGCFLKRHVEKTPWAHLDIAGVTWQNKSTPSIPSGGVGWGVRMLHHLINQY

SEQ ID NO: 139599 - protein, 288 aa, Unknown
  Bacterial polypetide isolated from the Sargasso Sea
ELIKGYLLRRYEFSTYKAIDGKCMGSVTMTSKHPKDFGKSLSEIKAIVDGVFFTRNLINEPANILNTVEFSVRLKELSALGIEVEILEEKKLAELGMNALLGVGQGSANPSRVVVMSWKGLSENTKPLALVGKGVVFDTGGISLKPAGGMEDMTMDMGGAGVVAGTMLSLAKRKAKANVVGLVGLVENMPSSNAQRPGDIVKSMKGDTIEVINTDAEGRLVLSDLLWYTQERFKPSGIIDLATLTGAIIVALGYENAGVFSNDDDFCNSFLKVANQENEGAWRMPLGA

SEQ ID NO: 139600 - protein, 284 aa, Unknown
  Bacterial polypetide isolated from the Sargasso Sea
NKYFIEEFFHGTQLKSYEFLKYKTKKESEIFKLSVSCNSNFLTNNNNKKLDSLLQGTIFTKDLVSEPGNVLHPDEYAKRLIQLKKIGLKVRVYNNKELKKLGMNALLGVGQGSIRGSYLVTMEWNGSKSKNKPLAFVGKGVCFDTGGISLKPAKFMEDMTYDMAGSAVVVGLMKNLALRNAKVNAVGVVGLVENMPGGNAQRPGDIVKSYSGKTIEVLNTDAEGRLVLADALTYTEEKFKPQFIIDLATLTGAIIVSLGSEYAGLFSNNDKLSKQLFDSGEKVG

SEQ ID NO: 139601 - protein, 212 aa, Unknown
  Bacterial polypetide isolated from the Sargasso Sea
MAGSAAVVGLMKTLALRKANVNAVGVVGLVENMVSGNAQRPGDIVKSYSGKTIEVLNTDAEGRLVLADALTFTEKKFKPKFIVDLATLTGAIIVSLGSEYGGLFSNDDKLSNQLIDAGNKVDEKLWRMPLHKNFDKLINSKNADMQNINYVGGAGSTTAAQFLQRFILNKTPWAHLDIAGMAFSKYGGALNSGGATGYGVRLLNKLVEDYYE

SEQ ID NO: 139602 - protein, 165 aa, Unknown
  Bacterial polypetide isolated from the Sargasso Sea
YSGKTVEILNTDAEGRLVLADALTYTEEKFKPKFIVDLATLTGAIIVSLGSEYAGLFSNDDKLSNQLINAGENVEEKVWRMPLNKNFDKLIDSKNADMQNINYVGGAGSTTAAQFLQRFILNKTPWAHLDIAGMAFSKYGGALNSGGATGYGVRLLNKLIEDNYE

SEQ ID NO: 139603 - protein, 208 aa, Unknown
  Bacterial polypetide isolated from the Sargasso Sea
ATVVGLMKTLALRKAKINAVGVVGLVENMPGANAQRPGDIVKSYSGQTIEVLNTDAEGRLVLADALTYTEEKFKPSLIIDLATLTGAIIVALGSEYAGLWSNNKKLSKQLFDAGEQVEEKVWEMPLHENYNKLMNSNNADMQNINYVGGAGSTTAAQFLQRFIINKTPWAHLDIAGMAFSKYAGALNSGGATGYGVRLLNKFIEENYE

SEQ ID NO: 139604 - protein, 231 aa, Unknown
  Bacterial polypetide isolated from the Sargasso Sea
NKSRPLAFVGKGVCFDTGGISLKPAKFMEDMTYDMAGSAVVVGLLKNLAIRKAKINAVGVVGLVENMPDGNAQRPGDIVKSYSGKTIEILNTDAEGRLVLADALTYTEKKYKPKFIVDLATLTGAIIVSLGSEYAGLFSNDDKLSNQLSKAGEKVGEKVWRMPLNDNYDKLINSKKADMQNINYVGGAGSTTAAQFLQRFILNKTPWAHLDIAGMAFSKYGGALNSGGATG

SEQ ID NO: 139605 - protein, 168 aa, Unknown
  Bacterial polypetide isolated from the Sargasso Sea
LNHTVGKTIEVLNTDAEGRLVLADALTFTEKKFKPKLMIDLATLTGAIIVSLGSEYAGLFSNDDKLSKQIFVAGGKVGEKVWRLPLHKNYDKLMDSKTADMQNINYVGGAGSTTAAQFLQRFIINKTPWAHLDIAGMAFSKYGGALNPSGATGYGVRLLNKFVEDNYE

SEQ ID NO: 139606 - protein, 305 aa, Unknown
  Bacterial polypetide isolated from the Sargasso Sea
IGRFLHGLKLKSYEFNLYKSKKKENIFKITLIGKQSALSLKNKLKFKALEEGTFFTRDLVSEPGNILHPDEYAKRLLKLKKYGLKVTVYDQKKLKKLGLNALLGVGQGSIRGSYLVTVEWKGSKSKSKPLAFVGKGVCFDTGGYSLKPARFMEDMTYDMAGSAAVVGLMKTLALRKAKINAVGVVGLVENMVSGNAQRPGDIVKSYSGKTIEVLNTDAEGRLVLADALTFTEKKFKPELMVDLATLTGAIIVSLGSEYAGLFSNDDKLSKQLLDAGERVDEKLWRMPLHKNFDKLMDSKNADMQN

SEQ ID NO: 139607 - protein, 289 aa, Unknown
  Bacterial polypetide isolated from the Sargasso Sea
YGLKVTVYDQKKLKKLGCNALLGVGQGSIRGSYLVTIEWKGNKSKSKPLAFVGKGVCFDTGGYSLKPARFMEDMTYDMAGSAAVVGLMKTLALRKAKINAVGTVGLVENMVSGNAQRPGDIVKSYSGKTIEVLNTDAEGRLVLADALTFTEKKFKPKLMVDLATLTGAIIVSLGSEYAGLFSNDDKLSKQLFEAGEKVDEKLWRMPLHKNFDKLMDSKNADMQNINYVGGAGSTTAAQFLQRFIINKTPWAHLDIAGMAFSKYGGALNSGGATGYGVRLLNKFVEDNYE

SEQ ID NO: 139608 - protein, 247 aa, Unknown
  Bacterial polypetide isolated from the Sargasso Sea
KDKTKPLAFVGKGVCFDTGGISLKPAKFMEDMTYDMAGSAVVVGLMKSLAIRKAKINAVGVVGLVENMPGGNAQRPGDIVKSYSGKTVEILNTDAEGRLVLADALTYTEEKFKPKFIVDLATLTGAIIVSLGSEYAGLFSNDDKLSSQLIKAGEFVEEKVWRMPLNKNYDKLINSKNADMQNINYVGGAGSTTAAQFLQRFILNKTPWAHLDIAGMAFSKYGGALNSGGATGYGVRLLNKLIEDHYE

SEQ ID NO: 139609 - protein, 265 aa, Unknown
  Bacterial polypetide isolated from the Sargasso Sea
WSGSIRGSYLVTMEWIGDKSKSKPVAFVGKGVCFDTGGISLKPAKFMEDMTYDMAGSAVVAGLMKNFALRKAKINAVGIVGLVENMPGGNAQRPGDIVKSYSGKTIEVLNTDAEGRLVLADALTFTERKYKPRFIIDLATLTGAIIVALGSEHAGLFSNNNKLSNQLYETGVKVDEKVWRMPLNKNYDKLMDSKNADMQNINYVGGASSITAAQFLQRFILNNTPWVHLDIAGMAFSKYAGALNSGGATGFGVRLLNKLVEDYYE

SEQ ID NO: 139610 - protein, 224 aa, Unknown
  Bacterial polypetide isolated from the Sargasso Sea
NGMEEMITDMSGSAVVVGSIMNAALNKSSKSLIGIIGLVENMPDANAQRPGDIIKSLSSQTIEIFNTDAEGRLVLADILTYIQKKYIAKEIIDFATLTGAIMIALGVHRAGLFSNNDKLAKKLENAGENSGEKLWRLPLGKEYDEEINSFRADMKNIGSSRFGGSTHAAQFIKRFINNDTPWAHLDIAGVSWTLKGGNNSFSKLHAPGATAFGIRLIDQFLKGR

SEQ ID NO: 139611 - protein, 291 aa, Unknown
  Bacterial polypetide isolated from the Sargasso Sea
NVMTPPKIAEYAKSLGEYGVDVKVLGEKEMKKLGMGSLLGVGQGSIHESQLVIMKWNGSRNKKKKPIAFIGKGVSFDTGGVSLKPSNGMEEMKYDMGGSGVVIGLMKALALRKAKANVIGVVGLVENHIGSKAQRPSDVVKSYSGQTIEVLNTDAEGRLVLADALWYTQEQYKPELMVDLATLTGAIIVALGDEYAGLFSNSDKVSKQLAEAGDIEGEKLWRLPLNERYDKMLNSPIADMQNITNGRGPGSITAAQFLQRFVNKVPWAHLDIAGTTWTKQPLPTSPKGATA

SEQ ID NO: 139612 - protein, 180 aa, Unknown
  Bacterial polypetide isolated from the Sargasso Sea
MPGGNAQRPGDIVKSYSGKTVEILNTDAEGRLVLADALTYTEEKYKPKFIVDLATLTGAIIVSLGSEYAGLFSNDNKLSNQLIDVGEKTEEKVWRMPLNKNFDKLIDSKNADMQNINYVGGAGSTTAAQFLQRFILNKTPWAHLDIAGMAFSKYGGALNSGGSTGYGVRLLNKLVEDYYE

SEQ ID NO: 139613 - protein, 279 aa, Unknown
  Bacterial polypetide isolated from the Sargasso Sea
RYDLLLLPPSFPYGGMENPCLTFVTPTLLAGDRSQAHVVAHEIAHSWSGNLVTNKTWEHFWLNEGFTVFIERKIMNKMYGKSVFDFNAIGGLMELKETVARLGTNHPHTVLKPELAGGVDPDDVFSKVPYEKGFAFLVYLEHMTRGDGGGPEHADAANGTPEFAEFLIEHFQRHKYATVESDDFKATYTARFPEASAQVDWDAWLTKPGTPPVNIGQYYDGGSSEASAELARKWHLCDVLGMGGEGTRPEGASADDIKNFSSMQVDHFLLSLMSTAAVR

SEQ ID NO: 139614 - protein, 164 aa, Unknown
  Bacterial polypetide isolated from the Sargasso Sea
SGKTIEVLNTDAEGRLVLADALTFTEKKFKPKFMIDLATLTGAIIVSLGSEYAGLFSNDDKLSKQLLEAGERVDEKLWRMPLHKNFDKLMNSKNADMQNINYVGGAGSTTAAQFLQRFIINKTPWAHLDIAGMAFSKYAGALNSGGATGYGVRLLNKFVEDNYE

SEQ ID NO: 139615 - protein, 262 aa, Unknown
  Bacterial polypetide isolated from the Sargasso Sea
SIRGSYMVTIEWNGNKNKSKPLAFVGKGVCFDTGGISLKPAKFMEDMTYDMAGSATVVGLMKTLALRRSKINAVGVVGLVENMPGSNAQRPGDIVKSYSGQTIEVLNTDAEGRLVLADALTYTEQKFKPSLIVDLATLTGAIIVALGSEYAGLWSNNKKLSKQLFDAGEKVEEKVWEMPLHENYNKLMNSNNADMQNINYVGGAGSTTAAQFLQRFIINKTPWAHLDIAGMAFSKYAGALNSGGATEYGVRLLNKFIEENYE

SEQ ID NO: 139616 - protein, 157 aa, Unknown
  Bacterial polypetide isolated from the Sargasso Sea
LNTDAEGRLVLADALTFTEKKFKPKFMVDLATLTGAIIVSLGSEYAGLFSNDDKLSKQLLEAGKKVDEKLWRMPLHKNFDKLINSKNADMQNINYVGGAGSTTAAQFLQRFIINKTPWAHLDIAGMAFSKYAGALNSGGATGYGVRLLNKFVEDNYE

SEQ ID NO: 139617 - protein, 199 aa, Unknown
  Bacterial polypetide isolated from the Sargasso Sea
MKYDMAGAGTVVGLMKTLAVRKAKVNAVGIIGLVENMPDGNAQRPGDVVKSYSGKSIEIFNTDAEGRLVLADILTYTEKRFKPKFIINLATLTGAIIVSLGNEYAGLFSNNNQLAERINKVSYIDNEKAWRLPLNKNFDKLIDSQIADVQNINYSGGAGSITAAQFLQRFILNKTPWAHLDIAGMAWNKKVTKTIPVGA

SEQ ID NO: 139618 - protein, 265 aa, Unknown
  Bacterial polypetide isolated from the Sargasso Sea
IILQVQKYFSKRDTKKTSIKTKIKIYSSQFSRLEKNYETVKAIHEGVTMTRNLVTEPPNVMTPPELAKNAASLEKIGVKVTILGEKEMSKLGMGSLLSVGRGSEHESKLAIMEWKGHKNKKKKPIAFIGKGVSFDTGGVSLKPAGGMEEMKYDMGGSGVVIGLMKTLALRKAKANVVGVVGLVENHIGNMATRPSDVVKSYSGQTIEVLNTDAEGRLVLADALWYTQEKYKPELMVDLATLTGAIIIAIGNEYAGLFSNNDKLSK

SEQ ID NO: 139619 - protein, 185 aa, Unknown
  Bacterial polypetide isolated from the Sargasso Sea
GLVENMVSGVAQRPGDIVKSYSGKTIEVLNTDAEGRLVLADALTFTEKKFKPKFIVDLATLTGAIIVSLGSEYAGLFSNDDKLSKQILDAGEKVEEKLWRMPLHKNYDKLMNSKNADMQNINYVGGAGSTTAAQFLQRFILNKTPWAHLDIAGMAFSKYGGALNSGGATGFGVRLLNQLIEENYE

SEQ ID NO: 139620 - protein, 270 aa, Unknown
  Bacterial polypetide isolated from the Sargasso Sea
ALLGVGQGSIRGSYLVTMEWRGAKNNSRPLAFVGKGVCFDTGGYSLKPARFMEDMTYDMAGSATVVGLMKSLALRKAKVNAVGVVGLVENMVSGNAQRPGDIVKSYSGKTIEVLNTDAEGRLVLADALTFTEKKYKPKFIIDLATLTGAIIVCLGSEYAGLFSNDDKLSKQISNAGEKVEEKVWRMPLHKNYDKLMNSKNADMQNINYVGGAGSTTAAQFLQRFILNKTPWAHLDIAGMAFSKYGGALNSGGATGFGVRLLNQLIEENYE

SEQ ID NO: 139621 - protein, 228 aa, Unknown
  Bacterial polypetide isolated from the Sargasso Sea
GYSLKPAKFMEDMTYDMAGSATVVGLLISLALRKAKVNAVGVVGLVENMVSGNAQRPGDIVKSYSGKTIEILNTDAEGRLVLADALTFTEKKFKPKFMIDLATLTGAIIVSLGSEYAGLFSNDDKLSKQLIESGEKVEEKLWRMPLHKNYDKLIDSKNADMQNINYVGGAGSTTAAQFLQRFVLNKTPWAHLDIAGMAFSKYGGALNSGGATGYGVRLLSQLIEDNYE

SEQ ID NO: 139622 - protein, 282 aa, Unknown
  Bacterial polypetide isolated from the Sargasso Sea
MHGFKLKSYNFDKYKTKKNKNNISINVFGKNIPSSKDQNKFKAIEEGTFYTRDLVSEPGNILHPDEYAKRLKSLTKFGLKITVYDEKKLKKLGMNTLLGVGQGSIRGSYLVTMEWKGLKDNSKPLAFVGKGVCFDTGGISLKPAKFMEDMTYDMAGSAVVVGLMKSLALRKAKVNAVGVVGLVENMPGGNAQRPGDIVKSYSGKTVEILNTDAEGRLVLADALTYTEEKFKPKFIVDLATLTGAIIVSLGSEYAGLFSNDDKLSKELIKAGEKVEEKYGECL

SEQ ID NO: 139623 - protein, 245 aa, Unknown
  Bacterial polypetide isolated from the Sargasso Sea
KSKPLAFVGKGVCFDTGGISLKPAKFMEDMTYDMAGSAVVAGLMKNFALRKAKINAVGVVGLVENMPGGNAQRPGDIVKSYSGKTIEILNTDAEGRLVLADALTFTEKKFKPQIIIDLATLTGAIIVALGSEHAGLFSNDDKLSDKLYNAGIQVDEKVWRLPLNKNYDKLMNSKNADMQNINYVGGASSITAAQFLQRFILNNTPWAHLDIAGMAFSKYGGALNSSGATGYGVRLLNKLVEDNYE

SEQ ID NO: 139624 - protein, 61 aa, Unknown
  Bacterial polypetide isolated from the Sargasso Sea
PQLTAPLKKGQVVGTIDFQLNGKSIEQRPLVVMDAVEEGGFFSRMWDVVLMKFHQWFGNWF

SEQ ID NO: 139625 - protein, 230 aa, Unknown
  Bacterial polypetide isolated from the Sargasso Sea
MIVGGISIKPASKMDEMKYDMCGAGVVIGVMKIISILKPKMNIVGIVPSTENMSGDKAYRPGDILTAYNGKTIEVLNTDAEGRLILADALSYASEHYDPEFILDFATLTGAVVVALGHVATGIMGTDDSLIEKIKFSSTITGEKVWEFPLWEEYLDQVKSTIADVKNLGAPGQAGSIAGGAFLHSFVRENIPWCHFDIAGSAWGNKNLPYQNKGLATGEMIRLVVDLLEI

SEQ ID NO: 139626 - protein, 272 aa, Unknown
  Bacterial polypetide isolated from the Sargasso Sea
MNALLGVGQGSIRGSYLVTMEWRGTSSKKKPLAFVGKGVCFDTGGISLKPAKFMEDMTYDMAGSAVVVGLMKSLALRKAKINAIGVVGLVENMPGGNAQRPGDIVKSYSGKTIEVLNTDAEGRLVLADALTFTEEKYKPEFIVDLATLTGAIIVSLGSEFAGLFSNSDKLSKQLFDAGQKVGERVWRMPLDKNYDKLINSKNADMQNINYVGGAGSTTAAQFLQRFILNKTPWAHLDIAGMAFSKYGGALNSEGATGFGVRLLNQLIEDYYE

SEQ ID NO: 139627 - protein, 204 aa, Unknown
  Bacterial polypetide isolated from the Sargasso Sea
GAGTVFGVMCSLQKAKADTNVIGIMACAENMPSAKATKPGDVVTSMSGQTIEVLNTDAEGRLVLADALTYVERYKPSYVIDMATLTGAVVIALGSHASGVMANNQFLADKIIESGEETGDRAWQLPLWNEYMSCTRTNFADLANIGGGREAGTIHAAAFLSKFAKNYKWAHMDIAASAWSSSPKGGTGRPVSLICNLILNKKLK

SEQ ID NO: 139628 - protein, 180 aa, Unknown
  Bacterial polypetide isolated from the Sargasso Sea
MVSGNAQRPGDIVKSYSGKTIEVLNTDAEGRLVLADALTFTEKKFKPKFMVDLATLTGAIIVSLGSEYAGLFSNNDKLSKQLLEAGEKVEEKLWRMPLNKNFDKLINSKNADMQNINYVGGAGSTTAAQFLQRFILNNTPWAHLDIAGMAFSKYGGALNSGGATGYGVRLLNQLIEDNYE

SEQ ID NO: 139629 - protein, 174 aa, Unknown
  Bacterial polypetide isolated from the Sargasso Sea
MPAGNATKPGDVVTSMSGQTIEVLNTDAEGRLVLCDVLTYIEKFDPKVVIDTATLTGAVVVALGSVAAGVMGNDQKLVDKILEAGHASGEKAWQLPLWDEYQSYLDSNFADIANIAPGRAAGTIEGGCFISRFTENYKWAHIDIAGVADIGDGPKKGSTGKPVGLLFEFVNSNK

SEQ ID NO: 139630 - protein, 285 aa, Unknown
  Bacterial polypetide isolated from the Sargasso Sea
GLKVTVLDEKELKKQKMGALLGVAQGSANKPYVVTLEWKGNKSSNFDFSFVGKGVTFDTGGISIKPSSGMEEMKYDMGGSAVVLGLMKSLALGKSKVNVSAAIGLVENMPSGTAQRPGDVVKSMSGQTIEVINTDAEGRLVLADVVWYAQKKFKPKKLIDLATLTGAIIVSIGQEKAGMFSNDDKLAVEIEESGKKIGEPVWNMPIDETYERDIKSDIADMKNVGSGRGAGSTAGAIFIKRFIKNVSWVHLDIAGVTWAKQDKPLIPKGGTGYGVRLLEHLVNGD

SEQ ID NO: 139631 - protein, 280 aa, Unknown
  Bacterial polypetide isolated from the Sargasso Sea
LVSEPGNILHPDEYAQRLLDLKKFGLKINILDEKKLKKLGMNTLLGVGQGSIRGSYLVTMEWNGAKNKFKPLAFVGKGVCFDTGGISLKPAKFMEDMTYDMAGSAVVVGLMKSLAIRKAKINAVGVVGLVENMPGGNAQRPGDIVKSYSGKTVEILNTDAEGRLVLADALTYTEEKYKPQIIVDLATLTGAIIVSLGSEYAGLFSNDDKLSKQLIKAGEYVDEKVWRMPLNKNFDKLIDSKNADMQNINYVGGAGSTTAAQFLQRFILNKTPWAHLDIAG

SEQ ID NO: 139632 - protein, 193 aa, Unknown
  Bacterial polypetide isolated from the Sargasso Sea
KINAVGVVGLVENMVSGNAQRPGDIVKSYSGKTIEILNTDAEGRLVLADALTFTEKKFKPRFIVDLATLTGAIIVSLGSEYAGLFSNDDKLSKEIFNAGEKVEEKVWRMPLHKNYDKLMNSKNADVQNINYVGGAGSTTAAQFLQRFILNKTPWAHLDIAGMAFSKYGGALNSGGATGFGVRLLNQLVEENYE

SEQ ID NO: 139633 - protein, 294 aa, Unknown
  Bacterial polypetide isolated from the Sargasso Sea
NSLKKVGLKINIYDEKKLKKLRMNTLLGVGQGSIRGSYLVTMEWKGKKDNSKPVAFVGKGVCFDTGGISLKPAKFMEDMTYDMAGSATVVGLMKSLALRKAKVNAVGVVGLVENMPGGNAQRPGDIVKSYSGKTVEILNTDAEGRLVLADALTYTEEKYKPKFIVDLATLTGAIIVSLGSEYAGLFSNDDKLSNQLIDVGEKTEEKVWRMPLNKNFDKLIDSKNADMQNINYVGGAGSTTAAQFLQRFILNKTPWAHLDIAGMAFSKYGGALNSGGATGYGVRLLNKLVEDYYE

SEQ ID NO: 139634 - protein, 279 aa, Unknown
  Bacterial polypetide isolated from the Sargasso Sea
KKMKSLGMNALLGVAQGSVRPGRVMIMKWNGNTKSKEKPISFIGKGVTFDTGGISIKPSGGMEDMKWDMGGAGVVAGLMYTLALRKSKANVIGAVGLVENMPDGNAQRPGDVVKSMSGQTIEVLNTDAEGRLVLADVLWYVKEKFKPKLMIDLATLTGAIIVALGERYAGLFSNDNSLVKKILNSSERTNELVWQLPLDEKFDKLLDCQIADMKNITGTRGAGSITAAQFLKRFVGNTSWAHLDIAGVTWSKKGTEFSRPGGTGFGVRLLDDFVRTNYE

SEQ ID NO: 139635 - protein, 230 aa, Unknown
  Bacterial polypetide isolated from the Sargasso Sea
MHGLRLKSYSFEKYKSKKNEKNTSIIVFGKNVPSIKDQIKFKAIEQGTFYTRDLVSEPGNVLHPDEYAKRLGLLKKDGLKINIYDEKKLKKLGMNTLLGVGQGSIRGSYLVTMEWKGLKDNSKPLAFVGKGVCFDTGGISLKPAKFMEDMTYDMAGSAVVVGLMKILALRKAKVNAVGVVGLVENMPGGNAQRPGDIVKSYSGKTVEILNTDAEGRLVLADALTYTEEKL

SEQ ID NO: 139636 - protein, 243 aa, Unknown
  Bacterial polypetide isolated from the Sargasso Sea
KPLGFVGKGVCFDTGGISLKPARFMEDMTYDMAGSAVVVGLMKNFAIRKAKINAVGVVGLVENMPGGNAQRPGDIVKSYSGKTIEVLNTDAEGRLVLADALTFTEKKFKPELIVDLATLTGAIIVCLGSEYAGLFSNNDKLSKQIFEAGEKVDEKVWRLPLHKNYDKLMDSKTADIQNINYVGGAGSTTAAQFLQRFIINKTPWAHLDIAGMAFSKMAGNLNPGGATGYGVRLLNQFVEDNYE

SEQ ID NO: 139637 - protein, 256 aa, Unknown
  Bacterial polypetide isolated from the Sargasso Sea
MGQSAEGRWLKLNHSFGDKSPTHGQALRIEFPSQFPKVRIYYHTSPQASGLQWLTKEQTSEKQQPFMYSQSQSIHARSWIPLQDTPAVRLNYQARIHTPKELLAVMGADNSANTDKDGDYFFRMPQAIPAYLIALAIGDLEFKAMSERTGVYAEKVWLDKAVAEFSDTEQMMQVASAMYGDYPWGRYDLLILPASFPFGGMENPRLSFITPTVIAGDKSLVSLIAHELAHSWSGNLVTNGSWHELWLNEGFTNYVE

SEQ ID NO: 139638 - protein, 261 aa, Unknown
  Bacterial polypetide isolated from the Sargasso Sea
MRLKSYKFEKYKTKKNKKDIIVNVCGKNIPSLKDQLKFKAIEEGSFYTRDLVSEPGNVLHPDEYAKRLNSLRKIGLKINIFDEKKLKKLGMNTLLGVGQGSIRGSYLVTMEWNGLKDKSKPLAFVGKGVCFDTGGISLKPAKFMEDMTYDMAGSAVVVGLMKSLALRKAKINAVGVVGLVENMPGGNALRPGDILKSYSGKTVEVLNTDAEGRLVLADALTYTEQKFKPKFIVDLATLTGAIIVALGSEYAGLFSNDDKLS

SEQ ID NO: 139639 - protein, 242 aa, Unknown
  Bacterial polypetide isolated from the Sargasso Sea
LKSKPGKDFIGRFVHGLKLKSYEFNIYKSKKIKNILTISLIGKQSTLALKNKLKFKALEEGTFFTRDLVSEPGNILHPDEYANRLKKLKKYGLKVTVYDQKKLKKLGCNALLGVGQGSIRGSYLVTIEWKGNKSKSKPLAFVGKGVCFDTGGYSLKPARFMEDMTYDMAGSAAVVGLMKTLALRKSKINAVGVVGLVENMVSGNAQRPGDIVKSYSGKTIEVLNTDAEGRLVLADALTFTEK

SEQ ID NO: 139640 - protein, 156 aa, Unknown
  Bacterial polypetide isolated from the Sargasso Sea
NTDAEGRLVLADALTYTEKKYNPKFIIDLATLTGAIIVSLGSEYAGLFSNNDKLSKQIFDAGESVEEKVWRMPLHENYNKLMNSKNADMQNINYVGGAGSTTAAQFLQRFIINKTPWAHLDIAGMAFSKYGGALNSGGATGFGVRLLNELIKKNYE

SEQ ID NO: 139641 - protein, 296 aa, Unknown
  Bacterial polypetide isolated from the Sargasso Sea
RVKGAAVARSEFAPLERIVEGVFFTRDLVSEPPNVLYPKSFATEVKALTKLGIKVEVLGEKQMAKLGMGSLLGVGQGSVRESQIAIMRWDGGAKSQKPVAFIGKGVTFDTGGISLKPGPGMQDMKWDMGGAGAVSGVMKALAGRKAKVNVVGLIGLVENMPDGNAQRPGDIVTSMSGQTIEIHNTDAEGRLVLADVMWYAQERFKPQCMIDLATLTGAIIISLGHEHAGMFSNDDALSEQLTAAGLVTGEKVWRMPLGDAYDKKINTDGADMKNVGGRDAGSITAAQFLQRFVKKV

SEQ ID NO: 139642 - protein, 287 aa, Unknown
  Bacterial polypetide isolated from the Sargasso Sea
LKINIYDEKKLKKLGMNTLLGVGQGSIRGSYLATMEWKGLKSNTKPLAFVGKGVCFDTGGISLKPAKFMEDMTYDMAGSATVVGLMKSLALRKAKVNAVGVVGLVENMPGGNAQRPGDIVKSYSGKTVEILNTDAEGRLVLADAITYTEKKYKPKFIVDLATLTGAIIVSLGSEYAGLFSNDDKLSKQLIDVGEKTEEKVWRMPLNKNFDKLIDSKNADMQNINYVGGAGSTTAAQFLQRFILNKTPWAHLDIAGMAFSKYGGALNSGGATGYGVRLLNKLVEDYYE

SEQ ID NO: 139643 - protein, 215 aa, Unknown
  Bacterial polypetide isolated from the Sargasso Sea
FDKARLRRLRMRALLGVAQGSAHDPRVVVMRWNGAPRSNKKPIAFIGKGVTFDSGGISIKPSSGMEEMKWDMGGAGTVAGLMCALAGRKAKVNAIGAVGLVENMPSATAQRPGDVVKALSGKTIEVINTDAEGRLVLADVLWYVQNRFKPAAMIDLATLTGAMIVALGHNYAGLFSNNDELSERLAEAGEAIGERVWRMPMHESYEPDIKSQIAD

SEQ ID NO: 139644 - protein, 212 aa, Unknown
  Bacterial polypetide isolated from the Sargasso Sea
MAGSAVVVGLMKSLALRKAKINAVGVVGLVENMPGGNAQRPGDIVKSYSGKTVEILNTDAEGRLVLADALTYTEEKFKPKFIVDLATLTGAIIVSLGSEYAGLFSNDDKLSNQLINVGDSVEEKVWRMPLNKNFDKLIDSKNADMQNINYVGGAGSTTAAQFLQRFILNKTPWAHLDIAGMAFSKYGGALNSGGATGYGVRLLNKLIEDHYE

SEQ ID NO: 139645 - protein, 209 aa, Unknown
  Bacterial polypetide isolated from the Sargasso Sea
MSGGAAVIATMQAIAELEVRENVVGLIPASDNMPSGTATKPGDVISSLAGKTIEVINTDAEGRLILADALAWGARLKPAAMIDCATLTGSVIIALGHHAAAVMGNDNALVSELRDAGDAAGERCWPLPLWDEYRKQLDSNYADLQNIGGRPAGSITAGAFLKEFVGDVPWAHLDIAGTAWGDGNLSYQRKGGTGFPTRLLIEWVRRRAG

SEQ ID NO: 139646 - protein, 267 aa, Unknown
  Bacterial polypetide isolated from the Sargasso Sea
MEEGTFYTRDLVSEPGNVLHPDEYAKRLKSLKKHGLRINLYDDKKLKKLGMNALLGVGQGSVRGSYLVTIEWNGAKNNSKPLAFVGKGVCFDTGGYSLKPARFMEDMTYDMAGSATVVGLMKNLALRKAKVNVVGVVGLVENMVSGNAQRPGDIVKSYSGKTIEVLNTDAEGRLVLADALTFTEEKFKPKIIVDLATLTGAIIVSLGSEYAGLFSNNDKLSKQLIDAGNKVEEKLWRMPLHKNYDKLMNSKNADMQNINYVGGAGST

SEQ ID NO: 139647 - protein, 167 aa, Unknown
  Bacterial polypetide isolated from the Sargasso Sea
KSYSVKTVEILNTDAEGRLVLADALTYTEEKYKPKFIVDLATLTGAIIVSLGSEYAGLFSNDDKLSNQLIDVGEKTEEKVWRMPLNKNFDKLINSKNADMQNINYVGGAGSTTAAQFLQRFILNKTPWAHLDIAGMAFSKYGGALNSGGATGYGVRLLNKLVEDHYE

SEQ ID NO: 139648 - protein, 192 aa, Unknown
  Bacterial polypetide isolated from the Sargasso Sea
GLKVNIYDEKKLKKLGMNALLGVGMGSIRGSYLVTMEWNGAKNNSKPLAFVGKGVTFDTGGYSLKPARFMEDMTYDMAGSAAVVGLLKSLALRKAKVNAVGVVGLVENMVSDRAQRPGDIVRSYSGKTIEVLNTDAEGRLVLADALTFTEKKFKPKFIIDLATLTGAIIVCLGSEYAGLFSNDDKLSKQILN

SEQ ID NO: 139649 - protein, 302 aa, Unknown
  Bacterial polypetide isolated from the Sargasso Sea
NHATPSYIANAVKGLAKDIGGFSVEILEEKDMKKLGMGCLLSVSRGSIEPAKLVTMQYKGGKKGAKPIVLVGKGVTFDTGGISLKPPQKMDEMKWDMSGAGSVIGTMCAVAKSKLPVNLVCTVALSENMPGSKATKPGDVVTSMSGQTVEILNTDAEGRLVLSDALTYVGKYDPKVVINTATLTGAVVVALGSVAAGVMGNDQKLVDEILEAGQTTGEKAWQLPMWDEYQTYLDSNFADIANIAPGRAAGTIEGACFLSRFTKDYRWAHIDIAGVADIGQGKAKGSTGVPVGLLFEYVKSNF

SEQ ID NO: 139650 - protein, 298 aa, Unknown
  Bacterial polypetide isolated from the Sargasso Sea
NNPTTKKQLHFKAIEEGAFYARDLVSEPGNILHPDEYAKRLNSLKKDGLKINIYDKKKLKKLGMNALLGVGMGSIRGSYLVTMEWNGAKNKSKPLAFVGKGVTFDTGGYSLKPARFMEDMTYDMAGSAAVVGLMKSLALRKAKVNAVGVVGLVENMVSGVAQRPGDIVKSFSGKTIEVLNTDAEGRLVLADALSFTEKKFKPKFIIDLATLTGAIIVCLGSEYAGLFSNDDKLSRQILDAGDKVEEKLWRMPLHKNYDKLMDSKNADVQNINYVGGAGSTTAAQFLQRFILNKTPMGS

SEQ ID NO: 139651 - protein, 198 aa, Unknown
  Bacterial polypetide isolated from the Sargasso Sea
NVFKKNNDKKLKNKLNAILEGTNFTRDLVSEPGNVLTPDEYTKRLIKLKKYGLKITVYNEKKMKKLRMNALLGVGKGSICGSYLVTLEWKGIKNNSKPLAFVGKGVCFDTGGISLKPARFMEDMTYDMAGSAVVVGLMKNFALRKAKINAIGVVGLVENMPGGNAQRPGDIVKSYSGKTIEVLNTDAEGRLVLADALS

SEQ ID NO: 139652 - protein, 199 aa, Unknown
  Bacterial polypetide isolated from the Sargasso Sea
NKINKSIVGIIGLVENMPDGKAQRPGDIINSLSGQTIEVLNTDAEGRLVLADIITYIQKKYKPLEIIDFATLTGAIMIALGTHKAGIFSNNDKLSNKLESAGKLVKENIWRLPLGDEYNAEINSSRADMKNIGSSRYGGSIHAAEFIKRFIDKNTPWAHLDIAGVSWTMKAGQNNITKLHNPGATAFGVRLIDKFLRSK

SEQ ID NO: 139653 - protein, 164 aa, Unknown
  Bacterial polypetide isolated from the Sargasso Sea
SGKTIEILNTDAEGRLVLADAMSFTQKKFKPSLMIDLATLTGAIIVSLGSEYSGLFSNNDKLAKQLFEAGNKVEEKVWRMPLHKNYDKLIDSKNADMQNINYVGGAGSTTAAQFLQRFVSSKIPWAHLDIAGMAFSKYGGALNSGGATGYGVRILNKFIEDNYE

SEQ ID NO: 139654 - protein, 282 aa, Unknown
  Bacterial polypetide isolated from the Sargasso Sea
KAAREGIAIAKASGATKPLLVVPAVSDTRYQHAQQVAALACGQELWQPLEAREAKSLTPSLAAIGLLNSESHSQLINAAESGRVLARDLCGTEPERMSAMGFAQYCVDAFADSGLAVSVIDQVEQLRTDYPLLSAVGRSSFGVDRHHPRVVKLEYIGEGTITKTLFFAGKGVVYDTGGADIKVAGSMAGMSRDKGGAAAVAGLMKALSILKPKGIKVVAELGLVRNSIGSNAFVTDEIIRSHSGARVRIGNTDAEGRLVLADLLSHLRIQALQAINPQVFSV

SEQ ID NO: 139655 - protein, 200 aa, Unknown
  Bacterial polypetide isolated from the Sargasso Sea
NFALRKAKVNAVGVVGLVENMPGGNAQRPGDIVKSYSGKTIEVLNTDAEGRLVLADALTFTEEKFKPQVIIDLATLTGAIIVSLGSEYAGLFSNDDKLSKQLYEAGKKVEEKVWRMPLHNNYDKLINSKNADMQNINYVGGAGSTTAAQFLQRFILNKTPWAHLDIAGMSFSKYAGALNSGGATGYGVRLLNKFVEENYE

SEQ ID NO: 139656 - protein, 273 aa, Unknown
  Bacterial polypetide isolated from the Sargasso Sea
MISRYTNQLNVKHVSLESKSLHLNDKNLSKSLFEGVVLGNYEFLAYKTVDPKPNSLNKVTILGKCDKKNQQSSVVIANSVNYARDLGNHPANILTPTYLANESKRISKAKNMKCTIFDVSKFEKMGLGSFYGVARGAKEPAKMIIVEYNGGSKSEKPIALVGKGLTFDTGGISLKPGARMDEMKFDMCGSATVMGVMNAVSILQPKLNIIFAIGSTENMPGSDAQRPGDIVTAYNGKTIEVLNTDAEGRLVLADVLSYVDKNYKPKFMVDFAT

SEQ ID NO: 139657 - protein, 176 aa, Unknown
  Bacterial polypetide isolated from the Sargasso Sea
MLREPGDIVKSYSGKTIEVLNTDAEGRLVLADALTFTEKKFKPKFMVDLATLTGAIIVSLGSEYAGLFSNDDKLSKQLIEAGERVDEKLWRMPLHKNFDKLINSKNADMQNINYVGGAGSTTAAQFLQRFIINKTPWAHLDIAGMAFSKYAGALNSGGATGYGVRLLNKFVEDNYE

SEQ ID NO: 139658 - protein, 290 aa, Unknown
  Bacterial polypetide isolated from the Sargasso Sea
LKKNLLVFELNSNKKIVIISIKNNLKNADIENLGAEFFGRINYGKNSEYFIFSDSVKTKHDNFLGHFLHGLKLKSYEFKKYKTKKDTRLIIINVTGNKNKPSEKSQLKFKALEEGTFYARDLVSEPGNILHPDEYAKRLNLLKKDGLKVNIYDEKKLKKLGMHALLGVGQGSIRGSYLVTMEWNGAKNNSKPLAFVGKGVCFDTGGYSLKPARFMEDMTYDMAGSATVVGLMKNLALRKAKVNAVGVVGLVENMVSGNAQRPGDIVKSYSGKTIEVFNTDAEGRLVLADA

SEQ ID NO: 139659 - protein, 137 aa, Unknown
  Bacterial polypetide isolated from the Sargasso Sea
TLLSVGKGSRNPSKLVILEWNGRPLSKKLLGLVGKGVMFDSGGISLKSASGMQEMTGDMGGAAVIAGLFKALALRKSKSNVVGFLGLVENMPGGDAMKPGDIIQSLKGDTVEVNNTDAEGRLVLADLLWYCQMKYKV

SEQ ID NO: 139660 - protein, 248 aa, Unknown
  Bacterial polypetide isolated from the Sargasso Sea
AKNNSKPLAFVGKGVTFDTGGYSLKPARFMEDMTYDMAGSAAVVGLMKSLALRKAKINAVGVVGLVENMVSGVAQRPGDIVKSYSGKTVEVLNTDAEGRLVLADALTFTEKKFKPKFMIDLATLTGAIIVSLGSEYAGLFSNDDNLSKQILNAGEKVEEKLWRMPLHKNYDKLINSKNADMQNINYVGGAGSTTAAQFLQRFILNKTPWAHLDIAGMAFSKYGGALNSGGATGFGVRLLNQLIEENYE

SEQ ID NO: 139661 - protein, 237 aa, Unknown
  Bacterial polypetide isolated from the Sargasso Sea
FTQMGMGALAGVASGTDVPPKFIIMEYMAGPKNQKPKILVGKGLTFDSGGISIKPASKMDEMKYDMCGAGVVIGVMKIVSILKPKMNIVGIVPSTENMSGDKAYRPGDILTAYNGKTIEVLNTDAEGRLILADALSYASKHYDPEFILDFATLTGAVVVALGHVASGIMGTDNPLIEQIKSSSKITGEKVWEFPLWDEYLDQVKSEIADVKNLGAPGQAGSIAGGAFLNSFVNKDIP

SEQ ID NO: 139662 - protein, 208 aa, Unknown
  Bacterial polypetide isolated from the Sargasso Sea
GAANVLALTSMILSTGMKIQLRVLIPAVENSISGNSFRPGDILTARNGSTVEINNTDAEGRLVLADALSFASEDGPDLIISMATLTGAARVAFGSDIAPFFAERNEISDILKASGAKQNDPVWPLPFWDPYEKMIESDTADLDNSPSGGYGGAITAALFLRRFVTNPNSYVHFDIYAWSDTNKPGLPKGGITQGPRAIFDALPEILNI

SEQ ID NO: 139663 - protein, 228 aa, Unknown
  Bacterial polypetide isolated from the Sargasso Sea
GYSLKPARFMEDMTYDMAGSATVVGLMKNLALRKAKINAVGVVGLVENMVSGNAQRPGDIVKSYSGKTIEVLNTDAEGRLVLADALTFTEKKFKPKFIIDLATLTGAIIVCLGSEYAGLFSNDDKLSKQIFSAGEEVEEKVWRMPLHKNYDKLMNSKNADVQNINYVGGAGSTTAAQFLQRFIINKTPWAHLDIAGMAFSKYGGALNSGGATGFGVRLLNKLIEKNYE

SEQ ID NO: 139664 - protein, 251 aa, Unknown
  Bacterial polypetide isolated from the Sargasso Sea
WRGKNQIQNHWLLLVKEFALTTGGISLKPARFMEDMTYDMAGSAVVVGLMKNLALRKSKVNAVGVVGLVENMPGGNAQRPGDIVKSYSGKTIEVLNTDAEGRLVLADAITFTEKKFKPNLIIDLATLTGAIVVALGSEYAGLFSNNDNLSKQIHDAGEKVGEKAWRLPLHSNYDKLMNSKNADMQNINYVGGAGSTTAAQFLQRFILNKTPWAHLDIAGMAFSKYAGALNSSGATGYGVRLLNKFVEDNYE

SEQ ID NO: 139665 - protein, 296 aa, Unknown
  Bacterial polypetide isolated from the Sargasso Sea
MKSKHENFLSYFLHGIKLKSYSFNKYKTKKEDRKISINVIGKKNIPSAQLKLKFKALEEGTFYARDLVSEPGNILHPDEYAKRISSLKKDGLKVTIYDEKKLKKLGMHALLGVGQGSIRGSYLVTMEWNGKKNNSKPLAFVGKGVCFDTGGYSLKPARFMEDMTYDMAGSATVVGLMKSLALRKAKINAVGVVGLVENMVSGNAQRPGDIVKSYSGKTIEVLNTDAEGRLVLADALTFTEKRFKPQFIVDLATLTGAIIVCLGSEYAGLFSNDDKLSKQIFSAGEQVEEKVWRMPL

SEQ ID NO: 139666 - protein, 257 aa, Unknown
  Bacterial polypetide isolated from the Sargasso Sea
MQLKSYEFNKYKSKNKEKRFDIEILNRNKSFIFNKNKKFKSLIEGSNLTKDLVSEPGNILHPDEYAKRLLQLKKFGLKVNILNKKKLKKLGMNALLGVGQGSIRGSYLVTLEWKGLKAKKEPLAFVGKGVCFDTGGISLKPAKFMEDMTYDMAGSAVVVGLMKSLALRKAKINAVGVVGLVENMPGGNAQRPGDIVKSYSGKTIEVLNTDAEGRLVLADAITYTEKKYKPKFIVDLATLTGAIIVSLGSEFAGLFSK

SEQ ID NO: 139667 - protein, 263 aa, Unknown
  Bacterial polypetide isolated from the Sargasso Sea
KASSHKPRLFELTYKRSNSSLNLTLIGKGVCFDTGGLNLKSSSGMINMKKDMSGAASVLGLAHYFIRLNLNINLRILIPCVENSLSEKSFRPSDILISRSGMGIEVKNTDAEGRLVLADVLTYSTEKKSDILVTFASLTGAARVAMGPDITPFFSTCDDFADLLKISGDKMFDPVWRLPFYKDYNKELSSEFTDLNNAPLSGMAGAITAALFLKKFTKSHNMFLHFDIFGWNTKSKPGKTYGGLMQGVRSLGIAIEEKILKLN

SEQ ID NO: 139668 - protein, 262 aa, Unknown
  Bacterial polypetide isolated from the Sargasso Sea
TQTQFTMPQAIPAYLIAIAAGHLQFAALDDTSGIWAEPEMLAKASKEFADTPEMIAIAAKRYGDYRWGRYDLLILPPSFPFGGMENPRLSFITPTVIAGDKSLVSLIAHELAHSWSGNLVTNATWRDLWLNEGFTTYVENRIMEDLYGRDRALMEQTIGYSELLAELAELPAGDTVLHIDLGERDPDDAFSGVPYVKGQLFLRFLEQKFGRERFDNFVKSYFDHFAFQSITTEQFRNYLTQQLLQKYPNIVSESEVDTWVEG

SEQ ID NO: 139669 - protein, 252 aa, Unknown
  Bacterial polypetide isolated from the Sargasso Sea
FLENNNCSKITIFNTNKHIKKFNLIEHLIHGLKLKSYTFDIYKSKNEQKKISINLVTNTNKEDIKIKKKLDSLLDGINFTKDLVSEPGNVLHPDEYSKRLLKLKKIGLKVTVYDKKKLKKLGCNALLGVGQGSIRGSYLVVLEWKGKKNKSKPLAFVGKGVCFDTGGISLKPAKFMEDMTYDMAGSAVVVGLMKNFALRKAKINAVGVVGLVENMPGGNAQRPGDIIKSYSGKTIEVLNTDAEGRLVLADAI

SEQ ID NO: 139670 - protein, 274 aa, Unknown
  Bacterial polypetide isolated from the Sargasso Sea
LGFNALLGVGQGSIRGSYMVTIEWNGNKNKSKPLAFVGKGVCFDTGGISLKPAKFMEDMTYDMAGSATVVGLMKTLALRKSKINAVGVVGLVENMPGANAQRPGDIVKSYSGQTIEVLNTDAEGRLVLADALTYTEEKFKPSLIIDLATLTGAIIVALGSEYAGLWSNNKKLSKQLFDAGEHVEEKVWAMPLHENYNKLMNSNNADMQNINYVGGAGSTTAAQFLQRFIINKTPWAHLDIAGMAFSKYAGALNSGGATGYGVRLLNKFIEENYE

SEQ ID NO: 139671 - protein, 166 aa, Unknown
  Bacterial polypetide isolated from the Sargasso Sea
SFSGKTIEVLNTDAEGRLVLADALTFTEKKFKPRFIVDLATLTGAIIVCLGSEYAGLFSNDDRLSEQIFNAGEKVEEKVWRMPLHKNYDKLMNSKNADVQNINYVGGAGSTTAAQFLQRFILNKTPWAHLDIAGMAFSKYGGALNSGGATGFGVRLLNQLVEENYE

SEQ ID NO: 139672 - protein, 147 aa, Unknown
  Bacterial polypetide isolated from the Sargasso Sea
NTDAEGRLVLADALTYVERFEPRSVVDIATLTGAVIMALGYSTSGLMSNNDKLAEELLEAGRKASDRAWQLPLWDVYQKDLDSNFADIANIGGRAGTITAACFLSRFAEKYPWAHLDVAGTASYKGAAKGGSGRPVPLLSQYLIDKS

SEQ ID NO: 139673 - protein, 234 aa, Unknown
  Bacterial polypetide isolated from the Sargasso Sea
MPLILGGYSLKPARFMEDMTYDMAGSAAVVGLMKTLALRKAKINAIGAVGLVENMVSGNAQRPGDIVKSYSGKTIEVLNTDAEGRLVLADVLTFTEKKFKPKLIVDLATLTGAIIVSLGSEYAGLFSNDDKLSKQLLDAGERVDEKLWRMPLHKNFDKLMNSKNADMQNINYVGGAGSTTAAQFLQRFIINKTPWAHLDIAGMAFSKYAGALNSGGATGYGVRLLNKFIEENYE

SEQ ID NO: 139674 - protein, 193 aa, Unknown
  Bacterial polypetide isolated from the Sargasso Sea
KVNAVGVVGLVENMVSGNAQRPGDIVKSYSGKTIEVLNTDAEGRLVLADALTFTEKKYKPKFIIDLATLTGAIIVCLGSEYAGLFSNDDKLSKQIFEAGQKVEEKVWRMPLHKNYDKLMNSKNADMQNINYVGGAGSTTAAQFLQRFILNKTPWAHLDIAGMAFSKYGGALNSGGATGFGVRLLNQLIEENYE

SEQ ID NO: 139675 - protein, 317 aa, Unknown
  Bacterial polypetide isolated from the Sargasso Sea
HPGNVATPTKLAQEARKIGKRGKMRVKVFDRSKIIKMGMGGLAGVAAGTDEPPKFILMEYWGTKKTEKPKVLVGKGLTFDSGGISIKPAAKMDEMKFDMCGSAVVLGAMHALADLKPKINVVGIVPSTENLSGAKAYKPGDILKAYNGKTIEVLNTDAEGRLILADALSYASKHYKPEYILDFATLTGAVVIALGYVATGIMGTDDKLIKKVKSSSDATAEKVWELPLWKEYCHQIRSKIADIKNTGAPMQAGTIAAGAFLKEFVKDDIPWCHFDIAGTAWNDSETDSGGKLLEKPYTPREGASGNIIRLVLDLIEA

SEQ ID NO: 139676 - protein, 253 aa, Unknown
  Bacterial polypetide isolated from the Sargasso Sea
RDLVSEPGNILHPDEYAKRISLLKKDGLKINIYDEKKLKKLGMYALLGVGQGSIRGSYLVTMEWNGAKNNSKPLAFVGKGVCFDTGGYSLKPAKFMEDMTYDMAGSATVVGLMKNFALRKAKINAVGVVGLVENMVSGNAQRPGDIVKSYSGKTIEVLNTDAEGRLVLADALTFTERKYKPKFIVDLATLTGAIIVSLGSEYAGLFSNDDKLSDQIFSAGEKVEEKVWRMPLHKNYDKLMNSKNADVQNINYV

SEQ ID NO: 139677 - protein, 306 aa, Unknown
  Bacterial polypetide isolated from the Sargasso Sea
TDLDYEKIRKITGSLSRYINNMNIKKASIIIPGENNNKLKFNETADAVALGFLIGSYKYDKYKTEKSPNSLQELTLLNTSGQNISHDLSDIINESESINLVRDLINEPPNYMHPGTLEEISTKVASKGPIEMSVLNVKEMEILGMEVILGVGKGSTHDPKMIILNYQGDKSNPDNNIAIIGKGITFDSGGLNLKPGNSMRTMKTDMSGSAVVLGVMNAVAHQKPKKNIMGILAIAENMPGGSAQRPGDVVKAMNGKTIEIDNTDAEGRLVLSDALSYAVDKGINKIIDIATLTGAISVALGNEYTG

SEQ ID NO: 139678 - protein, 251 aa, Unknown
  Bacterial polypetide isolated from the Sargasso Sea
CKSNFGKPLAFVGKGVCFDTGGISLKPARFMEEMKYDMGGSAVVVGLMKCLAKRKAKVNAVGVVGLVENMPDGNAQRPGDIVKSYSGKTIEVLNTDAEGRLVLADALTYTEKKFNPKFIIDLATLTGAIIMALGEEYAGLFSNNDKISNELHEIGNKINEKVWRLPLHKNYDKLMNSAYADVQNINYAGGAGSITAAQFLQRFIVKNTPWAHLDIAGMAFSKKAASLNSGGATGFGVRLLNDLVKKHYEKR

SEQ ID NO: 139679 - protein, 463 aa, Unknown
  Bacterial polypetide isolated from the Sargasso Sea
CDEKYSISGIKKYISSAEFSYINDLIRTIDIKKNLFIFEINSKKKIVLISIKKNLKNSDIENLGAELHKKIDSKKNNEYFVVSDSVVGKNENFLGYFLHGLKLKSYEFKKYKTKKDSKIISINIVGTKNIPSAQNQLKFKALEEGTFYARDLVSEPGNVLHPDEYAKRIETLRKDGLKITVYDEKKLKKLGMNALLGVGQGSIRGSYLVTMEWNGAKNNSKPLAFVGKGVCFDTGGYSLKPAKFMEDMTYDMAGSATVVGLMKNFAIRKAKINAVGVVGLVENMVSGNAQRPGDIVQSYSGKTIEILNTDAEGRLVLADALTFTEEKFKPEFIVDLATLTGAIIVCLGSEYAGLFSNNDKLSKEIFNAGEKVEEKVWRMPLHKNYDKLMNSKNADVQNINYVGGAGSTTAAQFLQRFILNKTPWAHLDIAGMAFSKYGGALNSGGATGFGVRLLNQLVEENYE

SEQ ID NO: 139680 - protein, 212 aa, Unknown
  Bacterial polypetide isolated from the Sargasso Sea
MAGSAVVVGLMKNLALRKAKINAVGVVGLVENMPGGNAQRPGDIVKSYSGKTVEVLNTDAEGRLVLADALTYTEEKFKPKFIVDLATLTGAIIVSLGSEYAGLFSNDDKLSKQLIDVGNEVEEKVWRMPLNKNYDKLIDSKNADMQNINYVGGAGSTTAAQFLQRFILNKTPWAHLDIAGMAFSKYGGALNSGGATGFGVRLLNQLIEEYYE

SEQ ID NO: 139681 - protein, 295 aa, Unknown
  Bacterial polypetide isolated from the Sargasso Sea
LKKLKKYGLKVLIYDQKKLKKLGCNALLGVGQGSIRGSYLVTVEWKGNKSKSKPLAFVGKGVCFDTGGYSLKPARFMEDMTYDMAGSAAVVGLMKTLALRKAKINAVGVVGFVENMVSGNAQRPGDIVKSYSGKTIEVLNTDAEGRLVLADALTFTEKKFKPELMVDLATLTGAIIVSLGSEYAGLFSNDNKLSKQLIEAGERVNEKLWRMPLHKNFDKLMDSKNADMQNINYVGGAGSTTAAQFLQRFILNKTPWAHLDIAGMAFSKYGGAVNPSGATGYGVRLLNQFVENNYE

SEQ ID NO: 139682 - protein, 444 aa, Unknown
  Bacterial polypetide isolated from the Sargasso Sea
MGYIINNKKSEKNKIYCLNEDHDRKILIIFVSQIKSLNDSESLGANFYDHIKKEQIKDVSIVGSNQSNIKKKVKLESFVHGAQLKSYEFNLYITKKKLRDIQLNIIKSKNQIDIKLRNKLNAILDGVNFTKDLVSEPGNILHPDEYAKRIVKLRKFGLKVTVYDKKKLKKMGCNALLGVGQGSARGSYLVVVEWKGLKNNSRPLAFVGKGVCFDTGGYSLKPAKFMEDMTYDMAGSAAVIGLMKTIALRKSKINAVGVVGLVENMVSGNAQRPGDIVKSYSGKTIEILNTDAEGRLVLADALTFTEEKFKPQFMIDLATLTGAIIVSLGSEYAGLFSNNDKLSKQLIDSGVKIQEKLWRMPLHKNFDKLINSKNADMQNINYVGGAGSTTAAQFLQRFVLKKTPWAHLDIAGMAFSKYGGALNSGGATGYGVRLLNNLIEDNYE

SEQ ID NO: 139683 - protein, 244 aa, Unknown
  Bacterial polypetide isolated from the Sargasso Sea
SKPLAFVGKGVTFDTGGYSLKPARFMEDMTYDMAGSAAVVGLMKSLALRKAKVNAVGVVGLVENMVSGVAQRPGDIVKSYSGKTIEVLNTDAEGRLVLADALSFTEKKFKPKFIVDLATLTGAIIVCLGSEYAGLFSNDDNLSKQILAAGEKVEEKLWRMPLHKNYDKLMNSKNADVQNINYVGGAGSTTAAQFLQRFILNKTPWAHLDIAGMAFSKYGGALNSGGATGFGVRLLNQLIEEQYE

SEQ ID NO: 139684 - protein, 159 aa, Unknown
  Bacterial polypetide isolated from the Sargasso Sea
EVLNTDAEGRLVLADALTFTEKKFKPKFIVDLATLTGAIIVSLGSEYAGLFSNDDKLSKQLIDAGEKVDEKLWRMPLHKNFDKLMNSKNADMQNINYVGGAGSTTAAQFLQRFILNKTPWAHLDIAGMAFSKYGGALNSGGATGYGVRLLNKLVEDYYE

SEQ ID NO: 139685 - protein, 302 aa, Unknown
  Bacterial polypetide isolated from the Sargasso Sea
MEGVFLTRDLVSEPGNILHPDEYAKRIVKLRKFGLKVTVYDQKRLKKLGFNALLGVGQGSIRGSYMVTIEWNGNKSKSKPLAFVGKGVCFDTGGISLKPAKFMEDMTYDMAGSATVVGLMKTLALRKSKINAVGVVGLVENMPGANAQRPGDIVKSYSGQTIEVLNTDAEGRLVLADALTYTEEKFKPSLIIDLATLTGAIIVALGSEYAGLWSNNKKLSKQLFDAGEKVEEKVWEMPLHENYNKLMNSSNADMQNINYVGGAGSTTAAQFLQRFIINRTPWAHLDIAGMAFSKYAGALNSG

SEQ ID NO: 139686 - protein, 379 aa, Unknown
  Bacterial polypetide isolated from the Sargasso Sea
MSPLLRNTSSGIPLSFILKSELSDWQSKQPTFIQNWLNNTGFEKQGLALIPDSNSGELSQVICLMQSPNDFWAAGNLANTLPVGSYQIQGDDTFIEFVALGFVLGGYEFSEYKEKPTVKAELCIGDEQLYTRIKQQAEAIFLARDLVNTPAVDMMPQHLSQVMEDLASTHGGDFSQWIGDELLEQNYPTIHMVGRASENKPRLLDLKWGADDAPLITLVGKGVCFDSGGLDLKPSNGMRNMKKDMGGAAHVIALAQLIMAAKLPVRLRVLVPAVENAVSRNAFRPGDVVKTRKGIMVEIDNTDAEGRLVLCDALSEAQNDNPELIIDFATLTGACRVALGTELPGFFSTERDVANGIIDAGISVNDPVWQLPLFEQYRG

SEQ ID NO: 139687 - protein, 303 aa, Unknown
  Bacterial polypetide isolated from the Sargasso Sea
HPDEYAKRLNSLKKYGLKVTVYDEKKLKKLGMNTLLGVGQGSIRGSYLVTMEWNGLSKKTKPLAFVGKGVCFDTGGISLKPAKFMEDMTYDMAGSAVVVGLMKSLALRKAKINAVGVVGLVENMPGGNAQRPGDIVKSYSGKTVEILNTDAEGRLVLADALTYTEEKFRPKFIVDLATLTGAIIVSLGSEYAGLFSNDDKLSNQLIKAGENMEEKVWRMPLNKNFDKLIDSKNADMQNINYVGGAGSTTAAQFLQRFILNKTPWAHLDIAGMAFSKYGGALNSGGATGYGVRLLNKLIEDHYE

SEQ ID NO: 139688 - protein, 628 aa, Unknown
  Bacterial polypetide isolated from the Sargasso Sea
MLLPLVQYANAANILPNTSQASVTASQKHSVTDELTFANYQQVSIHHIALALNVDFAQQQLSGDAILELDWHQAGKVLVLDTRDLTIKSVSMLNANGQWQSVPFSLGSVDKVKGAALTINLPQERVAKVKVNYHTSKNPSGIQWLTPEQTQGKQWPFMFSQSQAIHARSWIPLQDTPAVRQTYSATVTAKQGINVVMSASRKSVSATQTQFTMPQAIPAYLIAIAAGHLQFATLDDTSGIWAEPEMLAKASKEFADTPEMIAIAAKRYGDYRWGRYDLLILPPSFPFGGMENPRLSFITPTVIAGDKSLVSLIAHELAHSWSGNLVTNATWRDLWLNEGFTTYVENRIMEDLYGRDRALMEQTIGYSELLAELAELPAGDSVLHIDLGDRDPDDAFSGVPYVKGQLFLRFLEQKFGRERFDTFVKSYFDHFAFQSITTEQFRSYLTQQLLQKYPNIVSESEVDTWVEGQGLPSFLVPPNSHAFDDIDAQRQAWLEGKREARALNTQDWTVHQWLRFINEMPRLNLTEQQLAELDKAFHFTGTHNNEIAFAWYALALDNGYYSVLPALKQHLTEIGRRRLIVPLYQKLASSEHYDWAKAVYLAARSGYHPQTQASLDMMFSDKPMEHTH

SEQ ID NO: 139689 - protein, 325 aa, Unknown
  Bacterial polypetide isolated from the Sargasso Sea
MNALLDGVFFTRDLVSEPGNILHPDEYAKRLVKLKKNGLKVTVYNKEKLKKLGCNALLGVGQGSVRGSYLVTIEWKGNKSKSKPLAFVGKGVCFDTGGYSLKPARFMEDMTYDMAGSAAVVGLMKTLALRKAKINAIGVVGLVENMVSGNAQRPGDIVKSYSGKTIEVLNTDAEGRLVLADALTFTEKKFKPKFMIDLATLTGAIIVSLGSEYAGLFSNDDKLSKQLLEAGERVDEKLWRMPLHKNFDKLINSKNADMQNINYVGGAGSTTAAQFLQRFIINKTPWAHLDIAGMAFSKYAGALNSGGATGYGVRLLNKFVEENYE

SEQ ID NO: 139690 - protein, 282 aa, Unknown
  Bacterial polypetide isolated from the Sargasso Sea
MNEKKLKKLGMHALLGVGQGSIRGSYLVTMEWNGAKNNSKPLAFVGKGVCFDTGGYSLKPARFMEDMTYDMAGSATVVGLMKSLALRKAKINAVGVVGLVENMVSGNAQRPGDIVKSYSGKTIEVLNTDAEGRLVLADALTFTEEKFKPKFIIDLATLTGAIIVCLGSEYAGLFSNDDQLSKKIFNAGEKVEEKVWRMPLHKNYDKLMNSKNADMQNINYVGGAGSTTAAQFLQRFILNKTPWAHLDIAGMAFSKYGGALNSGGATGFGVRLLNQLIEENYE

SEQ ID NO: 139691 - protein, 327 aa, Unknown
  Bacterial polypetide isolated from the Sargasso Sea
NKLNALLQGVFLTRDLVSEPGNILHPDEYAKRIVKLRKFGLKVKVYDQKKLKKLGFNALLGVGQGSIRGSYMVTIEWNGSKNKSKPLAFVGKGVCFDTGGISLKPAKFMEDMTYDMAGSATVVGLMKTLALRKSKINAVGVVGLVENMPGANAQRPGDIVKSYSGQTIEVLNTDAEGRLVLADALTYTEKKFKPSLIIDLATLTGAIIVALGSEYAGLWSNNKKLSKQLFDAGEQVEEKVWEMPLHENYNKLMNSNNADMQNINYVGGAGSTTAAQFLQRFIINKTPWAHLDIAGMAFSKYAGALNSGGATGYGVRLLNKFIEEYYE

SEQ ID NO: 139692 - protein, 389 aa, Unknown
  Bacterial polypetide isolated from the Sargasso Sea
MDNELFKDQLFIQREYKNINYIFINCKKLKISSDYENIGSKLFDYLNKNKIENSYIDISKIDINLTQLEKVIHGAKLKSYSFNIYKSNNKKNKNFNLNIVGIQTTKSNLLRKKLDALLEGVFFTRDLVSEPGNILHPDEYAKRLLKLKKIGLKVTVYNEKKLKKLGCNALLGVGQGSIRGSYLVTVEWKGNKSKSKPLAFVGKGVCFDTGGYSLKPARFMEDMTYDMAGSAAVVGLMKTLALRKAKINAVGVVGLVENMVSGNAQRPGDIVKSYSGKTIEVLNTDAEGRLVLADALTFTEKKFKPKFMIDLATLTGAIIVSLGSEYAGLFSNDDKLSKQLVEAGEIVDEKLWRMPLHKNFDKLINSKNADMQNINYVGGAGSTTAAQFL

SEQ ID NO: 139693 - protein, 288 aa, Unknown
  Bacterial polypetide isolated from the Sargasso Sea
MKCTVFSKNEIKSKRLGGVTAVGQGSKNEPRFIILEYRNGKKEQKPILLVGKAVTFDTGGISLKPGEKMDEMKFDKCGGCTVLGVMKAISELKLPINVIAIVPSVENMPSGDAFRPGDIVKLFNGKTAEILNTDAEGRLILADGLAYGIKHFQPSSVMDFATLTGACIVALGTNVAGIVSNNTKLATKVKSSSAKTSEEVWELPINDDYMDMVKSKVADIRNLGMGRAAGTITAAAFLANAVGNVPWVHFDIAGTAWIQPSTKSKSYNSHGATGFGVRLVVDYLMNQK

SEQ ID NO: 139694 - protein, 407 aa, Unknown
  Bacterial polypetide isolated from the Sargasso Sea
MSEGDFKAKAGSAMTLAGTDGGKAMLIGLGKAEDANLQSMRESGAKVTASLSKIHGKTITVKFSGMESADMGAFVEGMILRDYSYDKYKSKDEDDDSDDGEVHAHVTCEAEKIEDLQKSAKLSQAVASGVYLARDLGNAPPNDLYPMAFAEQAIEFGAKHDNVKVTIITYEQAISMGMGGLVGVGMGSARKPCMVIFEINPDMPGPSPCIVGKGITFDTGGISLKPPPSMDEMKYDMHGSATTFGVMQAIVASGHKDRVIGVTCMAENMPSSNAQRPGDVIKTYSGKTVEVLNTDAEGRLVLSDGLWYTGTHLNPSYIIDLATLTGACVVALGHEASGLWSNDDDLRNKIKEAGEHCGEIAWPMPLFKAFEKEMTDSKIADVRNLGAGRWGGSNTAAAFLKQFIPNK

SEQ ID NO: 139695 - protein, 506 aa, Unknown
  Bacterial polypetide isolated from the Sargasso Sea
MDIQFNNIRQEKDAVGVVFCDSKCRLIGYGKKLDQLSKKYISNIIKSDISFQERNSKNFDYSIIHQPANLKLSKLYVFKLKNFKDYQIRDFQVLGGHLNSLIKFYKETNVIVYPDGISSLKVGSLNAISEMILGMSLASYSFTKYFSKKDDKKNKTKTIKKKVKIYSSQHTRLSKNYESISAIHQGVTLTRNLVTEPPNVMTPPKIAEYAKSLGEYGVDVKVLGEKEMKKLGMGSLLGVGQGSIHESQLVIMKWNGARNKKKKPIAFIGKGVSFDTGGVSLKPSNGMEEMKYDMGGSGVVIGLMKALSIRKAKANVIGVVGLVENHIGSKAQRPSDVVKSYSGQTIEVLNTDAEGRLVLADALWYTQEQYKPELMVDLATLTGAIIVALGDEYAGLFSNSDKVSKQLSDAGDIEGEKLWRLPLNDRYDKMLNSPIADMQNITNGRGPGSITAAQFLQRFVNKVPWAHLDIAGTTWTKQPLPTSPKGATAFGVKLLNRFVSKYYEGK

SEQ ID NO: 139696 - protein, 284 aa, Unknown
  Bacterial polypetide isolated from the Sargasso Sea
GSDKNEISKGAMIGNAVCFARDLGNHPGNVTTPSKLASSAKDIADEGGMDLTVFERKEFTEMGMGGLAGVAQGTDEPPKFIILEYMKGGDKKPKVLVGKGLTFDSGGISIKPAGRMDEMKYDMCGSAVVLGVFKALALLKPELNVVGIIPSTENLNGAKAYKPGDILKAYNGKTIEVLNTDAEGRLILADGLSYASKHYDPEYILDFATLTGAMVVTLGHIATGVMGTDDNLIDKVLKASKATGEKVWELPLWEEFCKQIQSSIADVKNQGSPPQAGTIVAGAF

SEQ ID NO: 139697 - protein, 626 aa, Unknown
  Bacterial polypetide isolated from the Sargasso Sea
MPLVQYANATNSLPNSNVASVASSQLHTATDELTFANYQQVSIRHIELALNVDFAQQQLSGNAILELDWHKAGKMLVLDTRDLTINSVSMLNANGQWQSVPFSLGATDKVKGAALTINLPQERVAKIKVNYHTSKNPSGIQWLTPEQTQGKQWPFMFSQSQAIHARSWIPLQDTPAVRQTYSATVTAKQGISVVMSADRESMSATQTQFTMPQAIPAYLIAIAAGHLQFAALDDTSGIWAEPEMLAKASKEFADTPEMIAIAAKRYGDYRWGRYDLLILPPSFPFGGMENPRLSFITPTVIAGDKSLVSLIAHELAHSWSGNLVTNATWRDLWLNEGFTTYVENRIMEDLYGRDRALMEQTISYSELLAELAELPAGDTVLHIDLGERDPDDAFSGVPYVKGQLFLRFLEQKFGRERFDNFVKSYFDHFAFQSITTEQFRNYLTQQLLQKYPNIVSESEVDTWVEGQGLPSFLVPPNSHAFDDIDAQRQAWLEGKRAASALNTQDWTVHQWLRFINEMPRLNLTEQQLAELDKAFHFTGTHNNEIAFAWYALALDNGYYSVLPALKQHLTEIGRRRLIVPLYQKLASSEHYDWAKAIYLAARSGYHPQTQASLDMMFSDTPIEHEH

SEQ ID NO: 139698 - protein, 251 aa, Unknown
  Bacterial polypetide isolated from the Sargasso Sea
MTWTPKGRPKGTLALVGKGLTFDAGGLSIKSGQGMMDMKMDMGGAAAVVGAMSVMPDVAPRCRVRAYLPMTDNMLGGDATRPGDVLTIRNGKTIEVLNTDAEGRLVLADALSLASEGKPDAVIDLATLTGACMVALGPRIAGLMGRGDGFLEQVEAASSRTGERVWRLPLPDDYRHMVDSPVADMKNIGGPHGGAITAGLILGEFVAEGIDWAHLDIAGPAFTDSDDAEVVRGGTGFGVRLLVDLASSFTA

SEQ ID NO: 139699 - protein, 405 aa, Unknown
  Bacterial polypetide isolated from the Sargasso Sea
PIPSYLIALAIGDLEFKAMGERTGVYAEPALLESAAKEFEDTEAMLEVTEETYGPYQWDRYDLLILPPSFPFGGMENPRLSFITPTVIAGDKSLVSLIAHELAHSWSGNTVTNATWRDLWLNEGFTTYLTYRIMEMIYGHDRFKKEAVLGYQDLENDVAALEENDEILAIDLRGRNPDDVFSNIPYEKGALFLREIEQKIGRENFDAFLMQYFKDFAFKSITTDTFIAYLDDTLLKQYPDKLDAERIQTWIFEPGIPEGAPQPESDAFTKIDDTRSAWLSGDVKAADIETAQWTVHEWLYFLNNMPESLSSAQLAELDSAFSLTSTKNNEIAHSWLMIAVENNYQPAYDRLYSYLVSIGRNKLVKPLYRELSKTPEGKAFAKRAFEEAKPGYHPLTVKANEVYVN

SEQ ID NO: 139700 - protein, 430 aa, Unknown
  Bacterial polypetide isolated from the Sargasso Sea
NSIKDSKLKTVYICGLGSKIKDLNALDFEKIGGRITELTKLKIKTSVIIDKEINNNENIMRLGYGSILGSYSFNKYKTKNFTNHKISKIEIVSNNYTKLNRDFKRYTSISDGVFYARDLVNEPSNVLFPKAYAQRIQKLRQYGLKIEVLGESKMKALKMHSLVGVGQGSQRESQLVIMHWNGNKAKKTKPLCFVGKGVCFDSGGISIKPSNKMEEMIGDMGGSAAVVGTMLSLAKRKAKVNAIGIVGLVENMPDGKAQKPGDIIKSMSGQTIEIQNTDAEGRLVLADALWYAQKRFKPEFMIDLATLTGAMVISLGSLIAGLFSNDDRLSSKLIDAGEESGDQVWRFPLNKSYDKLINSKFADMKNIGMGGAGSITAAQFLQRFVNKVPWAHLDIAGTATGMPKTSTNTSWATGFGVHLLDTFVKKFYEK

SEQ ID NO: 139701 - protein, 447 aa, Unknown
  Bacterial polypetide isolated from the Sargasso Sea
FESSFEKKEDFISDNEIFQEYISTHSFEGKSNELLFMPPSMSSKNNKTLLIGCEDISQNNKELLELGYSIGSKLKDNCELNILNFKGDKDAIILGILLSKYNFDKYLSDDKDVVEISFNESFEVESSINKRDSIFWVRDLINTPAFDRSPEYFIEQVELITSNKEINVEVHNKEWLEKNNFGGVLGVAQGSVREPYFLTGQYNPDAKIQIALIGKGVLFDSGGLSLKSPSGMETMKTDMSGAATAWGAINLLAQNKIDVGLTVYTPLVENMPSGSAIRPGDVLTTRNGKTIEVLNTDAEGRLIMADALAYAAEKKPDIICDVATLTGAAVAALGLDVGALFSNDPELESLFMKASAISLEPYHPLPLYSDYKKLVESDIADMKNTGGRYGGAITAALILEEFIDENKWIHLDIAGPARSDNRKGATGFGVLSLYEFFKSISTDLPEN

SEQ ID NO: 139702 - protein, 443 aa, Unknown
  Bacterial polypetide isolated from the Sargasso Sea
MTVQINYKNSGTKKISANFILFVDEKFNISSLKKHASNHEFSYISDLLKTTDIKKNLLVFNINSKKKIILVSVKKNYLAIDVENLGAELFSQINNGKKSEYIINSDLISSKIENFLGHLLHGLKLKSYNFNKYKTKKESRLITINVIGNKNKPSVQNQLKFKALEEGTFYTRDLVSEPGNVLHPDEYAKRLNSLKKHGLKVNIYDEKKLQKLGMNALLGVGQGSIRGSYLVTIEWNGLKNNSKPLAFVGKGVCFDTGGYSLKPAKFMEDMTYDMAGSATVVGLMKSLALRKAKINAVGVVGLVENMVSGNAQRPGDIVKSYSGKTIEILNTDAEGRLVLADALTFTEKKYQPKFIIDLATLTGAIIVSLGSEYAGLFSNNDKLTKQLLDAGDKVEEKLWRMPLHKNFDKLINSKNADMQNINYVGGAGSTTAAQFLQRFYFKQ

SEQ ID NO: 139703 - protein, 450 aa, Unknown
  Bacterial polypetide isolated from the Sargasso Sea
GQQLNIIAPSGSRIDEVIIIGLGKASELTELELQKMGGAIYAKTNRVKSGTVHVILDNVAGSGMPASKMAAEIAYGARLRSYRFDKYKTKQKSESKPNIKNLNLLCSGSKAAKDLFRKLDKIVEGVFFTRDLVSEPPNVLYPETLAKEARKLEKLGIAVEVMGENQMRRLGMGALLGVGQGSVRESKLVVMHWRGKAKNRGKLLLSDNPISFIGKGVTFDTGGISIKPSAGMEDMKWDMGGAGVVVGLMKALAGRRAKVNVVGVVGLVENMPGGNAQRPGDIVSSMSGQTIEVLNTDAEGRLVLADALWYTNKRFKPKMMINLATLTGAIIVSLADKYAGLFSNNDVLCDRLSKAGEEVGELVWRLPLSAEYNKMIDSDVADMKNIGGRGAGSITAAQFLQRFVGDTRWAHLDIAGVTWTKTNSPIVPKGGTAFGVRLLDKLVQNHYEDK

SEQ ID NO: 139704 - protein, 442 aa, Unknown
  Bacterial polypetide isolated from the Sargasso Sea
GFGFKLNEIIEINNIKDKKLKTVYICGLGNKTKDVSALDFEKIGGRITELTKLKTKTSVIIDKEINNNENIMRLGYGSILGSYSFNKYKTKNLTNHKLSLIEIVSNNHTKLNKDFKRYASISDGVFYARDLVNEPSNVLFPKAYAQRIQKLRQHGLKIEVLGESKMKALKMHSLVGVGQGSQRESQLVIMHWVGNKAKKTKPICFVGKGVCFDSGGISIKPSNKMEEMIGDMGGSAAVVGAMLSLAKRKAKVNAIGIVGLVENMPDGKAQKPGDIIKSMSGQTIEIQNTDAEGRLVLADALWYAQKRFKPELMIDLATLTGAMVISLGSLIAGLFSNDDKLSSKLIDAGEESGDQVWRFPLNKSYDKLINSKFADMKNIGMGGAGSITAAQFLQRFVNKVPWAHLDIAGTATGMPKTSTNTSWATGFGVHLLDTFVKKFYEK

SEQ ID NO: 139705 - protein, 293 aa, Unknown
  Bacterial polypetide isolated from the Sargasso Sea
MEVSENKQNVIISKLLLGFKLKSYSFLKYKENNKINTKKIEYVKVLKKEKKILEQQLHLNDNLISGIFFSKDLTFEPPNFLTPQEFVNQITSLEKIGIEIEVLNEENMNKLGMHSLLGVGRGSAEKSYLVIMKWNGSPNSKKNIAYVGKGVCFDSGGLSLKTPRGMIDMKEDMGGAGIVVGAMKAIALQKVKRNVIGVVGLVENMPSSNAQRPGDIVKSMSGKTIEILNTDAEGRLVLADALYFTIKKFKPDFVIDLATLTGAIISALGKERAGLFSNDDNLSEYIFQTGEKE

SEQ ID NO: 139706 - protein, 249 aa, Unknown
  Bacterial polypetide isolated from the Sargasso Sea
GNRSKSKPLAFVGKGVCFDTGGYSLKPARFMEDMTYDMAGSAAVVGLMKTLALRKATVNAVGVVGLVENMVSGNAQRPGDIVKSYSGKTIEVLNTDAEGRLVLADALTFTEKKFKPKFIIDLATLTGAIIVSLGSEYGGLFSNNDKLSKQLIDAGEKTDEKLWRMPLHKNFDKLMDSKNADMQNINYVGGAGSTTAAQFLQRFILNKTPWAHLDIAGMAFSKYGGALNSSGATGYGVRLLNKLVEDNYE

SEQ ID NO: 139707 - protein, 164 aa, Unknown
  Bacterial polypetide isolated from the Sargasso Sea
MSGQTIEIQNTDAEGRLVLADALWYAQKRFKPELMIDLATLTGAMVISLGSLIAGLFSNNDKLSKNLIDAGEESGDLVWRFPLNKSYDKLINSKFADMKNIGMGGAGSITAAQFLQRFVNKVPWAHLDIAGTATGMPKTSTNTSWATGFGVHLLDTFVKKFYEK

SEQ ID NO: 139708 - protein, 165 aa, Unknown
  Bacterial polypetide isolated from the Sargasso Sea
LQWKTIEILNTDAEGRLVLADALTFTEEKYKPKFIIDLATLTGAIIVSLGSEYAGLFSNDDKLSKQLINIGEKVEEKVWRMPLNKNFDKLINSKNADMQNINYVGGAGSTTAAQFLQRFILNKTPWAHLDIAGMAFSKYGGALNSGGATGYGVRLLNKLIEEHYE

SEQ ID NO: 139709 - protein, 243 aa, Unknown
  Bacterial polypetide isolated from the Sargasso Sea
VCFDTGGISLKPAKFMEDMTYDMAGSAVVVGLMKNLAIRKAKINAVGVVGLVENMPGGNAQRPGDIVKSYSGKTIEVLNTDAEGRLVLADALTFTEKKFKPQFIIDLATLTGAIIVSLGSEYAGLFSNNDKLSNQIFEAGKKVDEKVWRMPLHTNYDKLMNSKNADIQNINYIGGAGSITAAQFLQRFILNKTPWAHLDIAGMAFSKYGGALNSGGATGFGVRLLNKLIEDNYEWYRTNFINN

SEQ ID NO: 139710 - protein, 489 aa, Unknown
  Bacterial polypetide isolated from the Sargasso Sea
MAHLSNVKYGSGDWRNNKTDAVAVGIYEDLKMSRQIQGVNRELGRGISNALSANLLKGKIGEVKIIIGKKGNLAFVFGLGKVGNLIPETLRKAAAGVSKLCISNSVSSVSFLIPKEAKDDYISQAAAEGLVLGSYQFNEFKTTGEKPFNIKSAIILGGNKKAITKGVIIAEGVCLARNLENRPGNVSTPSHLADHAKKIGKTPNMKVTVFEREKFTKMGMGALAGVASGTDEPPKFIIMEHMAGPKNQKPKILVGKGLTFDSGGISIKPASKMDEMKYDMCGAGVVIGVMKIISILKPKMNIVGIVPSTENMSGDKAYRPGDILTAYNGKTIEVLNTDAEGRLILADALSYASEHYDPEFILDFATLTGAVVVALGHVATGIMGTDDSLIEKIKFSSGITGEKVWEFPLWEEYLDQVKSTIADVKNLGAPGQAGSIAGGAFLHSFVRENIPWCHFDIAGSAWGNKNLPYQNKGLATGEMIRLVVDLLEI

SEQ ID NO: 139711 - protein, 409 aa, Unknown
  Bacterial polypetide isolated from the Sargasso Sea
FEMPQAISPYLIAIGAGNLEFKAMSHQTGIFAEPEILEASVAEFNDTQAMIDKTNAMYGDYAWGRYDLLMLPPSFPFGGMENPRLSFITPTVVAGDKSLVNLIAHELAHSWSGNLVTNATWEDLWLNEGFTSYVENRIMEEVFGRDRAVMEQALDAAGLRAQLKTIDAPDTRLNLKLNGRDPDDAFSSVPYTKGQLFLIYLENKFGRDKFDPFVKTYFDEFAFKSLTTAQFVTYIEANLINRYPGIVSMDKVNEWIFEPGLPTDAPNPTSDAFDKVDTATTAWLQGAKTAAQLPTANWTVHEWLHFLNNLPRDLSIEKMTELDDEFNLTQSTNSERAFAWYMLAVGNGYQPIYPALDAHLSGIGRRKLIVPLYKSLITNGKKDWAQSVYLKARPGYHPLAQGTIDALFE

SEQ ID NO: 139712 - protein, 195 aa, Unknown
  Bacterial polypetide isolated from the Sargasso Sea
IGSEAFVTDEIITSHGGVRVRIGNTDAEGRLVLADLLSHLRIKAVTAVKPELFSVATLTGHVVRCYGNYPAAVENAVASGALCAQTLASQASHWGEPFEVSTLRREDFAKIREVSGAADILSSNNAPSSVTARGHQYPAAFLLKASGLFEHGVNAAIPLAYTHLDIAGSATEGDPLYGKPTASPLVSLYQYLINR

SEQ ID NO: 139713 - protein, 231 aa, Unknown
  Bacterial polypetide isolated from the Sargasso Sea
DTGGISLKPAKFMEDMTYDMAGSATVVGLMKTLALRKSKINAVGVVGLVENMPGGNAQRPGDIVKSYSGQTIEVLNTDAEGRLVLADALTYTEEKFKPSLIVDLATLTGAIIVALGSEYSGLWSNDEKLSKQLLEAGEHVEEKVWRMPLHENYNKLMNSKTADMQNINYVGGAGSTTAAQFLQRFIINKTPWAHLDIAGMAFSKYAGALNSGGATGYGVRLLNKFIEENYE

SEQ ID NO: 139714 - protein, 500 aa, Unknown
  Bacterial polypetide isolated from the Sargasso Sea
MKFSTNNKKINEIKSDCLMISIFNDGKLRGCAKLVNTANGKLIDDFIKNKDIQGKIGQTRIIPVTGKSYKRIVLVGCGKYEDFSQKNYRKAVISALNKISHTNHKSVVSLIHDGVEKIDNPEKAYRLSRVLAESWHSISYQYTTTKESNKKNLGLRKIEIGTNGKKAIRELQTGLKHGDAIGKATQLVRELGDLPANICTPSYLASVARKIVGKNKSAKLKVLNEAQMKKLGMDSLLSVTAGAKEPAKMIIAEFLNGPKSQKPVAVVGKGITFDTGGISLKPSNKMDEMKYDMCGASTTIGLLQMVTELNLPINALFVVPACENVPSSTATLPGDVVKSMSGTTIEILNTDAEGRLILADALTYAQKYKPKLIIDMATLTGACVVALGAHHSGLMSNSDQLAEKLFECGQTTDDVTWRLPLTEEYADQIVSNFADVANISTRGSGAGTITAGCFLQKFVGDYDWAHIDIAGVAWAEGANKGATGRPMGLMSEFLINESKT

SEQ ID NO: 139715 - protein, 157 aa, Unknown
  Bacterial polypetide isolated from the Sargasso Sea
MNTDAEGRLVLADALTFTEKKFKPKFIIDLATLTGAIIVCLGSEYAGLFSNDDKLSKQIFEAGEIVDEKVWRMPLHKNYDKLMNSKNADVQNINYVGGAGSTTAAQFLKRFIINKTPWAHLDIAGMAFSKYGGALNSGGATGFGVRLLNQLVEKDYE

SEQ ID NO: 139716 - protein, 216 aa, Unknown
  Bacterial polypetide isolated from the Sargasso Sea
MTYDMAGSAAVVGLMKNLALRKAKINAVGVVGLVENMVSGNAQRPGDIVKSYSGKTIEILNTDAEGRLVLADALSFTEKKFKPRFIIDLATLTGAIIVSLGSEYGGLFSNNDNLSKQLIDAGEKVEEKLWRMPLNDNFDKLINSKNADMQNINYVGGAGSTTAAQFLQRFILNKTPWAHLDIAGMAFSKYGGALNSSGATGYGVRLLNKLIEDNYE

SEQ ID NO: 139717 - protein, 453 aa, Unknown
  Bacterial polypetide isolated from the Sargasso Sea
MKKVLSDNEYSYVSDLIKLEDQKKKILTFDISSKKKIILISFKGNFNSSDAENLGAKCYEVFSKLKKNQYIVNTNTLSNQSIKLIGYFLHGIKLKSYKFEKYKTKKNKKDIFLNVIGKNVPNQKDQIKFKALEDGTFYTRDLVSEPGNILHPDEYAKRIKSLSKIGLKVNIYDDKKLKKLGMNTLLGVGQGSIRGSYLVTMEWNGTKNKSKPLAFVGKGVCFDTGGISLKPAKFMEDMTYDMAGSAVVVGLMKNLALRKAKVNAVGVVGLVENMPGGNAQRPGDIVKSYSGKTVEILNTDAEGRLVLADALTYTEKKFKPRFIVDLATLTGAIIVSLGSEYAGLFSNDDKLSKQLINAGEIVEEKVWRMPLNKNYDKLIDSKNADMQNINYVGGAGSTTAAQFLQRFILNNTPWAHLDIAGMAFSKYGGALNSGGATGYGVRLLNKLIEDNYE

SEQ ID NO: 139718 - protein, 439 aa, Unknown
  Bacterial polypetide isolated from the Sargasso Sea
DLLKVSNKKSKIISYDISSKKKIILVSIDKNLKNSDLESLGARFYDHIKDIKQSNFIVNSDTAKNTSENIIGHFLHGIKLKSYIFEKYKSKKNKNKITISVIGKKIPSKTDQLKFKAIEDGTFYARDLVSEPGNVLHPDEYAKRLTSLKKIGLKINIFNDKKLKKLGMNTLLGVGQGSIRGSYLVTMEWRGLKNNSKPLAFVGKGVCFDTGGISLKPAKFMEDMTYDMAGSATVVGLMKSLALRKAKVNAIGVVGLVENMPGGNAQRPGDIVKSYSGKTVEILNTDAEGRLVLADALTYTEEKYKPKFIVDLATLTGAIIVSLGSEYAGLFSNDDKLSSQLIDVGEKTEEKVWRMPLNENFDKLIDSKNADMQNINYVGGAGSTTAAQFLQRFILNKTPWAHLDIAGMAFSKYGGALNSGGATGYGVRLLNKLVEDYYE

SEQ ID NO: 139719 - protein, 512 aa, Unknown
  Bacterial polypetide isolated from the Sargasso Sea
MFQVNFVDVQAENAIFDGEGWDAVVVVTPDLVSIGIDEISLLAEHGAKVDKRVGKSPTLLFAPGLAGGRLIIAPVTQVADDYADVRIYGDAARVAIAIAKDAGAKRPLLYVVPSTTPKFGFASEVAALACGQELWQTLELREATGLTPAFEAIGLLSLSSEKSHLLNALEAGRVLARDLCGTEPERMSAKAFAEYCLQAFKGSVIKTAVVEDRDILERDYPLLSAVARSSFAVGRHQPRVVKLEYLPEGEITRTFLFAGKGVVYDTGGADLKVGGAMAGMSRDKGGASAVAGLFKTLSMLKPKGIRVIAELGLVRNSIGSEAFVTDEIITSHAGVRVRIGNTDAEGRLVLADLLSHLRIKAVSAMQPELFSVATLTGHVVRCYGNYPAAVENAVASGAQCAQTLALQASQWGEPFEVSTLRREDFAKIREVSGAADILSSNNAPSSVTARGHQYPAAFLLKASGLFEHGVNAAIPLAYTHLDIAGSATEGDPLYGKPTASPLVGLYQYLINR

SEQ ID NO: 139720 - protein, 231 aa, Unknown
  Bacterial polypetide isolated from the Sargasso Sea
DTGGYSLKPARFMEDMTYDMAGSAAVVGLMKTLALRKAKINAVGAVGLVENMVSGNAQRPGDIVKSYSGKTIEVLNTDAEGRLVLADALTFTEKKFKPKLMVDLATLTGAIIVSLGSEYAGLFSNDDKLSKQLINAGEIVDEKLWRMPLHKNFDKLMDSKNADMQNINYVGGAGSTTAAQFLQRFIINKTPWAHLDIAGMAFSKYAGALNTGGATGYGVRLLNQFVEDNYE

SEQ ID NO: 139721 - protein, 490 aa, Unknown
  Bacterial polypetide isolated from the Sargasso Sea
MANLLKIKHITNDWHSSNDQSVSVGIYDNLQLNRQLQGVNRKSGRAISHNLSADLIKGKVGEVTRIVGKKGFVAYVYGLGPKGNLTPETLRISAAAVTKSCIADKIDSVTFLLPIEAKENVMSQAASEGMVLGSYQFNEFKSKKDDLFELRHASIAGGNKKAVERGAIIGNSVCFARDLENRPGNIATPSHLADNALEIGNSSDVKVTVFDRDKFTKIGMGALAGVASGTDEPPKFIILEYFNGPKKQKPKVLVGKGLTFDSGGISIKPAAKMDEMKYDMCGSGVVLGVMKAVSIIKPKSNIIGIIPSTENMSGDKAYRPGDILTAYNGKTIEVLNTDAEGRLILADALSYACKHYDPEYILDFATLTGAVVVALGHIASGIMGTDPSLISAIKNSSEITGEKVWEFPLWDEYLDQVKSKIADVKNLGAPGQAGTIAGGAFLKAFVDDNIPWCHFDIAGSAWGDKKLAYQNPGTASGEVIRLILDLIEVK

SEQ ID NO: 139722 - protein, 434 aa, Unknown
  Bacterial polypetide isolated from the Sargasso Sea
SKTFDQVTRDWIKQNNFLGSLGQSVLCPTKTSDMVAVLGLGDENSRKRSRFSLAAAAKSLPAGNYEIINPEEVENLEIEALGWLLNNYVFDKYKNKKASQSYLVQPKTINSDRVLKFAEAEALARNLINTPSSDMGPEDLASAVKNLANKFDAEYSEIVGEKLIQQNFPLIHAVGRASAQEPRLLEIKNGSAGPKVTLVGKGVCFDTGGLNIKPGRSMGLMKKDMGGAANVLALTSMILSTGMNIQLRVLIPAVENSISGNSFRPGDILTARNGSTVEINNTDAEGRLVLADALSLASEGNPDLIISMATLTGAARVAVGADIAPFFAERNEVSDILKSSGIQQNDPVWPLPFWDPYEKMIEPDTADLDNAPSGGYGGAITAALFLRRFVTMPNSYIHFDIYSWSDTNKPGLAKGGITQGPRAIFDALPKILDI

SEQ ID NO: 139723 - protein, 296 aa, Unknown
  Bacterial polypetide isolated from the Sargasso Sea
AKNLCKSEGLKYKVIEEKEMQKLGMGMLLGVSQGSITPAKLIFMEYRHPEAKDTLAVIGKGVTFDSGGISLKPSKSMDEMKFDMCGSAAVLGAMNAVAKIKPKLNVIGVVPATENLPGGNAQRPGDIVTAYNGKKVEILNTDAEGRLILGDALSYTIEKYNPVAVVDLATLTGACVVALGHHATGALSNHSGFMERIRQAGEKSGDRVWELPNFPEYGELLKGKYGDLQNIGGPAGGTITGGKFLQHFVGDTPWVHLDIAGTAWNVKYVDYHPANGATGVGVRLLIDLISEWQPLN

SEQ ID NO: 139724 - protein, 389 aa, Unknown
  Bacterial polypetide isolated from the Sargasso Sea
MDFSIKACDGTKGSSNGFLTGKSDCIVIGVFESQTLSGAALEIDAATKGLLTRIIKAGDMDGKAGTTLFLHEVSGIGASRVLLVGLGKQDAFSQKAYGEAVRAAWRALLGTKIVQVTFTLAQLPILERSADWGVRAAILALRELTYRFTQMKSKPDNAPRALKRIVFSVNTGDEKAAKLAAKQGAALANGMDLTRDLGNLPSNVCTPTYLANTAKKLAKDWKLKVEVLGEKQCEALKMGSFLSVTAGSVEPAQFIVLQYHGGAAKAAPVVLVGKGVTFDTGGISLKPGEGMDEMKYDMCGAGSVLGTLRAVAEMGLKINVVGIIPAVENMPSATATKPGDIVTSMKGLTIEVLNTDAEGRLILCDALTYAERFKPAAVIDIATLTGACI

SEQ ID NO: 139725 - protein, 497 aa, Unknown
  Bacterial polypetide isolated from the Sargasso Sea
MAHLKTVSATTKNWSELPSDVIVVGVFSKGELSPMAKDVDETLGGQLQTAVKNGDVTGRAGESMIFYGKKHRLIAVGLGEKKNLDLEQIRRASGTAVKTATRKKLANIFMEEFAQDKDGAAQAQAEGVILASYQFLDYKTMNKQNNFMLKKVIVRTWDRSGLRKGSLIANAVCFARDLGNHPGNVATPTKLAQEARKIGKRGKMRVRVFDRAKIIKMGMGGLAGVAAGTDEPPKFILMEYWGTKKTEKPKVLVGKGLTFDSGGISIKPASKMDEMKFDMCGSAVVLGAMHAIADLKPKINVVGIVPSTENLSGAKAYKPGDILKAYNGKTIEVLNTDAEGRLILADALSYASKHYKPEYILDFATLTGAVVVALGYVATGIMGTDDTLIKKVKSSSNTTAEKVWELPLWKEYCHQIRSKIADVKNIGAPMQAGTIAAGAFLKEFVKDGIPWCHFDIAGTAWSDSETDNGGVVREKPYTPKEGASGNVIRLVLDLIEA

SEQ ID NO: 139726 - protein, 362 aa, Unknown
  Bacterial polypetide isolated from the Sargasso Sea
ADPGELVIIPQDKDNIRKVLLGRTYENDVYSKFICSNLSKKLPGNNYYISNLDPDDILPYISWALGCYKYDSAPISTSKLFLPDKIHNEVSIHVESIFFTMDLINHPANRLTTEEFAKIIGEYFTNKNCKVTEIIGEDLLKHNFPLIYEVGKASSHKPRLVEIQWGKKNDPKVTLVGKGITFDTGGLDIKPSSGMLLMKKDMGGAANILGLANMIIGNKLNLNLRVLIPIAENSISSNSFRPGDILNSRSGLTVEIGNTDAEGRLILADSLTLADEGSPDLIIDMATLTGAARVAVGPEIVPFFSTSEAISNILKKVSQNVQDPVWELPFFAPYGKWLNNEISDLNNSPNTPFAGSIIAAEF

SEQ ID NO: 139727 - protein, 236 aa, Unknown
  Bacterial polypetide isolated from the Sargasso Sea
IVGKGITFDTGGINLKTDSDSIVRMTSDMAGAAAALGTIKALALQKAPVNVVAVMAMAENMVSDKAMLPGDVLKSAAGLTIQVTNTDAEGRLVLADALWYANKEFQPRAMVDIATLTGAKVGAVGTYYAGLFSQQQSLVDQLTLAGEKVNEPLWRLPLGPQFGDEIKSDIADLKNTGSSTGASTAAWFLKQFAGDTPWAHLDIAGNALSRTDKEVNTKGATGYGVRLLTEWALKQP

SEQ ID NO: 139728 - protein, 430 aa, Unknown
  Bacterial polypetide isolated from the Sargasso Sea
MSKELTGLKGDFLVLRDFNKNKSEYKKYAWMKGLFANLDKYAVKNAVIYADTSHLFKDDNFLFDLAKTAEKTSYRYTDTNPNTKKELILKNVSLAVENASAAQKKVVELGYNVGSGANTARNLGDRPANHATPSYIANAVKGLAKDIGGFSVEILEEKDMKKLGMGCLLSVSRGSIEPAKLVTMQYKGGKKGAKPIVLVGKGVTFDTGGISLKPPQKMDEMKWDMSGAGSVIGTMCAVAKSKLPVNLVCTVALSENMPGSKATKPGDVVTSMSGQTVEILNTDAEGRLVLSDALTYVGKYDPKVVINTATLTGAVVVALGSVAAGVMGNDQKLVDEILEAGQTTGEKAWQLPMWDEYQTYLDSNFADIANIAPGRAAGTIEGACFLSRFTKDYRWAHIDIAGVADIGEGKAKGSTGVPVGLLFEYVKSNF

SEQ ID NO: 139729 - protein, 453 aa, Unknown
  Bacterial polypetide isolated from the Sargasso Sea
MTLKIKYLDSQKGSSKNKALFLGKDSKLSDFKGIFDDKINKKIVNFLNNNKKTQEDKILSLNLDFDQRLVIIYLIKKNDALQSEKIGAKFYDFIKSNNVNDILILGSNFSPVKNHIKFNEFIHGAELKAYEFNLYKTKKNKKEININILKNKNQINKNIKYNLDAVLNGINFTRDLVSEPGNILHPDEYAKRLTKLRKYGLKVTIYDQKKLKKLGCNALLGVGQGSIRGSYLVTIEWKGSKSKSKPLAFIGKGVCFDTGGYSLKPARFMEDMTYDMAGSAAVVGLMKTLALRKSKINAVGVVGLVENMVSGNAQRPGDIVKSYSGKTIEVLNTDAEGRLVLADALTFTEKKFKPKFMIDLATLTGAIIVSLGSEYAGIFSNDDRLSKQLIEAGEKVDEKLWRMPLHKNFDKLINSKNADMQNINYVGGAGSTTAAQFLQRFIINKTPWAHLDI

SEQ ID NO: 139730 - protein, 407 aa, Unknown
  Bacterial polypetide isolated from the Sargasso Sea
TDSETESLGAKFYDNIKEIKQNNFIINSDITKSISKKFIGHFLHGIKLKSYIFEKYKSKKSIKKMTMTVIGKNLTPKADQLKFKAIEDGTFFARDLVSEPGNILHPDEYAKRLNSLKKIGLKINVYDEKKLKKLGMHTLLGVGQGSIRGSYLVTMEWKGLKNNSKPLAFVGKGVCFDTGGISLKPAKFMEDMTYDMAGSATVVGLMKSLALRKAKVNAIGVVGLVENMPGGNAQRPGDIVKSYSGKTVEILNTDAEGRLVLADALTYTEEKYKPKFIIDLATLTGAIIVSLGSEYAGLFSNDDKLSKQLIDVGEKTEEKVWRMPLNKNYDKLIDSKNADMQNINYVGGAGSTTAAQFLQRFILNKTPWAHLDIAGMAFSKYGGALNSGGATGYGVRLLNKLVEDYYE

SEQ ID NO: 139731 - protein, 296 aa, Unknown
  Bacterial polypetide isolated from the Sargasso Sea
INKVLINNNRPLKYSLNGPKLNIELDRTYGFDDTLTLSIDYISRPKKGLYFVQNDRSYPDKNVQAWTQGEGMDNHNWVPLWDYPNDRSTFEVILTVDTPYTAISNGEFIGMKDNGITRTFHWHEQFPMVSYLISFVIGDYRRIEDKYGDLSIGYWVTPEYSDEDAFRSFSRTPEMVAYFNELTGIPYPYEKLDQIIVDDFMWGGMENITLIHQSSRTMHTDRARPDHTSDGLVAHEIAHQWFGNMLTTRNWANAWLNEGFATFLTYVWQEYDKGRDNAEYSRRWMMSSVRWADKSN

SEQ ID NO: 139732 - protein, 323 aa, Unknown
  Bacterial polypetide isolated from the Sargasso Sea
KDKFWFLETISRSIESGAYIFSTTKNKTAKTEKIGKDIISSQISLRNVAIITAKLSASDTKKAKIAVARGFSVGEGVNTAKHLGDLPANHATPKLIEKIVKNTVKNYSGLKVKSLNEKDLARLKMGSYLSVSKGSDEPPRMIVIEYKGGKKNEKPVALVGKGITFDTGGISLKPSSGMDEMKWDMCGAGTVFGVMCSLARIKADVNVIGIMACAENMPSARATKPGDVVTSMSGQTIEILNTDAEGRLVLADALTYVGRYKPSYVIDMATLTGAVVIALGSHASGVMANNQFLADKIIESGEETGDRAWQLPLWNEYKSCTKT

SEQ ID NO: 139733 - protein, 227 aa, Unknown
  Bacterial polypetide isolated from the Sargasso Sea
PAGIMYPESFANEARKLKSLGVKVTVLEAKDIERLNLGALAAVGKGSERPPKLVVAHWPGSKEAPIALVGKGITFDSGGYNIKATGTSIARMKSDMAGAATVLGTVKAMAIQKAPVNLVAIMPMAENMVSGHAMIPGDVIKTAQGLTVEVLNTDAEGRLVLADGLWYARENYRPSIIVDVATLTGSKVGALGSVYAGLFTDSEPLVQQLTFAGQQVGEKSLALAVRS

SEQ ID NO: 139734 - protein, 240 aa, Unknown
  Bacterial polypetide isolated from the Sargasso Sea
PKILVGKGLTFDSGGISIKPSSKMDEMKYDMCGSGVVLGVMKIIETLKPKMNVIGIIPSTENMSGDKAYRPGDVLKAYNGKTIEVLNTDAEGRLILADALSYASKHYDPEYILDFATLTGAVVVALGHVATGIMGTDKKLIDKIKDSAVTTSEKVWEFPLWDEYIDQVKSNIADVKNLGAPMQAGTIAGGAFLKSFVKDEIPWCHFDIAGTAWGDKSLPYQNKGTATGEVIRLVVDLMGI

SEQ ID NO: 139735 - protein, 301 aa, Unknown
  Bacterial polypetide isolated from the Sargasso Sea
FARPKYLAGEARRLARKTKNLSVSLLDERKMADLGMHSLLSVGNGSDQQSQLIVMKYQGAAANARPYCLVGKGITFDTGGISLKPGAKMDEMKFDMGGAGSVFGALYAASLMSLPINIVGVIAAAENMPSGRATKPGDVVTSMSGKTIEILNTDAEGRLVLCDALTYVERFSPIEVIDIATLTGAIIVALGQEATGIFSNDDQLAESLLAAGDRSHDRGWRFPIWEEYHRQLDSQFADLANIGTGGAGSITAACFLSQFAQNYKWAHLDIAGTAFRAAPKGGTGRPVPLLMQYLRERAGKI

SEQ ID NO: 139736 - protein, 278 aa, Unknown
  Bacterial polypetide isolated from the Sargasso Sea
MVSLANAHNEKELSIHLNDSIISNPFGNLVEVAARTVESSSYKFNQTKNKTVKKLSLSKVTFTSFQLSASESRNTSAAVKKGYAIGEGMNATKFLGDLPANHCTPRIIESKAKQLKKIFPKLKIKSLNEKQLAQLKMGSYLSVARGSIEPPRMIIIEYNGGPKNVAPAVLVGKGITFDTGGISLKPSGKMDEMKWDMGGAASVFGVMQTLARINAKVNVIGVMACAENMPSSKATKPGDVVTSMSGQTIEILNTDAEGRLVLCDALTFVKRYKPKYGN

SEQ ID NO: 139737 - protein, 211 aa, Unknown
  Bacterial polypetide isolated from the Sargasso Sea
MDEMKYDMSGAGSVIGTMQACAEMNLKNNVIGILACAENMPGSQATRPGDVVTSMSGITIEILNTDAEGRLVLCDALTFCKKYKPRYILDMATLTGACLVGLGKYPSGLFSNSSELSSKIKKSADNTGDRVWELPLYQDYFDELKTNFADIQNIGGRYGGAITAAAFLANFTKDQKWAHLDIAGTAWEIGQDKGSTGRPVKLLTDFVMTNK

SEQ ID NO: 139738 - protein, 278 aa, Unknown
  Bacterial polypetide isolated from the Sargasso Sea
KYKADTANVLFDDVTGVDANHLLAANFAHGANLRDHRFEKYKQTPSTQTVTYSFDVDSTKKTKTTYKQLESIQAGVFLARDLTSEVATEMTPVDFANAAKELESLGVTITVLKPEQLKELGMGALEAVGRGSDQGARLVVAHYKGSNDDPIALVGKGITFDSGGYSIKTGASIARMKSDMAGAAAVLGTVKAMAMAKADKNVVAVMGMAANMVSQFAVAPGDVVRTAEGLSVEILNTDAEGRLVLSDAMWYARKHFNPSIMIDVATLTGSKIRAVGNE

SEQ ID NO: 139739 - protein, 297 aa, Unknown
  Bacterial polypetide isolated from the Sargasso Sea
AIVPPDTDDSTITDVAMAARLGAYAFTAFKSSDPATARPVRSVTILVPAPAGAAREIIDKTETVGEAVCFTRDLVNTPPNALAPADLAQAAKDSVAGLPVTVKIWDEKALEKDNCGGILGVGKGSSRPPRLVRMTYAPRGATSHVALVGKGITFDTGGISIKPAANMDEMKADMSGAAAVIGAMRAIASLGLSVKVTGWVPAAENMPSGTAQRPGDVLRTYSGTTVEVLNTDAEGRLVLADALGMAVEDAPDLIVDVATLTGAQRIALGSRTAGVMANDDDARTQVIDAANAAGEAM

SEQ ID NO: 139740 - protein, 264 aa, Unknown
  Bacterial polypetide isolated from the Sargasso Sea
GVAQGTDEPPKFIILEYNNGGDQKPKILVGKGLTFDSGGISIKSASKMDEMKYDMCGSTVVLGVMQAIAMLKPKLNVVGIIPSTENLSGAKAYKPGDILTAYNGKTIEVLNTDAEGRLILADGLSYASKHYDPEYILDFATLTGAVLVSLGHVATGIMGTDDNLMKKVKKSSKSVAEKVWELPLWSEYCKQVQSNIADVKNTGAPMQAGSIAGGAFLKEFVKDDIPWVHFDIAGTAWGVKPDSMNPKGSATGWGIRLVLDMMGI

SEQ ID NO: 139741 - protein, 485 aa, Unknown
  Bacterial polypetide isolated from the Sargasso Sea
MAHITKVDVSNESWNETNAGLIAVGVFQDKSFTTMASNINDSNDGVLSKAIEMGDVKGKNGESNLFYIDGQRIQLLGLGKKEELNPDTMRLAGGRASRLAIDKKIDHIAIECPSNENEICQALAEGLVLGSYQFLDYKTKEKNAFELKSATVLGSDKNEISKGAMIGNAVCFARDLGNHPGNVTTPSKLAASAKDIADEGGMDLTVFEREEFTEMGMGGLAGVAQGTDEPPKFIILEYMKGGDKKPKVLVGKGLTFDSGGISIKPAGRMDEMKYDMCGSAVVLGVFKALALLKPELNVVGIIPSTENLNGAKAYKPGDILKAYNGKTIEVLNTDAEGRLILADGLSYASKHYDPEYILDFATLTGAMVVTLGHIATGVMGTDDKLIDNVLKASKATGEKVWELPLWEEFCKQIQSSIADVKNQGSPPQAGTIVAGAFLKEFVKKGIPWAHFDIAGTAWGGKPSSINPKGSATGWGVRLVLDMMDV

SEQ ID NO: 139742 - protein, 467 aa, Unknown
  Bacterial polypetide isolated from the Sargasso Sea
MCVGVYKDLSMTPSGSDIDQEFDGAISSAIKVGDIKGKSNEVNYFYANGHRLVVIGLGEKEKINSSKIRHAAATVLRSAISKKIDSLTIDCLCESLESCQAMGEGIVLGSYQFLDYKTKEKKKFEIQSVSMVGCSQKDQDEINKGVVIGSSVCLARDLGNHPGNKATPSLLAETAKDIADVGDMKLTVFDRDEFTQMGMGGLAGVAQGTDEPPKFIILEYNNGGDQKPKILVGKGLTFDSGGISIKPASKMDEMKYDMCGSTVVLGVMQAIAMLKPKLNVVGIIPSTENLNGAKAYKPGDILTAYNGKTIEVLNTDAEGRLILADGLSYASKHYDPEYILDFATLTGAVLVSLGHIATGIMGTDDTLIKKVKKSSQSVAEKVWELPLWSEYCKQVQSNIADVKNTGAPMQAGSIAGGAFLKEFVKDDIPWVHFDIAGTAWGVKPDSMNPKGSATGWGIRLVLDMMGI

SEQ ID NO: 139743 - protein, 266 aa, Unknown
  Bacterial polypetide isolated from the Sargasso Sea
MGSYLSVSKGSDEPPRMIIIEYKGGKKGEKPIALVGKGITFDTGGISIKPSSGMDEMKWDMCGAGTVFGVMCSLASIKADVNVVGIMACAENMPSAKATKPGDVVTSMSGQTIEVLNTDAEGRLVLADALTYVGRYKPSYVIDMATLTGAVVIALGSHASGVMANNQFLADKIIESGEATGDRAWQLPLWNEYKSCTRTNFADLANIGGGREAGTIHAAAFLSKFTEDYKWAHMDIAASAWSSSPKGGTGRPVPLICDLILNKKLK

SEQ ID NO: 139744 - protein, 490 aa, Unknown
  Bacterial polypetide isolated from the Sargasso Sea
MLVIPVNKKILASPEFKELDKKSNGYISRSIKDSISPSNQNHLISSLGGVKAKKILLINDLNEKDDIYLWLNKYKYIAKIANSIGCKNLAVLDGQNYPKGKDKFWFLETISRSIESGAYIFSTTKNKTAKTEKIGKDIISSQVSLRNVTIITAKLSSSDTKKAKIAVARGFSVGEGVNTAKHLGDLPANHATPKLIEKIVKNTVKNYSGLKVKSLNEKDLARLKMGSYLSVSKGSDEPPRMIIIEYNGGKKNEKPVALVGKGITFDTGGISLKPSSGMDEMKWDMCGAGTVFGVMCSLARIKADVNVVGIMACAENMPSARATKPGDVVTSMSGQTIEILNTDAEGRLVLADALTYVGRYKPSYVIDMATLTGAVVIALGSHASGVMANNQFLADKIIESGEETGDRAWQLPLWNEYKSCTKTNFADLANIGGGREAGTIHAAAFLSKFAEDYKWAHMDIAASAWSSSPKGGTGRPVPLICDLILNKKLK

SEQ ID NO: 139745 - protein, 511 aa, Unknown
  Bacterial polypetide isolated from the Sargasso Sea
MKNKNKFLLSVMALACLNSLNANAETFSFDTRNSLNSDTLVLFQSADSTTYSLDFLPQSTQDQLNLAVADNSFAGKRGEILEILVPSEIDAKRVLLVGIGDAKTLTPGEINTLGGNIAAKLETVPQATVRVLTQGLSNAPLFGSELAHGIELRSYRYTQFKASNRAEKNYQIGVDDLSQNQKHHKNLQAIEAGVFLARDLTNAPAGIMYPESFANEARKLKSLGVKVTVLEAKDIERLNLGALAAVGKGSERPPKLVVAHWPGSKEAPIALVGKGITFDSGGYNIKATGTSIARMKSDMAGAATVLGTVKAMAIQKAPVNLVAIMPMAENMVSGHAMIPGDVIKTAQGLTVEVLNTDAEGRLVLADGLWYARENYRPSIIVDVATLTGSKVGALGSVYAGLFTDSEPLVQQLTFAGQQVGEKVWRLPLDQAYDDELKSTIADLKNTGKEGSAGASSAAMFLKRFAGEQPWAHLDIAGNALTATDTAVVPAGATGYGVRLLSTWLTQPKAQN

SEQ ID NO: 139746 - protein, 265 aa, Unknown
  Bacterial polypetide isolated from the Sargasso Sea
LLGMGSFLSVSRGSKQPAQLIVIEYMPLKNEKPIVLVGKGITFDTGGISLKPSAKMDEMKYDMSGAGSVMGVMKACAQMKLKKNVIGILACAENMPGSQASRPGDVVTTMSGITVEILNTDAEGRLVLCDALTYSRKFKPKYVIDIATLTGACLVGLGKYPSGLFSKSDKISKLIEKSSERTGDRVWRLPLYDDYFDEIKTNFADIQNIGGRYGGAITAAAFLAKFTEGLEWAHLDIAGTAWDEGANKGSTGRPVGLLIDFVRSN

SEQ ID NO: 139747 - protein, 356 aa, Unknown
  Bacterial polypetide isolated from the Sargasso Sea
MKIIIPFLFIYLTIIHGEEVPYNPTPDRYVDIHHSRIDIKVNLDDSTVIGNVTHIMSSLRTDLYIIQLDCEDTEINKVLINNNRPLKYSLNGPKLNIELDRTYGFDDTLTLSIDYTSRPKKGLYFVQNDRTYPDKNVQAWTQGEGMDNHNWVPLWDYPNDRSTFEVILTVDTPYTAVSNGEFMGMKDNGITRTFHWYEHFPMVSYLISFVIGDYRRIEDKYGDLSIGYWVTPEYSDEDAFRSFSRTPEMVAYFNELTGIPYPYEKLDQIIVDDFMWGGMENITLIHQSSRTMHTDRARPDHTSDGLVAHEIAHQWFGNMLTTRNWANAWLNEGFATFLTYVWQEYNKGRDDAEYSR

SEQ ID NO: 139748 - protein, 392 aa, Unknown
  Bacterial polypetide isolated from the Sargasso Sea
MGFNYPKGKDKYWFLEMIARSMESGAYIFSTTKNKTAKSEKVGKDLVSSQVSLKSVSLITTKLSTAEVKKAKTSISIGFSVGEGVNTAKHLGDLPANHATPKLIEKIVKTTVKNYPSLKVKALNEKDLAKLKMGSYLSVSKGSDEPPRMIIIEYKGGKKGEKPIALVGKGITFDTGGISIKPSSGMDEMKWDMCGAGTVFGVMCSLASIKADVNVVGIMACAENMPSAKATKPGDVVTSMSGQTIEVLNTDAEGRLVLADALTYVGRYKPSYVIDMATLTGAVVIALGSHASGVMANNQFLADKIIESGEATGDRAWQLPLWNEYKSCTRTNFADLANIGGGREAGTIHAAAFLSKFTEDYKWAHMDIAASAWSSSPKGGTGRPVPLICDLI

SEQ ID NO: 139749 - protein, 342 aa, Unknown
  Bacterial polypetide isolated from the Sargasso Sea
MKIIITLILIIFAIVQAEEVPYNPTPDRYVDIHHSIIDVQVDLEDSTVVGNVTHTMSSLRTDLYIIQLDCEDTKIKRVTINNNRPLKYSLNGPKLNIELDRTYGFDDTLTLSIDYLAKPKKGLYFVQNDQNYPDKNVQAWTQGEGMDNHNWVPLWDYPNDRSTFEVILTVDTPYTAVSNGEFMGMVDNGITRTFHWHEHFPMVSYLISFVVGEFRRIEDKYGDLSIGYWISPEYSEEDALRSFSRTPEMVAYFNELIGIPYPYEKLDQIIIDDFMWGGMENITLIHQSSRTMHTDRARPDHSSDGLVAHEIAHQWFGNMLTTRNWANAWLNEGFATFLTYVW

SEQ ID NO: 139750 - protein, 680 aa, Unknown
  Bacterial polypetide isolated from the Sargasso Sea
NHNWVPLWDYPNDRSTFEVILTVDTPYTAVSNGEFMGMKDNGITRTFHWHEQFPMVSYLISFVIGDYRRIEDKYGDLSIGYWVTPEYRDEDAFRSFSRTPEMVAYFNELTGIPYPYEKLDQIIVDDFMWGGMENITLIHQSSRTMHTDRARPDHTSDGLVAHEIAHQWFGNMLTTRNWANAWLNEGFATFLTYVWQEYDKGRDDAEYSRRWMMSSVRWADKSNPRPMVQYYYVSDMDLFDSNIYAKGALVLNMLRQILGYDAFWRAVRNYAKEYQHKNVESQDLKRIFEDVTGQNLEWFFDQWVYTAGLPELEIKYKYNRRNEHVKLTVKQTQKVENSSLFRLPLTVLIDNGEIIRQEIWIEEEESTFLIPSIRNPNMVLVDEGHIIPKRMKFDKKHPELMYQAKNAPHILDRIWAIEQLADHPHKKSIENTLVFSLKNDPFYGVRIAAATALGEYEPRKGGEILMNSIDRQDNRVKRACIRSLRNYKGTKIRNFLLNTIMNSDNDYLVNDAYNTMFRVDSMTADSLYDWAMKQDSHNDIIRKSAIRSLSKYNKTNYKRLKVLLKYGEAPWSCRSTVLSTIGKHVKKHPELIQEFEELLFDPSRSVRTTAANLLSQYGDESHIPKLESLIIRDPITDRWITPLISRLKGEKDSEEKSYSIKNDLLDIRDRLDKLIKSQKE

SEQ ID NO: 139751 - protein, 511 aa, Unknown
  Bacterial polypetide isolated from the Sargasso Sea
MKNKNKFLLSVMALACLNSLNANAETFSFDTRNSLNSDTLVLFQSTDSTTYSLDFLPQSTQDQLNLAVADNSFSGKRGEILEILVPSEIDAKRVLLVGIGDAKTLTPGEINTLGGNIAAKLETVPQATVRVLSQGLSNAPLFGSELAHGIELRSYRYTQFKTSNRAEKNYQIGVDDLSKNQKHHKNLQAIEAGVFLARDLTNAPAGNMYPESFANEARKLKALGVKVTVLEAKDIERLNLGALAAVGKGSERPPKLVVAHWPGSKEAPIALVGKGITFDSGGYNIKATGTSIARMKSDMAGAATVLGTVKAMAIQKAPVNLVAIMPMAENMVSGHAMIPGDVIKTAQGLTVEVLNTDAEGRLVLADGLWYARENYRPSVIIDVATLTGSKVSALGTVYAGLFTDSEPLVQQLTFAGQQVGEKVWRLPLDQAYDDELKSTIADLKNTGKEGSAGASSAAMFLKRFAGEQPWAHLDIAGNALTATDTAVVPAGATGYGVRLLSTWLTQPKAQN

SEQ ID NO: 139752 - protein, 333 aa, Unknown
  Bacterial polypetide isolated from the Sargasso Sea
VCEDKSSLLVVLVDKSAKKNKLLIHMDKVTKGGLFKSINSFVKSKAKSLNLQSPDGVSSKEVLLMKTPEKSNTYLWLDLFKSISKIANSLGKQDISVMFACKCPDGKDESWLTEVCCRQIEASAYIFGSSKNKTVVKPSLKKASIIASSVTSSALKKLKTSAKVGFAVGEAMNAAKHLGDMPANLCTPRIIERKVKALKKPFPKLKISTFNEKDLAKLKMGSFLSVGRGSDEPSRMMTIEHKGGKAGEKPIVLVGKGITFDTGGISLKPSPAMDEMKWDMCGAASVFGVMIALARLNAKVNVVGLLACAENMPSAHATKPGDVVTSMSGQTMK

SEQ ID NO: 139753 - protein, 91 aa, Unknown
  Bacterial polypetide isolated from the Sargasso Sea
GTQAGDRAWQLPLFDEYQEQLDSPFADMANIGGPKAGTITAGCFLSRYTKAYPWAHLDIAGTAWISGGKDKGATGRPVPLLMQYLLDQAKA

SEQ ID NO: 139754 - protein, 271 aa, Unknown
  Bacterial polypetide isolated from the Sargasso Sea
MKTPEKSNTYLWLDLFKSISKIANSLGKQDISVMFACKCPDGKDESWLTEVCCRQIEASAYIFGSSKNKTVVKPSLKKASIIASSVTSSALKKLKTSAKVGFAVGEAMNAAKHLGDMPANLCTPRIIERKVKALKKPFPKLKISTFNEKDLAKLKMGSFLSVGRGSDEPSRMMTIEHKGGKAGEKPIVLVGKGITFDTGGISLKPSPAMDEMKWDMCGAASVFGVMIALARLKAKVNVVGLLACAENMPSAHATKPGDVVTSMSGQTIEIL

SEQ ID NO: 139755 - protein, 289 aa, Unknown
  Bacterial polypetide isolated from the Sargasso Sea
MSLAKSAKAKDFAYLMSSTTSKDFDLIWAAEAAARTFESAAYTFNATKNKTAKPVTVKKGTILIGGLTSAKLKAVKAAVKLGHAVGEGMNATKHLGDLPANHCTPRIIERKTKALKKDFPALKISSLNEKDMERLKMGSYLSVGRGSDEPSRMMTIEYKGGAKNKQPVVLVGKGITFDTGGISIKPSPAMDEMKWDMCGAASVFGIMQTLARLKAKVNVVGLLVCAENMPSAHATKPGDVVTSMSGQTIEILNTDAESRLGLCDALTYSKKFKPSHVIDMATLTGAVVI

SEQ ID NO: 139756 - protein, 274 aa, Unknown
  Bacterial polypetide isolated from the Sargasso Sea
MVKESIKEINSGSRKSIFLPAPTKIAAKNILLIKEPDPKAASFLVLRYYEEIMGLVKSAKAKDFAYLMSSTTSKDFDLAWAAEVAARTFESAAYTFNATKNKTAKPIIVKKGALLFAGLTPAKLRSVKAAVRLGHAVGEGMNATKHLGDLPANHCTPRIIERKTKALKKDFPALKISSLNEKDMERLKMGSYLSVGKGSDEPSRMMTIEYRGGAKDKQPIVLVGKGITFDTGGISIKPSPAMDEMKWDMCGAASVFGIMQTLARLKAKVNVVGL

SEQ ID NO: 139757 - protein, 314 aa, Unknown
  Bacterial polypetide isolated from the Sargasso Sea
MVVLVDKSAKKNKLLIHMDKVTKGSLFKSINSFIKSKAKSLNLQSPDGVSSKEVLLMKTPEKSNTYLWLDLFKSISKIANSLGKQDISVMFACKYPNEKDENWLTEVCCRQIEASAYIFGSSKNKTVVKPSLKKASIIASSVTSSALKKLKTSAKVGFAVGEAMNAAKHLGDMPANLCTPRIIERKVKALKKPFPKLKISTFNEKDLAKLKMGSFLSVGRGSDEPSRMMTIEHKGGKAGEKPIVLVGKGITFDTGGISLKPSPAMDEMKWDMCGAASVFGVMIALARLNAKVNVVGLLACAENMPSAHATKPGD

SEQ ID NO: 139758 - protein, 302 aa, Unknown
  Bacterial polypetide isolated from the Sargasso Sea
MRIANLNTSMLVIPVNTNTKKNRVFKEIDGVSNGYISKTIANQLKDKTNTVLLPQIQGVKAKNILLIKSLSKEDQIYKWLKHFQSITRTANQYKCNDISILIDAVAPKSKNKFWVIETIARVVESNAYIFSQTKNKTAIKPTLKRLQILTSDFSNQEILKGKQYAKKGFAIGEGVNTAKYLGDLPANHCTPRIIEKKVKAMKRDFPSLKIKSFNEKDLAKLGMGSFLSVGHGSDEPSRMMVIEYKGGSASEKPVALVGKGITFDTGGISIKPSPAMDEMKWDMCGAASVFGVMSMLARLTQK

SEQ ID NO: 139759 - protein, 503 aa, Unknown
  Bacterial polypetide isolated from the Sargasso Sea
MAYKVLNNVHLKDATGVSSLSTDMLVLVINKNTKNDTSFMELNKKSKNYLSKTIKSHLDQPGSSILLPKTDGINAKHILLVKGLDVDAPTHKWLSLYQSIAQKGNQNKCKDISVMPGTVSPKGKDELWLIEMVSKTIESNVYIFSETKNKTSKKPSVKKLTILTTGLTGSKLTKAKQAAKVGYAIGEGVNTAKYLGDLPANHCTPKIIEKKVKAMTKDFPKLKVKSFNERQMHKMGMGSFLSVSRGSEEPARMMVIEYKGGKSTDKPIALVGKGVTFDTGGVSIKPSPGMDEMKWDMCGAATVFGVMSTLARLNADVNVVGVMGCAENMCSSKATKPGDVVTSMSGQTIEILNTDAEGRLILADCLTYVGKYKPSYVIDMATLTGAVVIALGRHASGVMANDQYLADKIIESGEESGDRAWQLPLWDEHQSCTKTKYADLANIGGGREAGTIHAAAFLSKFTNDYKWAHIDIAATASYSTPVKAGTGRPVPLISQLILSKKLK

SEQ ID NO: 139760 - protein, 423 aa, Unknown
  Bacterial polypetide isolated from the Sargasso Sea
MKIACSEFTELGSQMVLPLFEGVDKAPNNSLRGLSRSQRSLVRDALSSGGFDGKKGRRMTLWTPGCNIVLVGMGEKDSLGHKRARNTGARLIASMSKKKGIDVTVRFTSGWSVKRMIDFAEGMLLRDYEFLEHQESPKDHISEPWNVSFQASSRYQESLARGLSKVGSVAEGVHLARDLGNEPANVLYPMEYAKRAEEWAKDKANVEVEVFDWKKLQELGMGGLINVGKGSDRKPCMVLFTLNPDADEGVQRPCIVGKGITFDTGGISIKPTGGMWDMKYDMCGAATVFGLMHSLHATGYQRRVNGIACLAENMPGSGAYRPGDVFKTYSGKTIEVFSTDAEGRNVLADGLWKAGELDPEYIVDLATLTGAVVVALGNQISGMWGYDEGICKRLKQLQRGAASLSGGCLLRSVPQVHDRLCIR

SEQ ID NO: 139761 - protein, 259 aa, Unknown
  Bacterial polypetide isolated from the Sargasso Sea
MKTPDKSNTYLWLDLFKSISKTANSLGKQDISVMFACKCPDGKDESWLTEVCCRQIEASAYIFGSSKNKTVVKPSLKKASIIASSVTASALKKLKTSAKVGFAVGEAMNAAKHLGDMPANLCTPRIIERKVKALKKPFPKLKISTFNEKDLAKLKMGSFLSVGRGSDEPSRMMTIEHKGGKAGEKPIVLVGKGITFDTGGISLKPSPAMDEMKWDMCGAASVFGVMIALARLNAKVNVVGLLACAENMPSAHATKPGDV

SEQ ID NO: 139762 - protein, 505 aa, Unknown
  Bacterial polypetide isolated from the Sargasso Sea
MAYKVLNNILLKDVSSSGLSSLKTDLLVLVINKETKTNASFKDLNKISKNYLSKAISSHLKESGSSVLLPNIDGIHAKNLLLVKGLDKKDPVHKWLSMYQSVAHKGNHIGSKDISVMPGSVMPNGKDEFWLIEMVSKTIESNVYIFSETKNKTVKKPSVKKLTVLTSGLSGSILNKAKKAAKKGYAIGEGVNTAKYLGDLPANHCTPRIIERKVKAMTKDFPKLKVKSFNEKDMQKMGMGSFLSVSRGSEEPARMMVIEYKGGKASEKPIALVGKGVTFDTGGVSIKPSPAMDEMKWDMCGAATVFGVMSTLARLDADVNVVGIMGCAENMCSSKATKPGDVVTSMSGQTIEILNTDAEGRLILADCLTYVEKYKPSYVIDMATLTGAVVIALGRHASGVMANDQYLADKIIESGEESGDRAWQLPLWDEHQSCTKTKYADLANIGGGREAGTIHAAAFLSKFTKNYKWAHIDIAATASYSTPVKAGTGRPVPLISELILSKKLK

SEQ ID NO: 139763 - protein, 496 aa, Unknown
  Bacterial polypetide isolated from the Sargasso Sea
MAYKVLNNVSVKDVTSSDLLSLKSDLLVIVINKNTKDKVVNQLAKDVSSHLKESGSSVLVPNAKSFNAKNVLLVKGFQDSDQIHKLISMYQSIAQKGNQLKAKDISIMPGTVYPKGKCEMWLIEMVAKTIESNVYIFSETCNKTAKKPSVKKLNILVSSLTKSDLIKAKNAAKKGYAIGEGVNSAKYLGDLPANHCTPRIIEKKVKAMTKDFPKLKVKSFNENQMKKMGMGSFLSVSRGSEEPARMMVIEYKGGKSSEKPVALVGKGVTFDTGGVSIKPSPAMDEMKWDMCGAATVFGVMSMLARLNANVNVVGIMGCAENMCSSKATKPGDVVTSMSGQTIEILNTDAEGRLILADCLTYVGKYKPSHVIDMATLTGAVVIALGRHASGVMTNDQHLADMIIESGEESGDRAWQLPLWDEHQSCTNTKYADLANIGGGREAGTIHAAAFLSKFTKDYKWAHIDIAATASYSTPVKAGTGRPVPLISELLLSKRLK

SEQ ID NO: 139764 - protein, 306 aa, Unknown
  Bacterial polypetide isolated from the Sargasso Sea
MSYRVLNSISVKNLSGKEFVKDKSSLLVVLVDKSAKKNKLLIHMDKVTKGSLFKSINSFVKSKAKSLNLQSPDGVSSKEVLLMKTPDKSNTYLWLDLFKSISKIANSLGKQDISVMFACKCPDEKDESWLTEVCCRQIEASAYIFGSSKNKTVVKPSLKKASIIASSVTSSALKKLKTSAKVGFAVGEAMNAAKHLGDMPANLCTPRIIERKVKALKKPFPKLKISTFNEKDLAKLKMGSFLSVGRGSDEPSRMMTIEHKGGKAGEKPIVLVGKGITFDTGGISLKPSPAMDEMKWDMCGAASVLA

SEQ ID NO: 139765 - protein, 297 aa, Unknown
  Bacterial polypetide isolated from the Sargasso Sea
KDESWLTEVCCRQIEASAYIFGSSKNKTVVKPSLKKASIIASSVTSSALKKLKTSAKVGFAVGEAMNAAKHLGDMPANLCTPRIIERKVKALKKPFPKLKISTFNEKDLAKLKMGSFLSVGRGSDEPSRMMTIEHKGGKAGEKPIVLVGKGITFDTGGISLKPSPAMDEMKWDMCGAASVFGVMIALARLNAKVNVVGLLACAENMPSAHATKPGDVVTSMSGQTIEILNTDAEGRLVLCDALTYVKKYKPAHVIDIATLTGACVVALGNYASGLMANDQKLADKILQAGENSGDRA

SEQ ID NO: 139766 - protein, 359 aa, Unknown
  Bacterial polypetide isolated from the Sargasso Sea
YLIYLKIANSLGKQDISVMFACKCPDGKDESWLTEVCCRQIEASAYIFGSSKNKTVVKPSLKKASIIASSVTSSALKKLKTSAKVGFAVGEAMNAAKHLGDMPANLCTPRIIERKVKALKKPFPKLKISTFNEKDLAKLKMGSFLSVGRGSDEPSRMMTIEHKGGKAGEKPIVLVGKGITFDTGGISLKPSPAMDEMKWDMCGAASVFGVMIALARLNAKVNVVGLLACAENMPSAHATKPGDVVTSMSGQTIEILNTDAEGRLVLCDALTYVKKYKPAHVIDIATLTGACVVALGNYASGLMANDQKLADKILQAGENSGDRAWQLPLWDEYKSCTKTNFADLANIGGAGAGTVTAAA

SEQ ID NO: 139767 - protein, 288 aa, Unknown
  Bacterial polypetide isolated from the Sargasso Sea
ITTASQALVGLSIPSAAIDVTSFKVKGVNTDWLVESAMASLSHSSYQFNQYKSKASKKFQLKSAVFYVDALEKRGLAKTIKCGNALDEGLAFAKDLGNQPPNICNPDYLLSETRRLLKGEKVKVSQLDERKMTSLGMGAFMAVSKGSDAQGRMIIIEYSGGKKGDAPTVLVGKGITFDTGGISLKPPPGMDEMKFDMCGAAAVLGVTRAVISAKLPINLVTIVAAAENMPSGRATRPGDIVTTSSGKTVEILNTDAEGRLVLCDAINYALRYKPKSIVDVATLTGACI

SEQ ID NO: 139768 - protein, 161 aa, Unknown
  Bacterial polypetide isolated from the Sargasso Sea
GDILTTMSGQTVEVLNTDAEGRLVLCDALTYVERFDPDTVIDVATLTGACIVALGAHATGLLANHNPLAHDLLKASEQSGDRAWQLPLWDDYQDQLESPFADFTNLGGRAAGTITAACFLSKFTKKYNWAHLDVAGTAWRSGANKGATGRPVPMLTQYLLN

SEQ ID NO: 139769 - protein, 143 aa, Unknown
  Bacterial polypetide isolated from the Sargasso Sea
MEFSVKSGSPEKQRSACIVVGVYEPRRLSGIAEQLDKISEGYISNLLRRGDLEGKPGQMLLLHHVPNVLSERVLLVGCGKERELDERQYKQIITKTINTLNETGSMEAVCFLTELHVKGRDTYWKVRQAVETTNSSLYSFDAL

SEQ ID NO: 139770 - protein, 213 aa, Unknown
  Bacterial polypetide isolated from the Sargasso Sea
EMKYDMCGAATVVGVTAALAEMSASVNFVGIIPAVENMPDGAASRPGDIVTSMSGKTIEILNTDAEGRLILCDALTYCEKFDPEVVIDIATLTGACIVALGSQASGLMSNDDRLADDLLAAGQRCGDKAWRLPIWDGYQKQIDSPFADMANVGGRAAGTITAACFLARFAENYRWAHLDIAGTAWVSGKNKSASGRPVPLLVEYIMHRAALLS

SEQ ID NO: 139771 - protein, 219 aa, Unknown
  Bacterial polypetide isolated from the Sargasso Sea
DEMKFDMCGAAAVLGAMKIIGQINPQINVVGVIAATENLPGGDAQRPGDIVTAYNGKRVEILNTDAEGRLILGDALSYVVKEFKPNAVIDLATLTGACITALGHYASGAITNNDILMEQVRKAANLSGDKVWQLPSFPEYGESIKGKYGDLQNIGVGDSGTIIGGMFLEHFVDNTPWVHLDIAGTAWNVKHLGYQPNSGATGVGVKLLADLVQNWELIK

SEQ ID NO: 139772 - protein, 295 aa, Unknown
  Bacterial polypetide isolated from the Sargasso Sea
MVARKIVSKNKSASLKVLNEAQMKKLGMNSLLSVTAGAQEPAKMIIAEFKNGQKSQKPVAIVGKGITFDTGGISLKPSNKMDEMKYDMCGAATTIGLLQMVTDLNLPINAVFVVPACENIPSSTATLPGDVVKSMSGTTIEVLNTDAEGRLILADALTYTQRYKPKLIIDMATLTGACVVALGAHHSGLMSNSDQLAEKLFQCGQSTDDVTWRLPLTEEYANQIVSNFADVANISTRGSGAGTITAGCFLQKFVGDYDWAHIDIAGVAWAEGANKGATGRPMGLMSEFLINESNT

SEQ ID NO: 139773 - protein, 189 aa, Unknown
  Bacterial polypetide isolated from the Sargasso Sea
LKLPINVVGIIPATENMPSGDATNPGDIFTSMSGQTVEVLNTDAEGRLILCDAITYSKKYNPEVVIDIATLTGACVIALGKHATGLLSNHNPLARELINAGEESGDRVWQLPLWDEYQQQLNSPFADIANIGGREAGTITAACFLSRFAEKLQWAHLDIAGTAWLSGSKKGATGRPVSLLMQYILNKIK

SEQ ID NO: 139774 - protein, 294 aa, Unknown
  Bacterial polypetide isolated from the Sargasso Sea
DLKPKDLAFTAKNIARQHKMECTVLEEKQMKKLGMEMLLGVSKGSREPAKLILMEYFHQKAKQTVALVGKGVTFDSGGISLKPGKNMDEMKFDMCGAAAVLGAMEIIGQLNPKINVIGVIAATENLPGGDAQRPGDIVTAYNGKRVEILNTDAEGRLILGDALSYVVKEFKPNAIIDLATLTGACITALGHYASGAITNNNKLMELVRKAANLSGDRVWQLPSFPEYGESIKGKYGDLQNIGVGDSGTIVGGMFLEHFVDNTPWVHLDIAGTAWNVKHVGYQPNSEQQDWSEAT

SEQ ID NO: 139775 - protein, 504 aa, Unknown
  Bacterial polypetide isolated from the Sargasso Sea
MAYKVLSSLTANNINSADLLKVKTDLLIIAVNKKTSSASELNALQSNPQSLMKESIKEINSGSRKSIFLPAPAKVAAKNILLIKEPDSKAASFLVLRYYEEIMSLVKSAKAKDFAYLMSSTTSKDFDLVWAAEAAARTFESAAYTFNATKNKTAKPVTVKKGTILIGSLTSAKLKAVKAAVKLGHAVGEGMNATKHLGDLPANHCTPRIIERKTKALKKDFPALKISSLNEKDMERLKMGSYLSVGRGSDEPSRMMTIEYKGGAKNKQPVVLVGKGITFDTGGISIKPSPAMDEMKWDMCGAASVFGIMQTLARLKAKVNVVGLLVCAENMPSAHATKPGDVVTSMSGQTIEILNTDAEGRLVLCDALTYSKKFKPSHVIDMATLTGAVVIALGSPATGVMANNQPLADKILAAGEKSGDRAWQLPLWEEYAHCTKTNFADLANIGGGREAGTIHAASFLSNFTKDFKWAHMDIAASAWNGGAKKGGTGRPVPLLAELILNGNL

SEQ ID NO: 139776 - protein, 492 aa, Unknown
  Bacterial polypetide isolated from the Sargasso Sea
MKKNLLKVKSDSLIIGVNEGNALNPISSKIDQATNGVIKKLAKRKEFEGKVGQQAYVAAPEGLSAERLYLIGFGKSKDLLSNEDIDKILNSTISSLKSSKSNNASICFPSLKYSNKSQNDSWLLQKMATFFENRVYTYDAKLNKKNKSVNHLKKVNLFLESSLSATNQRKALKTGQVIGQGMNSAKDLANLPGNICTPSYLASTSRAAAKKYAKLSCKVFGEREMKKMGMDCLLSVGNGSAQESKLISMSYLGGKKGDQPYAIVGKGITFDTGGISLKPGAAMDEMKFDMCGAASVIATMQVVSELKLPINVVGVVASAENMPGSKATKPGDVVKTMSGLTVEILNTDAEGRLVLADALTYVKRFKPKTVVDIATLTGAVIIALGYSTSGLMSNNDKLAKDLLNAGQKASDKAWQLPLWDVYQKDLDSNFADIANIGGRAGTITAACFLSRFAEDFPWAHLDVAGTASYKGAAKGGSGRPVPLLSQYLIDKA

SEQ ID NO: 139777 - protein, 312 aa, Unknown
  Bacterial polypetide isolated from the Sargasso Sea
MNAAKDLANLPGNVCTPSYLASTSRTASRNYQNLSCKVFGEKEMKKMGMDCLLSVGNGSAQESKLISMNYQGGKKGQKPYAIVGKGITFDTGGISLKPPATMDEMKFDMCGAASVIATMQVVAELKLPINLIGVVASAENMPGSKATKPGDVVKTMSGKTVEILNTDAEGRLVLADALTYVERFNPVSVIDIATLTGAVIMALGYSTSGLMSNNDELAKRLLEAGEKASDRAWQLPLWDVYQKDLDSNFADIANIGGRAGTITAACFLSRFAEKYPWAHLDVAGTASLKGAAKGGSGRPVPLLSQYLIDIAG

SEQ ID NO: 139778 - protein, 188 aa, Unknown
  Bacterial polypetide isolated from the Sargasso Sea
MIKPKSNIIGVVASAENMPGSKATKPGDVVKTMSGQTVEILNTDAEGRLVLCDALTYVERFKPKNVIDIATLTGAVIVALGHVASGLMSNNQKLADKIIDAGHASMDKAWQLPLWDEYQGDLDSNFADIANIGGRAGTITAACFLSRFTKKYPWAHLDVAGTAHGSGKAKASRGRPVPLLTNYLLSQS

SEQ ID NO: 139779 - protein, 249 aa, Unknown
  Bacterial polypetide isolated from the Sargasso Sea
MITIRYNGAKANQAPVILIGKGITFDTGGISLKPPPAMDEMKFDMCGAASVIGATMAAIEAKLKINLITIVAAAENMPSGRATRPGDIVKSYSGKTIEILNTDAEGRLVLCDAIAYAKSFKPKAIVDVATLTGACIVALGSHASALYSNDDQLANSLESAANESGDKVWRMPLWEEYQGNLKSNFADMANVGGREAGSVVAACFLSRFADNEKWAHLDIAGSAFHSGPRKGSTGRPVPLLFKYLQSQEN

SEQ ID NO: 139780 - protein, 434 aa, Unknown
  Bacterial polypetide isolated from the Sargasso Sea
APAKVAAKNILLIKEPDSKAASFLVLRYYEEIMSLVKSAKAKDFAYLMSSTTSKDFDLVWAAEVAARTFESAAYTFNATKNKTAKPVTVKKGTILIGGLTSAKLKAVKAAVKLGHAVGEGMNATKHLGDLPANHCTPRIIERKTKALKKDFPALKISSLNEKDMERLKMGSYLSVGRGSDEPSRMMTIEYKGGAKNKQPIVLVGKGITFDTGGISIKPSPAMDEMKWDMCGAASVFGIMQTLARLKAKVNVVGLLVCAENMPSAHATKPGDVVTSMSGQTIEILNTDAEGRLVLCDALTYSKKFKPSHVIDMATLTGAVVIALGSPATGVMANNQPLADKILAAGEKSGDRAWQLPLWEEYAHCTKTNFADLANIGGGREAGTIHAASFLSNFTKDFKWAHMDIAASAWNGGAKKGGTGRPVPLLAELILNGNL

SEQ ID NO: 139781 - protein, 415 aa, Unknown
  Bacterial polypetide isolated from the Sargasso Sea
KGLSSEDIDKIAMSVTTCLTTKKSSTGIVSLPSMKHESKENTDETLLQKIGTAVESKAYTYDAKLNKKNKKINYLKKVSIVIDSKQGVAKLRKGLKTGQVIGQGMNVAKDLANLPGNVCTPSYLATSSRSAANKYQKLSCRVYGEKEMKKMGMDCLLSVGNGSAQESKLISMNYQGGKKGDKPYAIVGKGITFDTGGISLKPPPTMDEMKFDMCGAASVIATMQVVSELKLPINIVGVVASAENMPGSKATKPGDVVRTMSGKTVEILNTDAEGRLVLADALTYVERFEPRSVVDIATLTGAVIMALGYSTSGLMSNNDKLAEELLEAGRKASDRAWQLPLWDVYQKDLDSNFADIANIGGRAGTITAACFLSRFAEKYPWAHLDVAGTASYKGAAKGGSGRPVPLLSQYLIDKS

SEQ ID NO: 139782 - protein, 278 aa, Unknown
  Bacterial polypetide isolated from the Sargasso Sea
LSCRVYGEKEMKKMGMDCLLSVGNGSAQESKLISMNYQGGKKGDKPYAIVGKGITFDTGGISLKPPPTMDEMKFDMCGAASVIATMQVVSELKLPINIVGVVASAENMPGSKATKPGDVVRTMSGKTVEILNTDAEGRLVLADALTYVERFEPRSVVDIATLTGAVIMALGYSTSGLMSNNDKLAEELLEAGRKASDRAWQLPLWDVYQKDLDSNFADIANIGGRAGTITAACFLSRFAEKYPWAHLDVAGTASYKGAAKGGSGRPVPLLSQYLIDKS

SEQ ID NO: 139783 - protein, 271 aa, Unknown
  Bacterial polypetide isolated from the Sargasso Sea
MKKLGMGSLLSVSEGSVEPAKLVTMQYKGGKKDAKPIVLVGKGITFDTGGISLKPGAKMDLMKWDMSGAGSVIGTMCAVAASKLPVNLVCTVALSENMPAGNATKPGDVVTTMSGQTVEILNTDAEGRLVLCDALTYVKKYNPKVVINTATLTGAVIIALGDVAAGVMGNDQKLIDKILEAGQNTGEKAWQLPLWDEYQSYLDSNFADIANIAPGRAAGTIEAGCFLSRFTEDYKWAHIDIAGVADIGEGKNKGSTGKPVGLLFEYVNSNR

SEQ ID NO: 139784 - protein, 362 aa, Unknown
  Bacterial polypetide isolated from the Sargasso Sea
MKFATNNKKINEIKSDCLMVSVFDDGKLRGATKLVNTSNEKLIEDFIKNKDIQGKIGQTRIIPVTGKSYKRIVLVGCGTFENFSQKNYRKAVISALKKISLSNHKKVVSLIHDGAENINSPKKAYRMARVLAESWHAISYQYTTTKESNHKKLNLRRIEIGTNGKKATKDLKIGLEHGDAIGKATQLVRHLGDLPANICTPSYLASVARKIVSKNKSASLKVLNESQMKKLGMNSLLSVTAGAQEPAKMIIAEFKNGQKSQKPVAVVGKGITFDTGGISLKPSNKMDEMKYDMCGAATTIGLLQMVTDLNLPINAVFVVPACENIPSSTATLPGDVVKSMSGTTIEVLNTDAEGRLILADAL

SEQ ID NO: 139785 - protein, 490 aa, Unknown
  Bacterial polypetide isolated from the Sargasso Sea
MAFYKALENIELKKYSEATPETFAVVFYSKASLKNSSLFDKDMKQKVSTYFEDEKRTSMLLSKELTGDERDILIIKDFDTKKPDHKKYKWMNSIFVGLDKYGVVQASIYADTSSLFKDKGFVFDLAKIAEKATYRYTDTNPNTKSEAVLKTIDICVEKLNASLNKSVELGFNVGRGANTARNLGNRPANHATPTYIANHVNELAKEIGGFTVEILEEKDMKKLGMGSLLSVSEGSVEPAKLVTMQYKGGKKDAKPIVLVGKGITFDTGGISLKPGAKMDLMKWDMSGAGSVIGTMCAVAASKLPVNLVCTVALSENMPAGNATKPGDVVTTMSGQTVEILNTDAEGRLVLCDALTYIKKYNPKVVINTATLTGAVIIALGDVAAGVMGNDQKLIDKILEAGQNTGEKAWQLPLWDEYQSYLDSNFADIANIAPGRAAGTIEAGCFLSRFTEDYKWAHIDIAGVADIGEGKNKGSTGKPVGLLFEYVNSNR

SEQ ID NO: 139786 - protein, 199 aa, Unknown
  Bacterial polypetide isolated from the Sargasso Sea
MKISIKSLDDIQKMKVAGKLAAQVLDMITPYVKPGVSTGELDRLCYEHIVNVQGAVPANIGYKGYEKTICSSVNQVICHGIPDNNRILKDGDILNIDVTVIKNGWHGDTSKMFLVGKCAPHNERLVRITQECLYKAIEVVKPGAYLGDIGYIIEKHAKENHYSVVEDYCGHGIGQIYHEDPQVLHYGKKGTGPQIKEGM

SEQ ID NO: 139787 - protein, 113 aa, Unknown
  Bacterial polypetide isolated from the Sargasso Sea
MNNTIHSSDDFEGMRKAGNLAASTLDLLVEKVKPGVSTEEIDNIAFDYIVRHGGLIAPLFYKGYPKSVCTSINHVICHGIPSSRILENGDIVNIDVTVIVDGWHGDTSRMFPV

SEQ ID NO: 139788 - protein, 202 aa, Unknown
  Bacterial polypetide isolated from the Sargasso Sea
SIPANIGYNGYEKTLCTSINNVICHGIPDAQKKLKDGDIVNIDVTVLHDGWHGDTSRMFLVGKVAPHAKRLVDITRDCMYAGIEQVKPGAKLGNVGHAIQVMAEKNYYSVVRDYCGHGIGKVYHEEPQVMHYGEKDTGIELKEGMCFTIEPMINLGTHHAKVLEDGWTVVTKDGKLSAQWEHTVAVTDSGYEILTLGEEKVV

SEQ ID NO: 139789 - protein, 264 aa, Unknown
  Bacterial polypetide isolated from the Sargasso Sea
MRNNNIPIHTKKDFEGMREAGSLAAEVLDTLNEKIVPGISTQEINDICHDQIIQNKAIPAPLNYKGFPKSVCTSVNHVVCHGIPSEKKILSDGDIVNVDVTVILNGWHGDSSRMFVAGKTNKKSYEFLKITYESLLIGISEAKPGKHIGDIGNKIQKLAEGKGYSVVRDFCGHGIGKEFHTPPSVLHFGEPGEGPILEPGMFLTIEPMINLGGWQTKILNDGWTAVTKDKSLSAQFEHTIGITEEGNEIFTLSKNNTAFPIKDV

SEQ ID NO: 139790 - protein, 158 aa, Unknown
  Bacterial polypetide isolated from the Sargasso Sea
MSDYKEKFEKMKVAGNLAARTLDMLTENIKEGVSTDYIDKLGYEFIRDNGGYSAPLYYRGFTKSLCTSLNHVVCHGIPSDRILRDGDAVNVDVTAIVDEHYGDTSRMFCIGKTPVKLNNLIETTYESMMRAIKILKPGIKLGDIGYTIQSFVEEKVFL

SEQ ID NO: 139791 - protein, 139 aa, Unknown
  Bacterial polypetide isolated from the Sargasso Sea
MNQRTIKLHQEQDFVAMRKAGKLAAMTLDYITPFVKPGVTTDELDKLCHNFISDHNGISAPLGYRGFPKSICTSINHVVCHGIPSDKKLKNGDIINIDVTPTLDGWHGDSSRMYPVGKPSRKALRLIDVTYEAMMKGIE

SEQ ID NO: 139792 - protein, 63 aa, Unknown
  Bacterial polypetide isolated from the Sargasso Sea
MTFTIEPMINSGKYDVKMLNDGWTAVTKDKSLSAQFEHTLGITENGYEIFTESAKGYSKPPYL

SEQ ID NO: 139793 - protein, 117 aa, Unknown
  Bacterial polypetide isolated from the Sargasso Sea
MLTVPKDVVRTDYAETSYPKSEAESRLQQILYELKDSEKEQLRRCCVVSRGALDAVVRAIRPGVVPDELDRICHNYITQHGGYPSPLNYYGFPKSCCISVNEVICHGIPDARPLEKG

SEQ ID NO: 139794 - protein, 151 aa, Unknown
  Bacterial polypetide isolated from the Sargasso Sea
MFFVGEVSVKAKNLVNTTYDALIKTIKILKSDVYLGDIGFSIQSYVESKGFSVVRDFCGHGIGKKFHESPNILHYGEKGKGQKLKEGMIFTLEPMINEGIFETKTLKDGWTAVTKDKLLSAQFEHTVGITNNGCEIFTLSKKGLDFPPYKI

SEQ ID NO: 139795 - protein, 98 aa, Unknown
  Bacterial polypetide isolated from the Sargasso Sea
VRDFCGHGLGKKFHEPPNILHNGEPKTGNRLSAGMLFTIEPMINEGEYNTKLLQDGWTAVTKDKSLSAQFEHTVGVTSNGYEIFTLSKKKMDLPETLK

SEQ ID NO: 139796 - protein, 206 aa, Unknown
  Bacterial polypetide isolated from the Sargasso Sea
NTQQAIPAPLNYKGFPKSICTSVNHVICHGIPSEKKVLKEGDIINIDVTVIKDSYHGDTSKMWIVGKPKPGTERLIQITQECLYKGIELVKPGTRLGDIGHVIQQHAEKHRYSVVRDYCGHGIGKVFHEEPQVMHYGKPGTGMELKEGMTFTIEPMINQGKYQTKLLADGWTVVTKDHKLSAQWEHTILVTADGYEVLTRRSEESF

SEQ ID NO: 139797 - protein, 178 aa, Unknown
  Bacterial polypetide isolated from the Sargasso Sea
MIKTQEEVRGMREAGRLAAEVLDMITDFVKPGISTGELDKICHEHIVKEQKAIPANVGYRGFEKTLCTSLNQVVCHGIPDDKRYLKNGDILNIDVTVIKDGWHGDTSKMFLVGKSETHNERLVKITQECLYKGIKAVRPGAKLGDIGHAIQKHAEKNHYSVVEEYCGHGIGKIYHDEP

SEQ ID NO: 139798 - protein, 105 aa, Unknown
  Bacterial polypetide isolated from the Sargasso Sea
ENKNYSVVRDFCGHGIGQQFHTAPSVLHYGNIGEGPELKPGMFFTIEPMINIGDWKVKILNDGWTAVTKDKSYSAQFEHTIGITEVGNEIFTLSKNNTDFPINDL

SEQ ID NO: 139799 - protein, 252 aa, Unknown
  Bacterial polypetide isolated from the Sargasso Sea
MKNKHGIHIYNKKDLDGIKKACDIASETLDMVADLIEPGITTLSLDKACHEFILLKNAIPATLGYRGYPKSCCISLNHVVCHGIPSEKKLKNGDILNIDVTCIFDGWFGDTSRMFIVGDINLKAKRLIEITHESLLKGIEKAIPGNTFGDIGAAIQSFVEKNKMSVVKDFCGHGIGSDFHQPPNVLHYGTKNSGPKLEPGMCFTIEPMVNIGRPETKILSDNWTAVTRDKSLSAQFEHTIFINEKGNEISQN

SEQ ID NO: 139800 - protein, 70 aa, Unknown
  Bacterial polypetide isolated from the Sargasso Sea
KGYSVVRDFCGHGISNTFHESPNILHYGKKNTGLEVYAGMTFTIEPMINAGKYDVKILNDGWTAVTKDKS

SEQ ID NO: 139801 - protein, 80 aa, Unknown
  Bacterial polypetide isolated from the Sargasso Sea
SMKEGHVFTIEPMINAGDWRDETWPDGWTAVTRDGKRSAQYEHTMVVTSDGVEILTRRNEDSPRVFPWTDGESEGVVPGS

SEQ ID NO: 139802 - protein, 197 aa, Unknown
  Bacterial polypetide isolated from the Sargasso Sea
MNISIKNFKDIEKMRIAGKLAAEVLEMITPFVKPGVSTGELDKLCHDHIVNIQDAIPANVGYKGYEKTICSSINQVICHGIPNNEKFLKDGDILNIDVTVIKDGWHGDTSKMFLVGKCAPHNQRLVKITQECLYKGIEVVKPGAYLGDIGNAIQKHAERNYYSVVEDYCGHGIGKIYHEEPQILHYGRPGTGIQLKE

SEQ ID NO: 139803 - protein, 225 aa, Unknown
  Bacterial polypetide isolated from the Sargasso Sea
MNEEFLKSFDGTREAGAIASGALDELNTIIKPGVTTEKIDKVCYEYINDHDAYSAPLYYRGFPKSCCTSANHIVCHGIPQNKILRDGDILNVDVTAIKNGWHGDTSRMYLVGDVSVKAKKLIKVTYESMLKGIEILKEGSFTGDIGNAIQTHVEQQGFSVVRDFCGHGLGRKFHQSPNILHYGEEKTGEKLVTGMLFTIEPMINEGDYNTKVLSDGWTAVTKDKL

SEQ ID NO: 139804 - protein, 192 aa, Unknown
  Bacterial polypetide isolated from the Sargasso Sea
MNNTIHSSDDFEGMRKAGNLAASTLDLLVEKVRPGVSTEELDNIAFDYIVRHGGLIAPLFYKGYPKSVCTSINHVICHGIPSSRILENGDIVNIDVTVIVDGWHGDTSRMFPVGKINAKAQKLIDCTFHAMHEGINAAQPDATLGDIGNAIQTYAEKQNYSVVRDFCGHGLGKVFHEFPNILHYGNKGKGEK

SEQ ID NO: 139805 - protein, 181 aa, Unknown
  Bacterial polypetide isolated from the Sargasso Sea
PSEKKLLNNGDIINVDVTVILDGWYGDSSRMFVAGKTNKKNYDLLKTTYECLHIGIKEAKPGKTFGDIGFKIQEYAESKNYSVVKDFCGHGIGKQFHTPPSVLHYGKEGEGIELKPGMFFTIEPMINLGDWRIKILNDGWTAVTKDKSFSAQFEHTIGITENGNEIFTLSENNTDFPINDL

SEQ ID NO: 139806 - protein, 147 aa, Unknown
  Bacterial polypetide isolated from the Sargasso Sea
MNNYSEKFEKMRVAGKLAASTLDMITEYIKPGISTEKIDRLCFEYIRDNGGYSAPLFYRGYTKSVCTSLNHVICHGIPSDRTLVEGDILNIDITAVVNDFYGDTSRMYVVPDISVKAKNLIDTTYESLINSIKILKPGIKLGDIGYE

SEQ ID NO: 139807 - protein, 123 aa, Unknown
  Bacterial polypetide isolated from the Sargasso Sea
MSTVKPKTDTEIDAMREAGRLAAEVLEMIEPRVEVGMTTGEIDRICHDHIVSVQKAVPAPLNYKGFPKSICTSVNEVICHGIPSDSKKLRNGDIINIDVTVIKDGWHGDTSIMIGVGNVAPHA

SEQ ID NO: 139808 - protein, 178 aa, Unknown
  Bacterial polypetide isolated from the Sargasso Sea
KFYKNGDIINVDITVIVDGWYGDSSRMYVAGKIKDKKTQNLLKTTYECLLKGIEIAKPGNYFGDIGNAIQEYAESKNFSIVRDFCGHGIGKQFHTPPSVLHYGKKGGGLKIKPGMIFTIEPMINIGGWEVKTLNDGWTAVTKDKSLSAQFEHTIGITEKGNEIFTLSQNDTSFPINTI

SEQ ID NO: 139809 - protein, 63 aa, Unknown
  Bacterial polypetide isolated from the Sargasso Sea
MTFTIEPMINEGKFATKMLNDGWTAVTKDKSLSAQFEHTVGITENGYEIFTESAKGYLKPPYL

SEQ ID NO: 139810 - protein, 148 aa, Unknown
  Bacterial polypetide isolated from the Sargasso Sea
CVGETSVKAKNLINATYEAMMKAINILKPGVKLGDIGYEIQSFVEDKGFSVVKDFCGHGISNVFHEYPNILHYGKKNTGISLESGMTFTIEPMINSGKFDVKILDDGWTAVTKDKSLSAQFEHTIGITENGYEIFTKSDKNYLRPPYK

SEQ ID NO: 139811 - protein, 192 aa, Unknown
  Bacterial polypetide isolated from the Sargasso Sea
MIKSIEEINGMRDAGKLAAEVLDMITNFVKPGISTGELDKICHDYIVEEQKAIPANVGYRGFEKTLCTSLNQVICHGIPDDKRFLKNGDILNIDVTVIKDGWHGDTSKMFLVGKTEAHNERLVKITQECLYKGIEAVMPGAKLGDIGHAIQEHAEKNHYSVVEEYCGHGIGKVYHDEPQILHYGTPEYWIRN

SEQ ID NO: 139812 - protein, 131 aa, Unknown
  Bacterial polypetide isolated from the Sargasso Sea
AEKLINTTYESMMKAISIVKEGIHIGDIGSTIQTHVEAEGFSVVQDFCGHGIGQTFHKEPNVLHYGEKGTGEKLKEGMIFTIEPMINLGNYETKTLNDGWTAVTKDKSLSAQFEHTIGVTKDGCEIFTQSN

SEQ ID NO: 139813 - protein, 230 aa, Unknown
  Bacterial polypetide isolated from the Sargasso Sea
MNEEILKSFDKTRKAGAIAAGALDVLDEIIKPGVTTEKIDKICFEYINDHGAYSAPLFYRGFPKSCCTSTNHIVCHGIPQNKTLRDGDIVNVDVTAFKDGWHGDTSRMFLVGNVSVKAKKLVKATYDSMIEGIKTLKDGSYIGDIGSAIQKHVEKQGFSVVRDFCGHGLGKKFHEPPNILHYGDPKTGEKLISGMLFTIEPMINEGAFNTKVLNDGWTAVTKDKSLSATI

SEQ ID NO: 139814 - protein, 190 aa, Unknown
  Bacterial polypetide isolated from the Sargasso Sea
SVTIVVCHGIPGEKILNEGDILNIDVTVILDGWFGDTSRMFFAGKPSIKAKILCDITYQCLMEGIKVCKPGNKLGDIGYKIQSIAEGQRFSVVRDFTGHGLGKVFHCAPTILHFGDPDQGMELKPGMFFTVEPMINVGGYATKILSDGWTAVTRDRSLSAQFEHTIGITENGPEIFTQSKLGFNKPPYEI

SEQ ID NO: 139815 - protein, 129 aa, Unknown
  Bacterial polypetide isolated from the Sargasso Sea
MVDIKSKLDVERMKVAGKLASDVLVMIEPYVTQGISTEELDQICHDYIVNKQKAIPAPLNYKGFPKSICTSVNHQVCHGIPAADKILKDGDIINIDITVIKDGFHGDTSKMFFVGKPSVLANRLCKITQ

SEQ ID NO: 139816 - protein, 200 aa, Unknown
  Bacterial polypetide isolated from the Sargasso Sea
YRGFPRSCCTSPNHVICHGIPKDKILNEGDIVNVDVTVLKDGWHGDTSRMFFVGEVSTKAKKLVRTTYEAMTKSIKILRDGIYTGDLGSVIQNHVESNGFSVVRDFCGHGTGRKFHEQPNILHFGDPKTGVKLKTGMIFTVEPMINEGEYDIKLLNDGWTAVTKDKKLSAQFEHTVGVTDKGYEIFTSSKKGLDFPPYKI

SEQ ID NO: 139817 - protein, 71 aa, Unknown
  Bacterial polypetide isolated from the Sargasso Sea
TGHELTAGMTFTIEPMINVGKLDVKVLKDGWTAVTKDKSLSAQFEHTIGITEDSYEIFTESVKGYKRPPYN

SEQ ID NO: 139818 - protein, 258 aa, Unknown
  Bacterial polypetide isolated from the Sargasso Sea
MKIKSYKTDEVEPCREASKITATILDELNNIIKEGVSTSEIDEYCLNRIQELGGTPAPLFYRGFPKSTCTSLNHVICHGIPNYNRNLQNGDILNVDVTTIIDGWHGDSSRMFKVGDISIKASNLCKVTYDCLIESINEIKVGAPISKIGKKIEDIATSNNFSVVRDFCGHGVGLKFHENPSILHYYDSEYDKVKFVDGMIFTIEPMINVGKYQSKILNDGWTAVTKDKTLSAQYEHTIYINGDIIEILTESPSKAFYN

SEQ ID NO: 139819 - protein, 260 aa, Unknown
  Bacterial polypetide isolated from the Sargasso Sea
MDSNRLNKDGIRIHTDSELVEMKLSCKLAAETLDMIGDYVEPGVSTDKINNLCHEFMLDNGAKPATLGYRGFPKSCCISINHVVCHGIPGPKILKESDILNIDVTCILNGWFGDSSRMYIAGATSKKAIRLIEVTYNALLRGIEVVKPGNTFGDIGEAIQKYVESKKMSVVRDFCGHGVGRSFHSAPNVLHFGEKNTGSFLEPGMFFTIEPMVNLGKPDTKILSDNWTAVTRDKSLSAQFEHTVAVTNSGVEVLTLSPQD

SEQ ID NO: 139820 - protein, 196 aa, Unknown
  Bacterial polypetide isolated from the Sargasso Sea
PANIGYGGFPKTLCTSVNNVICHGIPSEDKILKNGDIVNIDVTVIHEGWHGDTSQMFLVGKVAPHAKRLVDITKDCLFAGINQVKPGAKLGDVGFAIQELAEKNHYSVVRDYCGHGIGKTYHEEPQVMHYGEKGQGLELKEGMCFTIEPMINLGEYHSKVLSDGWTVVTKDGKLSAQWEHTVAVTNNGYEILTAGE

SEQ ID NO: 139821 - protein, 57 aa, Unknown
  Bacterial polypetide isolated from the Sargasso Sea
MIFTIEPMINLGGYETKVLNDGWTAVTKDKSLSAQFEHTVGITKEGYEIFTKSKQVN

SEQ ID NO: 139822 - protein, 182 aa, Unknown
  Bacterial polypetide isolated from the Sargasso Sea
LADHGFPKSCCTSVNEVICHGIPDSYELQEGDIVNVDITTYFGGYHGDCSETFLVGEVDEAGKQLVKVTYDCWQAAIDYCKPGALYRGIGCAPTPTRRAPRAPPHPAHRASPCPPCRCRIAAPSRPAQRSSRTTSSPTATRASRTFAATASAKSSTRRPTSCITKTGRPARWRSGTCSRSSR

SEQ ID NO: 139823 - protein, 159 aa, Unknown
  Bacterial polypetide isolated from the Sargasso Sea
GWHGDSSRMFQVGDIDKRKYKLLKTTYECLNIGIKNAIPGNTLGDIGYKIQNYAENKKYSVVREFCGHGIGKEFHTPPQVLHYGKKSKGIILEPGMIFTIEPMINIGEWETTILSDGWTAVTKDGSLSAQFEHTIGVTEDGNEIFTLSQNNTDFPIKEI

SEQ ID NO: 139824 - protein, 172 aa, Unknown
  Bacterial polypetide isolated from the Sargasso Sea
GDIIYVDVLALKDGWHGDTSRMFCVGEISVKAKNLINATYESMMMAIKILKNGVSLSDVGYTIQKHAESKGFSVVRDFCGHGIGKNFHEQPNVLHYGDPANKQKLKTGMIFTIEPMINEGEFNIGVLQDGWTAVTKDKLLSAQFEHTVGIKNDGYEIFTQSKKEFNFPPYKK

SEQ ID NO: 139825 - protein, 94 aa, Unknown
  Bacterial polypetide isolated from the Sargasso Sea
CGHGIGKKFHEHPNILHYGEEKTGEKLKTGMIFTIEPMINEGEYETKVLNDGWTAVTKDKKLSAQFEHTVGITDNGYEIFTTSNKGLDYPPYKI

SEQ ID NO: 139826 - protein, 184 aa, Unknown
  Bacterial polypetide isolated from the Sargasso Sea
MTDYKEKFEKMRVAGNLAARTLDMLTENIKEGISTDHIDKLGYEFIRDNGGYSAPLYYRGFTKSLCTSLNHVVCHGIPSDRILQDGDAVNVDVTAIVDEHYGDTSRMFCIGKTAVKLNNLINATHESMMRAIRILKPGIKLGDIGYEIQSFVEEKGFSVVRDFCGHGISTTFHESPNILHYGKK

SEQ ID NO: 139827 - protein, 63 aa, Unknown
  Bacterial polypetide isolated from the Sargasso Sea
FFTIEPMINIGDWQTKILQDGWTAVTRDKSLSAQYEHTIGITKDGNEIFTLSQNNSDFPVNRI

SEQ ID NO: 139828 - protein, 258 aa, Unknown; identical to SEQ ID NO: 139818
  Bacterial polypetide isolated from the Sargasso Sea

SEQ ID NO: 139829 - protein, 79 aa, Unknown
  Bacterial polypetide isolated from the Sargasso Sea
MHYGNIGEGPILKPGMFFTIEPMINLGDWRTKILNDGWTAVTKDKSLSAQFEHTIGITEKGNEIFTLSHNNSDFPINPL

SEQ ID NO: 139830 - protein, 167 aa, Unknown
  Bacterial polypetide isolated from the Sargasso Sea
NIDITVILDGWFGDTSRMFYVGQPSAKAKILTRVTYECMMLGIEQVKPGNRVGDIGHAIQKHAEKNRFSVVRDFTGHGLGTEFHTAPTILHYGEKDTGELLKEGMFFTIEPMINAGGHAVKVLSDGWTARTKDYSLSAQFEHSVGVTSKGYEIFTLSKKNYTQPPYL

SEQ ID NO: 139831 - protein, 79 aa, Unknown
  Bacterial polypetide isolated from the Sargasso Sea
HESPQILHYGTKNTGMKLLEGMTFTIEPMINAGNHNTKVLNDGWTVVTQDHSLSAQWEHTILVTKDGFEILTKRDEELI

SEQ ID NO: 139832 - protein, 228 aa, Unknown
  Bacterial polypetide isolated from the Sargasso Sea
MQNREIPLHNLSDFEGIRKAGALAANILDQLKDIINPGISTQQINDFCHEMILDNNAIPAPLNYKGFPKSICTSVNHVVCHGIPSEKKILEEGDIVNIDVTVILDGWYGDTSRMFVAGKTNKKIYSFLKTTYECLLIGIKNALPGKNLGDIGFEIQKYAEEKNYSVVRDFCGHGIGKEFHLPPSVLHFGELGTGPKLEPGMLFTIEPMINIGDWKIKILNDGWTAVTK

SEQ ID NO: 139833 - protein, 153 aa, Unknown
  Bacterial polypetide isolated from the Sargasso Sea
MNNTIHSSDDFEGMRKAGNLAASTLDLLVEKVKPGVSTEELDNIAFDYIVRHGGLIAPLFYKGYPKSVCTSINHVICHGIPSSRILENGDIVNIDVTVIVDGWHGDTSRMFPVGKINAKAQKLIDCTFHAMHEGINDAQPDATLGDIGNAIQT

SEQ ID NO: 139834 - protein, 260 aa, Unknown
  Bacterial polypetide isolated from the Sargasso Sea
MNDFVKTPDEIAKMRVAGKLASDVLMMIGGYVKPGITTGELDKICHKYIVDVQNAIPAPLNYRGFPKSICTSVNHQICHGIPSDTKKLKDGDIINIDVTVIKDGYHGDTSRMFLVGNTSIQSKRLCEVTRQSMIEGIKAVRPGGTTGDIGAAIQEYAEANKYSVVREYCGHGIGKKFHESPQILHYGKKNTGIRLEEGMIFTIEPMINVGSYKTKLLNDGWTVVTQDHELSAQYEHTVLVTNKGSEILTIRTEEDESEFK

SEQ ID NO: 139835 - protein, 48 aa, Unknown
  Bacterial polypetide isolated from the Sargasso Sea
EPMINAGKYETKLLNDGWTAVTKDKSLSAQFEHTVGITNNGYEIFTLS

SEQ ID NO: 139836 - protein, 94 aa, Unknown
  Bacterial polypetide isolated from the Sargasso Sea
MWTWDWKEFHTPPSVLHYGKVGEGPELKPGMFFTIEPMINLGDWRVKILNDGWTAVTKDRSLSAQFEHTIGITEDGNEIFTLSENNTDFPINDL

SEQ ID NO: 139837 - protein, 106 aa, Unknown
  Bacterial polypetide isolated from the Sargasso Sea
VEEQGFSVVRDFCGHGLGKKFHQSPNILHYGEEKTGEKLVAGMLFTIEPMINEGDYNTKVLNDGWTAVTKDKLLSAQFEHTVGITNNGYEIFTLSKKGLDLPESLK

SEQ ID NO: 139838 - protein, 129 aa, Unknown
  Bacterial polypetide isolated from the Sargasso Sea
MAAIIKTADQIEKMRVAGKLAAEVLEMIEPYVKAGVTTEELNTICHNYIVDVQQAIPAPLNYHGFPKSICTSVNQVICHGIPSAEKKLKDGDIINIDITVIKDGFHGDTSKMFVIGKPSIMAERLIRVT

SEQ ID NO: 139839 - protein, 208 aa, Unknown
  Bacterial polypetide isolated from the Sargasso Sea
MNNNYQEAFEKTRSAGIIAAGALNEVEKIIKPGIRTDQIDKLCYEYINDHDAYSAPLFYRGFPKSCCTSTNHVVCHGIPSNKILQDGDILNVDVTALKDGWHGDTSKTFEVGKVSVKAKKLVKTTYQALMNAIEIVKEGVCLGDIGSTIQNFVEAEGFSVVQDFCGHGIGRLFHQEPNILHYGKKGTGEKLKAGMIFTIEPMINFGNM

SEQ ID NO: 139840 - protein, 115 aa, Unknown
  Bacterial polypetide isolated from the Sargasso Sea
MVEESLITIHTEKDFDSMRRAGKLAAEVLDFITPHVVPGVTTGKLDQLCHNFIIDHGAIPSPLNYRGFPKSICTSINHVVCHGIPGEKVLRNGDIVNIDITVTLDGWHGDTSRMF

SEQ ID NO: 139841 - protein, 214 aa, Unknown
  Bacterial polypetide isolated from the Sargasso Sea
EFIKDNGGYSAPLYYRGFPKSCCTSVNHIVCHGIPGEKYLKDGDILNVDVTAVVNGWHGDTSRMFFVGDVSIKSKNLVAATYDSMMKAISIIKDGIHLGDIGETIQTYVEKKGFSVVRDFCGHGIGKIFHEPPNILHYGKKGFGDKLKQGMIFTVEPMINEGGYETKVLNDGWTAVTKDKSLSAQFEHTVGVTKDGFEIFTESKKKYEKPPYSI

SEQ ID NO: 139842 - protein, 215 aa, Unknown
  Bacterial polypetide isolated from the Sargasso Sea
NKICHEYIVNKQNAIPAPLNYHGFPKSICTSVNHVVCHGIPNYKEKLNDGDIINIDITVIKDGYHGDTSKTFFIGHPKKETKKLVEITYECMKEAILIVRPGTRLGDIGYTIQKIAEANGYSVVREYCGHGIGKIFHEEPQILHYGKPNTGMELAEGMTFTIEPMINLGERFVELLNDNWTVETKDKKISAQWEHTVLVTKNSFEVLTKRTDESF

SEQ ID NO: 139843 - protein, 246 aa, Unknown
  Bacterial polypetide isolated from the Sargasso Sea
MNNTIHSSDDFEGMRKAGNLAASTLDLLVEKVKPGVSTEELDNIAFEYIVRHGGLIAPLFYKGYPKSVCTSINHVICHGIPSSRILENGDIVNIDVTVIVDGWHGDTSRMFPVGKINAKAQKLIDCTFHAMHEGINAAQPNATLGDIGSAIQTYAEKQNYSVVRDFCGHGLGKVFHEFPNILHYGDKGKGERIEPGMFFTVEPMINFGKYDVRMLGDGWTAVTKDKSLSAQFEHSIGITNGGVEIF

SEQ ID NO: 139844 - protein, 80 aa, Unknown
  Bacterial polypetide isolated from the Sargasso Sea
HGIGVDFHEEPFVFHCHRQEPQMMMVPGMTFTIEPMINTGTHKAVILDDDWTAVTKDGGLSAQWEHTVLVTESGVEVLTS

SEQ ID NO: 139845 - protein, 81 aa, Unknown
  Bacterial polypetide isolated from the Sargasso Sea
QLFHQEPNVLHYGKRGTGEKIKAGMIFTIEPMINVGKFETKTLQDGWTAVSKDKSLSAQFEHTIGVTKQGCEIFTLSKIND

SEQ ID NO: 139846 - protein, 205 aa, Unknown
  Bacterial polypetide isolated from the Sargasso Sea
MKISIKTSEQIEKMRIAGKLAAEVLEMISPYVLPGISTSELDRLCYEHIVNVQKAIPANIGYNGFEKTICSSINQVICHGIPSEKRILKEGDILNIDVTVIKDGWHGDTSKMFLVGKCAPHNQRLVKVTQECLYKGIEVVKPGAHISDIGNAIQEHAEKNYYSVVEDYCGHGIGTVYHEEPQILHYGKPGKGLQLREGMCFTIEP

SEQ ID NO: 139847 - protein, 256 aa, Unknown
  Bacterial polypetide isolated from the Sargasso Sea
YDNQSFEKVREAGSVASGALDEVYKIIKPGISTNKIDDICYEFLNDNNSYSAPLYYRGYPKSCCTSINHTVCHGVPSEKTLKDGDIVNVDVTAFKNGWHGDTSRMFLVGDVSVKALNLVKATYDSMMKAIEILKDGIALGDIGATIQEHVEKEGFSVVRDFCGHGVGKKFHEEPNILHYGKRGEGLKIKEGMIFTIEPMINYGKFETKVLQDGWTAVTRDKSLSAQFEHTVGIKKNGYEIFTLSKKGLDFPPNKND

SEQ ID NO: 139848 - protein, 219 aa, Unknown
  Bacterial polypetide isolated from the Sargasso Sea
NDLCHDYILKNNALPAPLNYRGFPKSTCISVNHVVCHGIPGDKILDEGDILNIDITVILDGWYGDTSRMYFVGKPSKKAKFLTKITYECLWLGIETVKPGSTTGDIGHAIQMHAEKNGLSVVRDFTGHGLGKVFHSPPTILHYGQPNTGDTLEEGMIFTIEPMINSGKYDVKILSDGWTAVTRDKSLSAQFEHSIGVTADGYEVFTISPKGYTQPEYPI

SEQ ID NO: 139849 - protein, 104 aa, Unknown
  Bacterial polypetide isolated from the Sargasso Sea
SKGYSVVRDFCGHGIGKNFHEPPNILHYGASGSGEKLKTGMIFTIEPMINEGKYNLNFLKDGWAAVTKDKMLSAQFEHTVGIKDDSYEIFTLSKNGLDFPPYKT

SEQ ID NO: 139850 - protein, 67 aa, Unknown
  Bacterial polypetide isolated from the Sargasso Sea
MVKKELGEKIKAGMIFTIEPMINIGKYETKTLNDGWTAVTKDKSLSAQFEHTIGVTKDGYEIFTKTK

SEQ ID NO: 139851 - protein, 254 aa, Unknown
  Bacterial polypetide isolated from the Sargasso Sea
MIINIKTKEEQDKMRVAGRLAADVLDMIEDFVKPGVSTNELDEICHKFIVEVQGATPAPLNYRGFPKSICTSVNHVVCHGIPSEKILKSGDFLNIDITVVKDGYHGDTSRMFFVGKPNIKAKRLSDITYKSMWLGIEQLACGKYLGDVGNAIQCFAEKNRYSVVREYCGHGIGKFFHEDPQVLHYGKAGTGPKLESGMVLTVEPMINAGKKDVKILPDGWTVVTKDHDLSAQWEHTVLIKKDGYEVLTLGRDQR

SEQ ID NO: 139852 - protein, 226 aa, Unknown
  Bacterial polypetide isolated from the Sargasso Sea
ISTQEINDICHDQIIQNKAIPAPLNYKGFPKSVCTSVNHVVCHGIPSQRKILSDGDLVNVDVTVILNGWHGDSSRMFVAGKTNKKNYEFLKITYESLLIGISEAKPGKHIGDIGNKIQKLAEGKGYSVVRDFCGHGIGKEFHTPPSVLHFGEPGEGPMLEPGMFLTIEPMINLGGWQTKILNDGWTAVTKDKSLSAQFEHTIGITEEGNEIFTLSKNNTSFPIKDV

SEQ ID NO: 139853 - protein, 169 aa, Unknown
  Bacterial polypetide isolated from the Sargasso Sea
MDYIKTESDIEKMRIAGKLASQVLEMVEEYVKPGISTLKLDQICHDYIVTQQDAIPAPLNYKGFPKSICTSVNHQVCHGIPSDEKILKKGDIVNIDVTVIKDGFHGDTSKMFQIGKTSILADRLCKVTQKCMYEAIKIVRPGLHIGDIGAIIQEIAHDNKFSVVRDYWD

SEQ ID NO: 139854 - protein, 270 aa, Unknown
  Bacterial polypetide isolated from the Sargasso Sea
MTKEQKKIFSDGREVKIHSESDFNSMEKAGALAAEVLDFITPHVQQGITTDALDSLCYDFIVDRNAIPAPLNYRGFPKSICTSLNHVVCHGIPGQKKLRDGDIINIDITVILEGWHGDSSRMFLVGKVPLKARRLVEITYEAMMRGIEVVKPGATLGDIGYAIQSFAEKHRYSVVRDFCGHGIGQVFHDAPSVLHYGREGDGMELTEGMFFTIEPMINQGKLDVKILEDGWTAVTRDRSLSAQFEHSLGVTKNGHKIFTVSPKGYHCPPY

SEQ ID NO: 139855 - protein, 256 aa, Unknown
  Bacterial polypetide isolated from the Sargasso Sea
MSISIKDKKDIENMKIAGKKAAAVLKMLEENVVPGVTTKELDDIAFKFITEELKSIPANIGYNGYEKTLCTSINNVICHGIPDAQRKLKDGDIVNIDVTVLHDGWHGDTSRMFLVGKVAPHAKRLVDITRDCMYAGIEQVKPGAKLGNIGHAIQIMAEKNYYSVVRDYCGHGIGKVYHEEPQVMHYGEKDTGIELKEGMCFTIEPMINLGTHHAKVLEDGWTVVTKDGKLSAQWEHTVAVTSNGYEILTLGEEKVV

SEQ ID NO: 139856 - protein, 255 aa, Unknown
  Bacterial polypetide isolated from the Sargasso Sea
MSVEIKTLEQQEKMRIAGKLASEVLDMIGEHVKPGVSTMELDEICNDFIVNTQKTIPANVGYRGFPATTCTSINHVVCHGIPNEKRLKNGDILNIDVTVIKDGFHGDTSRMFSVGKTSNQANKLIETTYESMCEGIKAVKPGNKLGDIGYAIQKHAEGNYFSVVKEYCGHGIGEIYHDEPQILHYGIPNTGMELKEGMTFTIEPMINSGGSAVRLLSDGWTVVTKDHSLSAQWEHTILVTNDGYEVLTLAPGELI

SEQ ID NO: 139857 - protein, 256 aa, Unknown
  Bacterial polypetide isolated from the Sargasso Sea
MNNTIHSSDDFEGMRKAGNLAASTLDLLVEKVKPGVSTEELDNIAFDYIVRHGGLIAPLFYKGYPKSVCTSINHVICHGIPSSRILENGDIVNIDVTVIVDGWHGDTSRMFPVGKINAKAQKLIDCTFHAMHEGINAAQPDATLGDIGNAIQTYAEKQNYSIVRDFCGHGLGKVFHEFPNILHYGDKGKGDKIEPGMFFTVEPMINFGKYDVRMLGDGWTAVTKDKSLSAQFEHSIGITNDGVEIFTKSPAGLDKP

SEQ ID NO: 139858 - protein, 255 aa, Unknown
  Bacterial polypetide isolated from the Sargasso Sea
MNISIKNFEGIEKMRIAGKLAAEVLEMITPFVKPGVSTGELDKLCYDHIVNVQNAIPANVGYKGYEKTICSSINQVICHGIPNNEKFLKDGDILNIDVTVIKDGWHGDTSKMFLVGKCAPHNQRLVQITQECLYKGIQAVKPGAYLGDIGNAIQKHAERNYYSVVEDYCGHGIGKIYHEEPQILHYGKPGTGIQLKEGMCFTVEPMINQGTKYCKTLNDGWTVETRDGRNSAQWEHTIAVTKTGSEILTKRNDEF

SEQ ID NO: 139859 - protein, 198 aa, Unknown
  Bacterial polypetide isolated from the Sargasso Sea
MNNNYLEKFEKMRVAGKLAAQTLDEVTPFIKPGVTTNKIDKICYEYIRDNGGYSAPLFYRGFKNSLCTSLNHVICHGIPSERVLEDGDILNVDVTAIVDGYYGDTSRMFNIGKISVKAKNLIDATYQSMMNAIKILKPGIKLGDIGYEIQSYVEEKNYSVVRDFCGHGISNTFHEPPNILHYGKKNTGVELKPGMTFK

SEQ ID NO: 139860 - protein, 101 aa, Unknown
  Bacterial polypetide isolated from the Sargasso Sea
QAYQLRELDEICFNHIVNVQKAIPANVGYNGYEKTICAILNQVICHGIPSNEKVLKSGDILNIDVTVVKDGWHGDTSKMFLVGKCAPHNERLVKVTQEVSL

SEQ ID NO: 139861 - protein, 192 aa, Unknown
  Bacterial polypetide isolated from the Sargasso Sea
TCISVNHVVGHGIPGDKKLQSGDILNIDVTVILDGWYGDTSRMFFAGEPSVKAKRLCDVTYKCLMAGIEVSKPGATLGDIGYAIQTLAEKERFSVVRDFTGHGLGQVFHCPPSVLHFGNPGEGIRLEPGMIFTIEPMINAGGYATKILSDGWTAVTRDRSLSAQFEHSIGITENGAEIFTLSKKNYDFPPYK

SEQ ID NO: 139862 - protein, 197 aa, Unknown
  Bacterial polypetide isolated from the Sargasso Sea
GFPKTCCTSSNHIVCHGVPSDKVLREGDIINVDVTAFKDGWHGDTSRMFYVGEVSVRAKKLVETTYEAMMKGIEALKLNSHLGNIGEAIQKYVEKKGYSVVRDFCGHGTGETFHKEPNVLHYGKNGEGQKLEVGMIFTIEPMINEGKYETKVLSDGWTAVTKDKKLSAQFEHTVGITNDGYEIFTISKKGLNFPPYK

SEQ ID NO: 139863 - protein, 182 aa, Unknown
  Bacterial polypetide isolated from the Sargasso Sea
MNEETLKSFDGTREAGAIASGALDELNAIVKPGVTTEKIDKICYEYINDHGAFSAPLYYRGFPKSCCTSANHIVCHGIPQNKVLRDGDILNVDVTAIKNGWHGDTSRMYLVGDVSVKAKKLIKVTYESMIKGIQTLKEGSFTGDIGFAIQTHVEQQGFSVVRDFCGHGLGRNFINHQIYCIT

SEQ ID NO: 139864 - protein, 227 aa, Unknown
  Bacterial polypetide isolated from the Sargasso Sea
MNDEILESFEGTRKAGAIAAGALDELNSMIKPGVTTEVIDKFCYEYINDNGAYSAPLFYRGFPKSCCTSTNHIVCHGIPQNKFLRDGDIINVDVTAIKDGWHGDTSRMFLVGNVSVKAKKLIKATYESMIKGIKTLKEGSFTGDIGSAIQNHVEQEGFSVVRDFCGHGLGKKFHEPPNILHYGEPKTGKRLSAGMLFTIEPMINEGEYNTKLLQDGWTAVTKDKSLS

SEQ ID NO: 139865 - protein, 126 aa, Unknown
  Bacterial polypetide isolated from the Sargasso Sea
VRPGAHLGDIAYAIQKHAEAQGYSVVREYCAHGIGTVFHEDPQILHYGRPGTGLELQAGMIFTIEPMINAGRRDIRTMPDQWTVKTKDRSLSAQWEHTVLVTETGYDVLTVSAGTPARPPVVAATA

SEQ ID NO: 139866 - protein, 71 aa, Unknown
  Bacterial polypetide isolated from the Sargasso Sea
ILHYGKSGTGEKIHEGMIFTIEPMINLGNYETKTLNDGWTAVTKDKSLSAQFEHTIGVKKDGYEIFTLPKK

SEQ ID NO: 139867 - protein, 256 aa, Unknown
  Bacterial polypetide isolated from the Sargasso Sea
MSISIKGKKDIENMKIAGKKAAAVLKMLEEHVVPGVTTKELDDIAFKFITEELKSIPANIGYNGYEKTLCTSINNVICHGIPDAQKKLKDGDIVNIDVTVLHDGWHGDTSRMFLVGKVAPHAKRLVDITRDCMYAGIEQVKPGAKLGNIGHAIQIMAEKNYYSVVRDYCGHGIGKVYHEEPQVMHYGEKDTGIELKEGMCFTIEPMINLGTHHAKVLEDGWTVVTKDGKLSAQWEHTVAVTDSGYEILTLGEEKVV

SEQ ID NO: 139868 - protein, 301 aa, Unknown
  Bacterial polypetide isolated from the Sargasso Sea
MKPAINSLSRNSPCWCGSGKKFKKCHLGKDPIHSLPMNEKPIFNEKRIYIKTEEQIEGIRKSGQLTKKLLDMVEDRIGEGVTTNDLNNLVHTETLANGAIPAPLNYGHGQGRRRMPFPKSICTSPNDVICHGIPNNQALRNGDILNVDITCILDGYYGDASRMFIIGDVPEDTKKLVEVTHECLKLGIKQVFPSKRLGDIGHAIQKHAENNGFSVVRDFAGHGVGIEFHEAPQILHFGQPGKGEMLRENMVFTIEPMINMGSYECRILGDGWTAVTADGSLSAQWEHTLLVTKSGAEILTA

SEQ ID NO: 139869 - protein, 136 aa, Unknown
  Bacterial polypetide isolated from the Sargasso Sea
MIKDLEEINGMREAGRLAAQVLDMISNFVKPGISTGELDKICHDYIVKEQQAIPANVGYRGFEKTLCTSLNQVVCHGIPDDKRFLKNGDILNIDVTVIKDGWHGDTSKMFLVGKTEQHNERLVKITQECLYKGINA

SEQ ID NO: 139870 - protein, 251 aa, Unknown
  Bacterial polypetide isolated from the Sargasso Sea
MNADIKESFEKTRAAGSIAASTLDEVAKIIKPGIATDQINNLCYEFINDHGAYSAPLFYRGFPKSCCTSVNHVVCHGVPSEKILKEGDILNVDVTAYKDGWHGDTGRMFEVGKVSVKAKKLIETTYESMMKGIKILKENVQLGDIGSTIQEHVEANGCSVVQDFCGHGIGQTFHKEPNILHYGKKGTGEKIKAGMIFTIEPMINLGDYQTKVLNDGWTAVTKDKSLSAQFEHTVGITKDGYEIFTQSKKFS

SEQ ID NO: 139871 - protein, 256 aa, Unknown
  Bacterial polypetide isolated from the Sargasso Sea
MSNTIHSSDDFEGMRKAGNLAASTLDLLVEKVKPGVSTEELDNIAFDYIVRHGGLIAPLFYKGYPKSVCTSINHVICHGIPSSRILENGDIVNIDVTVIVDGWHGDTSRMFPVGKINAKAQKLIDCTFHAMHEGINAAQPDATLGDIGSAIQTYAEKQNYSVVRDFCGHGLGKVFHEFPNILHYGDKGKGERIEPGMFFTVEPMINFGKYDVRMLGDGWTAVTKDKSLSAQFEHSIGITNDGVEIFTKSPAGLDKP

SEQ ID NO: 139872 - protein, 92 aa, Unknown
  Bacterial polypetide isolated from the Sargasso Sea
HGIGKEFHTPPSVLHYGNLGEGPELKPGMFFTIEPMINLGDWRIKILQDGWTAVTKDKSLSAQFEHTIGITEEGNEIFTLSENNTDFPINDL

SEQ ID NO: 139873 - protein, 264 aa, Unknown
  Bacterial polypetide isolated from the Sargasso Sea
MRHNNIPIHSKNDFENMRLAGSLAALVLDSLYEKIVPGISTQEINDICHEIIVKNNAIPAPLNYKGFPKSVCTSVNHVVCHGIPSEKKILSEGDIVNVDVTVILNGWYGDSSRMFVAGKTNKKNFDLLKITYESLLIGIKEAKPGNHIGDIGSKIQKLAESNGYSVVRDFCGHGIGKEFHTPPSVLHFGEPGEGPKLEPGMFLTIEPMINLGGWQTKILNDGWTAVTKDKSLSAQFEHTIGITDQGNEIFTLSKNNTAFPINDV

SEQ ID NO: 139874 - protein, 258 aa, Unknown
  Bacterial polypetide isolated from the Sargasso Sea
MKIKSYKSDEVEPCREASKITATILDELNNIIKKDVSTSEIDDYCLTRIQELGGTPAPLFYRGFPKSTCTSLNHVICHGIPNHNRNLQNGDILNVDVTTIIDGWHGDSSRMFKVGDISIKASNLCKVTHDCLIESIDEIKVGEPISRIGKKIENIATSNNFSVVRDFCGHGVGLKFHENPSILHYYDSEYDKVKFVDGMIFTIEPMINVGKYQSKILNDGWTAVTKDKTLSAQYEHTIYINGDIIEILTESPSKAFYN

SEQ ID NO: 139875 - protein, 90 aa, Unknown
  Bacterial polypetide isolated from the Sargasso Sea
DYCGHGIGTIYHEEPQVLHYGKAGTGIKLEEGMCFTIEPMINQGRKYSKVLKDGWTVETKDGRNSAQWEHTIAVTDRGYEILTKRSDEYV

SEQ ID NO: 139876 - protein, 110 aa, Unknown
  Bacterial polypetide isolated from the Sargasso Sea
EIQSFVEERGFSVVKDFCGHGISTTFHEPPNILHYGNKNSGMELKPGMTFTIEPMINSGKYHVKILNDGWTAVTKDKSLSAQFEHTLGITENGYEIFTESVKGYLKPPYL

SEQ ID NO: 139877 - protein, 236 aa, Unknown
  Bacterial polypetide isolated from the Sargasso Sea
LDEVSKIIKPGITTEEIDKLCFEFINDLGAYSAPLYYRGYPKSCCTSTNHIVCHGIPGNKTLKEGDIINVDITTLKDGWHGDTSRMFYVGEVSVKAHNLTITTYEAMMESIKILKKGLCLGDIGSTIQKYVEAKGFSVVRDFCGHGVGKNFHEAPNILHYGQPGTGDKLEAGMIFTIEPMINEGEYNTNVLKDGWTAVTKDKMLSAQFEHTVGIKDDGYEIFTLSKKGLNFPPYKK

SEQ ID NO: 139878 - protein, 257 aa, Unknown
  Bacterial polypetide isolated from the Sargasso Sea
PRRILIKTEEQLEGIRKSSRLTRDLLDMIEDRIEAGVSTNQINEWVHEETLAQGAIPAPLNYGRGKGPRGRPFPKSVCTSINEVICHGIPNEQILVDGDIINVDVTCIVDGYFGDASRMFIIGEVPDATRKLVEETRKCLELGIAQVRPGGKTGDIGHAIQTHAESLGYSVVRDFCGHGVGVEFHEAPQILHYGTPGTGDLMQENMVFTIEPMINIGRPESRILRDGWTAVTVDGSLSAQWEHTIHVTGEGCQVLTG

SEQ ID NO: 139879 - protein, 106 aa, Unknown
  Bacterial polypetide isolated from the Sargasso Sea
FVEEKGFSVVRDFCGHGISTTFHESPNILHYGSKNTGMEIRPGMTFTIEPMINSGKYDVKMLNDGWTAVTKDKSLSAQFEHTLGITENGYEIFTESAKGYSKPPYL

SEQ ID NO: 139880 - protein, 126 aa, Unknown
  Bacterial polypetide isolated from the Sargasso Sea
AINILKPGITLGDIGHTIQLHVEKKGYSVVRDFCGHGISTKFHEPPNILHYGKKNTGIKVFPGMTFTIEPMINFGKYDIKMLNDGWTAVTKDKSLSAQFEHTVGITENGYEIFTESAKGYSKPPYK

SEQ ID NO: 139881 - protein, 171 aa, Unknown
  Bacterial polypetide isolated from the Sargasso Sea
MTVTIKSAEEIEKMRVAGRLAAEVLEMIGEHVKPGVTTEEIDRICHDYIVNVQQAIPAPLNYKGFPKSICTSINHVVCHGIPNDKPLKDGDVLNIDVTVIKDGYHGDTSKMFMVGKVAEWAERLAKVTQECMYKGIELVKPGTRLGDIGEVIQKHAEKNGFSVVREYCGHG

SEQ ID NO: 139882 - protein, 179 aa, Unknown
  Bacterial polypetide isolated from the Sargasso Sea
MIEYWEEGDIVNIDVTAIINNHYGDTSRMFCVGKTPVKANNLIEITFNSMMKAIRILKPGIKLGDIGNEIQTYVENNGFSVVRDFCGHGISTVFHEMPNILHYGQKNTGSELKAGMTFTIEPMINSGKYDVKVLNDGWTAVTKDKSLSAQFEHTVGITENGYEIFTESAKGYSKPPYNN

SEQ ID NO: 139883 - protein, 197 aa, Unknown
  Bacterial polypetide isolated from the Sargasso Sea
YPKSICTSSNHIVCHGIPGNKTLEEGDVVNVDVTAIKDGWHGDTSRMFYVGKVSIKAQNLTKTTYEAMMEAIKILKSGLHLGDIGSCIQKYVEAKGFSVVRDFCGHGVGKNFHEAPNVLHYGEPRTGDKLKPGMIFTIEPMINEGEYETKVLKDGWTAVTKDKMLSAQFEHTVGIKDQGYEIFTLSKKGLDFPPYKI

SEQ ID NO: 139884 - protein, 106 aa, Unknown
  Bacterial polypetide isolated from the Sargasso Sea
FIEEKGFSVVRDFCGHGISTTFHEQPNILHYGKKDTGIELKPGMTFTIEPMINAGEFGVKILNDGWTAVTKDKSLSAQFEHTLGITENGYEIFTESAKGYSKPPYL

SEQ ID NO: 139885 - protein, 224 aa, Unknown
  Bacterial polypetide isolated from the Sargasso Sea
MNNYTEKFEKMRIAGKLAAQTLDMLTENIKEGVSTAYIDKLGYEFIRDNGGHSAPLYYRGFTKSLCTSLNHVVCHGIPTEDRILVEGDALNVDVTAIINDHYGDTSRMFCIGKTSVKLNNLIDATYQSMMKAIKILRPGIKLGDIGYEIQSYIEEKGFSVVRDFCGHGISTTFHEAPNILHYGTKNTGMELKTGMTFTIEPMINAGKFNVKVLNDGWTAVTKDK

SEQ ID NO: 139886 - protein, 75 aa, Unknown
  Bacterial polypetide isolated from the Sargasso Sea
GKKNKGMELKPGMTFTIEPMINAGKYDVKMLNDGWTAVTKDKSLSAQFEHTLGITENGYEIFTESAKGYSKPPYL

SEQ ID NO: 139887 - protein, 93 aa, Unknown
  Bacterial polypetide isolated from the Sargasso Sea
CGHGISTTFHEPPNILHYGNKNTGMELIPGMTFTIEPMINEGKFATKMLNDGWTAVTKDKSLSAQFEHTLGITENGYEIFTESAKGYLKPPYL

SEQ ID NO: 139888 - protein, 200 aa, Unknown
  Bacterial polypetide isolated from the Sargasso Sea
APLNYKGFPKSICTSVNHQVCHGIPATTKILKNGDIINIDVTVIKDGFHGDTSKMFCVGEPSILADRLCKVTQECMYKAISIVKPGLHVGDIGAVIQEHAHVNNFSVVRDYCGHGIGKNFHEPPQILHYGTRKTGIRLKEGMTFTIEPMINSGKYKTKLLNDGWTVVTQDHSLSAQWEHTVLVTNNGYEVLTIRNEEEGI

SEQ ID NO: 139889 - protein, 170 aa, Unknown
  Bacterial polypetide isolated from the Sargasso Sea
DALNVDVTAIIDNHYGDTSRMFCIGETSVKYTNLINATYDAMMKAISILKPGIKTGDIGFEIQSHVEKKGFSVVRDFCGHGIGTSFHEPPNILHYGKKGTGIEIKPGMTFTIEPMINAGKFDTKTLNDGWTAVTKDKSLSAQFEHTVGITENGYEIFTESAKSYTKPPYL

SEQ ID NO: 139890 - protein, 222 aa, Unknown
  Bacterial polypetide isolated from the Sargasso Sea
MNNYSEKFEKMRVAGKMAAKCLDMITEYINPGITTNKIDKLCYEFIRDNGGYCAPLYYRGFEKSLCTSLNHVICHGIPSDRELEENDILNIDVTAIVDDYYGDTSRMFTVGEISIKAKNLIDATYESLMNATKILKPGIKLGDIGYEIQSYVEAKGFSVVRDFCGHGISNIFHEPPNVLHYGKKNTGSELQPGMTFTIEPMINSGKYDAKILTDGWTAVTKD

SEQ ID NO: 139891 - protein, 232 aa, Unknown
  Bacterial polypetide isolated from the Sargasso Sea
MSDYKEKFEKMKVAGNLAARTLDMLTENIKEGVSTDYIDKLGYEFIRDNGGYSAPLYYRGFTKSLCTSLNHVVCHGIPSDRILRDGDAVNVDVTAIVDEHYGDTSRMFCIGKTPVKLNNLIETTYESMMRAIKILKPGIKLGDIGYTIQSFVEEKGFSVVRDFCGHGISTTFHESPNILHYGSKNTGMEIRPGMTFTIEPMINSGKYDVKMLNDGWTAVTKDKSLSAQLNIP

SEQ ID NO: 139892 - protein, 205 aa, Unknown
  Bacterial polypetide isolated from the Sargasso Sea
TLLHFIIRGFKKSLCTSLNHVVCHGIPSDRVLIEGDAVNIDVTAVVNEYYGDTSRMFTIGDISVKAKNLIETTYESMMRGIKILKPGVKLGDIGFEIQSFVEERGFSVVRDFCGHGISNTFHEPPNILHYGKKNTGHELTPGMTFTIEPMINVGKLDVKVLNDGWTAVTKDKSLSAQFEHTIGITEDSYEIFTESVKGYKRPPYN

SEQ ID NO: 139893 - protein, 223 aa, Unknown
  Bacterial polypetide isolated from the Sargasso Sea
MSDYKEKFEKMKIAGNLASKTLDMLTGEIKAGVSTNKIDKLGYEYIRDNGGYSAPLFYRGFPKSLCTSLNHVICHGIPSERILDEGDILNIDVTAIVDGFYGDTSRMYSIGKISVKAQNLIDATYESLMKSIKILKPGLKLGDIGHEIQKYVEARGFSVVRDFCGHGIGDNFHEPPNILHYGKKNTGAELRPGMTFTIEPMINSGKYDVKILDDGWTAVSKDK

SEQ ID NO: 139894 - protein, 201 aa, Unknown
  Bacterial polypetide isolated from the Sargasso Sea
HGAYSAPYFYRGFPKSCCTSANHVVCHGIPSDKILKEGDIVNVDVTALKDGWHGDTSRTFEIGEISVKAKKLVKTTYDAMMKAIKIVKDDIYLGDIGATIQKHVEAEGFSVVQDFCGHGIGQVFHKEPNVLHYGKEGTGEKIKAGMIFTIEPMINLGNYETKTLKDGWTAVTKDKSLSAQFEHTIGVTKDGCEIFTLSKNK

SEQ ID NO: 139895 - protein, 232 aa, Unknown
  Bacterial polypetide isolated from the Sargasso Sea
MSDYKEKFEKMRVAGDLAAKTLDMLTDNIKEGVSTDYIDKLGYEFIRDNGGHSAPLYYRGFTKSLCTSLNHVVCHGVPSDRVLRNGDAVNVDVTAIVDEHYGDTSRMFCIGKTPIKLNNLIDATYESMMRAIRILKPGIKLGDIGYEIQSFVEEKGYSVVRDFCGHGISTTFHEPPNILHYGSKNSGPELKPGMTFTIEPMINSGKYDVKMLNDGWTDVTKDKSLSAQLNIR

SEQ ID NO: 139896 - protein, 248 aa, Unknown
  Bacterial polypetide isolated from the Sargasso Sea
MNNYTEKFEKMRIAGKLASKTLDMITDYIKPGVSTEKIDDLCFEFIRDNGGYSAPLFYRGYKKSVCTSLNHVICHGIPSERTLIEGDILNIDITAIVNDYYGDTSRMFVVPHISVKAKNLIDATYESLMNSIKILKPGKKIGDIGYEIQSYVEKKGFSVVRDFCGHGISNVFHEPPNVLHYGKKDTGNELEPGMTFTIEPMINVGKFESKVLNDGWTAVTKDKSLSAQFEHTIGINENGYEIFTESVK

SEQ ID NO: 139897 - protein, 238 aa, Unknown
  Bacterial polypetide isolated from the Sargasso Sea
MNEEFLKSFDGTREAGAIASGTLDELNTIIKPGVTTEKIDKICYEYINDHGAYSAPLYYRGFPKSCCTSTNHIVCHGIPQDKILRDGDILNVDVTAIKNGWHGDTSRMYLVGDVSVKAKKLIKVTYESMLKGIEILKEGSFTGDIGNAIQTHVEQQGFSVVRDFCGHGLGRKFHQSPNILHYGEEKTGEKLVAGMLFTIEPMINEGDYNTKVLSDGWTAVTKDKLLSAQFEHTVGITK

SEQ ID NO: 139898 - protein, 235 aa, Unknown
  Bacterial polypetide isolated from the Sargasso Sea
RGNLAAQTLDMLTENIKEGISTDYIDKLGYEFIRDNGGYSAPLYYRGFKKSLCTSLNHVVCHGVPSEDRILEDGDAVNVDVTAVVNEHYGDTSRMFCIGKTPVKLNNLINATYESMMKAIKILKPGVRLGDIGYEIQSYVEEKGFSVVRDFCGHGISTTFHEPPNILHYGNKNTGKGITPGMTFTIEPMINAGKYDVKMLNDGWTAVTKDKSLSAQFEHTVGIYRNGYEIFTESV

SEQ ID NO: 139899 - protein, 228 aa, Unknown
  Bacterial polypetide isolated from the Sargasso Sea
MSKNYSEKFEKMRVAGKLASSTLDMITSFIKPGITTDFIDKTCYEFIKDNGGYSAPLNYRGFEKSVCTSLNHVVCHGIPSDRTLEDGDILNIDVTAIINNHYGDTSRMYIAGNTNIKAQNLINATYESLMNAIRILRPGLKLGDIGFTIQSYVEQKGFSVVRDFCGHGISNKFHEPPNILHYGKRNSGIELYPGMTFTIEPMINAGKYDVKVLNDGWTAVTKDKSLSA

SEQ ID NO: 139900 - protein, 116 aa, Unknown
  Bacterial polypetide isolated from the Sargasso Sea
MGDIGYEIQSYVEGKGFSVVRDFCGHGISTIFHEPPNILHYGKKNTGIKTYPGMTFTIEPMINSGKYDVKLLNDGWTAVTKDKSLSAQFEHTLGITENGYEIFTESAKGYSKPPYK

SEQ ID NO: 139901 - protein, 101 aa, Unknown
  Bacterial polypetide isolated from the Sargasso Sea
FSVVRDFCGHGIGKSFHLSPNILHYGEKGKGEKISTGMIFTIEPMINAGKFPTKTLSDGWTAVTKDKTLSAQFEHTVGIKEDGFEIFTLSQENLDQPKYDL

SEQ ID NO: 139902 - protein, 237 aa, Unknown
  Bacterial polypetide isolated from the Sargasso Sea
MKNSYLEKFEKMRIAGKLASKTLDMITEYVKPGISTDKIDQMCHEFIRDNGGYSAPLYYRGYTKSLCTSLNHVVCHGIPSDRTLDEGDALNIDVTAIVNDYHGDTSRMFSVGEVSIKAKNLINATYESMINAIKILKPGTKLGDIGYEIQSYIEKKGFSVVRDFCGHGISNIFHEQPNVLHYGKKNTGIELTPGMTFTIEPMINSGKYDTKILNDGWTAVTKDKSLSAQFEHTVGIT

SEQ ID NO: 139903 - protein, 227 aa, Unknown
  Bacterial polypetide isolated from the Sargasso Sea
MIKTLSDIEEMKVAGKLAAEVLEMITPFVKPGISTGELDSICHDYIINEQNAIPANVGYRGFEKTICSSLNQVVCHGIPDDKRILKNGDILNIDVTVLKDGWHGDTSKMFLVGKCKPHNERLVKVTQECLYKAIEIVGPGAHLGDIGHAIQEHAEKNYYSVVEEYCGHGIGKVYHEEPQILHYGKQGTGLRLEEGMCFTIEPMINLGTKFTKSLNDGWTVETKDGRN

SEQ ID NO: 139904 - protein, 258 aa, Unknown
  Bacterial polypetide isolated from the Sargasso Sea
MTDKKLEAFEGTRIAGAIASAALDEVAKVVKPGIKTDDIDKLCFEFINDSNAYSAPLFYRGYPKSCCTSTNHIVCHGIPQNKILKEGDIVNVDVTAQKDGWHGDTSRMYFVGDVSIKAKKLVNATYDAMIKSIQILKNDIHIGDIGSVIQKHVEAEGFSVVRDFCGHGVGRSFHAPPNILHYGEAKTGEKLKAGMIFTIEPMINEGNYETKLLNDGWTAVTKDKKLSAQFEHTVGITDNGYEIFTSSKKGLDFPPYKI

SEQ ID NO: 139905 - protein, 183 aa, Unknown
  Bacterial polypetide isolated from the Sargasso Sea
CHGIPSDRVLNEGDAVNIDVTAIVNEYYGDTSRMFTIGDIPVKAKNLIETTYKSMMKGIEILKPGVKLGDIGFVIQSFVEERGFSVVRDFCGHGISNTFHEQPNILHYGKKNTGYELIPGMTFTIEPMINVGKLDVKVLNDGWTAVTKDKSLSAQFEHTIGITEDSYEIFTESVKGYKRPPYN

SEQ ID NO: 139906 - protein, 242 aa, Unknown
  Bacterial polypetide isolated from the Sargasso Sea
MSDYKEKFEKMRAAGNLAARTLDMLTDHIKPGISTDKLDNLGYEFIKDHGAYSAPQFYRGFKKSLCTSLNHVVCHGIPSDRVLDEGDAINIDVTAILDGHYGDTSRMYTVGEVSIKSKNLIDATYNSMMKAINILKPGLCLGDIGHEIQSYVEEKGFSVVRDFCGHGISTKFHEPPNVLHYGKKNTGIKVYPGMTFTIEPMINFGKYDIKLLNDGWTAVTKDKSLSAQFEHTVGITENGYEI

SEQ ID NO: 139907 - protein, 77 aa, Unknown
  Bacterial polypetide isolated from the Sargasso Sea
HYGRKNTGMELRPGMTFTIEPMINAGKYDVKMLNDGWTAVTKDKSLSAQFEHTLGITENGYEIFTESAKGYSKPPYL

SEQ ID NO: 139908 - protein, 143 aa, Unknown
  Bacterial polypetide isolated from the Sargasso Sea
SIKSKNLIDATYEAMMRAIRVLKPGLTLGDIGYEIESYIDEKGFSVVRDFCGHGISTTFHEPPNILHYGKKNTGFKVYPGMTFTIEPMINFGKFEVKVLNDGWTAVTKDKSLSAQFEHTLGITENGYEIFTESAKGYSKPPYK

SEQ ID NO: 139909 - protein, 253 aa, Unknown
  Bacterial polypetide isolated from the Sargasso Sea
SEKFEKMRIAGKLASDTLDMLTENIKEGISTAYIDKLGYEFIRDNGGYSAPLYYRGFKKSLCTSLNHVVCHGIPSEERILEEGDALNVDVTAIINNHYGDTSRMFCIGKTSVKLNNLIDATYESMMKAIKILKPGIKLGDIGYEIQNYIEEKGFSVVKDFCGHGISTKFHEPPNILHYGRKNTGMKLESGMTFTVEPMINAGKFNVKMLNDGWTAVTRDKSLSAQFEHTVGITENGYEIFTESAKDYSKPPYL

SEQ ID NO: 139910 - protein, 202 aa, Unknown
  Bacterial polypetide isolated from the Sargasso Sea
NYKGFPKSVCTSVNHVVCHGIPNEKKLLNNGDIINVDVTVILDGWYGDSSRMFVAGKTNKKNYDLLKTTYECLLVGIKEALPGKTFGDIGHKIQEYAEAKNYSVVREFCGHGIGKEFHTPPSVLHYGKVGEGPELKPGMFFTIEPMINLGDWRVKILNDGWTAVTKDKSLSAQFEHTIGITEDGNEIFTLSENNTDFPINDL

SEQ ID NO: 139911 - protein, 208 aa, Unknown
  Bacterial polypetide isolated from the Sargasso Sea
MTEYLEKFEKMRIAGKLAAQTLDMLTENIKEGISTAHIDKLGYEFIRDNGGHSAPLYYRGFTKSLCTSLNHVVCHGIPSEDRILEEGDAVNVDITAIVNEHYGDTSRMFCIGNTSVKLNNLISTTYDSMMKAIKILKPGIKLGDIGYEIQSHVEEKGFSVVKDFCGHGIGTTFHEPPNILHYGRKNTGMELKPGMTFTIEPMINEGKF

SEQ ID NO: 139912 - protein, 192 aa, Unknown
  Bacterial polypetide isolated from the Sargasso Sea
LCTSLNHVVCHGIPSDRILNEGDTVNIDVTAILDGHYGDTSRMYTVGEVSIKSKNLIDATYNSMMKAINILKPGLSLGDIGHEIQSYVEEKGFSVVRDFCGHGISTTFHEPPNILHYGKKNTGIKVYPGMTFTIEPMINSGKYDVKLLNDGWTAVTKDKSLSAQFEHTVGITENGYEIFTESAKGYSKPPYK

SEQ ID NO: 139913 - protein, 188 aa, Unknown
  Bacterial polypetide isolated from the Sargasso Sea
NHIVCHGIPKDKVLDEGDIVNVDVTALKDGWHGDTSRMYFVGEVSTKANQLVRTTYDALIKSIKILKNDIYLGDIGSVIQNYVEKKGFSVVRDFCGHGVGKKFHEYPNILHYGEEKTGDRLKTGMIFTIEPMINEGDYETKVLNDGWTAVTKDKKLSAQFEHTVGITDDGYEIFTISKKGLDYPPYKI

SEQ ID NO: 139914 - protein, 174 aa, Unknown
  Bacterial polypetide isolated from the Sargasso Sea
MEYLSEKILKDGDIINVDVTALKDGWHGDTSRTFEIGEVSIKAKNLVRTTYEAMMKAIEVVKDNTHLGDIGWTIQNHVESKGFSVVQDFCGHGVGKLFHEPPNVLHYGEKGTGEKIKAGMIFTIEPMINAGNYETKTLNDGWTAVTKDKSLSAQFEHTIGVTKEGCEIFTLPNK

SEQ ID NO: 139915 - protein, 229 aa, Unknown
  Bacterial polypetide isolated from the Sargasso Sea
YLEDFVQVGISTEEIDSLAYKYITEELKCIPANVGYNDYPKTLCTSVNDVICHGIPSDKEILKDGDIVNIDITVIVDGWHGDTSKMFLIGKSQPHVKRLVDITRECMFKGIEVCKPGAFTGDIGYAIQTHAEKNHYSVVKNYCGHGIGKIYHEDPQITHFGNKGEGIKLEEGMVFTIEPMINLGSHKTKLLKDGWTVVTEDGKLSAQWEHTIAITEQGYEILTLREEEK

SEQ ID NO: 139916 - protein, 86 aa, Unknown
  Bacterial polypetide isolated from the Sargasso Sea
VFHEAPNILHYGNKNTGMELRPGMTFTIEPMINAGKFDTKVLNDGWTAVTKDKSLSAQFEHTIGITENGYEIFTESAKGYSKPPYN

SEQ ID NO: 139917 - protein, 66 aa, Unknown
  Bacterial polypetide isolated from the Sargasso Sea
KPGMTFTIEPMINSGKYDVKMLNDGWTAVTKDKSLSAQFEHTLGITENGYEIFTESAKGYSKPPYL

SEQ ID NO: 139918 - protein, 219 aa, Unknown
  Bacterial polypetide isolated from the Sargasso Sea
MNNYSEKFEKMRIAGKVASKTLDMITDHIKPGISTEKIDHMCYEFIKDNGGHSAPLFYRGYKKSVCTSLNHVICHGVPSDRTLEEGDILNIDVTAIVNDYYGDTSRMFSVGEISVKAKNLINSTYESMMNAIKILKPGAKLGDIGYQIQSYVEEKGFSVVRDFCGHGISNTFHEHPNILHYGKKDTGQELKPGMTFTIEPMINAGKYESKLLNDGWTAV

SEQ ID NO: 139919 - protein, 245 aa, Unknown
  Bacterial polypetide isolated from the Sargasso Sea
MNDYKEKFEKMKIAGGLASKTLDMLTNEIKEGISTNKIDKLGFEFIRDNGGYSAPLYYRGFRKSLCTSLNHVICHGIPSDRILEEGDIVNVDVTTIVDGFYGDTSRMYSIGKISVKAQNLIDATYESLMRSIKILKPGVKLGDIGNEIQKYVEAKGFSVVRDFCGHGIGDKFHEPPNILHYGKKNTGAELKPGMTFTIEPMINSGKFEVKILDDGWTAVTKDKSLSAQFEHTVGIKDNGYEIFTE

SEQ ID NO: 139920 - protein, 227 aa, Unknown
  Bacterial polypetide isolated from the Sargasso Sea
MNNYSEKFEKMRIAGKLASKTLDMLTSEVKEGVSTDKIDQLGYEFIRDNGGHSAPLYYRGFKKSLCTSLNHVVCHGIPSDRVLNEGDVVNIDVTAIVNEYYGDTSRMFAIGDIPVKAKNLIETTYESMMKGIKILKPGIKLGDIGYEIQSFVEERGFSVVRDFCGHGISNTFHEQPNILHYGKKNTGHELTPGMTFTIEPMINVGKLDVKVLNDGWTASDKRISLYL

SEQ ID NO: 139921 - protein, 218 aa, Unknown
  Bacterial polypetide isolated from the Sargasso Sea
KLCYEFINDHKAYSAPLFYRGYPKSCCTSTNHVVCHGIPKGKVLCEGDIVNVDVTALKDGWHGDTSRMYFIGDVSTKANQLVKTTYDALIKSIKILKNDIHLGDIGSAIQKYVEKKGFSVVRDFCGHGVGKKFHEHPNILHYGEEKTGDKLKTGMIFTIEPMINEGQYETKVLNDGWTAVTKDKKLSAQFEHTVGITDNGYEIFTTSNKGLDYPPYKI

SEQ ID NO: 139922 - protein, 206 aa, Unknown
  Bacterial polypetide isolated from the Sargasso Sea
KFEKMRIAGKLASKTLDMLTDNIKEGISTDYIDKLGYEFIRDNGGYSAPLYYRGFKKSLCTSLNHVVCHGIPSEDRILEEGDALNVDVTAIIDEHYGDTSRMFCIGKTSVKLNNLIDATYESMMRAIKILKPGIRLGDIGNEIQSYVEEKGFSVVKDFCGHGISTTFHEPPNILHYGSKNTGIEIKLGMTFTIEPMINAGKFEVKM

SEQ ID NO: 139923 - protein, 160 aa, Unknown
  Bacterial polypetide isolated from the Sargasso Sea
DIVNVDVTSLVEGYHGDTSRTYCVGQVSVKAKNLVETTKEALDRSIKILKPGIHLGNIGNEIQTYVENKGYSVVRDFCGHGVGREFHEEPNILHYGKNGTGPKLQEGMVFTIEPMINAGKYETKVLNDGWTAVTKDKSLSAQFEHTVGITNNGYEIFTLS

SEQ ID NO: 139924 - protein, 255 aa, Unknown
  Bacterial polypetide isolated from the Sargasso Sea
IHGPDNFESMRKAGQLASDVLDYITPYVKPEVTTGYLNDLAHDYILSNNAIPAPLNYKGFPKSTCISVNHVVCHGIPGDKKLQSGDILNIDVTVILDGWYGDTSRMFFAGEPSVKAKRLCDVTYKCLMAGIEVSKPGATLGDIGYAIQTLAEKERFSVVRDFTGHGLGQVFHCPPSVLHFGNPGEGIRLEPGMIFTIEPMINAGGYATKILSDGWTAVTRDRSLSAQFEHSIGITENGAEIFTLSKKNYDFPPYK

SEQ ID NO: 139925 - protein, 213 aa, Unknown
  Bacterial polypetide isolated from the Sargasso Sea
MVHEETLTQEQIPAPLNYGRGKGPRGRPFPKSVCTSINEVICHGIPNEQILVDGDIINVDVTCIVDGYFGDASRMFIIGEVPDATRKLVEETRKCLELGIAQVRPGGKTGDIGHAIQTHAENLGYSVVRDFCGHGVGVEFHEAPQILHYGTPGTGELIQENMVFTIEPMINMGRPESRILRDGWTAVTVDGSLSAQWEHTIHVTREGCQVLTG

SEQ ID NO: 139926 - protein, 162 aa, Unknown
  Bacterial polypetide isolated from the Sargasso Sea
AIVDEHYGDTSRMFCIGKTPIKLNKLIDATYESMMRAIKILKPGIKLGDIGYEIQSFVEQKGFSVVRDFCGHGISTTFHEPPNILHYGNRNSGMELRPGMTFTIEPMINSGKYDVKMLNDGWTAVTKDKSLSAQFEHTLGITENGYEIFTESAKGYLKPPYL

SEQ ID NO: 139927 - protein, 223 aa, Unknown
  Bacterial polypetide isolated from the Sargasso Sea
KSIDYCFEYINDNNALSAPLFYRGFPKSCCTSANHIVCHGIPSKNKILKEGDILNVDVTVQKDGWHGDTSRMYLVGEVSTKAKKLVSTTYEAMIKSINILKDGVHLGDIGFTIQEYVESKGYSVVRDFCGHGTGKNFHEPPNILHYGDAKTGDRIKTGMIFTIEPMINEGESETKVLNDGWTAVTKDKKLSAQFEHTVGITDKGCEIFTASKKGLNFPPYKND

SEQ ID NO: 139928 - protein, 135 aa, Unknown
  Bacterial polypetide isolated from the Sargasso Sea
ETTYESMMRAIKILKPGIKLGDIGYTIQSFVEEKGFSVVRDFCGHGISTTFHESPNILHYGSKNTGMEIRPGMTFTIEPMINSGKYDVKMLNDGWTAVTKDKSLSAQFEHTLGITENGYEIFTESAKGYSKPPYL

SEQ ID NO: 139929 - protein, 192 aa, Unknown
  Bacterial polypetide isolated from the Sargasso Sea
RGFPKSLCTSLNHVICHGIPGKRILDEGDILNVDVTTIVDGYYGDTSRMYSIGKISVKAQNLINVTYESLMKSIKILKPGLKLGDIGNEIQTYVEARGFSVVRDFCGHGIGEKFHEPPNILHYGKKNTGMELTPGMTFTIEPMINSGKYDVKILDDGWTAVSKDKSLSAQFEHTVGIKDNGYEIFTESVKVM

SEQ ID NO: 139930 - protein, 253 aa, Unknown
  Bacterial polypetide isolated from the Sargasso Sea
SGFEGMRKAGLLAARILDELKNIIQPGISTEKINSFCHKMIIDNNAIPAPLNYKGYPKSICTSVNHVVCHGIPNEKKILKNGDIVNVDVTVILNGWHGDSSRMYASGEINKKIESLLKTTYECLLLGIKIAKPGKHLGDIGYVIQKHAESKKFSVVRDFCGHGIGKKFHAPPSVLHYGNLDEGPELKPGMFFTIEPMINIGEWDVKILNDGWTAVTKDKSLSAQFEHTIGITENGNEIFTLSQNNSDFPINTI

SEQ ID NO: 139931 - protein, 146 aa, Unknown
  Bacterial polypetide isolated from the Sargasso Sea
GDIPVKAKNLIETTYESMMKGIKILKPGVKLGDIGYEIQSFVEERGFSVVRDFCGHGISNTFHEQPNILHYGKKNTGHELTPGMTFTIEPMINVGKFDVKVLNDGWTAVTKDKSLSAQFEHTIGITEDSYEIFTESVKGYKRPPYN

SEQ ID NO: 139932 - protein, 102 aa, Unknown
  Bacterial polypetide isolated from the Sargasso Sea
KGFSVVRDFCGHGISTTFHEPPNILHYGKKNTGMELRPGMTFTIEPMINSGKYDVKMLNDGWTAVTKDKSLSAQFEHTLGITENGYEIFTESAKGYSKPPYL

SEQ ID NO: 139933 - protein, 69 aa, Unknown
  Bacterial polypetide isolated from the Sargasso Sea
EKIKSGMVFTIEPMINAGKYETKVLSDGWTAVTKDKSLSAQFEHTVGITKDGYEIFTLSKKGLNFPPYK

SEQ ID NO: 139934 - protein, 113 aa, Unknown
  Bacterial polypetide isolated from the Sargasso Sea
IGYEIQSYVEDKGYSVVRDFCGHGVSTTFHEPPNILHYGNKNSGAELKPGMTFTIEPMINSGKYDVKMLNDGWTAVTKDKSLSAQFEHTLGITENGYEIFTESVKGYLKPPYL

SEQ ID NO: 139935 - protein, 209 aa, Unknown
  Bacterial polypetide isolated from the Sargasso Sea
DNLCYEYINDHGAYSAPLFYRGFPKSCCTSANHVVCHGIPSSKILNDGDIINVDVTALKDGWHGDTSRTFEIGEVSIKAKKLVRVTHEAMMKAIEIIKEDICLGDIGSTIQNHVEAEGFSVVQDFCGHGIGQQFHKEPNILHYGEKGTGEKIKAGMIFTIEPMINLGKYETKTLNDGWTAVTKDKSLSAQFEHTVGVTKDSCEIFTLSK

SEQ ID NO: 139936 - protein, 212 aa, Unknown
  Bacterial polypetide isolated from the Sargasso Sea
ASQTLDMLTNEVKEGVSTDKIDQLGYEFIRDNGGYSAPLYYRGFKKSLCTSLNHVVCHGIPSDRVLIDGDAVNIDVTAIVNEYYGDTSRMFTIGDIPVKAKNLIETTYESMMKGIKILKPGIKLGDIGYEIQSFVEERGFSVVRDFCGHGISNTFHEQPNILHYGKKNTGYELIPGMTFTIEPMINVGKLDVKVLNDGWTAVTKDKSLSAQF

SEQ ID NO: 139937 - protein, 226 aa, Unknown
  Bacterial polypetide isolated from the Sargasso Sea
MNISIKNKNDIEKLRNAGQLAANVLNMITEHVKPGISTGELDDICHDFIVNEQKAIPANIGYLGYEKTSCISVNQVICHGIPNQNKILKDNDIVNIDVSVLKDGWYGDTSKMFLVGKTQPHNEKLVSVTQECLYKAIEIAKPGITLGDIGHVIQTHAEKNHYSVVEEYCGHGIGKVYHEDPQVLHFGRPGTGIELVEGMCFTIEPMINQGTKYTKILSDGWTVETK

SEQ ID NO: 139938 - protein, 190 aa, Unknown
  Bacterial polypetide isolated from the Sargasso Sea
YVIKSCCLSWIPTDRILRDGDAVNVDVTAIVDEHYGDTSRMFCIGKTPIKLNNLIDTTYESMMRAIKILKPGIKLGDIGYTIQSFVEEKGFSVVRDFCGHGISTTFHEAPNILHYGSKNTGMELTPGMTFTIEPMINSGKYDVKMLNDGWTAVTKDKSLSAQFEHTLGITENGYEIFTESAKGYLKPPYL

SEQ ID NO: 139939 - protein, 125 aa, Unknown
  Bacterial polypetide isolated from the Sargasso Sea
ISILQPGKKLGDIGFEIQSYVESKGYSVVRDFCGHGISNVFHEPPNILHYGSKNSGKELLPGMTFTIEPMINYGKYDTKVLNDGWTAVTKDKSLSAQFEHTVGITEDSYEIFTESVKGYTRPPYN

SEQ ID NO: 139940 - protein, 212 aa, Unknown
  Bacterial polypetide isolated from the Sargasso Sea
FTNEIDKICYEYINDHGAFSAPLFYRGFPKSCCTSANHIVCHGIPSKKILKEGDIINVDVTAFKNGWHGDTSRMFKVGEISVKAQKLINATYDSMMKAIKIIKDGVHLGDIGSIIQHHVEKEGFSVVQDFCGHGIGETFHKEPNVLHYGEKGTGEKIKAGMIFTIEPMINQGKFETKTLNDGWTAVTKDKSLSAQFEHTIGVTKDGYEIFTR

SEQ ID NO: 139941 - protein, 87 aa, Unknown
  Bacterial polypetide isolated from the Sargasso Sea
MYFTKVQNILHYGKKNTGPELQPGMTFTIEPMINAGKYEVKILNDGWTAVTKDKALSAQFEHTVGITDNGYEIFTESVKNLKRPPYN

SEQ ID NO: 139942 - protein, 220 aa, Unknown
  Bacterial polypetide isolated from the Sargasso Sea
ELDNLGYEFIKDHGAYSAPQFYRGFKKSLCTSLNHVVCHGIPSDRVLNEGDAINIDVTAILDGHYGDTSRMYTVGEVPIKSKNLIDATYDSMMKAINILKPGLSLGDIGHEIQSHVEEKGFSVVRDFCGHGISTIFHEPPNILHYGKKNTGIKVYPGMTFTIEPMINSGKYDVKLLNDGWTAVTRDKSLSAQFEHTVGITENGYEIFTESAKGYSKPPYK

SEQ ID NO: 139943 - protein, 62 aa, Unknown
  Bacterial polypetide isolated from the Sargasso Sea
GEKLKAGMIFTIEPMINAGKYETKILNDGWTAVTKDKSLSAQFEHTVGITKDGYEIFTESKN

SEQ ID NO: 139944 - protein, 159 aa, Unknown
  Bacterial polypetide isolated from the Sargasso Sea
DEHYGDTSRMFCIGNTPVKLNNLIDATYQSMMRAIKILKPGIKIGNIGHEIQSYVEEKGYSVVRDFCGHGIGKKFHEPPNILHYGNKNSGIDLWPGMTFTIEPMINSGKYDIKMLNDGWTAVTKDKSLSAQFEHTLGITENGYEIFTESAKGYSKPPYL

SEQ ID NO: 139945 - protein, 188 aa, Unknown
  Bacterial polypetide isolated from the Sargasso Sea
LNHVVCHGIPSDRILSEGDAVNIDVTAIVNEYYGDTSRMFTIGDIPVKAKNLIDTTYESMMKGIAILKPGVKLGDIGFEIQSFVEERGFSVVRDFCGHGISNTFHEQPNILHYGKKNTGHELTPGMTFTIEPMINVGKLDVKVLNDGWTAVTKDKSLSAQFEHTIGITEDSYEIFTESVKGYKRPPYN

SEQ ID NO: 139946 - protein, 209 aa, Unknown
  Bacterial polypetide isolated from the Sargasso Sea
MSDYKEKFEKMKIAGNLAARTLDMLTENIKEGISTDYIDKLGYEFIKDNGGYSAPLYYRGYTKSLCTSLNHVVCHGIPSDRILKDGDALNVDVTAIIEDHYGDTSRMFCIGKTPVKLNNLIDVTYESMMRAIKILKPGIRLGDIGYEIQSFVEEKGFSVVKDFCGHGIGTSFHEPPNILHYGSKNSGMELKPGMTFTIEPMINAGKYDV

SEQ ID NO: 139947 - protein, 106 aa, Unknown
  Bacterial polypetide isolated from the Sargasso Sea
FCRKNGFSVVRDFCGHGIGTNFHQEPNILHYGSKDTGNELKPGMTFTIEPMINAGKYHTKVLNDGWTAVTKDKTLSAQFEHTVGITENGYEIFTESAKGYKEPPYN

SEQ ID NO: 139948 - protein, 256 aa, Unknown
  Bacterial polypetide isolated from the Sargasso Sea
MTNYKEKFEKMRIAGNLAARTLDMLTESIKEGVSTNHIDKLGYEFIRDNGGYSAPLYYRGFTKSLCTSLNHVVCHGVPSERILQEGDAINVDVTAIVDEHYGDTSRMFCIGKTPVKLNNLIDATYESMMRAITILKPGIKLGDIGYTIQSFIEEKGFSVVRDFCGHGISTTFHEPPNILHYGNKNSGMELKPGMTFTIEPMINSGKYDVKMLNDGWTAVTKDKSLSAQFEHTLGITENGYEIFTESAKGYSKPPYL

SEQ ID NO: 139949 - protein, 252 aa, Unknown
  Bacterial polypetide isolated from the Sargasso Sea
MNSIKKYNESDFVKLRKAGKLAAIALDNIKDKILPGITTQTIDEIIKKFLRDHNAYPAPLLYRGYPKSICTSINHVVCHGIPSDKELKNGDILNIDVTAYLDGFHGDCSKMFCVGDISVKAKNLINVTKECLNRSIKILKPGIHFGNIGHVIQSFAEEKGFSVVREFCGHGVGENFHEEPNVLHYGNKNEGPILEEGMVFTIEPMINEGKFETKVLKDGWTAVTKDKSLSAQFEHTVGITNNGYEIFTLNKN

SEQ ID NO: 139950 - protein, 256 aa, Unknown
  Bacterial polypetide isolated from the Sargasso Sea
MNISIKSKNDIEKLRSAGQLAADVLNMITEYVKPGISTGELDDICYDFIVNEQKAIPANIGYNGYEKTSCISVNQVICHGIPNQNKILKDNDIVNIDVTVLKNGWYGDTSKMFLVGKTQPHNEKLVSVTQECLYKAIEIAKPGMTLGDIGYIIQTHAEKNHYTVVEDYCGHGIGKVYHEDPQVLHFGRPGMGIKLEEGMCFTIEPMINQGTKYTKILSDGWTVETKDGRNSAQWEHTIAITSNGCDVLTKRDEERF

SEQ ID NO: 139951 - protein, 278 aa, Unknown
  Bacterial polypetide isolated from the Sargasso Sea
MRRTSSVPNPIQPGYVSPQRSVPSDIGRPDYALDGIPKATTPNDLRKDAATLDRMRAAGSAARRVLRKVAAEISPGVTTEHLDETCHEACIAEGGYPSPLNYNGFPKSLCTSINEIICHGIPDDRSLREGDIINCDVTIFLDGVHGDHSETFAVGEVDQQSQKLIDITRECLYLGIGAVRAGGVVSDIGKAIQHHAEEAGFGVVREFIGHGVGEIFHHLPNIPHYFEPSARFEFKPGMTFTIEPMITIGEPKATLWDDGWTAATMDLSRTAQFEHTVV

SEQ ID NO: 139952 - protein, 255 aa, Unknown
  Bacterial polypetide isolated from the Sargasso Sea
MSISLKSKNDIEKMKIAGNYAAKVLEYLEDFVQVGISTEEIDNLAYKYITEELKCIPANVGYNDYPKTLCTSINEVICHGIPSDKEILKDGDIVNIDITVIVDGWHGDTSKMFLIGKSQPHVKRLVDITRECMFKGIEVCRPGAFTGDIGYAIQTHAEKNHYSVVKNYCGHGIGKIYHEDPQITHFGNKGEGIKLEEGMVFTIEPMINLGSHKTKLLKDGWTVVTEDGKLSAQWEHTIAITEQGYEILTLREEEK

SEQ ID NO: 139953 - protein, 271 aa, Unknown
  Bacterial polypetide isolated from the Sargasso Sea
MAITLKNEHDIAEMRVACRLASEVLDFITPHVVAGVTTAELDRLCHEFMLNEQGTIPAPLNYQPPGYPPYPKATCISVNDVICHGIPGEKVIKNGDALNIDITVIKNGYFGDTSRMFIVGEGSILAKRLVQTTYECMWLGIDQVKPGAHLGDIGYAIQKHAEAQGYSVVREYCGHGIGTVFHEDPQVVHYGRPGTGIELKAGMIFTIEPMINAGKRDIRTMPDQWTVKTRDRSLSAQWEHTVLVTETGYEVLTVSAGTPARPVFAQPAAAV

SEQ ID NO: 139954 - protein, 205 aa, Unknown
  Bacterial polypetide isolated from the Sargasso Sea
MNSNYSEKFEKMRIAGKLASKTLDMITDFIKPGISTNKIDQLCHEFIKDKGGYSAPLYYRGYTKSLCTSLNHVVCHGIPSDRVLNEGDFLNIDITAIVNDYHGDTSRMFNVGNIPVKAENLINVTYDSMMNAIKILKPGIKLGDIGHEIQSYVEEKGFSVVRDFCGHGISNVFHEQPNILHYGKKNEGLELKPGMTFTIEPMINS

SEQ ID NO: 139955 - protein, 256 aa, Unknown
  Bacterial polypetide isolated from the Sargasso Sea
MKISVKSKSDISKMRVAGKLAAEVLEIISPHVVPGISTGELDEICFNHIVNIQKAIPANVGYNGYEKTICASLNQVICHGIPSNKKVLKSGDILNIDVTVVKDGWHGDTSKMFLVGKCAPHNERLVRVTQECLYKGIEVVKPGAFLGDIGHAIQTHAEKNHYSVVEDYCGHGIGTVYHEEPQVLHYGKAGTGIELREGMCFTIEPMINQGRKFSKVLNDGWTVETKDGRNSAQWEHTISVTKDGYEILTKRSDEHV

SEQ ID NO: 139956 - protein, 256 aa, Unknown
  Bacterial polypetide isolated from the Sargasso Sea
MIDYKEKFEKMRAAGKLASKTLDMLTDYIKPGVSTDKIDKLGYEFIKDNGGYSAPLFYRGFEKSLCTSLNHVVCHGIPSNRILEDGDAVNVDVTAVVDNYYGDTSRMYEIGNVPVKAKNLIEATYNSLMKAISILQPGKKLGDIGFEIQSYVESKGYSVVRDFCGHGISNVFHEPPNILHYGSKNTGKELIPGMTFTIEPMINYGKYDTKVLNDGWTAVTKDKSLSAQFEHTVGITEDSYEIFTESVKGYKRPPYN

SEQ ID NO: 139957 - protein, 264 aa, Unknown
  Bacterial polypetide isolated from the Sargasso Sea
MQSNNIPIYHKNDFQKMHQAGRLAASVLDKLYELIKPGISTLEINDFCHNLIIKNNAVPAPLNYKGFPKSVCTSVNHVVCHGIPNEKKLLNNGDIINVDVTVILDGWYGDSSRMFVAGKTNKKNYDFLKTTYECLHVGIKEAMPGKTFGDIGHKIQEYAEAKNYSVVRDFCGHGIGKEFHTPPSVLHYGKVGEGPELKPGMFFTIEPMINLGDWRVKILNDGWTAVTKDKSLSAQFEHTIGITKDGNEIFTLSENNTDFPINDL

SEQ ID NO: 139958 - protein, 256 aa, Unknown
  Bacterial polypetide isolated from the Sargasso Sea
MKISIKNSSEIEKMRVAGKLAAEVLEMITPYVIPGVSTGELDKICFDHIVNNQNAIPANVGYKGYEKTICTSVNQVICHGIPNNQKILKDGDILNIDVTVIKDGWHGDTSKMFLVGKCAPHNERLVRITQECLYKGIKAVKPGAYLGDIGNAIQKHAESNYYSVVEDYCGHGIGTIYHEEPQVLHYGKSGSGIQLKEGMCFTIEPMINQGTKFSKILSDGWTVETRDGRNSAQWEHTIAVTKDGSEILTKRNEEFQ

SEQ ID NO: 139959 - protein, 255 aa, Unknown
  Bacterial polypetide isolated from the Sargasso Sea
MEKLIKTTEDIQKMRVAGRLAAEVLEVITPKVVPGISTGELDKLCYEHIINVQNAIPANVGYKGYEKTICSSINQVICHGIPSNEKILKDGDILNIDVTVIKDGWHGDTSKMFLVGKCAPHNERLVKITQECLYKGIEVVKPGAYLGDIGSAIQKHAESNYYSVVEDYCGHGIGAVYHEEPQVLHYGKSGSGIQLKEGMCFTIEPMINQGTKYCKTLKDGWTVETKDGRNSAQWEHTIVVTRDGSEILTKRNEEL

SEQ ID NO: 139960 - protein, 206 aa, Unknown
  Bacterial polypetide isolated from the Sargasso Sea
MEKLIKTTEDIQKMRVAGRLAAEVLEVITPKVVPGISTGELDKLCYEHIINVQNAIPANVGYKGYEKTICSSINQVICHGIPSNEKILKDGDILNIDVTVIKDGWHGDTSKMFLVGKCAPHNERLVKITQECLYKGIEVVKPGAYLGDIGSAIQKHAESNYYSVVEDYCGHGIGAVYHEEPQVLHYGKSGSGIQLKEGMCFTIEPR

SEQ ID NO: 139961 - protein, 249 aa, Unknown
  Bacterial polypetide isolated from the Sargasso Sea
MSNYTEKFEKMRAAGNLAAKTLDMLTDHIKPGISTDEIDNLGYEFIKDHGAYSAPQYYRGFKKSLCTSLNHVVCHGIPSDRVLNEGDAVNIDVTAILNGHYGDTSRMYNVGEISIKSKNLIDATYDSMMKAINILKPGLSLGDIGHEIQTYVEEKGFSVVRDFCGHGISTTFHEPPNILHYGKKNTGIKVYPGMTFTIEPMINSGKYEVKLLNDGWTAVTKDKSLSAQFEHTVRITENGYEIFTESAKG

SEQ ID NO: 139962 - protein, 265 aa, Unknown
  Bacterial polypetide isolated from the Sargasso Sea
MSIVIKTAEEIEKMRAAGKLAAQVLEMIAPYVKAGVSTNELNDICAKYTEEQGAISAPLNYHGFPKSICTSLNNVICHGIPSDRVLKDGDILNIDITVIKDGYHGDTSKMFLIGEVSPKDKRLCRIAQESLYLAIRKVRPGLKLGEIGNTIEKFIKASKTGLEKYSIVQDYCGHGIGAGFHEEPQVMHYRNGDNTILRPGMCFTIEPMINAGRHTTVLDRDDKWTVTTSDGKNSAQWEHTLLVTETGVEVLTLRDEEDFPRIINH

SEQ ID NO: 139963 - protein, 255 aa, Unknown
  Bacterial polypetide isolated from the Sargasso Sea
MNISIKNFEDIEKMRIAGKLAAEVLEMITPFVKPGVSTGELDKLCYDHIVNVQNAIPANVGYKGYEKTICSSINQVICHGIPNNEKFLKDGDILNVDVTVIKDGWHGDTSKMFLVGKCAPHNQRLVQITQECLYKGIEAVKPGAYLGDIGNAIQKHAERNYYSVVEDYCGHGIGKIYHEEPQILHYGKPGTGIQLKEGMCFTIEPMINQGKKYCKTLNDGWTVETKDGRNSAQWEHTIAVTKTGSEILTKRNDEF

SEQ ID NO: 139964 - protein, 285 aa, Unknown
  Bacterial polypetide isolated from the Sargasso Sea
MKKGPESSKELSRNDPCWCGSGKKFKKCHLGREQPPPRPKASVSQNPRRILIKTEEQLEGIRKSSRLTRDLLDMIENRIESGVSTNQINKWVHEETLAQGAIPAPLNYGRGKGPRGRPFPKSVCTSINEVICHGIPNEQILVDGDIINVDVTCIVDGYFGDASRMFIIGEVPDATQKLVQETRKCLELGIAQVRPGGKTGDIGHAIQTHAESLGYSVVRDFCGHGVGVEFHEAPQILHYGTPGTGDLMQENMVFTIEPMINMGRPESRILGDGWTAVTVDGSLSA

SEQ ID NO: 139965 - protein, 256 aa, Unknown
  Bacterial polypetide isolated from the Sargasso Sea
MRISIKSNKEIEKMRIAGSLAAEVLEMISPFVVPGISTGELDKICYEHIVNKQNAIPANVGYKGYEKTICSSINQVICHGIPNNEKFLKEGDILNIDVTVIKDGWHGDTSKMFLVGKCAPHNERLVKITQECLYKGINEVKPGAFLGDIGYAIQKHAEENYYSVVEDYCGHGIGSVYHEEPQVLHYGKRGTGIQLKEGMCFTIEPMINQGTKYSKILKDGWTVETKDGRNSAQWEHTIVVTEHGSEILTKRDEEFI

SEQ ID NO: 139966 - protein, 256 aa, Unknown
  Bacterial polypetide isolated from the Sargasso Sea
MSDYKEKFEKMRVAGKLASKTLDMLTDYIKPGVSTDKIDKLGYEFIKDNGGYSAPLFYRGFEKSLCTSLNHVVCHGIPSERILEDGDAVNVDVTAVIDNHYGDTSRMYEVGNVPVKAKNLIEATYDSLMKAISILQPGKKLGDIGFEIQSYVESKGYSVVRDFCGHGISNVFHEPPNILHYGSKNTGKELIPGMTFTIEPMINYGKYDTKVLNDGWTAVTKDKSLSAQFEHTVGITEDSYEIFTESVKGYTRPPYN

SEQ ID NO: 139967 - protein, 252 aa, Unknown
  Bacterial polypetide isolated from the Sargasso Sea
MVKNQSEIEKMRVAGKLAAEVLIMLGDFVKPGITTDDINSICHNFIVNELECIPAPLNYKGFPKSVCTSVNHQVCHGIPGSRKLKKGDIVNVDITVIKDGYHGDTSKMFYIGKPSVQAKRLTEITYEALKIGIKTVKPGNTLGDIGFNIQKYVEENNFSVVREFCGHGIGKEFHEEPQVLHYGNQGEGEVLREGMTFTIEPMVNFGKKEVKILPDQWTVVTKDHSLSAQWEHTILVTKNGYEVLTIRPDENI

SEQ ID NO: 139968 - protein, 258 aa, Unknown
  Bacterial polypetide isolated from the Sargasso Sea
MENNYTEAFEGTRNAGSIAAAALDEVGKIIKPGITTEKIDKLCFEFINDFKAYSAPLYYRGYPKSCCTSVNHTVCHGIPSNKILKEGDIVNVDVTALKDGWHGDTSRMFYAGQVSVKSKNLTKVTYDAMMAAIKILRQGINIGDIGFTIQKHVEAKGFSVVRDFCGHGLGRNFHELPNILHYGEQGTGDKLKTGMIFTIEPMINEGKYETNVLKDGWTAVTKDKMLSAQFEHTVGIKNEGYEIFTLSKKGLDFPPDTK

SEQ ID NO: 139969 - protein, 258 aa, Unknown
  Bacterial polypetide isolated from the Sargasso Sea
MKIKSYSNAEVDSCRKAGKITATILDELNNIIKEGITTSEIDEFCLTRIQELGGTPAPLFYRGFPKSTCTSLNHVICHGIPNYNRNLQKGDILNVDVTTIIDGWHGDSSRMYKVGEVSIKANNLCKVTHDCLIESIDEIKVGEPISRIGKKIEDIATSNNFSVVRDFCGHGVGLKFHENPSILHYYDSEYDNIKFIDGMIFTIEPMINAGKYQSKILSDGWTAVTKDKTLSAQYEHTIYINGDNVEILTESPNKAFYN

SEQ ID NO: 139970 - protein, 256 aa, Unknown
  Bacterial polypetide isolated from the Sargasso Sea
MSDYTEKFEKMRAAGNLAARTLDMLTDHIKPGVSTDEIDNLGYEFIKDHGAYSAPQFYRGFKKSLCTSLNHVVCHGIPSDRVLNEGDAVNIDVTAILDGHYGDTSRMYTIGEVSIKSKNLIDATYNSMMKAINILKPGLSLGDIGNEIQSYIEEKGFSVVRDFCGHGISTTFHEPPNILHYGKKNTGTKIYPGMTFTIEPMVNFGKYDVKVLNDGWTAVTKDKSLSAQFEHTIGITENGYEIFTESAKGYSKPPYK

SEQ ID NO: 139971 - protein, 256 aa, Unknown
  Bacterial polypetide isolated from the Sargasso Sea
MSDYTEKFEKMRAAGSLAAKTLDMLTGHIKPGISTDELDNLGYEFIKDHGAYSAPQYYRGFKKSLCTSLNHVVCHGIPSDRVLDEGDSINIDVTAILDGHYGDTSRMYTVGEVPIKSKNLIDVTYDSMMKAINILKPGLSLGDIGNEIQSYVEEKGFSVVRDFCGHGIGTTFHEPPNILHYGKKNTGIKIYPGMTFTIEPMINFGKYDVKVLNDGWTAVTKDKSLSAQFEHTIGITENGYEIFTESAKGYSKPPYK

SEQ ID NO: 139972 - protein, 255 aa, Unknown
  Bacterial polypetide isolated from the Sargasso Sea
MNISIKNFEGIEKMRIAGKLAAEVLEMITPFVKPGVSTGELDKLCYDHIVNVQNAIPANVGYKGYEKTICSSINQVICHGIPNSEKFLKDGDILNIDVTVIKDGWHGDTSKMFLVGKCAPHNQRLVQITQECLYKGIEAVKPGAYLGDIGNAIQKHAEKNYYSVVEDYCGHGIGKIYHEEPQILHYGKPGTGIQLKEGMCFTIEPMINQGTKYCKTLNDGWTVETKDGRNSAQWEHTIAVTKTGSEILTKRNDEF

SEQ ID NO: 139973 - protein, 256 aa, Unknown
  Bacterial polypetide isolated from the Sargasso Sea
MNISIKNKNDIEKLRSAGQLAANVLNMITEHVKPGISTGELDDICHDFIVNEQKAIPANIGYNGYEKTSCISVNQVICHGIPNQNKILKDNDIVNIDVTVLKDGWYGDTSKMFLVGKTQPHNEKLVSVTQECLYKAIEIAKPGITLGDIGHVIQSHAEKNHYSVVEDYCGHGIGKVYHEDPQVLHFGKPGTGIELVEGMCFTIEPMINQGTKYTKILSDGWTVETKDGRNSAQWEHTIAITSNGCDVLTKRDEERF

SEQ ID NO: 139974 - protein, 215 aa, Unknown
  Bacterial polypetide isolated from the Sargasso Sea
NEIDKLCYEYINDHKAYSAPLLYRGFPKSCCTSVNHVVCHGIPSNKVLKDGDILNVDVTALKDGWHGDTSRMFEIGNVSVKAKKLIETTYQSMMKAISILKEDIHLGDIGSTIQKYVEANGCSVVQDFCGHGIGQSFHLEPNILHYGKKGTGEKIKAGMIFTIEPMINLGKYETKVLSDGWTAVTRDKTLSAQFEHTVGITKDGYEIFTESKILN

SEQ ID NO: 139975 - protein, 140 aa, Unknown
  Bacterial polypetide isolated from the Sargasso Sea
SKKLIETTYESMMRGIKILKPGVKLGDIGHEIQSFVEERGFSVVRDFCGHGISNTFHEPPNILHYGKKNTGHELTPGMTFTIEPMINVGKLDVKVLNDGWTAVTKDKSLSAQFEHTIGITEDSYEIFTESVKGYKRPPYN

SEQ ID NO: 139976 - protein, 154 aa, Unknown
  Bacterial polypetide isolated from the Sargasso Sea
TSRMFTVGEISVKAKNLIDATYNSLMNATKILKPGIKLGDIGYEIQSYVEAKGFSVVRDFCGHGISNIFHEAPNVLHYGKKNTGSELQPGMTFTIEPMINSGKYDAKVLKDGWTAVTKDKSLSAQFEHTVGITENGYEIFTESVKGYKKPPYIK

SEQ ID NO: 139977 - protein, 225 aa, Unknown
  Bacterial polypetide isolated from the Sargasso Sea
ITTEDLDRLCHSFILDNNAIPAPLNYKGFPKSICTSINHVVCHGIPGGRTLDEGDILNIDVTVILDGWYGDTSRMFGVGKVAVKAARLMDVTYECLMKGIEVVKPGSTLGDIGHAIQEYAEKERFSVVRDFCGHGLGRVFHSAPSILHYGTAGMGAVLQKGMFFTIEPMINAGKYAVKILPDGWTAVTRDRSLSAQFEHSLGVTEDGCELFTVSPLGLHKPPYDV

SEQ ID NO: 139978 - protein, 265 aa, Unknown
  Bacterial polypetide isolated from the Sargasso Sea
MSIVIKTAEEIEKMRAAGKLAAQVLEVIAPYVKAGVTTNELNDICAKYTEEQGAISAPLNYHGFPKSICTSLNNVICHGIPSDRVLKDGDILNIDITVIKDGYHGDTSKMFLIGEVSPKDKRLCRIAQESLYLAIRKVRPGLKLGEIGNTIEKFIKASKTGLEKYSIVQDYCGHGIGAGFHEEPQVMHYRNGDNTILRPGMCFTIEPMINAGRHTTVLDRDDNWTVTTSDGKNSAQWEHTLLVTETGVEVLTLRDEEDFPRIINH

SEQ ID NO: 139979 - protein, 245 aa, Unknown
  Bacterial polypetide isolated from the Sargasso Sea
MNKNYSEKFEKMSVAGKLAAQTLDMITEHIKPGVSTNKIDQLCYEFIRDNKAYSAPLYYRGFKKSLCTSLNHVVCHGIPSDRILDEGDIINIDVTTIVDNYHGDTSRMFCVGKTSIKANNLINATYESMMKAINILKPGIKLGDIGYEIQSYVESKGFSIVKDFCGHGISNVFHEYPNILHYGKKNTGIELKTGMTFTIEPMINYGKHDVKILDDGWTAVTKDKSLSAQFEHTVGITENGYEILQ

SEQ ID NO: 139980 - protein, 241 aa, Unknown
  Bacterial polypetide isolated from the Sargasso Sea
SLASKTLDMLTMKIKEGISTNKIDKLGFEFIRDNGGYSAPLYYRGFEKSLCTSLNHVICHGIPGERILEEGDIVNVDVTTIVDGYYGDTSRMYSIGKISVKAQNLIDATYESLMRSIKILKPGVKLGDIGNEIQTYVEAKGFSVVRDFCGHGIGDKFHEPPNILHYGKKNTGAELKPGMTFTIEPMINSGKFEVKILDDGWTAVSKDKSLSAQFEHTVGIKDNGYEIFTESAKGYLKPPYN

SEQ ID NO: 139981 - protein, 221 aa, Unknown
  Bacterial polypetide isolated from the Sargasso Sea
INTFCHDLILKNNATPAPLNYKGFPKSICTSVNHVVCHGIPSEKKILQEGDIVNVDVTVILDGWHGDSSRMFSAGKINKKTELLLKTTYECLLMGIQEAKPGKYFGDIGFVIQEYAESKNFSVVRDFCGHGIGKKFHTPPSVLHYGNIGEGPQIKPGMLFTIEPMINIGDWHVKILNDGWTAVTKDKSLSAQFEHTIGINENGNEIFTLSQNNSDFPINTL

SEQ ID NO: 139982 - protein, 233 aa, Unknown
  Bacterial polypetide isolated from the Sargasso Sea
MKINLKNQDQISQMRIAGQLAAEVLEMITPYVVPGVSTEELDKRCYDFIVNEQKAIPANVGYNGFEKTICSSVNQVICHGIPSDKKILKDGDILNIDVTVIRDGWHGDTSKMFLVGKTQPHNERLVKVTQECLYKAIEVVKPGAHLGDIGAAIQEHAEKNHYSVVEDYCGHGIGQVYHEEPQVLHYGKAGQGIEIKEGMCFTIEPMINQGSKYTKLLSDGWTVETKRWKKFSA

SEQ ID NO: 139983 - protein, 100 aa, Unknown
  Bacterial polypetide isolated from the Sargasso Sea
FSVVRDFCGHGIGDVFHQSPNVLHYGKKNTGPELQPGMTFTIEPMINAGKYEVKILNDGWTAVTKDKTLSAQFEHTVGITDNGYEIFTESVKNLKRPPYN

SEQ ID NO: 139984 - protein, 105 aa, Unknown
  Bacterial polypetide isolated from the Sargasso Sea
VEEKGFSVVRDFCGHGISNTFHEPPNILHYGKKDTGQELKPGMTFTIEPMINAGKYESKLLNDGWTAVTKDKSLSAQYEHTLGITENGYEIFTESVKGYSKPPYN

SEQ ID NO: 139985 - protein, 256 aa, Unknown
  Bacterial polypetide isolated from the Sargasso Sea
MSINLKNSDQISKMQIAGQLAAEVIEMIGPFVVPGVSTAELDKRCYDFIVTEQKATPANIGYNGFEKTICSSVNQVICHGIPTEKKILKDGDIINIDVTVICDGWHGDTSKMFLVGKAQPHNERLVKVAQECLYKAIDIVKPGAHLGDIGAVIQEHAEKNHYSVVEDYCGHGIGRVYHEDPQILHYGKFGRGIEIQEGMCFTIEPMINQGSKYTKILSDGWTVETKDGRNSAQWEHTLAVTSSGVEILTKRSEEHF

SEQ ID NO: 139986 - protein, 179 aa, Unknown
  Bacterial polypetide isolated from the Sargasso Sea
MGDRTLQDGDIVNIDVTAIVNDHYGDTSRMYTVGDISVKSKKLINVTYESLNRAIKILKPGRRIGDIGHEIQSFVEKNGFSVVRDFCGHGIGTNFHQEPNILHYGSKDTGDELKPGMTFTIEPMINAGKYHTKVLSDGWTAVTKDKTLSAQFEHTVGITENGYVIFTESAKGYKEPPYN

SEQ ID NO: 139987 - protein, 211 aa, Unknown
  Bacterial polypetide isolated from the Sargasso Sea
MSNYSEKFEKMRIAGKLASKTLDMLTDEVKEGVTTDRIDQLGYEFIRDNGGHSAPLYYRGFKKSLCTSLNHVVCHGIPSDRVLNEGDAINIDVTAIVNEYYGDTSRMFTIGDIPVKAKNLIETTYDSMMKGIGILKPGLKLGDIGYEIQSFVEERGFSVVRDFCGHGISNTFHEQPNILHYGKKNTGHELTPGMTFTIEPMINVGKLDVKV

SEQ ID NO: 139988 - protein, 254 aa, Unknown
  Bacterial polypetide isolated from the Sargasso Sea
MIKSSDEIAKMKLAGKLAAQTLEMIEQHVQPGVSTGELDRICHDYIVNEIDCIPAPLNYNGFPKSICTSINQVVCHGIPDDNRVLKNGDIINIDVTVIKDGYHGDTSKMFFVGKKQPHAERLVSITQECLYKAIAICKPGIKLGDIGYVIQKHAEENHYSVVRDYCGHGIGKVFHEDPQILHYGNPGTGMELKAGMCFTIEPMINLGTHKTKLSKNDGWTVETIDGRLSAQWEHTLAITDDGCEVLTARSEETL

SEQ ID NO: 139989 - protein, 79 aa, Unknown
  Bacterial polypetide isolated from the Sargasso Sea
IFHYGKKNTGAELRPGMTFTIEPMINSGKYDVKILDDGWTAVSKDKSLSAQFEHTVGIKDNGYEIFTESVNGYMKPPYN

SEQ ID NO: 139990 - protein, 255 aa, Unknown
  Bacterial polypetide isolated from the Sargasso Sea
MIKYKEKFEKMRVAGKLASRTLDMLTDFIRPGISTNKVDQLAYDFIRDHGGYSAPQFYRGFKKSLCTSLNHVVCHGIPSDRILEDGDVLNVDVTAVVNEYYGDTSRMFAIGNSTIKANNLIDATYESMMRAIKILKPGIKLGDIGNEIQTFVEEKGYSVVRDFCGHGISNTFHESPNILHYGKKNTGLEIYSGMTFTIEPMINVGKFDVKILNDGWTAVTKDKSLSAQFEHTVGITENGYEIFTESVKGYNKPPY

SEQ ID NO: 139991 - protein, 131 aa, Unknown
  Bacterial polypetide isolated from the Sargasso Sea
YEAMMKAIKILKPGVKLGDIGNAIQSHVENKGYSVVRDFCGHGISNTFHESPNILHYGKKNTGIEVYPGMTFTIEPMINAGKYGVKILNDGWTSVTKDRSLSAQFEHTVGITENGYEIFTESAKGYNKPPY

SEQ ID NO: 139992 - protein, 298 aa, Unknown
  Bacterial polypetide isolated from the Sargasso Sea
KSVPLGIARPDYAESGVPQITAPSDLRKDPATIERMRLAGSAARRVLRRVASEISPGVTTDYLDQVCHQACIEEGGYPSPLNYNGYPKSLCTSVNEIICHGIPDDRPLGEGDIINCDVTIFLDGVHGDHSETFAVGSIDQPSTDLIRITRECLYLGIGAVRAGGVVNEIGKAIQTHAEAAGLGVVREFIGHGVGEVFHHLPNIPHYYEPSARFEFAPGMTFTIEPMITIGSPSANLWEDGWTAATNDLSRTAQFEHTILVRDDGVEILTLEDDEPQPFLTSGDGATWPQTIPTGSQNS

SEQ ID NO: 139993 - protein, 264 aa, Unknown
  Bacterial polypetide isolated from the Sargasso Sea
MQSNNIPIYTYKDFEGMRKAGSLAAKILDQLKSLIKPGISTLEINDFCHELIVKNEAIPAPLNYKGFPKSICTSVNHVVCHGIPNEQKILKDNDIINVDVTVILDGWYGDSSRMYVAGPINNKIYSLLKTTYECLLIGIENALPGKHLGDIGYAIQNHAEKNHYSVVRDFCGHGIGKEFHTPPSVLHYGNIGEGPILKPGMFFTIEPMINLGDWRTKILNDGWTAVTKDKSLSAQFEHTIGITEKGNEIFTLSYNNSDFPINPL

SEQ ID NO: 139994 - protein, 268 aa, Unknown
  Bacterial polypetide isolated from the Sargasso Sea
MAKREIPIRGAAEIAKSREAAKLASQVLTMITEHVKPGVTTDELDVLCREYIVDVLGAIPANIGYHGYPKTLCTSVNHVVCHGIPTSRPLRDGDIVNLDIAVIKDGWFGDTSRMYFVGEPNELARRLVATTYEAMHAGIRAVRPGATLGDVGYAIQQVAHREGFSVVREYCGHGIGDVYHDEPQVLHYGRPGTGVPLRPGMIFTIEPMLNAGKRDTRMLADGWTVVTKDHSLSAQWEHMVVVTETGFEVLTEDAKPQAFPALSGTHAA

SEQ ID NO: 139995 - protein, 264 aa, Unknown
  Bacterial polypetide isolated from the Sargasso Sea
MQSNNIPIYKKNDFQKMQKAGRLAAYILDQLYELIQPGISTLEINDFCHDLIIKNNAIPAPLNYKGFPKSVCTSVNHVVCHGIPNDKKILNIGDIINVDVTVILDDWYGDSSRMYVAGKTNKKNLDLLKTTYECLHIGIKEAQPGKNFGDIGFKIQEYAESKNYSVVRDFCGHGIGKQFHTPPSVLHYGNLGEGPELKPGMFFTIEPMINLGDWQIKILNDGWTAVTKDKSLSAQFEHTIGITEDGNEIFTLSENNTDFPINDL

SEQ ID NO: 139996 - protein, 291 aa, Unknown
  Bacterial polypetide isolated from the Sargasso Sea
ESADARRMYACFEQPFLKATFQLTVTAPDHWQVISNAPTPDPEPTGPGMAVWNFDASPRMSTYITALVAGPYYVVRDSYTGPHGTYPLGVFCRASLAEHLDADDIFELTKQGFAFFEEQFQIPYAFGKYDQLFVPEFNAGAMENAGCVTFLEDFVFRSRVTQAAYEQRANTILHEMAHMWFGDLVTMKWWDDLWLNESFAEWAAHHANVHATRFSEAWTTFANLRKAWAYRQDQLPSTHPIAADMVDLDAVRVNFDGITYAKGASALRQLVAWVGEHEFLDGLHEYFTKHA

SEQ ID NO: 139997 - protein, 875 aa, Unknown
  Bacterial polypetide isolated from the Sargasso Sea
MFKASLVALTCSALMSCAVKSPLNTGPRDASPYISQYQASLRSQVISDVHYELDFQLTGDTQFSATTKIHFNLSEVPKQLSLDLSKAQIKRFLINGTAIYPNYNGAYISLNTRLLTSGDNTVEVQFTRAHSTNGEGLHRFQDPVDGKVYLYSHFEPAAAQQMFAVFDQPDLKANYKISVTAPKDWQVISTMRESSVTPAGTINRWEFPETPKLSPYNFSMHAGPYHMWQDNSGRYPMRLFARQSVAHQVTPQDWFTYTKQGLTFFDAYFGIPYPFKKYDQILVPDFLYGAMENAAAVTFAEDHFLHKAEMTAEQKQSLAGVIMHEMAHQWFGDLVTMKWWNGLWLNESFASFMGTLATQEATEFTNAWRSFYAQGKQRAYEQDSLVTTHPIEVPVATTQNAFDNIDAITYQKGASTLKQLRHLLGDLVFRRGVSNYLKQYSYQNAELDDFINSLAKAAGRDLSAWTQEWLYSAGVNTIKAEYRCDGNRISEFSLLQYPASSELPTLREQKVQIALFTKGRFDLRHETTVPVTYKGERTEVKQLVGERCPDLVYPNYDDWGFVKVQLDEKSFDTAKQQLSRVTDPLLRSMLWQSLWDSVREGNLSLDQYLSTVFVNAPAENDYTVVGQIISSLLRSKEYLAQIAPIQQNYAENAVKGLAQMSLRKTMESRGDNDFQRRWFDAYIQLASDRDSLRHLAQLLDGTTKIKGLTLDQDLRWAIIIQLNRYDFPNAQQRITREIARDNSDSGEKAALAAQVIRPEAAAKRRWLSKVHADVLPFAKQRIIMENLYPAEQKLLSAATAEERLANLADMDKKGPVFMRSYSRNLIPTDCNYNSITALDKVLDSQTGLSNLSRRTLLETRQAEQRCVLIKNKMTH

SEQ ID NO: 139998 - protein, 875 aa, Unknown
  Bacterial polypetide isolated from the Sargasso Sea
MFKASLVALTCSALMSCAVQSPLNTGPRDASPYISQYQASLRSQVISNVHYELDFQLTGDTEFSATTKVHFNLSEVPKQLSLDLNKAQIKRFLINGTAVYPNYNGAYISLNTRLLSSGDNTVEVQFTRPHSTNGEGLHRFQDPVDGKVYLYSHFEPAAAQQMFAVFDQPDLKANYKISVTAPKDWQVISTMRESSVTPAGAINRWEFPETPKLSPYNFSMHAGPYHMWQDNSGRYPMRLFARQSVANQVTPEDWFTYTKQGLNFFDAYFGIPYPFKKYDQLLVPDFLYGAMENAGAVTFAEDHFLHKAAMTAEQKQSLAGVIMHEMAHQWFGDLVTMKWWNGLWLNESFASFMGTLATQEATEFTNAWRSFYAQGKQRAYEQDSLVTTHPIEVPVATTQNAFDNIDAITYQKGASTLKQLRHLLGDLVFQRGVSNYLKQYSYQNAELDDFINSLAKAAGRDLSAWTKDWLYSAGVNTIKAEYRCDGNRISEFSLLQYPASSELPTLREQKVQIALFTKGRFDLRHETTVPTTYKGERTEVKQLVGERCPDLVYPNYDDWGFVKVQLDDKSFDTAKQQLSRVTDPLLRSMLWQSLWDSVREGNLSLDQYLSTVFVNAPAENDYTVVGQIISSLLRSKEYLAQIAPIQQNYAENAVKGLAQMSLRKTMESRGDNDFQRRWFNAYIQLAGDRDSLRHLAQLLDGTTKIKGLTLDQDLRWAIITQLNRYDFPNAQQRITQEAARDNSDSGEKAALAAQVIRPEAAAKRRWLSKVHADALPFAKQRIIMENLYPAEQKLLSAATAEERLANLGDMDKKGPVFMRSYSRNLIPTDCNYTSIAALDKVLDSQTGLSNLARRTLLETRQAEQRCVLIKNKMTH

SEQ ID NO: 139999 - protein, 315 aa, Unknown
  Bacterial polypetide isolated from the Sargasso Sea
WATKGNESQGEFALDTSIKLLDFYNSYFGIPFPLPKLDHIAIPDFAAGAMENWGAITYREVALLVDPQNTSASTKQTVAAIISHEMAHMWFGDLVTMKWWNDLWLNESFASWMGDKAVDAVFPEWEMWTQFLTSDTASAFSLDGLSNSHPIEQEVRNPAEIGQLFDAISYSKGGSTLRMLEAYIGAKDFQKGITEYLNTHAYNNAETSDLWDALGKSSGKPVAQVMNSWVKQTGFPVVSVERTKNKLNLSQKRFLYENINYENDYDDQSIWYIPINIQTSDKKDLISELMDTNSKSITIDSPNDSWLKINPDQTG

SEQ ID NO: 140000 - protein, 105 aa, Unknown
  Bacterial polypetide isolated from the Sargasso Sea
SVAPEGTVSTEIIAGSALLQQGWVGIHAVGRGSDRDPAMLVLDYNPTGKADAPVFAALVGKGITFDSGGYSIKASEGMVTMKCDMGGAATVTAALALAILQGLNK

SEQ ID NO: 140001 - protein, 269 aa, Unknown
  Bacterial polypetide isolated from the Sargasso Sea
KDNVNYTMTVGEELKNEGWVGIYNVGRGSERPPAMLVLDYNPTGNADAPIDAVLVGKGITFDSGGYSIKSSEGMLDMKCDMGGAATVTGALGLAITQGIEKRIQLILCCAENLISGHAYKLGDVLTYKNGVTVEVVNTDAEGRLVLADGLMAATDTGAPLIIDAATLTGAAMVALGSDYHAVFSMDDNAKEQMLNAAKAENERFWALPLEPFHADRCPSAFADTANSRPMKGGGGGGASNAAGFLSRFVKPEGWIHLDLAASVSRWCDC

SEQ ID NO: 140002 - protein, 44 aa, Unknown
  Bacterial polypetide isolated from the Sargasso Sea
FCGNYQQGWLHIDCSATYRKAPVEQWSAGATGLGVRTIANLLTA

SEQ ID NO: 140003 - protein, 186 aa, Unknown
  Bacterial polypetide isolated from the Sargasso Sea
LCCAENLISGGAFKLGDILTYKNGVTVEIVNTDAEGRLVLADGLQKAAEAKPELIIDAATLTGAAMNALGSEYNAVFALDKALAQRVLGYAEQVQEGAWQLPLEKWHQGQCPSPYADTANSRPVKGGGTGGASNAAGFLSRFVPNDGKGWVHLDLAAAFHNSANGFWAAGATGMGIRLVAQTLTQE

SEQ ID NO: 140004 - protein, 314 aa, Unknown
  Bacterial polypetide isolated from the Sargasso Sea
MAEFTVSLSRNSAEAVWGESAKLSFTESGAVIHLPDDKLNERLIQQAARKLDGLSLPAVTLSGDWHKEQQWAFALSFTRARKPASIKWAETADKEALEQEYAALLFTRQLVNETPEDLSPETLATRAAQWLKSLGGDKVTYSMTVGEDLKEQGWIGIYNVGRGSERPPAMLVLDYNPTGNTDAPVDAVLVGKGITFDSGGYSIKSSEGMLDMKCDMGGAATVTGALGLSISQGSEKRIQLILCCAENLISGHAYKLGDVLTYKNGVTVEVVNTDAEGRLVLADGLMAATETGAPLIIDAATLTGAAVVALGSDY

SEQ ID NO: 140005 - protein, 267 aa, Unknown
  Bacterial polypetide isolated from the Sargasso Sea
TDSSAATTSALESITLNSVGVANTLAALTTSGVLTSSLHVTGSTKLTITGALDSAITTIDASGSTGGLELTGAPGAAVLSVTGSSKADTLTAVGAGTTTLSMGGGNDTADFNANWTGADTYDGGDGTDTLRIDGDVSNSGLSSTVFGGLSNVEVLAVDTAHTITLDSNTPFTTIDISETADQTLNLNDGYTQATLVKIGSDLTDNINNNSNVQLTLQANSGAITTNLDIVGSVGTSDTLNIVNAATGTNTFDANNDVFETINLVAYS

SEQ ID NO: 140006 - protein, 140 aa, Unknown
  Bacterial polypetide isolated from the Sargasso Sea
KILGVVSPVDGAVLVPPRGADSRYGALCEEFVEMPHTGHIGSFCVTNVPIPGRDLELPYISAWIFLDGADIGFLNLVAECPPEECRIGMRVEAVWKPDEEIGMTAENILYWRPTGEPDIPFGSAGVRGWHAQGKGSETNA

SEQ ID NO: 140007 - protein, 301 aa, Unknown
  Bacterial polypetide isolated from the Sargasso Sea
GQTADTKAQRLHYSGGDLCLNQELKIYLRESDFPELKNYIGDDLLVTDGTSLLGADDKAAIAAIMNALEYLVAHPEIKHGPVKVGFVPDEEQGLRGAKAFDVAAFGADFGYTLDCCGIGEFVYENWNAGDAEIIFTGQSAHPMSAKGKLKNSLLMAHKFIAMLPGGEAPEYTEGREGYYWVKQLQGNSARTVLKLDIRDFTEEGYKARMAYIRQLAVGTCALWGENSVVCHLTDRYANVFNSLQGDAHYPIDIALRAYQKCGITPQPVAMRGGYDGAVLSQKGLPCPNIFTGAHNFHSIYE

SEQ ID NO: 140008 - protein, 71 aa, Unknown
  Bacterial polypetide isolated from the Sargasso Sea
MLIDNVVTKSEGDCMDKLLERFLHYVSLDTQSKSGVRQVPSTEGQWKLLQLLKQQLEEMGLVNISLSEKGT

SEQ ID NO: 140009 - protein, 261 aa, Unknown
  Bacterial polypetide isolated from the Sargasso Sea
FIVSNLDQNHSEIRIAFTTDEEIGRGVHKDLPNDLSVKFAYTFDGGKVGEIDNETFSADSAEVIIKGVSIHPGEAKNEMVNATHLASEIIKSLPLKTMTPEVTEKREGFIHATEMNGNSSEMKIKFIIRDFEIKGLENKKEILKDICKKIQNLEQRAKINISFKRQYRNMRYWLDENKIPLEIAENALINKNIKPIKKPIRGGTDGSLLTENGVPTPNIFTGMQNVHGPLEWISSTDMSLATEIMLEIIKLNSNLEAKNNS

SEQ ID NO: 140010 - protein, 176 aa, Unknown
  Bacterial polypetide isolated from the Sargasso Sea
MKFFNKENKLYPPIEAYDSGYIKQGIHEIYYEQCGNPKGKPAVFLHGGPGGGAGSFSRRFFNPKKYRIVLFDQRGCGKSKPHTCLENNTTWHLVEDIESIRKKLSIDKWLVFGGSWGSTLALAYAQSHPQNVTELVLRRIFMLRHKEIQWFYQYGASELYPEAWQGFLNEIPKEKR

SEQ ID NO: 140011 - protein, 279 aa, Unknown
  Bacterial polypetide isolated from the Sargasso Sea
MSITYHTLFAPLEPFDYGYLDVGDGHSIYYEQCGNPNGKVALFVHGGPGGGGDIAARRFFNPSHYRLVLFDQRGAGRSTPRASLEGNTTWHLVEDMELLRNKLNIKEWLVFGGSWGSTLSLAYAQTYPEVVTELILRGIFLLREQEIHWFYQSGASELYPDQWELFIEQIPENERHDLLSAYYRRLISDDAKVKLAAAKAWSMWEGATSFLDFDPNRTKQFGAPDFAIALARIETHYFINNGFFMDDNQLLKGIELIRHVPAVIVQGRYDVVCPMRSAW

SEQ ID NO: 140012 - protein, 320 aa, Unknown
  Bacterial polypetide isolated from the Sargasso Sea
MKFFNKENKLYPSIEPYDSGYIKQGIHEIYYEQCGNPKGKPAVFLHGGPGGGAGSFSRRFFNPKKYRIVLFDQRGCGKSKPHTCLENNTTWHLVEDIESIRKKLSIDKWLVFGGSWGSTLALAYAQSHPQNVTELVLRGIFMLRHKEIQWFYQYGASELYPEAWQGFLNEIPKEKRNNLVDAYREIFNGDDEEKKLSAAKAWSKWEASTSFINHNPEAVKDSVDSKFALAFALIENHYFVNNGFLENENQLLDNIDKIRDIPAVIIQGRYDVVCPPTTAYELHSRWPESELKIAPFSGHSAFEKEITHLLIETTDRFSKT

SEQ ID NO: 140013 - protein, 303 aa, Unknown
  Bacterial polypetide isolated from the Sargasso Sea
MNSGFIKKGIHEIYYEQSGNPKGKPAIFLHGGPGGGAGSFSRRFFNPKKYRIVLFDQRGCGKSKPHASLEGNTTWHLVEDIESIREQLDIEKWLVFGGSWGSTLALAYAQSHPQRVSELVLRGIFMLREKELQWFYQYGASEIYPEAWQGFLEEIPQEKRNNLIEAYREIFGGDDEEKKLSAAKAWSKWEASTSFINHNPEAVKESINSQFALAFALIENHYFVNKGFLDHENQLLDNIDKIRHIPAVIVQGRYDVVCPPTTAYELHQRWPESELKIAPFSGHSAFEEEITDLLIETTNNFSK

SEQ ID NO: 140014 - protein, 320 aa, Unknown
  Bacterial polypetide isolated from the Sargasso Sea
MKFFNKKNKLFPAIEPFDSGYITKGIHEIYYEQCGNPKGKPLIFLHGGPGGGAGSFSRRFFDPKKYRIVLFDQRGCGKSKPHTCLEDNTTWHLVEDIESIRDKLNIDKWLVFGGSWGSTLALAYAQSYPDVVSELILRGIFMLREKELQWFYQYGASEIYPEAWRGFLKEIPLEKRSNLIGAYREIFNGKDEEKKLSAAKAWSKWEASTSFINHNPEAVKDSVNSEFALAFALIENHYFVNKGFLEDENQLLDNIDKIRNIPTVIVQGRYDVVCPPTTAYELHSRWPEAELKIAPFSGHSAFEEEITHLLIEATNKFANS

SEQ ID NO: 140015 - protein, 133 aa, Unknown
  Bacterial polypetide isolated from the Sargasso Sea
MKLFNKKNKLFPAIEPFDNGYLERGVHEIYYEQCGNPEGKPIIFLHGGPGGGAGSFSRRFFDPKKYRIVLFDQRGCGKSKPHTCLEDNTTWHLVEDIESIRKELEIEKWLVFGGSWGSTLALAYAQSHPDVVS

SEQ ID NO: 140016 - protein, 240 aa, Unknown
  Bacterial polypetide isolated from the Sargasso Sea
MTAHVLMLSSSRQGDEAYLEHARALIFAHLGEIRDLLFVPYAAVTQTYDSYVDAVTSALPECKVTGLHTVEDPVAAVNNAKKNGQAIVVGGGNTFHLLSTLYANALIVPIKHAIADCTPYIGWSAGSNICGQSIRTTNDMPIIEPPSFDALDIVPFQLNPHYTDYQPPGHNGETRDQRLAEFTTLNPTTPVVAIREGTALRLTNNQLSLVGEKDGFIFLGEEKTPISSGDDLTYLLDSGE

SEQ ID NO: 140017 - protein, 236 aa, Unknown
  Bacterial polypetide isolated from the Sargasso Sea
MTVNALLLSSSRVGDTPYLSHAIPFIKPLTTNAQKWIFIPYAGVSMSYDTYLASVVAGLSELRLDISGIHQHPDPRQAIKDADGILIGGGNTFHLLHELYKYDLVHLIREEVLNGKPYIGWSAGSNVSGLSIRTTNDMPIIEPPSFTALNIVPFQLNPHYSNYRAPGHNGETRAQRLLEFTRVDPITPVVGIVEGSALWRQGDTLSLLGDNPAYLFCGEQQEIPIPVGSDLSHMLK

SEQ ID NO: 140018 - protein, 244 aa, Unknown
  Bacterial polypetide isolated from the Sargasso Sea
MSEPAVRVLLGSGGISTEDRREVYRNLVGDHFSDSDTVLFVPYASDDYDSYTSRMNDFMGPNGPSLVGIHTLEDELSAVNEAEGIYVGGGNSFLLIRDLHERGLIGPIRESCLGGVPYLGVSAGSNVACPTMMTTNDMPIVLPPSFESFGIVPFQINPHYHPGKVLFMDGDEVTNHYGESRAQRIAEFHRYQDTPVLGLWEGSFVQWDGSRGRLTGRATAFLPGAEPCDFHDGSEFDSELRFRD

SEQ ID NO: 140019 - protein, 236 aa, Unknown
  Bacterial polypetide isolated from the Sargasso Sea
MTVNALLLSSSRVGDTPYLSHALPFIKPLTAHAQKWIFIPYAGVSMSYDTYLASVVTGLSELKLDISGIHQHPDPRQAIKDADGILIGGGNTFHLLHELYKYDLVQLIRNEVLSGKPYIGWSAGSNVSGLSIRTTNDMPIIEPPSFAALNIVPFQVNPHYSNYRAPGHNGETRAQRLLEFTRVDPNTPVIGIVEGSALWRQGDTLSMLGDNPAYLFCGEQQELPIPVGSDLSHLLK

SEQ ID NO: 140020 - protein, 214 aa, Unknown
  Bacterial polypetide isolated from the Sargasso Sea
MRREGEKEGKSESGGGDASSDASSSGLFDALASLAACAGRCASHSLSARRFRGAIRTVLDPRVGVRGRRLLLGALREAATRDGPAAYFDFAGPRTRAPTPRNPRTLRNPSGGSSSASDGPGSLALRRVPFAFPAGRGGYAFAAWLRVEAFPREGAGRAALFALRATNGLGVAAELGPGGVELSVFSGASQSGQGGGGHAACSEVASLDAPIREK

SEQ ID NO: 140021 - protein, 173 aa, Unknown
  Bacterial polypetide isolated from the Sargasso Sea
LPCVFGEALTALYAALDEYQPLLTIAVGQAGGRVDITVERVAINVDDARIADNKGQQPVDVPVVAGGPAAWFSSLPVKAIVAALREQGIPASVSQTAGTFVCNHVMYGLLHALNGRTGAKGGFIHIPYLPEQAAAHPGEASMALQTVRAALETAIAISLRQEGDVKIVGGATH

SEQ ID NO: 140022 - protein, 337 aa, Unknown
  Bacterial polypetide isolated from the Sargasso Sea
MAVDTVWNDFGLDGTGSVIAILDTGVRGDHEGLNDMDDDPFTCIDDPPDPDPLDPEPQPIPSDCDPKIIAFFDAVFTDEEQDPSTSYDSGTHGTHVAGIAAGSGGGQTDPGTGLRYVGAAPGAYLINILGCCDGDIEDVMQGAQWAIENRDKYGIDVVTSSLGEQQFEVHIDNDGSSAWSRQMDMVVEAGIITTLSAGNEFGGATLAGCNTIDSPGDAELPVTVASLDKDLGLAIYSSRGYTSDFRVKPDVATIGSSIMAPDAATQDGYTSKSGTSMATPLMAGIAALMVQANPDLTPTEFKDIISAHSIERDIQLLNDPGFNDCSVLETRPDNEFG

SEQ ID NO: 140023 - protein, 213 aa, Unknown
  Bacterial polypetide isolated from the Sargasso Sea
MLKRSLFCRVAGWGVTNTSDQSYQLQIASVQYEPSCGKLNQRSKITEDMTCFKGRPGVDACQGDSGGPLMCHVDGYYLVLGIVSWGVGCAQSGYPGVYQRPAYSAHWIKETIAGYKRLKPHLSQYEWRKRAQCLKRREGRSYESSADGPSDWQSLIDDISQEQRSEELPKAPEPDFSGSGSTNGKEEDEKASIHITTTGGRPISKNCSWFRNN

SEQ ID NO: 140024 - protein, 317 aa, Unknown
  Bacterial polypetide isolated from the Sargasso Sea
PLVRTPGTPLPAPGRAARPRVRSRAVAFIAAVTALCLAAIPVASATSAAAGNAAGERQPRLMAAGDASGTPFVTALISVRGNSYGVCSAGVWKPTVLLTAAHCVIDETTGGPIDPSSFFVVNPGTAFRITSGGVQGATPARVVQAFVADDFQLRGTDVPGDDIAFVVLDQGVGDVTFSRLATTAELGRWLNNRTPVSALGYGFPSPSSPTTDIPRGAALPLLRVLDDFRNSDGLAILSSKQSGIDACSGDSGGPRFVIENDAPLLLGNIAGGSCNGLPGAGVIGFTGMSYRTLANAALATAGLSLIRAGRRRSSPPG

SEQ ID NO: 140025 - protein, 301 aa, Unknown
  Bacterial polypetide isolated from the Sargasso Sea
YSSYSGTSMATPHVAGAAALALAVDPTLTVSQLRTGLLGTVDSVASLSGKTVTGGRLNVGRLVESLSSEPTIPLPPSGLNASDGTTIGSVQVSWGSSLFADSYTLWRSRIDDASTAVVIADSLSTTSYQDLETDVNESYYYWVSATNNLGTSPLSDSDRGFHSPSRSPNDAFVDRIVLEGVLANASGTNLDATEESGEPTHAGVGGGKSVWWTWTSPASGSVEINTVGSGFDTVLAVYQGSRVDELSRIVSNDDIDYGVVLQSRVTFEAAAGQAYQIAVDGWSGATGSIELALTLDAPVPP

SEQ ID NO: 140026 - protein, 223 aa, Unknown
  Bacterial polypetide isolated from the Sargasso Sea
MWVNGGEIPGNGIDDDGNGVIDDVHGYSAVNNNGNPMDGNGHGTHVSGTIGAKGNNGVGVVGVNWDVKIAACQFLDADGYGSTAGAIACLDYFTDLKVNHGVDIKATNNSWGGGSFSQALKDAIEAGGEAGILFVAAAGNDAVDNDASPHYPSSYDSDVVLSIASTDRNDRMSDFSQWGLTSVDMGAPGTAILSTVPGGGYASYSGTSMATPHVTGAAALVWS

SEQ ID NO: 140027 - protein, 323 aa, Unknown
  Bacterial polypetide isolated from the Sargasso Sea
SSGHGTHCAGTVGGNGDASAGSRLGIAPNSWLIGLSMGELAFTIDEYSALEHVYELSKPGSSTQQAWNIRVVTNSWGPGFPFDSIDANDLTVQIIEKITYENNVAVIFANGNDGGDGEEDQSNIFAKVPVSIGVAASNRDGVGMSDFSSRGDMTNRDTWPDVSAPGVDIWSAAARATMIGGGTGAADIGSGELDYYYLAISGTSMATPHVAGLAALLWQAAPSMKMSDYDEDLDSIGNPTLHDPSGIAPPQEAERKIHELEVILKLTSDYITKGDNLAENNSIGLNNHTLDYAQGYGIVNADNAVALALTLQRLRDTNGDGLV

SEQ ID NO: 140028 - protein, 161 aa, Unknown
  Bacterial polypetide isolated from the Sargasso Sea
SATAFPSGVKNTPVEINETIAPIRIWKKEYRTDSGGPGKYRGGLGQVMEIGSTEGAPFALSSMFDRAYHPARGRGGGHPGAAGRVSLSSGEVLPPKGRTSVASGQRVILEMPGGGGRGKPEERDTSMIEEDLKNGFISVKKAKSEYGVIVSEAESLVVRKD

SEQ ID NO: 140029 - protein, 237 aa, Unknown
  Bacterial polypetide isolated from the Sargasso Sea
VAARHAIGQMLPDVVLGCLDQACPDVVPAEGTSCLWNFVLYGGHGISGGEFGNSTPFTVTMFHNGGTGARVAMDGLSATSFPSGVKNTPVEINETIAPIRIWKKEYRADSGGPGKYRGGLGQVMEIGSTEGAPFALSSMFDRAYHPARGRGGGRSGAAGRVSLSSGEVLPPKGRTSVPSGERVILEMPGGGGRGKPEERDISMIQEDLRNGFISAEKARSEYGLAVSDADLFVSRKD

SEQ ID NO: 140030 - protein, 196 aa, Unknown
  Bacterial polypetide isolated from the Sargasso Sea
MDTYYKVDSVFVHKKYQPGISHDIALIKLVDPVTDVTPARLYKRSDELGKNIWFIGAGGTGNGLTGQTVDNGANAGVLRKAQNSVEFAQGPLLTFTFDSGDEALPLEGVSGGGDSGGPAYLTLEGIHYLLGISSRVGGGEIGKYGVVEVYSRVSFFSAWIEDITSGDAKLQQQFALPKLDKLPAGMTAEMLAEVCA

SEQ ID NO: 140031 - protein, 271 aa, Unknown
  Bacterial polypetide isolated from the Sargasso Sea
GADGTGSTAGAIECIDYFTDLKENRGINIKATNNSWGGGGYSEALETAIEVSGQAGILFVAAAGNAGSNNDNVDNYPSNYVTTTNSLMAVASITRNDSDSGYSYGIETVDIAAPGSAILSTIPGDSYAAYSGTSMATPHVAGAAALVWSLNPELTPSEMKELLMATGETSLWADGRTVSGNRLNVLNALEEADPTPGFKLGITPGSAEIEAGETYTFTIEVGSIAGYEEEVQLSLAEESDIASLSANTAMPGDTVLLMVETAEDTPWGQYS

SEQ ID NO: 140032 - protein, 262 aa, Unknown
  Bacterial polypetide isolated from the Sargasso Sea
RRLGTAKGATIVALGTGDGASIFAAVQGLEWTYQHSRPGLNEYNIRVVSNSWGTNGDYNPSNAVTLLTDMLTYENKVAVIFAASNSGGNGDEAENDLRTNIYANTPSAISVAALVHEGDAVTSFSSRGWKTQQHTWPDIGAPGRNIWATAPRATYIDASTRTQGDLYYMAISGTSMATPHIGGIATLLLAAAPSLGVASYQVEDHDHLDSMYFNETAKGIQFDDWSDRNESKVHEVELILELTSHYGFLRNSCEDGNDDDIL

SEQ ID NO: 140033 - protein, 229 aa, Unknown
  Bacterial polypetide isolated from the Sargasso Sea
MIASLSNTGTTSAGSPGYSGEAGTSMATPHVAGVAALMLSVNSALTPDQIATVLKQSARPFPAGTYCATHTGVCGAGMLDAGAAVALAKGNPTVHASTSASTVVTNNAVTLTATGSAGLVNTITSVQWAQTSGPSVSLTTAGPDSNGNYTATFTPSAAGTYAFNVTLTSNTGATATDTTNVTVTAAASTGTTTPPAATSSGGGGGGAIGLAGAALLLAAGLAGRRRRAK

SEQ ID NO: 140034 - protein, 227 aa, Unknown
  Bacterial polypetide isolated from the Sargasso Sea
IINKSDIPNILSRVELSTDINSFASCDLVIEAIKEDLNLKKNIFNQLDKICKTDCILATNTSSISINRLAESTLRSDKVIGMHFMNPVPVMKLVEVIKGRNTSSETLNLILSVSKKLDKIPVQCNDSPGFVSNRILMPMINEAAHCYSEGVADALSIDSIMKLGMGHPMGPLKLADLIGVDVCVFILNVLFDELKDVKYKPSDILLKMVDNNELGKKTGKGFYNYEF

SEQ ID NO: 140035 - protein, 175 aa, Unknown
  Bacterial polypetide isolated from the Sargasso Sea
MDTYYKVDSVFVHKKYQPGISHDIALIKLVDPVTDVTPARLYKRSDELGKNIWFIGAGGTGNGLTGQTVDNGANAGVLRKAQNSVEFAQGPLLTFTFDSGDEALPLEGVSGGGDSGGPAYLTLEGIHYLLGISSRVGGGEIGKYGVVEVYSRVSFFSAWIEDITSGDAKLQQQFA

SEQ ID NO: 140036 - protein, 62 aa, Unknown
  Bacterial polypetide isolated from the Sargasso Sea
MLCAGVPEGGKDSCQGDSGGPLVTSMAPGNSSSNDGAQVQVVGVTSWGRGCARPNYPGVYSR

SEQ ID NO: 140037 - protein, 239 aa, Unknown
  Bacterial polypetide isolated from the Sargasso Sea
VAPGEYSLRSSDFPQVFFLEQQGMRKVCGATLVSDLWALTAAHCVGETSLGSVIQRGEEFEVKIANTERSIDLVVLHPDFVSPNAPEVDLALLRFSQEVNYPEPIPVNTQPNELGEVVTLVGWGYFGLGTTGRQYDDGTKRQAENRISQADQQLHSFFDDPRLSGSAALPLEGTLSLGDSGGPAFLDTPEGLLLAGVSVGQIEGPRFSEETQGQYGSVAVFERLSSHIEWINSVINSDY

SEQ ID NO: 140038 - protein, 279 aa, Unknown
  Bacterial polypetide isolated from the Sargasso Sea
LEPQPIPSDCDPKIIAFFDAVFTDEEQDPSTSYDSGTHGTHVAGIAAGSGGGQTDPGTGLRYVGAAPGAYLINILGCCDGDIEDVMQGAQWAIDNRDKYGIDIVTSSLGEQQFEVHIDNDGSSAWSRQMDMVVEAGIITTLSAGNEFGGATLAGCNTIDSPGDAELPVTVASLDKDLGLAIYSSRGYTSDFRVKPDVATIGSSIMAPDAATQDGYTSKSGTSMATPLMAGIAALMVQANPDLTPTEFKDIISAHSIERDIQLLNDPGFNDCSVLETRPD

SEQ ID NO: 140039 - protein, 292 aa, Unknown
  Bacterial polypetide isolated from the Sargasso Sea
AGSHSDSSWHGTFVTGQIVAQHNSVGIAGIAPNVTIQMARALGKCGGTTSDIMDALAWVTGESGVPGASGVALPVNAPMAQVVNMSLGGAGACSRAEQATITAARARGATIVVATGNDGAPTIGSPANCSGVVAVTAHTIGGDNANYANVGTGTTLSAPGGGSGTVIAGSGIKIRSISNASLTTPGTDTNTYKSEMGTSMATPHVAGVAALLLAYKPTLSVNDIKAILTQSARPFPAGTYCAQNVGACGAGMLDAGAAIALAVGNPTASVSSSASTIVANSPVTLTATVGAG

SEQ ID NO: 140040 - protein, 204 aa, Unknown
  Bacterial polypetide isolated from the Sargasso Sea
AAPGSAVQSTYPTNTYASLSGTSMATPHVAGGAALVWSYFPQCSNNQIRSALNATAEDKGSAGRDNFYGYGLMQLADAYNYLNTNGCAGGGTGGGGGGGSEPGVEPVSGQLTGLSGSRGNWDRYTWTIPEGVTQMTISTAGGSGDADLYVKFGSQPETNSYDCRPYQNGNSEVCTFDAPASGTWHIGIRAYSSYSGVTLSYSYE

SEQ ID NO: 140041 - protein, 216 aa, Unknown
  Bacterial polypetide isolated from the Sargasso Sea
MALFLALSAAAAPPIGKDASELVYNGSPTDPHEYTWFVSFIDVSKRDPSRVKDVWCGGSLISPQVVLTAAHCLEDLKNASDTLRVATHRHRRFKQDHECAVNLEVASWVMHPKYHTKTLHNDIALVFLKKAPPCIGRETEMVHLDKGPQTAWVDVPMKAIGYGRTPNVAMTMLEVVVKGVDHATCDAALKHEGGVFEDKVCAGGRGKDVCKSDSGG

SEQ ID NO: 140042 - protein, 303 aa, Unknown
  Bacterial polypetide isolated from the Sargasso Sea
DNEHRSLNDFDDVDDAPDEDSTSYNDQKWVAGFDATSPNPNSDGTTDPDDGNGHGTHVAGSALGTGDASREHRGTAPGAALVDIKVLTDGGGTNSQASLAGIQWMINNKDTDWGVNSTYRGIQVASMSYGSVGTPLNSGDQGDNGTSAEASLINQATEEGIICVVAIGNDGSNRVPSPGSADGAITVGSVNDKNTILRDDDEHSDFSNWGPRLSDGDDDDWDELKPDITSYGHNIISATYAASVPITGEGALADDQYDSKSGTSMATPIASGVVALMLEADSTLTPQEVKDILRNSSEERGDP

SEQ ID NO: 140043 - protein, 268 aa, Unknown
  Bacterial polypetide isolated from the Sargasso Sea
SGHPDFDYLEPWTGEKVIYSAKWTGVWTETRNSDTSSGHGTHVGGTIAGNGDASAGRRAGVAKGGQMVALGTGDGASIFAAEQGLEWTYEHSIPSQNQYHIRVVSNSWGTDGDYDPNGAIATVTDKLTFDNGVAVIFAASNSGGSGGGGECSGDLRTNVYANTPSAISVAALTHDGTQVTSFSSRGCMNQQHTWPDVGAPGRDIWATAPRGTAIDASTRTQGDLYYMAISGTSMATPHVGGMAGVILDIAPSLGVADYHREDHDESDS

SEQ ID NO: 140044 - protein, 250 aa, Unknown
  Bacterial polypetide isolated from the Sargasso Sea
MAARWAPYKIREMVHSTTVSPRWIKDTETFWYEWENADGTFFYLVNPERGTRNQLFDNDVMAAELTRITRDPWDGQHLPITNIRFLNDNIFQFDVESSQDEETQEESGQDNEERHDEDDRERTQKRVHHFEFTVSTQTLRELKDFEEPDDHPAWASVSPDGQTIIFVRNYNLWMMSGSDYGRILDARRGKDGDAAEKAENETDVEEIQLTTDGEEYYSYAANGTGRGETNISQDENKDDRKRANLTWSQD

SEQ ID NO: 140045 - protein, 281 aa, Unknown
  Bacterial polypetide isolated from the Sargasso Sea
MEADVLFYPSLDNSIDSIGTNVIWNQFGLRGEDTTIAILDTGVDFDHESLDDLDDDPDTDDPKIAVDSNGMLGFYNANTDQEYPDEQPHDSGSHGTHCAGIAAGTGGSSGTYAGVAPQANLVGVIALDGGSGDEGDLLRAVDWTIANKDRFSIDVMSLSLGGPIVIPGFTNNGESSISQALDIAVEAGIVTVVAIGNGNLGIAAHPGSASYPGDSVKAITVGSVNDDHNREIYSSRGPTGDGRLKPDLMAPGGAIMSASAGSGDGYVSYSGTSMATPHVAG

SEQ ID NO: 140046 - protein, 820 aa, Unknown
  Bacterial polypetide isolated from the Sargasso Sea
MTLSAVPAMAKDAPVYEKDAILVVYKDNATKAERSAAQRLIRGTLTDANADGVDDKFQHLLNGKLARLALRKGANIEDAIKVISRHPAVKYAEPNYILKAIGTPDDPSFASLWGMHNTGQNGGTADADIDAPEAWEITTGSSDVVIGVIDTGVDYNHPDLQANMWVNGGEIPGNGIDDDGNGVIDDVHGYSAVNNNGNPMDGNGHGTHVSGTIGAKGNNGVGVVGVNWDVKIAACQFLDADGYGSTAGAIACLDYFTDLKVNHGVDIKATNNSWGGGSFSQALKDAIEAGGEAGILFVAAAGNDAVDNDASPHYPSSYDSDVVLSIASTDRNDRMSDFSQWGLTSVDMGAPGTAILSTVPGGGYASYSGTSMATPHVTGAAALVWSLNPDLSPVEMKTLLMASGDANADLTGKTVAGTRLNVANALEQANPSPSYKFTVSPASQSVEAGNTASYNFTVGSVAGWEGDVALSVAVSPALEGVSLSASTVAAGGSFTLDVATTAQTAWGDYSITVTGSDGTIEKSKVVSLNVFPQGLNDFSYGNENAVAIPDNNANGVVSTIDVADDVQIFGVTADVNISHTWIGDLRVVLTSPAGTEVVLHNREGGSADNIVKSWDLSAFDGENARGTWSLSVDDNAGADTGTLNNWGLVISGLGEASPAAPVAGFEYTVEGLSVAFTNTSTDANDDIVSYSWDFGDDTNSSEMNPSHVFAAAGTYRVSLTVTDAMEHSNTVTMEVQVYEHSISAAVTRALVSRRGSAMVDLTWDSALGESVALYRDGELVATTENDGNYRDRFTTTASSVTYQVCETTGSLCSAAVVAQF

SEQ ID NO: 140047 - protein, 820 aa, Unknown
  Bacterial polypetide isolated from the Sargasso Sea
MTLSAVPAMAKDAPVYEKDAILVVYKDNVTKAERAAAQRLIRGTLTDANADGVDDKFQHLLNGKLARLALRKGANIEDAIKVISRHPAVKYAEPNYILKAIGTPDDPSFASLWGMNNTGQNGGSADADIDAPEAWEITTGSSDVVIGVIDTGVDYNHPDLQANMWVNAGEIPGNGIDDDGNGVIDDIHGYSAVNDNGNPMDGNGHGTHVSGTIGAKGNNGVGVVGVNWDVKIAACQFLDADGYGSTAGAIACLDYFTDLKVNHGVDIKATNNSWGGGSFSQALKDAIEAGGEAGILFVAAAGNDAVDNDASPHYPSSYDSDVVLSIASTDRNDRMSDFSQWGLTSVDMGAPGSAILSTVPGGGYATYSGTSMATPHVTGAAALVWSLNPDLSPVEMKSLLMASGDANADLTGKTVAGTRLNVANALEQANPSPSYKFTVSPVSQSVEAGSTASYNFSVGSVAGWEGDVALSVSVSPALEGVSLSASTVSAGGSFTLDVATTAQTAWGDYSITVTGTDGTIEKAKVVSLNVFPQGLNDFTYGNENAVAIPDNNASGIVSTIEVTDDVQIFGVTADVNISHTWIGDLRVVLTSPAGTEVVLHNRDGGSADNIVKSWDLSAFDGENARGTWSLSVDDNAAADTGTLNNWGLVISGLGEASPAAPVAGFEYAVEGLSVAFTNTSTDANDDIVSYSWDFGDGSTSTEMNPSHVFAAAGTYTVSLTVTDSMEHSNTVTMEVQVYEHSINASVTRALVSRRGSAMVDIEWDSALGESVALYRDGQLVVTTENDGNYRDRFTTSASSVTYQVCETTGTLCSAPVVAQF

SEQ ID NO: 140048 - protein, 289 aa, Unknown
  Bacterial polypetide isolated from the Sargasso Sea
MGYRDTPNASDVALLHLATPVTQAPIAIADPVIKDTWQQNTTMLHALGYGGIDPSATKASPQLLAVDLAYRGDRDFWYGDPTTTHIFAGKLAGQDTCKGDSGGPLTYGGQLVGVTSYGAFPCATGSAGGYVYAPAFSDWIAEQQQGITLTTVRGLILPSGTSGWADYLLANRSNQAVTLSGIYSDAPAMSNGCAARLEAGQTCTLRLRADGNNTVGTLRVQGVELTATNEQGASQRLEGALISLTSEPTKTPDTSTTTTTTTTSSSGGGGATGFAALLLLPLAWLRRRR

SEQ ID NO: 140049 - protein, 232 aa, Unknown
  Bacterial polypetide isolated from the Sargasso Sea
MRASDFSQVFYLELQGQRKVCGATLISNRWALTAAHCVSETSLGSVIGNGDEFLVEIANVPRSIDRVMLHPDFTSLKTPEVDLALLRFVQEVNYPTPISVNTKADELGEIVTLVGWGYFGLGTTGRQYDDGTKRQAKNRITQADQRLFSFFDDPRQLNSAALPLEGTLSLGDSGGPAFLETSEGLLLAGVSVGQVEGPDFSEETQGQYGSVAVYERVSLHVEWINSVLNSDY

SEQ ID NO: 140050 - protein, 204 aa, Unknown
  Bacterial polypetide isolated from the Sargasso Sea
MDTYYKVDSVFVHKKYQPGISHDIALIKLVDPVTDVTPARLYKRSDELGKNIWFIGAGGTGNGLTGQTVDNGANAGVLRKAQNSVEFAQGPLLTFTFDSGDEALPLEGVSGGGDSGGPAYLTLEGIHYLLGISSRVGGGEIGKYGVVEVYSRVSFFSAWIEDITSGDAKLQQQFALPKLDKLPAGMTAEMLAEVCADIGLKPSL

SEQ ID NO: 140051 - protein, 526 aa, Unknown
  Bacterial polypetide isolated from the Sargasso Sea
MLVSKDFVEWIEPKYPASLDNEVAATINGAEWVSTPSNMAGNGGALSGDGVIVAVMDSGLDNAAECDGVSHCNSVNSGINADFAGRIRGVVSYAGSTCATNGGCGPDDNNGHGTHVAGSVLGDGSNSPVGWDNSGMAPGAQLFMQSVGWKSTDGSLAPPSYGDGFEEAYNAGARVHTNSWGTPPDCATEGDLNSGLWCLQLYSATTESLDTAAHQYQDLTVLFSMGNDGRDCVGSSFATDESDPDGDGTHQFPAHPYCAAGKNGEINLGVLNQQASAKNIISVGASETQRQGTGLNVFDTYYGGAFYGAPILNEYDSDDPDGVWGRSNRGPTSDGRIKPDLVSPGSSIVSVKSSQKTHPNDLADGYYTVKSGTSMATPITAGSVALLIEYLNNHGYDCNLGNSPTSNNCPDSALIKGILSASSHDMVGQYSSGGDGENGAVEKAPNNHEGWGRVDLERAVGSAFTSGIDITTSDSHSFKLSVPDSGIDLLRVVLSWNEASNGASAGTQLRNDLDIHLKSPTGVLQT

SEQ ID NO: 140052 - protein, 556 aa, Unknown
  Bacterial polypetide isolated from the Sargasso Sea
ATNNSWGGGGYSEALETAIEEAGQAGILFVAAAGNSGSNNDNVDNYPSNYVTTTNSLVAVASHTRTDGDSGFSYGIETVDIAAPGTAILSTIPGDGYATYSGTSMATPHVTGAAALVWSLNPELTPSEMKELLMSTGETSLWADGRTVSGNRLNVLNALEEADPTPGFKLGITPGSAEIEAGETYAFTIEVGSIAGYEEEVQLSLAEPSDIASLSASSAMPGDTVTLTVETSEDTPWGPYSFTVNGVSGDIEKSKSANLYVYPQGLNEFPYAYSGDAVPTLPNEEDPDDVGVDLVINVPDDLTVFGMQASVDITHTYSGDLVLSLTSPQGTTTVLRQNQGGGTDDIVESYNSDAFNGEVATGDWTLNVLDTFNGDNGTVNTWSLVVTGIGEVGPTPPNSAFTYDASGLSVSFTNNSNDVNDDIVSYSWDFGDGSTSTEENPTHVYASTGAYDVTLTVTDSEGQTGVSTETVSVSDSTIVAEIDRAMLSRFGSLRVDLSYSGSMADTVMIYRNGELLEEVSNTGRYRDRSRGVQPGEYTYMVCDETSACSAPVSVNL

SEQ ID NO: 140053 - protein, 206 aa, Unknown
  Bacterial polypetide isolated from the Sargasso Sea
MVTNGLIEKAFSDNDFAIIKLATPVTFSDRVKPICLPSLLTDYDNKVATVSGWGRTIGGGPVSDILQKVNYVCLPKHPFPSIEFVSIFQIDLNTMTNAQCSSPPNLWEPNLISNNMICAYDSGKSVCNGDSGGPLVTNEGKYYSVIGKNIVYEFNFTCRCFVGVVSWGRGGCPVGTNYPNVYARVTSQLLWIKKYISGTTCPKPIL

SEQ ID NO: 140054 - protein, 158 aa, Unknown
  Bacterial polypetide isolated from the Sargasso Sea
LSSGGDLVAHLQEVDVTVFADGDCGMMDSYMTSDMMCAGVKEGGKDSCQGDSGGPLFTTDPANNNAETLIGVVSWGFGCAAAGQLGVYAEVSHFRDWIDAQLTGANTCSPPGSTGSSTSSPTTTTSGSGSGSGSGSSCGNCVFPFFFMVSSRVKFLLI

SEQ ID NO: 140055 - protein, 442 aa, Unknown
  Bacterial polypetide isolated from the Sargasso Sea
LVAYNDDESLLSLDSQLNYTAESSGTHYLDVGAYQDVYAGTYTLRASELTPPDPGFNSTDGYGHVSAQRAFEQLLNISLDPVDALGGNLWGVDNVDAPEVWNGGSGFAGATGSGTTIAVIDTGVDLDHPEFLGRIVAGYDFVDDDSIADDGNGHGTHVAGTIAGANDGTGITGVAYDAAIMPLRVLGNDGYGWTSDIISAVRWAADNGAHVINLSLGVSGYSQAMADAISYASGRGSVVVMAAGNSGGMAPEYPAAHAIDHGIAVGVVDSNRSFAGFSNRAGSTQLDYVTAPGVNIYSAVPGGGYDTFNGTSMATPHVAGVAGLLKSHDGSLSASAIEDLLTGSGSNNSISDSTAWNTTSSIPWSTRDVITMQTLDSFSDKQLSGTLIASVDGNGRERRSTLRGLKQGIRSNDASYDGLEAVKTIEASRNSFAVLEISNDHA

SEQ ID NO: 140056 - protein, 207 aa, Unknown
  Bacterial polypetide isolated from the Sargasso Sea
YISRIDGHPEFDAATFEFDVAVLTLERAVNVELFKPVSLSWTEHSAYIGDFAQVAGWGTQDDNALSSVLLVGHVPVQSFEVCTASSSYSPFDILSSNICAGFVSGGTDACQGDSGGPLLVSGKQIGIVSWGEGCALPNKYGVYFAVSHAQGFLAMATDDLVYTFSPQSGSPPPSPSPSPVPPPTPTPPPTPPVVLPPFLSFLSWLSA

SEQ ID NO: 140057 - protein, 809 aa, Unknown
  Bacterial polypetide isolated from the Sargasso Sea
MTINRTTKIALSLSSLAIAISAGVNAAPDAPGFAAAKQAQTSPLPKRYIVKFKNADAPALMSESSLQSSDQLATTMNYQPQVAEISAQHSVLNKAQAKEMKRIGRSNSYSVKLDNNGIKALRARADVEYVEEDMPRHLLSETTPWGQTFVGATQLSDSQAGNRTICIIDSGYDRGHSDLSGNNVTGTNNSGTGNWYEPGNNNAHGTHVAGTIAAIANNDGVIGVLPNQNANIHVIKVFNEAGWGYSSSLVSAVDTCVANGANVVTMSLGGAGSSTTERNALAAHYNNGVLLIAAAGNDGNNTHSYPASYDAVMSVASVDNHKDHSAFSQYTNQVEISGPGEAILSTVTRGEGRLADITIGGQSYFNSGVVPHNRFTPSGTNYAPNPYNGTATATLAECTVSGSTFNCGNMANKVCLVERVGNQGTSYPEINAVKACKNAGASAVIVYSNSALPGLQNPFLVDANSEINMVSVSVDRATGLALRNQLGATVTVSNQGNKDYEYYNGTSMATPHVSGVATLVWSYHPECSAAQVRNALKQTAEDLGTAGRDDYYGYGLVNAVAAKTFLDASCNGPTDPVDPTPTDSVLVNGVPKTGLSGAASEELHFSFEVPQGATNLGFVMNGGTGDADLYVQYGAAPTTSNYDCRPYKGGNSESCPISNVQSGTYYAMVKGYSAFSGVSLTASYTAQSGGGTPTTPASYTNTDNYNIPDNKTTGITSPITVTRTGNSGTVTAVVNIVHPYIGDLKVQLISPTGQTATLHNNTGAGADNINKSYTVDMTGVESSGVWKLKAVDSGRGDVGYIDSWELKFQ

SEQ ID NO: 140058 - protein, 504 aa, Unknown
  Bacterial polypetide isolated from the Sargasso Sea
MTVDRLVTIDQERYIIKFKDEMTSETVEVSALKGKGQISSAKVKGKKPFDIASAKSEVRKAGGAIKKELKKHKMVAATMSKSALNKLRKNPNVESIEVDVRRKPMAQTTPYGYTMVQANQFAQSDTTARKVCIIDTGYNLGHPDLPGTNDGVTGQANNSAVGNWYNDGNGHGTHVAGTIAAYDNNEGVVGVYPGVDMHIVKIFNDNGQWTYASDLIDAITQCQDAGSNVVNMSLGGGSSSTTERNAMQSFTDAGMLLVAAAGNDGNSAKSYPASYDAVMSVAAVDSNENRASYSQYNDQVEIAAPGSAVQSTYPTNTYASLSGTSMATPHVAGGAALVWSYFPQCSNNQIRSALNATAEDKGSAGRDNFYGYGLMQLADAYNYLNTNGCAGGGTGGGGGSEPGVEPVSGQLTGLSGTRRNWDRYTWTIPEGVTQMTIRTSGGSGDADLYVKFGSQPETNSYDCRPYQNGNSEVCTFDAPASGTWHIGIRAYSSYSGVTLSYSYE

SEQ ID NO: 140059 - protein, 521 aa, Unknown
  Bacterial polypetide isolated from the Sargasso Sea
MKLTKIASAVIALSVGVIAQAHADDNRYVIQVEAGHKGIVKALAKKLGAEINLEGDEFIAATFTGKDLAQVKGLLNNPHITLIEEDVRRHPMALFNDDAGNPMTQQVTPYAIYQSHANEVTFNPNAGMKVCIIDSGLDSSNPDFNWNNITGDNDSGTGNWNQNGGPHGTHVAGTIGAADNNIGVVGMAPGVPMHIVKVFNASGWGYSSDLAYAANKCSNAGAKIISMSLGGGAANNTEKNAFDAFTAAGGLVVAAAGNDGNSVRSYPAGYPSVMMIGANDANNKIADFSQYPSCVSGRGKKAVNDDGICVEVTAGGVDTLSTYPAGMATASTLTADGATVASSAMENPGSATGNTYFMGTAQAVDSGANGKICVIDRGVISFHDKVLNCENSGGVGAIVINNVAGMLYGTLGDTNATTIPAVGAAFEDRASLIAAQNTTVSIDSVDYGFMSGTSMATPAVSGMAALVWSNHSQCTGTQIRNALKATAMDAGTVGKDNYFGYGIVNAKAADAYLTTYGCSGK

SEQ ID NO: 140060 - protein, 809 aa, Unknown
  Bacterial polypetide isolated from the Sargasso Sea
MTINRTTKIALSLSSLAIAISASVHAAPDVPGFNAAMQAQTSPLPKRYIVKFKNADAPALMSVDSAQVSDQLPTTMNYQPKVAEISAQHSVLNKAQAKEMKRIGRSNSYSVKLDNNGIKALRARADVEYVEEDMPRRLLSETTPWGQTFVGATQLSDSQAGNRTICIIDSGYDRGHSDLSGNNVTGTNNSGTGNWFEPGNNNAHGTHVAGTIAAIANNDGVIGVMPNQNANIHVIKVFNEAGWGYSSSLVSAVDTCVNNGANVVTMSLGGAGSSTTERNALAAHYNNGVLLIAAAGNDGNNTHSYPASYDAVMSVASVDNHKDHSAFSQYTNQVEISGPGEAILSTVTRGEGRLADITIGGQSYFNSGVVPHNRFTPSGTNYAPNPYNGTATATLAECTVSGSTFNCGNMTNKVCLVERVGNQGTSYPEINAVKACKNAGASAVIVYSNTALPGLQNPFLIDANSEINMVSVSVDRATGLALRNQLGATVTVSNQGNKDYEYYNGTSMATPHVSGVATLVWSYHPECSAAQVRNALKQTAEDLGTAGRDDYYGYGLVNAVAAKTFLDASCNGPTDPVDPTPTDSVLVNGVPKTGLSGAASEELHFSFEVPQGATNLGFVMNGGTGDADLYVQYGAAPTTSNYDCRPYKGGNSESCPISNVQSGTYYAMVKGYSAFSGVSLTASYTAQSGGGTPTTPASYTNTDNYNIPDNKTTGITSPITVTRTGNSGTVTAVVNIVHPYIGDLKVQLISPTGQTATLHSNTGAGADNINKSYTVDMTGVESSGVWKLKAVDSGRGDVGYIDSWELKFQ

SEQ ID NO: 140061 - protein, 319 aa, Unknown
  Bacterial polypetide isolated from the Sargasso Sea
NSTSGNELYLINHLDENPQIKTINDDLSIDVYLLDSLDDELFLVTNNNADNQKIISVQATKPSLYNSKDLIPEQDSVMSPSSSGGYIFVELMQNAISKTFQYDFSGKLIREVDLPGIGSVSPISGKREDDELFYSFSNYHTPPTIYSINPKSGKSKIYFKPKINFDPEKYISEQVFYTSKDGTKVPMIITYKKGLSKNGKNPTILYGYGGFNISLTPNFSSIMAYWLEKGGVYAVPNIRGGGEYGKKWHLSGTKMNKQNVFDDFIYAARFLFSEGYTKSENLILRGGSNGGLLVGAVMTQEPQLARVALPAVGVLDMLR

SEQ ID NO: 140062 - protein, 206 aa, Unknown
  Bacterial polypetide isolated from the Sargasso Sea
GIYAVPNIRGGGEYGKKWHNAGTKMNKQNVFDDFISAAEYLIKNNYTSNDYLAIRGGSNGGLLVGAVMTQRPDLIKVALPAVGVLDMLRYHQFTSGAGWSYDYGTADDSKEMFEYLKKYSPVHALKSNTKYPATLVTTSDHDDRVVPAHSYKFIAGLQKVQEGNNPTLIRIQTKAGHGSVTLDQRIELESDILGFVWHNMGLKPDL

SEQ ID NO: 140063 - protein, 275 aa, Unknown
  Bacterial polypetide isolated from the Sargasso Sea
ILVDAKLYIQDLTVPGSKPIKIQGDYFARASVITNKNKTFYLYTNIEAPNGRIVSVDLSRPNIWKDIVSETENVMYPSSGGGNLFVRYLVDAKSQIMQFDLNGKIIREIELPAIGSAYGFSAKEDEDDLYYSFSSYTYPSTIFNYNIESGESNLYRQPEIDFEPSDYITEQVFFKSKDQTTVPMFITYKKGVDRNSANPTILYGYGGFNISQTPGFSATNIAWLENGGVYAVANIRGGGEYGKKWHKAGTQMNKQNVFDDFIAAAEYLISENYTS

SEQ ID NO: 140064 - protein, 221 aa, Unknown
  Bacterial polypetide isolated from the Sargasso Sea
VEKPYFSKVNSILLENEGVYALANLRGGGEYGQNWHEAGMLLNKQNVFDDFIAAAEYLETSGITSPNYLAIRGGSNGGLLVGAVLNQRPDICKVAFPEVGVMDMLRYEKFTIGHAWAIEYGSVEDQMHFNNLVSYSPLHTIKGGANYPSVLVYTADHDDRVVPAHSFKYTATLQAGQGGTNPILVRIGQSAGHGAGKPTKKIIKEYAEKWAFMFYEMGVGY

SEQ ID NO: 140065 - protein, 233 aa, Unknown
  Bacterial polypetide isolated from the Sargasso Sea
MGKIELPGPGTAYGWNGKKHDQVLYYTFTNYHSPGVIYSYDPRTKISTRYWKPKIDFDPDAYLSEQIFYTSSDGTKVPMIITRKKGVKYDGKNPTILYGYGGFNISIRPSFSIANAVWMEQGGIYAVANLRGGGEYGKTWHKAGIKLLKQNVFDDFIAAAEYLIDNNITSPEFLAIRGGSNGGLLVGATMTQRPELFKVALPAVGVLDMLRYHKFTSGAGWAYDYGTSKDSKE

SEQ ID NO: 140066 - protein, 288 aa, Unknown
  Bacterial polypetide isolated from the Sargasso Sea
SEWVTIIPENKNVLTSVNMIDGKLVAHYMIDIISEWVIFDINGKMIKKVDLPGLGISYGFGGDNEQSLSWYRFESLVHPPTVFSFDFDDYSSKVYYESKAKFDNESFVMKQEFYSSKDGTKIPIFIAHDKNIVLDGNRPTLMYGYGGFNISQKPYFNKTIPIILENGGVYAIACIRGGGEYGQEWHEAGMLDNKQNVFDDFIAGGEFLITEGYTSPDRLAIRGGSNGGTLVGAVINQKPNLFRVAFPEVGVMDMLRYEQFTIGWAWAVEYGTVKEKNDFENLLSYSPL

SEQ ID NO: 140067 - protein, 244 aa, Unknown
  Bacterial polypetide isolated from the Sargasso Sea
VGSQLYIKDLAVSDSKPIKIQGDYFARASVITNKKKTFYLYTNIEAPNGRIVSVDLSRPNDWKDVVPETENVMYPSSGGGNLFVRYLVDAKSQIMQYDLNGKIIREIELPAIGSAYGFSAKEDEDDLYYSFSSYTYPSTIFNYNIESGESSLYRQPEIDFEPSDYITEQVFYKSKDQTTVPMFITYKKGVDRNSANPTILYGYGGFNISQTPGFSATNIAWLENGGVYAVANIRGGGEYGKKWH

SEQ ID NO: 140068 - protein, 264 aa, Unknown
  Bacterial polypetide isolated from the Sargasso Sea
TLKELNQKYWKDVIPESKNVFSVSSGSGYFFAEYLVDAISKVYQYDYDGDLIREIELPGIGSSSGFYGEKDQKELYFSFSNYYTPGNIYSFNPENGDYDLYWKPEIEFNSSEYVSKQIFYKSKDGTKVPMIITHKKDLILNGKNPTILYGYGGFNISRTPGFSVTNAVWMDLGGVYAVPNIRGGGEYGKEWHNSGTKLNKQNVFDDFIAAGEYLISSNYTSSDYLALRGGSNGGLLVGAVMTQRPDLMKVALPAVGVLDMLRYH

SEQ ID NO: 140069 - protein, 699 aa, Unknown
  Bacterial polypetide isolated from the Sargasso Sea
MYKLCLNIFLILIIISCSNQKTSGYPETKKEEFTETIHGYEISDSYRWLEDFTSNDSLDWVKRQNKFTKTFISKNNYKKDIANYLEQIWENESISIPYKKGGKTFYYFNDGSFQQSKLMIKDCDKCDERVLIDPNTFSDDGTISLGGTSVNNSADMIAFSISDGGSDWRVWKVLDIETGEVLEDEIKWAKFSGASWENDDSGFFYQKYDEPQGELLKEVNESPKLMFHKIGTDQSEDYVVYENPDQPRWGWGINVIEDSNIKILSISEGTDERNRLYIQLNAGEKFIPLIDELIGAYSFIDSKDGILWFYTTEGAPNGKIVNLEIKNGSFVWNDVIQESKNSIRSVNVINNSFVINYLVDTFSSIKIFDLSGNFVQDLELPKNGTIGGFGGEIDDTETYFSISNYVTPREIYEINLDTLDVNLFWKEEIDGYESEDYVSELKFYPSKDGTKIPIHISYKKGLEINQDTPLMLYGYGGFNISLLPGFRKTHAAWKNLGGVYAVANLRGGGEYGSEWHEAGMLLNKQNVFDDFAFAAKFLHENNIGSEKTTAIIGGSNGGLLVAATMLQNPDLFKVAIPQVGVLDMLRFSKFTIGWAWESDYGSVDKKDEFENLLAYSPLHNIEKDKCYPTTLVTTASRDDRVVPSHSYKFAAKLQEYQGCENPILIRIEDRAGHGAGTPKDKIINQISEIYGYALKEISN

SEQ ID NO: 140070 - protein, 363 aa, Unknown
  Bacterial polypetide isolated from the Sargasso Sea
ESEYAIRSVNVINNFFVINYLVDTFSTIKVFNLEGEFISEIELPKKGNISGFGGDKEDTKSYYSITNYVTPREIYEFDFNTFTSKLFWKEELDGYKSDDYVSSLKFYESKDGTKIPIHISHKKSLDINEKTPLLIYGYGGFNISILPNFSKSHTAWKNQNGVYAVANLRGGGEYGDAWHADGMLLNKQNVFDDFAYAAKFLHDQKIGSPETTAIDGRSNGGLLVAATMLQNPDLYKVAIPQVGVLDMLRFSKFTIGWAWESDYGSVDKKDEFENLLAYSPLHNIKSDVCYPTTLITTASRDDRVVPSHSFKFAAKLQKNQSCNNPILIRIEDRAGHGSGTPKDKIINQISEIYGYALLKINEA

SEQ ID NO: 140071 - protein, 259 aa, Unknown
  Bacterial polypetide isolated from the Sargasso Sea
LKFYPSKDGTKIPIHISYKKGLEINQDTPLMLYGYGGFNISLLPGFRKTHAAWKNLGGVYAVANLRGGGEYGSEWHKAGMLLNKQNVFDDFAFAAKFLHENNIGSEKTTAIIGGSNGGLLVAATMLQNPDLFKVAIPQVGVLDMLRFSKFTIGWAWESDYGSVDKKDEFENLLAYSPLHNIEKGKCYPPTLITTASRDDRVVPSHSYKFAAKLQEYQGCQNPILIRIEDRAGHGAGTPKDKIINQISEIYGYALKEISS

SEQ ID NO: 140072 - protein, 690 aa, Unknown
  Bacterial polypetide isolated from the Sargasso Sea
MSGKARLHYPVTRQGEQVDHYFGQAVADPYRWLEDDRSPETEAWVKAQNAVTQGYLAEIPYRAAIKEKLASSWNYAKEGAPFREGRYHYFFKNDGLQNQNVLWRQLEGKPAEVFLDPNTLSPDGTTALDQLSFSRDGRILAYSLSLAGSDWREIHLMDVQSKQPLEAPLKDVKFSGISWLGNEGFFYSSYDKPDGSELSARTDQHKVYFHRLGTAQEDDRLVFGAIPAQHHRYVGATVTEDDRFLLISAANSTSGNRLYVKDLSQENAPLLTVQGDLDADVSLVDNQGSTLYLLTNRDAPNRRLVTVDAANPGPARWRDLIPERQQVLTVHSGSGYLFAEYMVDATARVEQFDYEGKRVREVALPGLGSVSGFNGKHDDPALYFGFENYAQPPTLYRFEPKSGAISLYRASAAPFKPEDYVSEQRFYQSKDGTRVPLIISYRKGLKLDGSNPTILYGYGGFDVSLTPSFSVSVANWLDLGGVYAVANLRGGGEYGQAWHLAGTRMNKQNVFDDFIAAAEYLKAEGYTRTDRLAIRGGSNGGLLVGAVMTQRPDLMRVALPAVGVLDMLRYHTFTAGAGWAYDYGTSADSEAMFDYLKGYSPLHNVRAGVSYPSTLVTTADHDDRVVPAHSFKFAATLQADNAGPHPQLIRIETNAGHGAGTPVAKLIEQSADIYAFTLYEMGYQQLPRQP

SEQ ID NO: 140073 - protein, 236 aa, Unknown
  Bacterial polypetide isolated from the Sargasso Sea
MLYGYGGFNVSLTLSFSVANLVWMEMGGVYAVPNLRGGGEYGKAWHDAGIQLKKQNVFDDFIAAGEYLIAQKYTSSDKLAIRGGSNGGLLVGAVMTQRPDLMKVAIPQVGVLDMLRYHTFTAGAGWAYDYGTSEQSKEMYDYIKGYSPVHNVKEGVAYPATLVTTGDHDDRVVPAHSFKFAAELQAKASGPNPQMIRIETNAGHGAGVPVSKQIELAADIFGFTLFNMGVKELPKQ

SEQ ID NO: 140074 - protein, 452 aa, Unknown
  Bacterial polypetide isolated from the Sargasso Sea
RWGWGISVIKDTNIKILSISEGTDERNRLYIQLNTGEKFIPLIDELIGAYNFIDSKDGILWFYTTEGAPNGKIVNLEIKNGSFVWNDVIQESENSIRSVNVINNSFVINYLVDTFSSIKIFDLSGNFVQDLELPKNGTIGGFGGEIDDTETYFSVSNYVTPREIYEINLDSLEVKLFWKEEIDGYESEDYVSELKFYPSKDGTKIPIHISYKKGLEINQDTPLMLYGYGGFNISLLPGFRKTHAAWKNLGGVYAVANLRGGGEYGSEWHEAGMLLNKQNVFDDFAFAAKFLHENNIGSEKTTAIIGGSNGGLLVAATMLQNPDLFKVAIPQVGVLDMLRFSKFTIGWAWESDYGSVDKKDEFENLLAYSPLHNIEKDKCYPTTLVTTASRDDRVVPSHSYKFAAKLQEYQGCENPILIRIEDRAGHGAGTPKDKIINQISEIYGYALKEISN

SEQ ID NO: 140075 - protein, 454 aa, Unknown
  Bacterial polypetide isolated from the Sargasso Sea
ISNYPSTTNDGRFLMIYRTKGTYGRSLMVKDLKKAKSEFIKIVNDYKSDISVIDHIDGKLLVITDRNAAKKKVVLIDLDNPGENEWVTIIPENKNVLTSVNMIDGKLVAHYMVDIISEWVIFDINGKMIKKVDLPGPGISYGFGGDNEQSLSWYRFESLVHPPTVFSFDFDDYSSKVYYKSKAKFDSESYVMKQEFYSSKDGTKIPIFIAHDKNIVLDGNRPTLMYGYGGFNISQKPYFNKTIPFILENGGVYAIACIRGGSEYGQEWHEAGMLDNKQNVFDDFIAGSEFLITEGYTSPDRLAIRGGSNGGTLVGAVINQKPNLFRVAFPEVGVMDMLRYEQFTIGWAWAVEYGTVKEKNDFENLLSYSPLHNIKNRSYPSVLVYTADHDDRVVPAHSFKYAAKLQNHQIHDEYPILIRIGTSTGHGAGKSTKKRIKEYAEKWAFMFYEMGVKL

SEQ ID NO: 140076 - protein, 260 aa, Unknown
  Bacterial polypetide isolated from the Sargasso Sea
SKDGTKVPMIITYKKGLSKNGKNPTILYGYGGFNISLTPNFSSIMAYWLEKGGVYAVPNIRGGGEYGKKWHLSGTKMNKQNVFDDFIYAARFLISEGYTKSENLILRGGSNGGLLVGAVMTQEPQLARVALPAVGVLDMLRYHKFTAGAGWAYDYGTSDESEEMFNYLLSYSPLHNIKDEVSYPATLITTGDHDDRVVPAHSYKFAASLQESDSGDNPILIRIETEAGHGAGTPTEIILDSYSEIFSFILGNVENRLSIK

SEQ ID NO: 140077 - protein, 236 aa, Unknown
  Bacterial polypetide isolated from the Sargasso Sea
SGWSGKIEDDTLYYSFTNYHSPGRIYSYSPKTKNSDEFWKPDINFDSDQYVSEQIFYTSTDGTKIPMIITRKKDVEYNGENPTILYGYGGFNISLRPSFSIANAVWMEQGGVYAVPNLRGGGEYGKDWHKAGTKQQKQNVFDDFIAAAEYLIEKNITSPDYLAIRGGSNGGLLVGATMTQRPELMKVALPAVGVLDMLRYHKFTAGAGWAYDYGTSEDSKEMFEYLKGYSPVHNVI

SEQ ID NO: 140078 - protein, 287 aa, Unknown
  Bacterial polypetide isolated from the Sargasso Sea
MTTGESEIYQSPSIDFIAEDYITKQIFLKSKDDTSIPMFITHKKDMVMNGTNPTILYGYGGFNISLTPSFSTTNLVWLENGGVYAVANLRGGGEYGKKWHLAGTKMNKQNVFDDFIAAAEYLINEKYTSSDYLATRGGSNGGLLVGATMLQRPELMKVTIPAVGVMDMLRYHQFTAGAGWSYDYGTAEDSPEMFQYLKTYSPVHAIKDGVSYPATLVTTSDHDDRVVPAHSYKFIAGLQKAHSGPNPVLIRIQTNAGHGSVSMEQRMDLASDIYAFIWYNMGVRPNL

SEQ ID NO: 140079 - protein, 265 aa, Unknown
  Bacterial polypetide isolated from the Sargasso Sea
MEIDWEEWSPGNFTTPLPPTTPFDTTPGPPADCVGDPNPTWAPATEIDLGLSCQNEGSKIVGGTVAPQGRFPWQVNYSWGCGGTILNDRWILTAAHCCEAMQEHVVTIGDYHFNDADVGEFQLTAEQVIMHPDYGQHPDSGIANDVCLLKVPSLAANAPADCNGCYATACLPSHAPNHGEYCVVSGWGNTQTDNPWPNELHEVGVFLFDHQFCQDYSHTGMTTVADLELCAGLPDNNGNCLADGGKDACQGDSGGPLTCVKDGQP

SEQ ID NO: 140080 - protein, 42 aa, Unknown
  Bacterial polypetide isolated from the Sargasso Sea
MSSQGDSGGPLVSERGGSFDLVGVVSWGYGCAQVAFLPSLVI

SEQ ID NO: 140081 - protein, 281 aa, Unknown
  Bacterial polypetide isolated from the Sargasso Sea
KQHPAYNPSNIQNDISVLELETAVDLYSYPNIKPICLPAQGATFPNGQATVSGWGTLASGGSAPATLHEVDVTVFADGNCGEMNQYMTPDMLCAGVAEGGKDACQGDSGGPLFISDPANNNAQSLIGVVSWGFGCANPGQLGIYAEVAYFRDWLDSQLTSVNTCSPPSGSELAAAVPCESVNASSTTAEPWYTTTTTTSAPGSGSGSGTCGNCVFPFTFGGRKHTTCTTIDGDSPWCATEVDSSGTFVQGKYEYCTDSSCPGLNPPAISVNPNNAVGSCCE

SEQ ID NO: 140082 - protein, 141 aa, Unknown
  Bacterial polypetide isolated from the Sargasso Sea
MEPKVKLPLLPLRDIVVFPNMVIPLFVGRDKSITALNEVMKGQKKIILVTQKNSEIDDPKKNDIYTYGCESNILQLLKLPDGTVKVLVEGTKRLKILDFNDEEKYISCTFEYLKDQIEPAEDLLPLSMTAIKRLEKLTNVN

SEQ ID NO: 140083 - protein, 256 aa, Unknown
  Bacterial polypetide isolated from the Sargasso Sea
DIIDGYAREAGVRGLENQLKKLLRKSARKIVEEESKCVKISKIDLPEMLGRKTFAEETRYKKPKIGVITGLAYTSVGGATLFIEASCVEAKNSGFKQTGQLGDVMIESTEIAYTYIRSIGSKDKKIQKFFAENFVHLHVPAGATPKDGPSAGITMACALYSLVTQVAVIPNLAMTGELTLTGLVMPVGGIKEKTIAARRSGITQLIFPAENQKDFDDLDESIKKGIKPYFVKNFSEVLPVGFPDLFVSRKKITTKK

SEQ ID NO: 140084 - protein, 100 aa, Unknown
  Bacterial polypetide isolated from the Sargasso Sea
MEVKLIQPLLPLRDIVVFPSMVIPLFVGRDKSITALNEVMKSDKKIILVTQKNSEVDDPKKNDVFSYGCESNILQLLKLPDGTVKVLVEGIKRVKIIDFK

SEQ ID NO: 140085 - protein, 117 aa, Unknown
  Bacterial polypetide isolated from the Sargasso Sea
MEPKVKLPLLPLRDIVVFPNMVIPLFVGRDKSITALNEVMKGQKKIILVTQKNSEIDDPKKNDIYTYGCESNILQLLKLPDGTVKVLVEGTKRLKILDFNDEEKYISCTFEYLKDQI

SEQ ID NO: 140086 - protein, 149 aa, Unknown
  Bacterial polypetide isolated from the Sargasso Sea
MEKNLIPVLPLRDIVVFPNMVAPLFVGREQSVNALNHVMKGDKKIFLISQKNSKVDNPNKENLYSFGTVAKIIQLLKLPDGTLKVLVEGIQRAKANQINFNKEYITASITEINNKTKKNSNIKALQKLIVEQFIEFQKINKKVSLDVIN

SEQ ID NO: 140087 - protein, 194 aa, Unknown
  Bacterial polypetide isolated from the Sargasso Sea
MKASYLKALLPLRDIVIFPSMVVPLFVGREKSIKALQEVMKNDKSIVLVTQKNSEIDDPEDKDLYGYGCLSKVLQLLKLPDGTVKVLVEGEKRVKILNHKESEDSFIKCEVEISEDENVTKELDTFAAGLLKKYEKLLVLTKKDTSEGINNLKNLKNASQIANNISSNLNIQIFEKQELLEILDLKKRLEKIYS

SEQ ID NO: 140088 - protein, 198 aa, Unknown
  Bacterial polypetide isolated from the Sargasso Sea
MEVKVTQPLLPLRDIVVFPSMVIPLFVGRDKSITALNEVMKDNKKIVLVTQKNSEVDDPKKNDVFSYGCESNILQLLKLPDGTVKVLVEGIKRIKIIDFKDDEKFISCTYEYQKELISNDEDLMPLALTAVRRLEKLTSINKKISTETINNIKELKDPSKIADNIASHLNSTISEKQQIFEMLDVKKRLNGVIKVMEN

SEQ ID NO: 140089 - protein, 115 aa, Unknown
  Bacterial polypetide isolated from the Sargasso Sea
GPSAGVGMFTSIVSLLSGKPVKSKLAMTGEITLRGNVLPIGGVKEKVTAAHRSGIKTIILPDHNRKDLEDIPDHIKKDLDFHFAKEMMDVIKVAVPRLNLKPTRKKTTSKNKKVA

SEQ ID NO: 140090 - protein, 157 aa, Unknown
  Bacterial polypetide isolated from the Sargasso Sea
MEVKVTQPLLPLRDIVVFPSMVIPLFVGRDKSITALNEVMKDNKKIVLVTQKNSEVDDPKKNDVFSYGCESNILQLLKLPDGTVKVLVEGIKRIKIIDFKDDEKFISCTYEYQKELISNDEDLMPLALTAVRRLEKLTSINKKISTETINNIKELKD

SEQ ID NO: 140091 - protein, 172 aa, Unknown
  Bacterial polypetide isolated from the Sargasso Sea
MLSENKKPLLPLRDIVIFPSVVVPLFVGRKKSISALEEVMKSDKSIVLVSQKNSEVDDPQAKDIFSFGCLSKVLQLLKLPDGTVKVLVEGLNRVKINEINNENKKYLSCKIEKIERDKETEENKLYALNLIKKFEKLSNVSRKDSMDFVKTLKSLKDSEHIADNIASNLNIF

SEQ ID NO: 140092 - protein, 237 aa, Unknown
  Bacterial polypetide isolated from the Sargasso Sea
MGDRETFTLPVLPLRDIVVFPNMIVRLFVGRERSVKALESVMANDQKIILATQKDATVDDPSVDHIHKIGVLAQVLQILKLPDGAVKILVEGTRRVQIEEFLPNEHFFEAHASASEDVNSNQDELEALRRSVVDEFDKYSKLSKTIPEEAISAVAEADSAEKLADTVAGHIGVSVEKKQAILEEMDLSRRLEELLAFMQGEMSVLRVEKKIKSRVKNQMEKTQKEYYLNEQMKAIKK

SEQ ID NO: 140093 - protein, 158 aa, Unknown
  Bacterial polypetide isolated from the Sargasso Sea
MKASYLKPLLPLRDIVIFPSMVVPLFVGREKSIKALQEVMKLDKSIVLATQKNSELDDPTGTDLYQFGCLSKVLQLLKLPDGTVKVLVEGEKRVKIIKHSDKTKEFLNCEVEIVNDQNITKDLDQLANGLIKKFERLQILSKKDISDGTNSLKNLKDP

SEQ ID NO: 140094 - protein, 133 aa, Unknown
  Bacterial polypetide isolated from the Sargasso Sea
MTSEKQKPLLPLRDIVIFPSTVIPLFVGRKKSIKALEEVMKTDKSIVLVAQKNPEVDDPKNEDIYSFGCLSKILQLLKLPDGTVKVLVEGLERVKIKSIKQEDKKYLNCDIEIVPSTDDTQESKTLATNLIRK

SEQ ID NO: 140095 - protein, 228 aa, Unknown
  Bacterial polypetide isolated from the Sargasso Sea
HAKAEEQNQIGTTCGLAWTQAGGELLVTEVNIMKGTGKLQLTGKLGDVMKESAQAALSYVRTNANRLGIFSSVFEKTDIHIHVPAGAVPKDGPSAGVTIATSLVSAFTSIPVRNEVAMTGETTLRGKVLAIGGLKEKLLAAKRGVISTVIIPDKNKKDLSEIPEEIQNGLEIIPVNTVEEVLNKSLERFPSPVIDPVSEDEEGSNKESPEAAILPETESSDSPRTYDA

SEQ ID NO: 140096 - protein, 116 aa, Unknown
  Bacterial polypetide isolated from the Sargasso Sea
MDVTYTKPLLPLRDIVIFPSIVVPLFVGREKSIKALQEAMKTDKSIILVAQKNSETDDPSEKDLFSFGCLSKVLQLLKLPDGTVKVLVEGQKRVKITNITNENTFLKCNVEIAADT

SEQ ID NO: 140097 - protein, 94 aa, Unknown
  Bacterial polypetide isolated from the Sargasso Sea
MDVKITQPLLPLRDIVVFPSMVIPLFVGRDKSITALNEVMKNNKKIVLVTQKNSEVDDPKNNDVFSYGCESNILQLLKLPDGTVKVLVEGTKRV

SEQ ID NO: 140098 - protein, 76 aa, Unknown
  Bacterial polypetide isolated from the Sargasso Sea
MAKNLLPVLPLRDIVVFPNMVAPLFVGREQSVNALNHVMTGDKKIFLLSQKNSKVDNPDKENLYSFGTVAKVIQLL

SEQ ID NO: 140099 - protein, 125 aa, Unknown
  Bacterial polypetide isolated from the Sargasso Sea
GMVTSIISAITGVEVRRDVAMTGEITLRGRVLPIGGLKEKLLAAQRGGLKTVLIPKDNEKDLADIPDNAKSNLTIIPVSMVDEALSAALVREPTPLAISGLPDITEESGTTVPDSGENPSDIVAH

SEQ ID NO: 140100 - protein, 185 aa, Unknown
  Bacterial polypetide isolated from the Sargasso Sea
MDIKISLPLLPLRDIVVFPSMVIPLFVGRDKSISALNEVMKKDKKIILVTQKNSEIDDPNKTDVFMYGCEGNILQLLKLPDGTVKVLVEGIKRVKILDFKDNEKFITCDYSVLSDVTNKEEDLYPLAVTAIRRLEKLTSINKKISNETINSIKQLKEPSQIADNIASHITATISEKQQIFETIDV

SEQ ID NO: 140101 - protein, 193 aa, Unknown
  Bacterial polypetide isolated from the Sargasso Sea
MDVKISLPLLPLRDIVVFPSMVIPLFVGRDKSISALNEVMKKDKKIILVTQKNSEIDDPKKTDVFMYGCEGSILQLLKLPDGTVKVLVEGIKRVKILDFNDNEKFITCDYTHYHDVLSKDEDLFPLAATALRRLEKLTSINKKISNEIINTIKQLKDPSQIADNIASHITATISEKQQIFEMVDVKKRIKCHY

SEQ ID NO: 140102 - protein, 180 aa, Unknown
  Bacterial polypetide isolated from the Sargasso Sea
MNLPLLPLRDIVVFPSMVIPLFVGRDKSINALNDVMTSEKKILLVTQKNSETDDPKRNDIFNYGCESRILQLLKLPDGTVKVLVEGIKRVKILDFVENTNFIKCDYEIQKDDFNKEENLMALASIAIRRLEKLTSINKKISSEILNNIKDLKDPSSVADHIASHLKRTISEKQQILKLLT

SEQ ID NO: 140103 - protein, 183 aa, Unknown
  Bacterial polypetide isolated from the Sargasso Sea
MELKVNLPLLPLRDIVVFPSMVIPLFVGRDKSITALNETMKQDKKIILVTQKNSEVDDPKKNDVFMYGCESNILQLLKLPDGTVKVLVEGKRRVKIVDFKDDEKFITCSFEHIVDQIDKNEDLMPLATTAVRRLEKLTSINKKISSETINSIKELKDSSKIADNIASHLNTTISEKQQMLKQL

SEQ ID NO: 140104 - protein, 183 aa, Unknown
  Bacterial polypetide isolated from the Sargasso Sea
ANALGKGGIIQIETIFYPANNFLDLRLTGMQGDVMKESMNVARTLAWSLTSQAKRTAHLKNFEKSKLQGLHIHCPEGAVPKDGPSAGTAITVAMYSLFNNKKIKNKVAITGEMNLQGQVTAIGGLELKILGGIRAGVNEFLFPKENKKHFEDMLEKYEGKDYFDGITFHQVSTIKEVLSLVFV

SEQ ID NO: 140105 - protein, 159 aa, Unknown
  Bacterial polypetide isolated from the Sargasso Sea
MIKSILPVLPLRDIVVFPHMVAPLFVGRKQSVNALNAVMVGDKKIFLLSQRNSEIDSPNEKNLYSYGTVAKVLQLLKLPDGTLKVLVEGLYRSKVTKLNFNKDYTLATISELKNNNKKNSNVKALQKLVVEQFEEYQKINKKVPLDLVNNIKTFNDPNK

SEQ ID NO: 140106 - protein, 52 aa, Unknown
  Bacterial polypetide isolated from the Sargasso Sea
MSIPENFVPVLPLRDIVVFPYMIVPLFVGREKSIKALEAVMREDKKVFLLVT

SEQ ID NO: 140107 - protein, 205 aa, Unknown
  Bacterial polypetide isolated from the Sargasso Sea
MDIKFNLPLLPLRDIVVFPNMVIPLFVGRDKSINALNEVMKKEKKIILVTQKNSEVDDPTKNDVFAYGCESNILQLLKLPDGTVKVLVEGINRVKITDYSDNKDFITCSYEKVSDQFNKDEDLMQTALSAVKKLEKLTSINKKISSETINNIKVLKDPSKIADNIASHLNTSISEKQQIFETQDVKKRLNLIIKIMENETSIYWG

SEQ ID NO: 140108 - protein, 172 aa, Unknown
  Bacterial polypetide isolated from the Sargasso Sea
MDVKISLPLLPLRDIVVFPSMVIPLFVGRDKSISALNEVMKKDKKIILVTQKNSEIDDPKKTDVFMYGCEGSILQLLKLPDGTVKVLVEGIKRVKILDFKDNEKFIICDYTHYNDISPKDEDLFPLAATALRRLEKLTSINKKISNETINTIKQLKDPSQIADNIASHITAT

SEQ ID NO: 140109 - protein, 219 aa, Unknown
  Bacterial polypetide isolated from the Sargasso Sea
MDVKISLPLLPLRDIVVFPSMVIPLFVGRDKSISALNEVMKKDKKIILVTQKNSEIDDPKKTDIFMYGCEGNILQLLKLPDGTVKVLVEGIKRVKILDFKDDDKFITCDFTPLKDELIEGEDLYPLAVTAVRRLEKLTSVNKKISSETINTIKQLKDPSQIADNIASHIVASISEKQQIFETADVKKRLNSIIKIMENETSIIGVEKRIRGRVKNQMEK

SEQ ID NO: 140110 - protein, 182 aa, Unknown
  Bacterial polypetide isolated from the Sargasso Sea
MEVKISLPLLPLRDIVVFPSMVIPLFVGRDKSISALNEVMKKDKKIILVTQKNSEIDDPKKTDVFMYGCEGNILQLLKLPDGTVKVLVEGIKRVKILDFKDNEKFITCEYTALNDVLDKSEDLYPLAVTAVRRLEKLTSINKKISNETINSIKQLKSPSEIADNIASHITATISEKQQILKL

SEQ ID NO: 140111 - protein, 143 aa, Unknown
  Bacterial polypetide isolated from the Sargasso Sea
MVKNIFPVLPLRDIVVFPNMVAPLFVGREQSVNALNNVMTNDKRIFLLSQKNSKIDNPNKDNLYNFGTVAKVIQLLKLPDGTLKVLVEGIHRAKVTKISFNKEFITASIMEINQKTKKNSNIRALQKLIIEQFIEFQKINKKV

SEQ ID NO: 140112 - protein, 100 aa, Unknown
  Bacterial polypetide isolated from the Sargasso Sea
MSKLENFFPILPLRDIVVFPHMIVPLFVGRDKSIKALETVMSEDKKVFLIAQKDGSVEDPSEKDLYRIGTLGNILQLLKLPDGTVKVLVEGISRAKIKTF

SEQ ID NO: 140113 - protein, 168 aa, Unknown
  Bacterial polypetide isolated from the Sargasso Sea
MLPLRDVVVFPHMVVPLFVGREKSIQALEAAMEGSKEILLVAQKDASTDEPGPKDVFAMGTLATVLQMLRLPDGTVKVLVEGNSRASISDIEEGDYLSGQAILMDEESLPEREKDVLTKTLMDEFEKYVKLSKKVPSEVSNALTGIQELERLVDTMAAHLEMRIPEKQ

SEQ ID NO: 140114 - protein, 216 aa, Unknown
  Bacterial polypetide isolated from the Sargasso Sea
MKVAPNLTEEHSGMLKNIQKPNRLTDRAISVITISNQEKQEILEELDIKIRIEKALNLISREIQRIKLGEEIQSEVHDEITKTQREYYLREQMKAIKKELGEDESTVELKELEDKIKAVKMPEESQKVAMKELDRLSRIPTQSPEYNVSRTYIEWLVDLPWSESTDDRIDLKEAMKILDEDHYGLEKVKERIVEYLAVRNLKQKKDPNGTVRGPIL

SEQ ID NO: 140115 - protein, 268 aa, Unknown
  Bacterial polypetide isolated from the Sargasso Sea
KSQFSLPKVVMREIVDGYARESGVRGLENQLKKLLRKSARKIVEEGSDSVKISKLDLPEMLGRKTFAEETRYKKPKIGVITGLAYTSVGGATLFIEASSVEAKNPGFKQTGQLGDVMIESTEIAYTFIRSIGSKDKKIKKFFSENFVHLHVPAGATPKDGPSAGITMACALFSLVTRVAVIPNLAMTGELTLTGLVMPVGGIKEKTIAARRSGITQLIFPTENQKDFDDLDDSIKKGIKPYFVKNFSEVLPVGFPDLSVRKKKIPSKK

SEQ ID NO: 140116 - protein, 104 aa, Unknown
  Bacterial polypetide isolated from the Sargasso Sea
LTNNKVKRDVAMTGEITLRGRVLPIGGLKEKIYAASRVGIKKVLIPQENFREVSEFDKEVIKGIKIIPVSDAFSILEHTLTKSIIPLNLTESRIKNNQNTTSTH

SEQ ID NO: 140117 - protein, 49 aa, Unknown
  Bacterial polypetide isolated from the Sargasso Sea
ALGGIRDEAEVRGHRRTYIGSLPGKIIQGLKKSKFNNPLFLLDEIDKIG

SEQ ID NO: 140118 - protein, 317 aa, Unknown
  Bacterial polypetide isolated from the Sargasso Sea
ELLRTNPLYGEEVKQYLSRFGPEDSSPLADFGASMTSAPGRELQDVLDTVPLLRRMEKVLLLMRKEQEVARLQSEINEEVNEKVQKHQREFFLREQLKVIQRELGIAKDDKTADVERFEERMAKLNPPDTVQDRFKDEIQKLQVLEQGSPEYGVTRNYLDWITQVPWGVHSEDHFDLAEARRILDRDHDGLDDVKDRIIEFLAEGTFKGEVSGSILLLVGPPGVGKTSIGRSVADALGREFYRFSVGGMRDEAEIKGHRRTYIGAMPGKFVQALKDSKVANPVIMLDEIDKIGSSYQGDPASALLETLDPEQNKEFL

SEQ ID NO: 140119 - protein, 191 aa, Unknown
  Bacterial polypetide isolated from the Sargasso Sea
MNVTYTKPLLPLRDIVIFPSIVVPLFVGRDKSIKALQEAMKTDKSIILVAQKNSEVDDPTEKDLFSFGCMSKVLQLLKLPDGTVKVLVEGQKRVKITKIKNESSFLNCDLEIAEDTNISKDLDIFAQGLVKKFEKLIVLNKKDFNENLNIIKNSKDAKIIADNIAANLNLKIFQKQEILEIRDLRKRLEKI

SEQ ID NO: 140120 - protein, 121 aa, Unknown
  Bacterial polypetide isolated from the Sargasso Sea
MENQIIGPVLPLRDLVVYPSITSPLFVGRAKSIDAINFAMNNNNKIIYLFTQKEPTTDDPQVNDVYTYGVKSKIIQFLKLPDNTYKVLTEGLEIVKIKSAVKASNNFLTAKIEPVVINKKN

SEQ ID NO: 140121 - protein, 88 aa, Unknown
  Bacterial polypetide isolated from the Sargasso Sea
MNNTTLPVLPLRDIVIFPGMVAPLFVGRAQSVNALNHAMTSDKKIFLLAQKNSEIDNPKKSDLYKCGTIAKVLQLLKLPDGTIKVLVE

SEQ ID NO: 140122 - protein, 230 aa, Unknown
  Bacterial polypetide isolated from the Sargasso Sea
MEVKFNTALLPLRDIVVFPCMVIPLFVGRDKSINALNEVMKKDKKIILVTQKNSDVDDPKRNDIFNYGCESSILQLLKLPDGTVKVLVEGLTRVKISDFKDKENYLFCEYEKVNDILSSDEDLMSLALNSIKKLEKLTSINKKISNETINNIKTLKDPSKIADNVASHLSTTISEKQQVFETFDLKKRLNLINKIMDNETSIIGVEKRIRGRVKTLDGKNSKRILLKRTT

SEQ ID NO: 140123 - protein, 126 aa, Unknown
  Bacterial polypetide isolated from the Sargasso Sea
MRSTYLKPLLPLRDIVIFPSMVVPLFVGREKSIKALQEVMKSDKSIVLVTQKNSEIDDPVGKDLFQYGCLSKVLQLLKLPDGTVKVLVEGEKRVKILKHNEDKEDFLTCEVEAIEDQNISKDLDQL

SEQ ID NO: 140124 - protein, 116 aa, Unknown
  Bacterial polypetide isolated from the Sargasso Sea
VIPLFVGRDKSITALNEVMKDNKKIILVTQKNSEVDDPKKNDLFSFGCESTILQLLKLPDGTVKVLVEGLKRVKLVDFKDQEKFINCVYEYQNDIVSTDENLYPLATIALRRLEKL

SEQ ID NO: 140125 - protein, 274 aa, Unknown
  Bacterial polypetide isolated from the Sargasso Sea
WSEDLEREIAKTCRKVATQLVKKTKLSKVVVTSKRVQKFLGVPRYKHAKAEEKNQIGTTCGLAWTQAGGELLVTEVNIMKGTGKLQLTGKLGDVMKESAQAALSYVRTNANRLGIFSSVFEKTDIHIHVPAGAVPKDGPSAGVTIATSLVSAFTSIPVRNEVAMTGETTLRGKVLAIGGLKEKLLAAKRGVIYTVIIPDKNKKDLSEIPEEIQNGLEIIPVNTVEEVLNKSLERFPSPVIDPVSEDEEDSNKENPEATILTETESSDSPRTYDA

SEQ ID NO: 140126 - protein, 103 aa, Unknown
  Bacterial polypetide isolated from the Sargasso Sea
MKSKRNIPVLPLRDIVVFPQMVAPLFVGRKLSVNALNHVMQSDKKILLITQKKSEIDSPLPSDLYSVGTLAKILQLLKLPDGTIKVLVEGIDRVKVSNIKSTE

SEQ ID NO: 140127 - protein, 271 aa, Unknown
  Bacterial polypetide isolated from the Sargasso Sea
IIDSIKDLALKIIEENPSIPSEASFAIKNIHSSSFLVNFVSSNMNISVAEKFKILSIDDLQKRALRCLKFMDVEFQKLSLKNDIQSKVRNDLDQQQREYFLNQQLKTIQEELGGSSNHQDIDEMKLKSNSKKWNKEVGNHFNKELIKLQRMNSQAAEYSIQRNYLDLMLDLPWNEYSKDNFSLNNAQKTLNKDHYGLDDVKRRIIEQIAVMKLRGDMNSPILCFYGPPGVGKTSLGKSIAESLGREYVRISLGGLRDEAEIRGHRKTYIGA

SEQ ID NO: 140128 - protein, 103 aa, Unknown
  Bacterial polypetide isolated from the Sargasso Sea
MDIKVTLPLLPLRDIVVFPSMVIPLFVGRDKSITALNEVMKGDKKIVLVTQKNSEVDDPKKNDVFTYGCESNILQLLKLPDGTVKVLVEGTKRVKIVDLKMMK

SEQ ID NO: 140129 - protein, 188 aa, Unknown
  Bacterial polypetide isolated from the Sargasso Sea
MKTSYLKPLLPLRDIVIFPSMVVPLFVGREKSIKALQEVMKSDKSIVLVTQKNSEIDDPIGKDLFQYGCLSKVLQLLKLPDGTVKVLVEGEKRVKINKYEENTNYLTCEVEVIEDQNVTKDLEQFSIGLVKKFEKLQILSKKDFNETSNNLKNLKNPSHIANNISSNLNIQIFEKQELLEITDLKKKL

SEQ ID NO: 140130 - protein, 182 aa, Unknown
  Bacterial polypetide isolated from the Sargasso Sea
MEVKSTQPLLPLRDIVVFPSMVIPLFVGRDKSITALNEVMKSDKKIVLVTQKNSEVDDPKKNDVFSYGCESNILQLLKLPDGTVKVLVEGIKRVKIVDFKDDEKFITCTYEHQKDILTKDEDLLPLALTAVRRLEKLTSVNKKISSETINNIKQLKDPSKIVDNIVSNLNASISEKQQIFRN

SEQ ID NO: 140131 - protein, 145 aa, Unknown
  Bacterial polypetide isolated from the Sargasso Sea
PKDGPSAGVTITTSLVSAFTGIPVLREVAMTGEVTLRGKVLPIGGLKEKLLAAKRGMMKTVLIPAKNEKDLTEVPEEIKTELQILSVENMDTVLERALECVPISVSDPEDDNKDERKLSEEESLVPQQKGNLTEPPFEVPNFPQH

SEQ ID NO: 140132 - protein, 223 aa, Unknown
  Bacterial polypetide isolated from the Sargasso Sea
MKKSNSDELVFPVLPLRDVIVFPNMVIPLFVGRDKSIKSLEVAMDNNKQIMLVAQKTADLDDPQDDDIYRFGTLATVLQLLKLPDGTIKVLVEGGSRAEIEGQIYGNDYFEARVNIVDEEIVDDREIEILSRSVIDSFDQYVKLNKKIAPEVMTSLSGIDDPSRLADTIAAHMVLKMEDKQAILEISDVKGRIENIISLIENELDILQVEKKIRGRVKNQMEK

SEQ ID NO: 140133 - protein, 119 aa, Unknown
  Bacterial polypetide isolated from the Sargasso Sea
VSVLTGIPVRKDIAMTGEVTLRGKALGIGGLKEKLLAALRAGTKTVIIPKENEKDMADIPDNVKDGLELIFVDNVDEVLKIALTKPLLPIEWDEDDSPKSTKDISEDDADQDVDNPITH

SEQ ID NO: 140134 - protein, 161 aa, Unknown
  Bacterial polypetide isolated from the Sargasso Sea
MNNTTLPVLPLRDIVVFPSMVAPLFVGRIQSVNALNHAMTSDKKIFLLAQKNSEIDNPKKSDLYEWGTIAKVLQLLKLPDGTIKVLVEGITRARLNTLNLSNDFLTAKINKIDTKIKKNNNLKTLVKIVIDQFQDYSKVNKKIPSDIVNNLISISDPNKIA

SEQ ID NO: 140135 - protein, 130 aa, Unknown
  Bacterial polypetide isolated from the Sargasso Sea
MEVKSSLPLLPLRDIVVFPSMIIPLFVGRDKSISALSEVMKNDKKIIVVTQKNSEVDDPKKTDVFNYGCEGNILQLLKLPDGTVKVLVEGNKRVKILDFVENEKFIACDFSYHNDQISKNENLLPLALIA

SEQ ID NO: 140136 - protein, 106 aa, Unknown
  Bacterial polypetide isolated from the Sargasso Sea
MTSENSKPLLPLRDIVIFPSTVIPLFVGRKKSIKALEEVMKTDKSIVLVAQKNSEEDDPNEEDIYSFGCLSKILQLLKLPDGTVKVLVEGTERVKIKFIKKEEKNI

SEQ ID NO: 140137 - protein, 245 aa, Unknown
  Bacterial polypetide isolated from the Sargasso Sea
IFLLSQKNSKVDNPDKENLYSFGTVAKIIQLLKLPDGTLKVLVEGIQRAKVNKISFNKEFITASITEINQKAKKNSNIKALQKLIIEQFVEFQKINKKVSQDVVNNVKVLNDPDKIVDIIVSNISISLSQKQEILEIINTEERLNKIYGYLVSEIDSFQVEKKIKGRVKRQMEKTQKEYYLNEQMKAIQKELGENEDLDEIAELEKKLNQYNLSKEAKEKCTSEIKKLKNMSPMSAEATVIRNYL

SEQ ID NO: 140138 - protein, 108 aa, Unknown
  Bacterial polypetide isolated from the Sargasso Sea
MSVETQTLPVLPLRDVVVYPHMVIPLFVGREKSIKALDKAMEGNKQILLIAQKSPTDDDPGENETYDVGTMANILQLLKLPDGTIKVLVEGTSRASVSNYKETDGMCV

SEQ ID NO: 140139 - protein, 125 aa, Unknown
  Bacterial polypetide isolated from the Sargasso Sea
MDVKTSLPLLPLRDIVVFPSMVIPLFVGRDKSISALNEVMKKEKKIILVTQKNSEIDDPKKTDIFMYGCEGSILQLLKLPDGTVKVLVEGTKRVKILDFKDNEKFITCDFTPYHDITNDSEDLYP

SEQ ID NO: 140140 - protein, 267 aa, Unknown
  Bacterial polypetide isolated from the Sargasso Sea
AKVLQLLKLPDGTIKVLVEGMTRARLTSLDLSNDFLTVKIKQITNKNKNNNKLKALVKIVIDQFQDYSKVNKKIPSDIVSNLLTMSDPNKIADVVSINLNINMEQKQELLEMHDLEKRLNKIHIYLVSEIDSFQMEKKIKGRVKRQMEKTQKEYYLNEQMKAIQKELGDNDDSDDIAEIEKKINSIKLSKDANDKCKSELKKLKNMSPMSAEATVIRNYLDWILSIPWNSKSEISKNVKKAKTILEEDHYGLDKVKDRILEIFSCSK

SEQ ID NO: 140141 - protein, 218 aa, Unknown
  Bacterial polypetide isolated from the Sargasso Sea
MDVKISLPLLPLRDIVVFPSMVIPLFVGRDKSISALNEVMKKDKKIILVTQKNSEIDDPKKTDVFMYGCEGSILQLLKLPDGTVKVLVEGIKRVKILDFTDNDKFITCDFTYFNDVLPKEEDLFPLASTALRRLEKLSSINKKISNETINTIKQLKDPSQIADNIASHITASISEKQQIFETVDVKKRLNAIIKIMENETSIIGVEKRIRGRVKTQME

SEQ ID NO: 140142 - protein, 191 aa, Unknown
  Bacterial polypetide isolated from the Sargasso Sea
KLNLTGKLGDVMKESAQAALSYVRTNANRLGIFSSIFEKKDIHIHVPAGAVPKDGPSAGVTIATSLVSAFTSIPVRNEVAMTGETTLRGKVLAIGGLKEKILAAKRGVISTVIIPEKNRKDLSEIPEEIQNGLEIIPVKTVEEVLNIALERFPSPVIDPVSEDEEVSNEESPEATILPETESSDSPRTYDA

SEQ ID NO: 140143 - protein, 154 aa, Unknown
  Bacterial polypetide isolated from the Sargasso Sea
MELKVNLPLLPLRDIVVFPSMVVPLFVGRDKSISALNEAMKQDKKIVLVTQKNSEVDDPKKNDIFMYGCESNILQLLKLPDGTVKVLVEGNKRVKIVDFKDDEKFITCSFVQITDQIDNNEDLMPLATTAVRRLEKLTSINKKISSETINSIKE

SEQ ID NO: 140144 - protein, 134 aa, Unknown
  Bacterial polypetide isolated from the Sargasso Sea
FHIHVPEGATPNYGPSAGIGMVTSIVSSITNIPVKRDVAMTGEVTLTGQVLPIGGLKEKLIAAHRAGIKVVLIPKENEKDLVDMPKKIVDEIKIMPVEYADEVLKIALTKELKKTEWVEVDMTKKDDKSQASIQ

SEQ ID NO: 140145 - protein, 155 aa, Unknown
  Bacterial polypetide isolated from the Sargasso Sea
MDIKVTLPLLPLRDIVVFPSMVIPLFVGRDKSITALNEVMKGDKKIVLVTQKNSEVDDPKKNDVFTYGCESNILQLLKLPDGTVKVLVEGTKRVKIVDFKDDEKFIKCSFEYQKDIISKEDDLLPLSLTAIKRLEKLTSVNKKISSETINNIKQL

SEQ ID NO: 140146 - protein, 76 aa, Unknown
  Bacterial polypetide isolated from the Sargasso Sea
TGEITLRGRVLPIGGLKEKLLAALRGGLSTVLIPKENEKDLAEIPDNVKSGLNIIPVSVVDEVISNALTTEPVPVD

SEQ ID NO: 140147 - protein, 187 aa, Unknown
  Bacterial polypetide isolated from the Sargasso Sea
MEVKHSSPLLPLRDIVVFPNMVIPLFVGRDKSITALNEVMKNNKKIILVTQKNSEVDDPKKTDVFMYGCESSILQLLKLPDGTVKVLVEGLKRVKLIDFNDDEKFITCSYQYNNDVSPEGEDLMPLATIAIRRLEKLTSINKKISSEIISNIKDLKDPAKIADNIASHLNSTISEKQQLLKLPMLKK

SEQ ID NO: 140148 - protein, 122 aa, Unknown
  Bacterial polypetide isolated from the Sargasso Sea
MEVKHTSPLLPLRDIVVFPSMVIPLFVGRDKSINALNEVMKDNKKIILVTQKNSEVDDPKKTDVFMYGCESSILQLLKLPDGTVKVLVEGLKRVKIIDFQDDEKFITCSYEHNNDLISKDED

SEQ ID NO: 140149 - protein, 115 aa, Unknown
  Bacterial polypetide isolated from the Sargasso Sea
MEIKHSLPLLPLRDIVVFPSMVIPLFVGRDKSISALNEVMKNDKKIILVTQKNSEIDDPKKTDIFHYGCEGSILQLLKLPDGTVKVLVEGIKRVKILDFKDNEKFIVCDYSHYQD

SEQ ID NO: 140150 - protein, 116 aa, Unknown
  Bacterial polypetide isolated from the Sargasso Sea
MSKNIIHPSLPLRDIVVFPSMIVPLFVGRDKSIRALNEAMKSGKKIVLITQKNAEIDDPGSEDIYSYGCESKILQLLKLPDGTVKVLVEGVNRVKILECKNEKEFLSCETGNCKRI

SEQ ID NO: 140151 - protein, 179 aa, Unknown
  Bacterial polypetide isolated from the Sargasso Sea
MEVKISLPLLPLRDIVVFPSMVVPLFVGRDKSISALNEVMKNDKKIILVTQKNSEIDDPTKTDIFMNGCEGNILQLLKLPDGTVKVLVEGIKRVKILDFKDNDKFIICDYTPYEDVINKEEDLYPLAVTAVRRLEKLTSINKKISSETINSIKQLKDPSQIADNIASHITATISEKQQI

SEQ ID NO: 140152 - protein, 164 aa, Unknown
  Bacterial polypetide isolated from the Sargasso Sea
MDIKVTLPLLPLRDIVVFPSMVIPLFVGRDKSITALNEVMKGDKKIVLVTQKNSEVDDPKKNDVFTYGCESNILQLLKLPDGTVKVLVEGTKRVKIVDFKDDEKFIKCSFEYQKDILLKEDDLLPLSLTAIKRLEKLTSVNKKISSETINNIKQLKDPSKMQII

SEQ ID NO: 140153 - protein, 291 aa, Unknown
  Bacterial polypetide isolated from the Sargasso Sea
QKDASNEDPTFKDIYHFGTVSNLLQLIKLPDGTMKVLVEGAKRCKIDKISESKGLTKAAVTEIDDDIIKVSDSMNLVKFIKTKFNDYVSSTKKIPPEILSTIDAIDDLSKLIDNIVNHLNIDTSQKQEILEIFDLQKRSESILTFIESQLDVIDVEKRIRSRVKKQMEKSQREYYLNEKIKAAQKELGEMGEEGDEFEVLKNKIEDSGMSKEAMKKAKSEFSKFKMMSPTSAEASVVRSYLECLIDVPWKKRGKVKSDIKAALVTLNDDHYGLEEVKDRILEYLAVQKRVK

SEQ ID NO: 140154 - protein, 161 aa, Unknown
  Bacterial polypetide isolated from the Sargasso Sea
MDVKISLPLLPLRDIVVFPSMVIPLFVGRDKSISALNEVMKKDKKIILVTQKNSEIDDPKKTDVFMYGCEGSILQLLKLPDGTVKVLVEGIKRVKILDFKDNEKFITCDYTFYNDVLPKDEDLFPLAVTALRRLEKLTSINKKISNETISTIKQLKDPSKI

SEQ ID NO: 140155 - protein, 200 aa, Unknown
  Bacterial polypetide isolated from the Sargasso Sea
MKASYLKPLLPLRDIVIFPSMVVPLFVGREKSIKALQEVMKSDKSIVLVTQKNSEVDDPVGKDLYQYGCLSKVLQLLKLPDGTVKVLVEGEKRIKILKHNESTNNFLNCEVEIVEDQNTSKDLEQFASGLIKKFERLQTLSKRELNDGSINIKNLKDPSQIANNISSNLNIQIFEKQELLEITDLKKRLEKIHSIIEKET

SEQ ID NO: 140156 - protein, 162 aa, Unknown
  Bacterial polypetide isolated from the Sargasso Sea
SVFKETDIHVHVPEGAVPNDGPSAGVTITTSLVSAFTGIPVLREVAMTGEVTLRGKVLPIGGLKEKLLAAKRGMMKTVLIPAKNEKDLTEVPEEIKTELQILSVENMDTVLEKALECVPISVSDPEDDNKDERKLSEEESLVPQQKGNITEPPFEVPNFPQH

SEQ ID NO: 140157 - protein, 140 aa, Unknown
  Bacterial polypetide isolated from the Sargasso Sea
MEVKFSLPLLPLRDIVVFPNMVIPLFVGRDKSINALNEIMKKEKKIILVTQKNSEVDDPTKNDVFTFGCESNILQLLKLPDGTVKVLVEGINRIKITDYSDNKDFITCSYEKVIDQINKEEDLMPTALSAIKKLEKLTSI

SEQ ID NO: 140158 - protein, 287 aa, Unknown
  Bacterial polypetide isolated from the Sargasso Sea
IFLVAQKDANVDEPGQKDIYDFGTVANILQLLKLPDGTVKVLVEGLERAKVSHHLENPDFFEAYLDKLEVPNYENDKETNALLRTAISQFENYVKLNRKVPPEILVSLNQISDLNKLADTMSAHLGIRLSEKQDLLECLSVKNRLSKVIEFMDNEIGVLQVEKKIRSRVKRQMDKTQKEYYLNEQIKAIQKELGETSDPKDEITEIEQKLKKINLSDEASEKVKAEIKKLKHMGPMSAEATVVRNYLDWIISIPWNNNSETNVNLNKALKVLNEDHFGLSKVKDRII

SEQ ID NO: 140159 - protein, 121 aa, Unknown
  Bacterial polypetide isolated from the Sargasso Sea
MEVKITQPLLPLRDIVVFPSMVIPLFVGRDKSITALNEVMKGNKKIILTTQKNSEVDDPKKNDIFSYGCESNILQLLKLPDGTVKVLVEGIKRVKIIDFKDDEKFISCTFEYLKELSTKEE

SEQ ID NO: 140160 - protein, 266 aa, Unknown
  Bacterial polypetide isolated from the Sargasso Sea
MEEPHFAAVVEPIPENISSAPELIALSKNVRTEFKRYLKDVKRRTEGIEKLSVDADEPYILSDRIAPLLNMELRKKQDLLENADPKRRLEIVYGRMLEEKEFKKVERKLKERVQGQIGRTQKEYYLNEQVKAIQKELGHGEDGKAEMDEYAKKIEEVKLSVEAKEMAEKELKKLKMMPSMSSEANVVRNYLDWLLCMPWDEKTEDNFDFEKAEEILDARHYGLEKVKERIIEYLAVAQQVGKMKGPIICLVGPPGVGKTSLARSVA

SEQ ID NO: 140161 - protein, 133 aa, Unknown
  Bacterial polypetide isolated from the Sargasso Sea
MDIKVTLPLLPLRDIVVFPSMVIPLFVGRDKSITALNEVMKGDKKIVLVTQKNSEVDDPKKNDVFTYGCESNILQLLKLPDGTVKVLVEGTKRVKIVDFKDDERFIKCSFEYQKDIVSKDDDLLPLSLTAIKR

SEQ ID NO: 140162 - protein, 105 aa, Unknown
  Bacterial polypetide isolated from the Sargasso Sea
MKASYLKPLLPLRDIVIFPSMVVPLFVGREKSIKALQEVMKSDKSIVLITQKNSEVDDPSSKDLYQYGCLSKVLQLLKLPDGTVKVLVEGEKRIKIVNYKEDNDN

SEQ ID NO: 140163 - protein, 109 aa, Unknown
  Bacterial polypetide isolated from the Sargasso Sea
MDIKFSSPLLPLRDIVVFPSMVIPLFVGRDKSISALNEVMKKDKKIIMVTQKNSEIDDPKKNDVFIYGCEGNILQLLKLPDGTVKVLVEGVKRVKIIDFNDNEKFINCE

SEQ ID NO: 140164 - protein, 121 aa, Unknown
  Bacterial polypetide isolated from the Sargasso Sea
MEIKKTLPLLPLRDIVVFPNMVIPLFVGRDKSIAALNDVMKQDKKIILTTQKNSEIDDPKNSDIYSFGCESNILQLLKLPDGTVKVLVEGNKRVKIVGFKEEDKFISCNYEYQTEIIKTKK

SEQ ID NO: 140165 - protein, 145 aa, Unknown
  Bacterial polypetide isolated from the Sargasso Sea
MEPKVKLPLLPLRDIVVFPNMVIPLFVGRDKSITALNEVMKGQKKIILVTQKNSEIDDPKKNDIYSYGCESNILQLLKLPDGTVKVLVEGTKRVKILDFNDEEKYISCTFEYLKDQIEPSEDLLPLSMTAVKRLEKLTNVNKKIS

SEQ ID NO: 140166 - protein, 167 aa, Unknown
  Bacterial polypetide isolated from the Sargasso Sea
MLENFLPILPLRDIVVFPHMIVPLFVGRDKSIKALEAVMSEDKKVFLIAQKDGSVEDPGEKDLYKIGTLGNILQLLKLPDGTVKVLVEGISRAKIKTFKNDDFLLADVNIINEKSSEKNDDLIGMLRAVKSQFENYSKLNKKITPEVLNSIDENDIPSKVSDIICSN

SEQ ID NO: 140167 - protein, 154 aa, Unknown
  Bacterial polypetide isolated from the Sargasso Sea
MKVSKTVAWNLIPKNIKKNIYEEMKESGNFGIHLHCPEGATPKDGPSAGGAITLCIISLLTNIQVNNEVALTGEIDLNGSIHKIGGLESKIDGGKNAGVKLILYPSQNQEDIELIKKNNPVLLENIECRPIDNIWQILDICLVKNELEFNKYLN

SEQ ID NO: 140168 - protein, 167 aa, Unknown
  Bacterial polypetide isolated from the Sargasso Sea
GGDILFIEACKMPGKGMLKLTGKLGDVMKESAQAAFSYIRTNAKKYGIDPNFYKKHDIHIHVPAGAIPKDGPSAGVAMITSMVSLLTNKPVKSMLGMTGEISLRGNVLPIGGLKEKSTAAHRSGLKEIIAPHLNKKDLEEIPSKVKKDLKITFVKDVEEVVKLALDI

SEQ ID NO: 140169 - protein, 267 aa, Unknown
  Bacterial polypetide isolated from the Sargasso Sea
MNKSKNILESAIHGHSSAKRQIERIIGQWISGDLDGYCFGFEGPPGVGKTSLAKKGIANCLTDENNNPRPFSFIAVGGSSNGSTFEGHNYTYVGSTWGKIVDVIIESKCMNPIIFIDELDKISKTEHGKEIIGILTHLIDPAQNNTFQDRYFSGIDLDLSKALFIFSYNDANIIDKILLDRIHRIKFKHLTIDEKIIITNDYILPELYKKMGLENTLIIDEDVIKFIIQEYTYEAGVRNLKQHLFDIIGEINLKLLTGNFTEPIPFK

SEQ ID NO: 140170 - protein, 87 aa, Unknown
  Bacterial polypetide isolated from the Sargasso Sea
MVKNLLPVLPLRDIVVFPSMVAPLFVGREQSVNALNHVMTGDKKIFLLSQKNSKIDNPNKDNLYTFGTIAKIVQLLKLPDGTLKVLV

SEQ ID NO: 140171 - protein, 129 aa, Unknown
  Bacterial polypetide isolated from the Sargasso Sea
MTTQNLKPLLPLRDIVIFPSTVIPLFVGRKKSIKALEEVMKTDKSIVLVAQKNSEVDDPKEGDIYSFGCLSKILQLLKLPDGTVKVLVEGVERVKIKSINKEEKKYLNCEIQIVSSTEDNQSSKNWRQI

SEQ ID NO: 140172 - protein, 161 aa, Unknown
  Bacterial polypetide isolated from the Sargasso Sea
FKQTGQLGDVMIESTEIAYTYVRSIGIKDKNIQKFFAENFVHLHVPAGATPKDGPSAGITMACSLYSLVTQVPVIPNLAMTGELTLTGLVMPVGGIKEKTIAARRSGINLLILPAENQKDFDDLDENIKGGIKTYFVKNFTEVLPICFPDRLDRRKKTSSK

SEQ ID NO: 140173 - protein, 108 aa, Unknown
  Bacterial polypetide isolated from the Sargasso Sea
MSNKSKFPVLPLRDVIVFPNMVIPLFVGRSKSIAALDAAMEDNKQIFLVAQKNADNDNPSQKDVYKNGTLSTILQLLKLPDGTIKVLVEGSQRAAIDGDIIDDNYLQA

SEQ ID NO: 140174 - protein, 213 aa, Unknown
  Bacterial polypetide isolated from the Sargasso Sea
MLKNTIPVLPLRDIVVFPNMVAPLFVGRQQSVNALNHVMTGDKKIFLLSQKNSKVDNPNQDNLYSFGTVAKIIQLLKLPDGTLKVLVEGIQRAKVNKINFYKEYITATIVEINQKNKKSSNIKALQKLIIEQFSEFQKINKKVSLDVINNVRTINDPDKIVDIIVSNISISLSQKQEILEIINTEDRLNKIYGYLVSEIDSFQVEKKIKGRVK

SEQ ID NO: 140175 - protein, 120 aa, Unknown
  Bacterial polypetide isolated from the Sargasso Sea
IVSVLTGIPVRKDIAMTGEVTLRGKALGIGGLKEKLLAALRAGTKTVIIPKENEKDMADIPDNVKDGLELIFVDNVDEVLNIALTKPLLPIEWDEDDSPKSSNDISEDDTEQDVDNPITH

SEQ ID NO: 140176 - protein, 185 aa, Unknown
  Bacterial polypetide isolated from the Sargasso Sea
ARLVELEEVEGYQSAEIELLEEGALDERESEVLVRSLMSQFEQFVQLGKKVPAEVVSSLSSIDEPGRLVDTMVAHLSLKLDEKQKILEILPLRDRVEHVLGVLDGEIDLLQVEKRIRGRVKKQMERSQREYYLNEQMKAIQKEMGNLDEGEGEFDELRRKIDNAGMPEEALSKANAELNKLKMMS

SEQ ID NO: 140177 - protein, 117 aa, Unknown
  Bacterial polypetide isolated from the Sargasso Sea
MEVKQNLPLLPLRDIVVFPSMVIPLFVGRDKSITALNEVMKDNKKIVLVTQKNSEVDDPKRNDLFSFGCESTILQLLKLPDGTVKVLVEGLKRVKIVDFIEQEKFISSVYEYQNDVN

SEQ ID NO: 140178 - protein, 103 aa, Unknown
  Bacterial polypetide isolated from the Sargasso Sea
AKQQIFETLDVKKRLNAAIKMMESETSIIGVEKRIRGRVKTQMEKTQREYYLNEQLKAIQKELGEIEDGKDETTNLKKSIQKAKMPKEVEKKCMSELKKLKNM

SEQ ID NO: 140179 - protein, 81 aa, Unknown
  Bacterial polypetide isolated from the Sargasso Sea
MFRRLDIKVRGSMSKSDKSSIFPVLPLRDIVVFPHMIVPLFVGREKSVRALEDVMKDDKQILLMTQRKPGDDDPKPDDMYK

SEQ ID NO: 140180 - protein, 115 aa, Unknown
  Bacterial polypetide isolated from the Sargasso Sea
SSLTAIKVKKDVSMTGEITLRGRVLPIGGLKEKLYAAVRAGIKTVIIPEENKKDLSELDKEILKNIKIFPISEAKSILQHSLSKKIKPINTSESETIKSIESSIQSDNLRKSTTH

SEQ ID NO: 140181 - protein, 292 aa, Unknown
  Bacterial polypetide isolated from the Sargasso Sea
MSKKNQKIPLLPLRDVVIFPSVVTPLFVGREKSITALQAAMAGDKQIMLVAQKSAQQDNPKLGDLYPIGTLSTILQLIKLPDGTLKVLVEGNQRASIESLEASDEYMSVQVSTIDEEAESKELDHFLPSLKKQFQEYVKLTRKATPEVLNTVNAIDSLSRLTDTLVGHLSIDISQKQEILEMISLTDRANRILEHLDSQLDLSKVEKKIRGRVKTQMEKSQKEYYLNEQMKALKKELGEIDEAEEAEELETKIKEAGMTKEAQEKALTELQKYKKMSPMSAEASVVRGYIDW

SEQ ID NO: 140182 - protein, 256 aa, Unknown
  Bacterial polypetide isolated from the Sargasso Sea
NIHSSSFLVNFVSSNMNISVVEKFKILSINDLQKRALRCLKFMDVEFQKLSLKNDIQSKVRNDLDQQQREYFLNQQLKTIQEELGGSSNHQDIDEMKLKSNSKKWNKEVSNHFNKELIKLQRMNSQAAEYSIQRNYLDLMLDLPWNEYSKDNFSLNNAQKTLNKDHYGLDDVKRRIIEQIAVMKLRGDMNSPILCFYGPPGVGKTSLGKSIAESLGREYVRISLGGLRDEAEIRGHRKTYIGAMPGRIVQNLKRVK

SEQ ID NO: 140183 - protein, 27 aa, Unknown
  Bacterial polypetide isolated from the Sargasso Sea
RVGVVTGLAWTEVGGRTFKNRISGDAR

SEQ ID NO: 140184 - protein, 53 aa, Unknown
  Bacterial polypetide isolated from the Sargasso Sea
MVKNFIPVLPLRDIVVFPNMIAPLFVGREQSVNALNNVMSGDKKIFLLSQKEF

SEQ ID NO: 140185 - protein, 168 aa, Unknown
  Bacterial polypetide isolated from the Sargasso Sea
MNKKNIPVLPLRDIVVFPYMVAPLFVGRKQSVNALNNVMTGDKKIFLLAQKNSEVDNPTDSNLYKYGTIAKILQLLKLPDGTIKVLVEGVERAKAEKIFINKDFITANISNVESINKNNNNIKALVKIVIEQFESYHKINKKISTEVLSNVQKCTNSNQIADIIAVNL

SEQ ID NO: 140186 - protein, 179 aa, Unknown
  Bacterial polypetide isolated from the Sargasso Sea
MTTESKKPLLPLRDIVIFPSIVVPLFVGRKKSIKALEEVMKSDKSVVLVTQKNSEVDDPGEKDIYSYGCLSKVLQLLKLPDGTVKVLVEGLARVKILEIEDDVKKYLSCKTQIIEADKENEEHKVFASNLIKKFEKLSSLNKKDVSDFTKGLKSLKNAHQLADNICSNLNIQIFEKQAL

SEQ ID NO: 140187 - protein, 116 aa, Unknown
  Bacterial polypetide isolated from the Sargasso Sea
MVTSIISAITEIPVNKDVAMTGEITLRGLVLPIGGLKEKLLAAHRAGIKKVLIPLENKKDLVEVPKTILDSMEIITVKNVDEVLKIALTKSLKPVKWVEVEQLSENKTKPGVSSRH

SEQ ID NO: 140188 - protein, 116 aa, Unknown
  Bacterial polypetide isolated from the Sargasso Sea
MNLTYTKPLLPLRDIVIFPSIVVPLFVGREKSIKALQEAMKTDKSIILVAQKNSEIDDPKDKDLYAFGCLSKVLQLLKLPDGTVKVLVEGQKRVKIVKVQNEKEFLNCEVELAEDT

SEQ ID NO: 140189 - protein, 121 aa, Unknown
  Bacterial polypetide isolated from the Sargasso Sea
MDVKISLPLLPLRDIVVFPSMVIPLFVGRDKSISALNEVMKKDKKIILVTQKNSEIDDPKKTDVFMYGCEGNILQLLKLPDGTVKVLVEGIKRVKILDFKDNEKFITCDYTHYNDVHQKMR

SEQ ID NO: 140190 - protein, 265 aa, Unknown
  Bacterial polypetide isolated from the Sargasso Sea
DNSKSAIVQGISRVKILDYTSEKPYFTAAVESISDEPIKDHLEIDRLTKNLRQAFEDLMKVAPNLTEEHSGMLKNIQKPNRLTDRAVSVITISNQEKQDILEELNIKRRIEKALNIISREIQRIKLGDEIQSEVHDEITKTQREYYLREQMKAIKKELGEDEGTVELNELEDKIKAAQMPKESEKIALKELDRLSRIPTQSPEYNVSRTYIEWLTDLPWSIRSEDRIDLKEAKKILDEDHYGLDKVKERIIEYLAVRNLKQKKDP

SEQ ID NO: 140191 - protein, 36 aa, Unknown
  Bacterial polypetide isolated from the Sargasso Sea
RIIEFLAVQKRMEKIKGPILCLVGPPGVGKTSLGKS

SEQ ID NO: 140192 - protein, 168 aa, Unknown
  Bacterial polypetide isolated from the Sargasso Sea
MEVKISSPLLPLRDIVVFPSMVIPLFVGRDKSITALNEVMKKDKKIILVTQKNSEIDDPKKTDVFMYGCEGSILQLLKLPDGTVKVLVEGIKRVKILDFKDNDKFIICDYTYHNDILPNEEDLFPLAATALRRLEKLTTINKKISNETINTIKQLKDPSQIADNIASH

SEQ ID NO: 140193 - protein, 307 aa, Unknown
  Bacterial polypetide isolated from the Sargasso Sea
DASNEDPTFKDIYHFGTVSNLLQLIKLPDGTMKVLVEGSKRCQIEKINETKGVTKAVVTEIDDDVIKVSDSMNLVRFIKTKFNDYVASTKKIPPEILSTIDAIDDLSKLIDNIVNHLNIDTSQKQEILEIFDLQKRSESLLTFIESQLDVIDVEKRIRSRVKKQMEKSQREYYLNEKIKAAQKELGEIGEEGDEFQVLKNKIEKAGMSKEALKKAKSEFSKFKMMSPTSAEASVIRSYLECLIDVPWKKRGKVKSDIKLALDTLNDDHYGLEEVKDRILEYLAVQKRVKNLKAPVLCLVGPPGRWKN

SEQ ID NO: 140194 - protein, 142 aa, Unknown
  Bacterial polypetide isolated from the Sargasso Sea
MDIKITLPLLPLRDIVVFPSMVIPLFVGRDKSISALNEVMKKDKKIILVTQKNSEIDDPKKTDVFMYGCEGNILQLLKLPDGTVKVLVEGIKRVKILDFKDNDKFITCDYSHQNDIVDKDQDLYPIAATAIRRLEKLTSINK

SEQ ID NO: 140195 - protein, 153 aa, Unknown
  Bacterial polypetide isolated from the Sargasso Sea
MNINSIPVLPLRDIVVFPHMIAPLFVGRKPSVNALNHVMIKDKKILLVTQINPEVDSPNSDHLYKVGTLAKVLQLLKLPDGTIKVLVEGLERANIKEFGSKNDFLIANYSPLKFKSKNNSNIRALVKIILEQFESYQKMNKKISSEIISNLKT

SEQ ID NO: 140196 - protein, 276 aa, Unknown
  Bacterial polypetide isolated from the Sargasso Sea
MLSQKDSKIDNPTKENLYKVGTIAKVIQLLKLPDGTLKVLVEGVQRATVSKINFNKEFITASIIEINKKTKRNSNIKVLQKLIIEQFVEFQKINKKVSIDVVNNTKSLNDPDKVVDIIVSNISISLAQKQEVLEILNTEDRLNKVYGHLVSEIDSFQVEKKIKGRVKRQMEKTQKEYYLNEQMKAIQKELGENEDMDEITELENKLNKYNLSKEAKDKCISEIKKLKNMSPMSAEATVIRNYLDWVMSIPWNNPDQISKNINKASSILENDHYGLE

SEQ ID NO: 140197 - protein, 291 aa, Unknown
  Bacterial polypetide isolated from the Sargasso Sea
IPSEASFAIKNIHSSSFLVNFVSSNMNISVAEKFKILSIDDLQKRALRCLKFMDVEFQKLSLKNDIQSKVRNDLDQQQREYFLNQQLKTIQEELGGSSNHQDIDEMKLKSNSKKWNKEVSNHFNKELIKLQRMNSQAAEYSIQRNYLDLMLDLPWNEYSKDNFSLNNAQKTLNKDHYGLDDVKRRIIEQIAVMKLRGDMNSPILCFYGPPGVGKTSLGKSIAESLGREYVRISLGGLRDEAEIRGHRKTYIGAMPGRIVQNLKRVKTSNPVFVLDEIDKLSIGNQGDPSSA

SEQ ID NO: 140198 - protein, 32 aa, Unknown
  Bacterial polypetide isolated from the Sargasso Sea
VTFNDHYLEVDYDLSDVMFVQQQTHKIFCLLY

SEQ ID NO: 140199 - protein, 98 aa, Unknown
  Bacterial polypetide isolated from the Sargasso Sea
DVAMTGEITLRGLVLPIGGLKEKLLAAHRAGIKKVLIPVENKKDLMEVPKTILENIEIIPVKNVDEVIKIALTKPLKRVEWVEVDQISKKEKEELSRH

SEQ ID NO: 140200 - protein, 124 aa, Unknown
  Bacterial polypetide isolated from the Sargasso Sea
MDVKISLPLLPLRDIVVFPSMVIPLFVGRDKSISALNEVMKKDKKIILVTQKNSEIDDPKKTDVFIYGCEGSILQLLKLPDGTVKVLVEGIKRVKILDFKDNEKFIMCDYTHHNDILTKDEDLF

SEQ ID NO: 140201 - protein, 157 aa, Unknown
  Bacterial polypetide isolated from the Sargasso Sea
MEVKLTQPLLPLRDIVVFPSMVIPLFVGRDKSITALNEVMKSDKKIILVTQKNSEVDDPKKNDVFSYGCESNILQLLKLPDGTVKVLVEGIKRVKIIDFKDDEKFIICTYEHQKDVLNKDEDLLPLALTAVRRLEKLTSVNKKISSETINNINNKRS

SEQ ID NO: 140202 - protein, 92 aa, Unknown
  Bacterial polypetide isolated from the Sargasso Sea
YTEDEKVEIVKQHLAPQMLEKHGLKSGELILDDSAITGLIRYYTREAGVRSLERELANLARKTVKKIVAGDIGSQTINEDNLHEFAGVRKFK

SEQ ID NO: 140203 - protein, 164 aa, Unknown
  Bacterial polypetide isolated from the Sargasso Sea
MDVKISLPLLPLRDIVVFPSMVIPLFVGRDKSISALNEVMKKDKKIILVTQKNSEIDDPKKTDVFMYGCEGSILQLLKLPDGTVKVLVEGTKRVKILDFKDNEKFITCDYTHYQDVLPKDEDLFPLAATALRRLEKLTSINKKISSETINTIKQLKDPSQIADN

SEQ ID NO: 140204 - protein, 184 aa, Unknown
  Bacterial polypetide isolated from the Sargasso Sea
MTKVVNITHPVLPLRDIVVFPHMIVRLFVGREKSVRALEEVMKDDKEILLASQIDASEDEPSIDTIYKTGVLANVLQILKLPDGAVKILVEGKNRVKIQEFVQTEEFFQAKAEIVEEVPGTAEEVEALRRSVVEDFERYAKLNKNVPEEAFNAIIETEEADKLADTVAGHLSIAVEKKQDLLET

SEQ ID NO: 140205 - protein, 182 aa, Unknown
  Bacterial polypetide isolated from the Sargasso Sea
MEVKFTQPLLPLRDIVVFPSMVIPLFVGRDKSITALNEVMKGDKKIILVTQKNSEVDDPKKNDIFSYGCESNILQLLKLPDGTVKVLVEGIKRVKILEFKDDEKFISCTYESQKDLTTKDEDLMPLALTAIRRLEKLNSVNKKISSETINSIKQLKDPSKIADNIASHLNSTISEKQQILKH

SEQ ID NO: 140206 - protein, 87 aa, Unknown
  Bacterial polypetide isolated from the Sargasso Sea
KNLAMTGEITLRGDVLPVGGIKEKILAAKRANIKEIILSEKNKFDIDEIDDHYLKNLKFHFVNSMREVLELSLSKEKVKNPIDLNKN

SEQ ID NO: 140207 - protein, 188 aa, Unknown
  Bacterial polypetide isolated from the Sargasso Sea
MDVKISLPLLPLRDIVVFPSMVIPLFVGRDKSISALNEVMKKEKKIILVTQKNSEIDDPKKTDIFMYGCEGNILQLLKLPDGTVKVLVEGIKRVKILDFKDNDKFINCEYTAHNDVINKDEDLYPLAATAIRRLEKLTSINKKVSNETINSIKQLKDPSQIADNIGSHINATISEKQQIFETADVKKR

SEQ ID NO: 140208 - protein, 194 aa, Unknown
  Bacterial polypetide isolated from the Sargasso Sea
MDVKNTLPLLPLRDIVVFPSMIIPLFVGRDKSISALNEVMKGNKKIVLVTQKNAEIDDPKEQDVFSYGCESNILQLLKLPDGTVKVLAEGMRRVKISDLKNNDNFMSCSFVYVNDYTPKEDNLLPLALTAIKKLEKLTSINKKVSSEIINNIKELKEPSKICDNIASHLNSTISEKQKLFETFDVSKRLNEVIK

SEQ ID NO: 140209 - protein, 246 aa, Unknown
  Bacterial polypetide isolated from the Sargasso Sea
MVSRLLELFLKVAIFIATFIGIIILSTYLYLLSELPRVDNVDQSKLQIPLKIYTSDEKLIGEFGEKKRRPLGFEEIPEDLKNAFLAAEDDGFFEHRGVSYPSLIRAFSQYIRVGLDATGGGTITMQVVRNYLLTREKKVRRKIKEIFLAFHLESAFSKEEIFEIYVNTIFLGNRSYGIEAAANTYFGKSVGELTVAESALIASLAQLPSRVNPIRNPERTKARRNWVLYRMKLLDFISEQDYQTAT

SEQ ID NO: 140210 - protein, 104 aa, Unknown
  Bacterial polypetide isolated from the Sargasso Sea
MKLLNLPILPLRDIVVFPHMVAPLFVGRKMSINALNKVMLSEKKILLITQKSSDIDNPSSKNLYNFGTVAKILQLLKLPDGTVKVLVEGLERAKVYEILDNKDF

SEQ ID NO: 140211 - protein, 256 aa, Unknown
  Bacterial polypetide isolated from the Sargasso Sea
MTKSRTKDLPLLPLRDVVIFPSVVTPLFVGRDQSIVALQASMASDKQIMLVAQKDSNTENPEQEDLYEVGTISSILQLIKLPDGTVKVLVEGSKRAKIKSVNDYKDYKAVDVTPIKEEEETDEAPTLVANLKKDFQEYVKVTRKTTPEVLHTVNSIDRLGRLTDTLVGHLSINLDQKQELLETKSLIERSKKILSHLDEQLDLTKVEKRVRGRVKKQMEKSQKEYYLNEQMKALKKELGEMDESDEAEVLEKQIKE

SEQ ID NO: 140212 - protein, 44 aa, Unknown
  Bacterial polypetide isolated from the Sargasso Sea
MIKSSIPVLPLRDIVVFPQMVAPLFVGRKLSINALNYVMSTDKK

SEQ ID NO: 140213 - protein, 76 aa, Unknown
  Bacterial polypetide isolated from the Sargasso Sea
MTLEREAHIELPVLPLRDVVVYPHMVIPLFVGREKSIRCLETAMAQDKQIILVAQRDAELDEPTKDDILKSVLWRL

SEQ ID NO: 140214 - protein, 111 aa, Unknown
  Bacterial polypetide isolated from the Sargasso Sea
GVGMFTAIVSLLSCKPVKSKVAMTGEITLRGNVLPIGGVKEKVTAAHRSGIKTIILPDHNRKDLEDIPDHIKKDLEFHFAKEMMDVIDVAIPGLNGKKKSKNSSSRIKKAV

SEQ ID NO: 140215 - protein, 129 aa, Unknown
  Bacterial polypetide isolated from the Sargasso Sea
DGPSAGIAIFNSLVSSLTTNKVRKDVAMTGEITLRGRVLPIGGLKEKIYAASRAGIKKVLIPEENKNEVTEFDKEILKYVKIIPINEAKSILEHTLVKPITPLDLTESEILEDQKNRYSDSNLKENLRH

SEQ ID NO: 140216 - protein, 124 aa, Unknown
  Bacterial polypetide isolated from the Sargasso Sea
MEVKLSQPLLPLRDIVVFPSMVIPLFVGRDKSINALNEVMKNDKKIILVTQKNSEVDDPKQNDIFSYGCESSILQLLKLPDGTVKVLVEGKKRVKILKFEDNEKFITCTYENINELESKEDLFP

SEQ ID NO: 140217 - protein, 153 aa, Unknown
  Bacterial polypetide isolated from the Sargasso Sea
MDVKITLPLLPLRDIVVFPSMVIPLFVGRDKSISALNEVMKKDKKIILVTQKNSEIDDPKKTDIFMYGCEGNILQLLKLPDGTVKVLVEGIKRTKILDFKDNDKFITCDYSYYNDIVSGDEDLYPLAVTALRRLEKLTSINKKVSSEIINTIK

SEQ ID NO: 140218 - protein, 157 aa, Unknown
  Bacterial polypetide isolated from the Sargasso Sea
MDVKITLPLLPLRDIVVFPSMVIPLFVGRDKSISALNEVMKKDKKIILVTQKNSEVDDPKNTDVFMYGCEGNILQLLKLPDGTVKVLVEGNKRVKILDFKDDEKYISCEFTHQNDEISKNEDLMPLALTAVKKLEKLTSVNKKISQDIINSIKQLKD

SEQ ID NO: 140219 - protein, 179 aa, Unknown
  Bacterial polypetide isolated from the Sargasso Sea
MISENSKPLLPLRDIVIFPSIITPLFVGRKKSIKALEEVMKTDKSIVLVAQKNSEVDEPKEEDLYSFGCLSKVLQLLKLPDGTVKVLVEGLERVKILELDNENDKYFDCKIEVISNKKEDEDSKIFANSLIKKFEKLSNLSRKDINEFTKNLKLLNNPSKIADNICSNLNIQISDKQHC

SEQ ID NO: 140220 - protein, 69 aa, Unknown
  Bacterial polypetide isolated from the Sargasso Sea
MVKNLLPVLPLRDIVVFPNMVAPLFVGREQSVNALNYVMTTDKKIFLLSQKNSKVDNPDKQNLYSFGTV

SEQ ID NO: 140221 - protein, 167 aa, Unknown
  Bacterial polypetide isolated from the Sargasso Sea
MEVKVKLPLLPLRDIVVFPNMVIPLFVGRDKSINALNEVMKGDKKIILVTQKNSEVDDPKKNDVFMYGCESNILQLLKLPDGTVKVLVEGQKRAKIIDYEDNEKFINCTYETLNNIVNKDDDLNSLSSMAIRRLEKLSNINKKIPNETINSIKEMKDPIQVADNIAS

SEQ ID NO: 140222 - protein, 140 aa, Unknown
  Bacterial polypetide isolated from the Sargasso Sea
KKDFHIHVPEGATPKDGPSAGIAMVTSIVSSITKNPVDKNIAMTGEVTITGQVLPIGGLKEKLLAAHRAGINQVIIPKENEKDLIDIPKKVREDIKVTVVENVDEVLKIALKKELKRVEWTEVENISKTDKDQKSQASIQ

SEQ ID NO: 140223 - protein, 175 aa, Unknown
  Bacterial polypetide isolated from the Sargasso Sea
VESTKMTGKGKLTLTGQLGDVMKESVSAALTYVRAHAEDFGIDVDFNDKSDIHVHVPAGAIPKDGPSAGVSMVTSLVSLLTNVPVKEKVAMTGEITLRGNVLPIGGVKEKVTAAHRSRIKEIILPEHNRKDLEDVPDHVAKDLKFHFAKEIKDVLLVALPSVFQKEKKSKKTAEN

SEQ ID NO: 140224 - protein, 233 aa, Unknown
  Bacterial polypetide isolated from the Sargasso Sea
EKEVNVNNKNLSDFLGVAKFNFGELETDDKVGIVIGLAWTEYGGEILKIETVTMPGKGRMQITGKLGDVMQESVKAAKSFVRSKCLEYGIIPPLFEKKDFHIHVPEGATPKDGPSAGVGMVTSIVSSITNIPVRKDLAMTGEVTLTGQVLQIGGLKEKLLAAHRAGIKEVLIPKENEKDLVDMPKKIMDDIKITPVEHADQVIKIALTKELKPTEWVEVDITKKDDKSQASIQ

SEQ ID NO: 140225 - protein, 122 aa, Unknown
  Bacterial polypetide isolated from the Sargasso Sea
PKDGPSAGIAIFNSLVSSLTNNKVKRDVAMTGEITLRGRVLPIGGLKEKIYAANRAGIKKVLVPESNIREISEFDLDVIKNIKIIGISDAFSILEHSLVKPIIPLNLTESAIKNTHNIRSTH

SEQ ID NO: 140226 - protein, 265 aa, Unknown
  Bacterial polypetide isolated from the Sargasso Sea
IRGYTKESGVRNLEREISKIARKVVKKIVAGEEKEVNVNNKNLSDFLGVAKFNFGELETDDKVGIVVGLAWTEYGGEILKIETVTMPGKGRMQITGKLGDVMQESVKAAKSFVRSKCLEYGIIPPLFEKKDFHIHVPEGATPKDGPSAGVGMVTSIVSSITNIPVRKDLAMTGEVTLTGQVLQIGGLKEKLLAAHRAGIKEVLIPKENEKDLVDMPKKIMDDIKITPVEHADQVIKIALTKELKPTEWVEVDITKKDDKSQASIQ

SEQ ID NO: 140227 - protein, 122 aa, Unknown
  Bacterial polypetide isolated from the Sargasso Sea
MENETSIIGVEKRIRGRVKTQMEKTQREYYLNEQLKAIQKELGEIEEGKDESTSLNKAILKAKMPKEVEKKCLQELKKLKNMSPMSAEATVVRNYLDWMTELPWYKKSAVDIDLKKSFRGVR

SEQ ID NO: 140228 - protein, 236 aa, Unknown
  Bacterial polypetide isolated from the Sargasso Sea
MDVKISLPLLPLRDIVVFPSMVIPLFVGRDKSISALNEVMKKDKKIILVTQKNSEIDDPSKTDVFMYGCEGNILQLLKLPDGTVKVLVEGIKRVKILDFKDNEKFISCDYTYFNDVLSKDEDLFPLAATALRRLEKLTSISKKISNETINTIKQLKDPSQIADNIASHIAASISEKQQIFETNDVKKRLNAIIKIMENETSIIGVEKRIRGRVKTQMEKTQREYYLNEQLKAIQKE

SEQ ID NO: 140229 - protein, 154 aa, Unknown
  Bacterial polypetide isolated from the Sargasso Sea
KVWEIWNYTPPTFEKKDFHIHVPEGATPKDGPSAGIAMVTSIVSSIVGIPVDREIAMTGEVTVTGQVLPIGGLKEKLLAAHRAGVKKVLIPKENEKDLTDIPKKVREDIKIIPVETADEVLKIALTKELKPVEWTEVDKISDTKKDEKSQASIQ

SEQ ID NO: 140230 - protein, 240 aa, Unknown
  Bacterial polypetide isolated from the Sargasso Sea
KKIVAGEEKEVNVNNKNLSDFLGVAKFNFGELEADDKVGIVVGLAWTEYGGEILKIETVTMPGKGRMQITGKLGDVMQESVKAAKSFVRSKCLEYGIIPPVFEKKDFHIHVPEGATPKDGPSAGVGMVTSIVSSITNIPVRKDLAMTGEVTLTGQVLQIGGLKEKLLAAHRAGIKEVLIPKENEKDLVDMPKKITDDIKITPVEHADQVIKIALTKELKPTEYVEVDISKKDDKSQASIQ

SEQ ID NO: 140231 - protein, 269 aa, Unknown
  Bacterial polypetide isolated from the Sargasso Sea
MDVKISLPLLPLRDIVVFPSMVIPLFVGRDKSISALNEVMKKDKKIILVTQKNSEIDDPKKTDVFMYGCEGSILQLLKLPDGTVKVLVEGIKRIKILDFKDNEKFITCDYTYFNDILLKEEDLFPLAATALRRLEKLTSINKKISNETINTIKQLKDPSQIADNIASHITATISEKQQIFETVDVKKRLNTIIKIMENETSIIGVEKRIRGRVKTQMEKTQREYYLNEQLKAIQKELGEIEDGKDETTSLNKAITKAKMPKEVEKKCLQ

SEQ ID NO: 140232 - protein, 151 aa, Unknown
  Bacterial polypetide isolated from the Sargasso Sea
MEYGIIPPVFEKKDFHIHVPEGATPKDGPSAGIAMVTSIVSSITNIPVDREVAMTGEVTVTGQVLPIGGLKEKLLAAHRAGVKKVLIPKENEKDLADIPKKVREDIKIIPIESADEVLKIALTKELKRVEWTEVDKLSESKKDEKSQASIQ

SEQ ID NO: 140233 - protein, 140 aa, Unknown
  Bacterial polypetide isolated from the Sargasso Sea
KKDFHIHVPEGATPKDGPSAGIAMVTSIVSSITKIPVRRDLAMTGEVTITGQVLPIGGLKEKLLAAHRAGIKEVLIPKENEKDLADIPKKVKEDIKITSVEIVEDVLKIALTKELKRVEWVEVEKISSEKKKDESQASIQ

SEQ ID NO: 140234 - protein, 281 aa, Unknown
  Bacterial polypetide isolated from the Sargasso Sea
RRRAEIMKTTIELPLLPLRDVVVYPHMVIPLFVGREKSIEALEAAMTGEKQILLLAQRNPADDDPDEAGLYRVGTVATVLQLLKLPDGTVKVLVEGEQRGEIERFIEVDGHCRAEVQLIDEVDAAERESEVFTRSLLSQFEQYVQLGKKVPAEVLASLNGIDEPSRLVDTMAAHMVLKIEQKQEILEITDLAARVEHVLALLDAEIDLLQVEKRIRGRVKKQMERSQREYYLNEQMKAIQKELGDSEEGHNELDELRKRIDNAGLTAEALNKANAELNKLK

SEQ ID NO: 140235 - protein, 262 aa, Unknown
  Bacterial polypetide isolated from the Sargasso Sea
LVEGLQRASINMFADKETYLESNIDLIEENIDTTDKKIRAQSKSITESFDKYVSLNKKIPPEVIGTINEIDDLSKLSDTIASHLSIKLSDKQGILEAIDLSDRFDKIMNFIQAELDVMQVEKKIRGRVKNQMEKTQREYYLNEQMKAIQKELGEGEDGKDDVQEYEEKIETTKLSKEAREKCYAEMKKLKSMSPMSAESSVIRNYLDWILSIPWNKKTKVKKDINFAEKVLNEDHYGLEKVKERILEYLAVQQRIKKRKGQS

SEQ ID NO: 140236 - protein, 251 aa, Unknown
  Bacterial polypetide isolated from the Sargasso Sea
MEVKITQPLLPLRDIVVFPSMVIPLFVGRDKSITALNEVMKGNKKIILTTQKNSEVDDPKKNDIFSYGCESNILQLLKLPDGTVKVLVEGTKRVKIIDFKDDEKFISCTFEYLKEISVKEEDLLPLALTAVRRLEKLTSINKKITSETINNIKQLKDPSKIADNIASHLNCTISEKQQIFETLDIKKRLNSIIKIMENETSIIGVEKRIRGRVKNQMEKTQREYYLNEQLKAIQKELGEIEDGKDETTNLK

SEQ ID NO: 140237 - protein, 301 aa, Unknown
  Bacterial polypetide isolated from the Sargasso Sea
DNIPPALYDRMEMIDFRGYIDDEKVQIAKKHLIPKQIKENGLTSKQVKFNDTGIKEIISSYTRESGVRSLEREISNVLRKVAVDVVNKKLKTASISKKSVNEYLGIPKFQSDLAERTTKPGVVTGMAWTAAGGDILFIESSKMKGKGVLTLTGQLGDVMKESASAAFTYVKSHTDILNLTDDFADKMDIHVHCPAGAIPKDGPSAGVGMFTSLVSLLTNKPVKSKVAMTGEITLRGNVLAIGGVKEKVTAAHRSGIKTIILPHANKRDLEEIPEHIKKDLSFHFAKEVMDVIDVAIPNLKK

SEQ ID NO: 140238 - protein, 247 aa, Unknown
  Bacterial polypetide isolated from the Sargasso Sea
RKVVKKVVNNEEKSVEVNERNIPDFLGIKKFKFGELEANDKVGIVIGLAWTEFGGEILKVETVNMPGKGRMQITGKLGDVMQESVKAAKSYVRSKCLEFGVTPPLFEKKDFHIHVPEGATPKDGPSAGIAMVTSIVSSITKVPVKKEIAMTGEVTITGQVLPIGGLKEKLLAAHRAGVKKVLIPKENEKDLVDVPKKVKDDIKIVPVETADEVIKIALTKELKPTEWSEVEKITDTKKDDKSQASIQ

SEQ ID NO: 140239 - protein, 206 aa, Unknown
  Bacterial polypetide isolated from the Sargasso Sea
SWNCNWIGWTEIGGEILKIETVNMPGKGRMQITGKLGDVMQESVKAAKSYVRSKSLDFGIIPPIFEKKDFHIHVPEGATPKDGPSAGIAMVTSIVSSITKIPVRRDIAMTGEVTITGQVLPIGGLKEKLLAAHRAGIKEVLIPKDNEKDLVDIPKKVKEDIKLTTVEIVDDVLKIALTKELKRIEWVEVDKLSDGKKDDKSQASIQ

SEQ ID NO: 140240 - protein, 198 aa, Unknown
  Bacterial polypetide isolated from the Sargasso Sea
TDDKIGIVVGLAWTEYGGEILKIETVTMPGKGRMQITGKLGDVMQESVKAAKSFVRSKCLEYGIIPPLFEKKDFHIHVPEGATPKDGPSAGVGMVTSIVSSITNIPVRKDLAMTGEVTLTGQVLQIGGLKEKLLAAHRAGIKEVLIPKENEKDLVDMPKKIMDDIKITPVEHADQVIKIALTKELKPTEWAEVDISKS

SEQ ID NO: 140241 - protein, 163 aa, Unknown
  Bacterial polypetide isolated from the Sargasso Sea
VKAAKSFVRSKSLEYGIIPPIFEKKDFHIHVPEGATPKDGPSAGVAMVTSIVSSITKIPVNREIAMTGEVTVTGQVLPIGGLKEKLLAAHRAGIKTVLIPKDNEKDLVEIPKKVKEDIKLIPVETADQVIKIALTKELKKVEWNDVENISKSKRDEKTQASIQ

SEQ ID NO: 140242 - protein, 292 aa, Unknown
  Bacterial polypetide isolated from the Sargasso Sea
APLFVGRKPSINALNKAMEEDKKILLITQKNSDVDIPNSEDLYTFGTLAKVLQLLKLPDGTIKVLVEGLERVKIKNINSTSDYILSSYTVISNNEKTTSKIKALVKIIIEQFESYQKINKKISSDVLSNIRTFNNFNKLADVVIANLNVDISQKQELLESVELEKRLDKVYGYLVSELDTLQVEKKIKGRVKRQMEKTQKEYYLNEQMKAIQKELGDNDDIDDIKEIEKKIQEIKLSKEAKDKCHAELKKLKNMSPMSAEATVIRNYLDWVLSIPWNNPSTISKNINKSKAI

SEQ ID NO: 140243 - protein, 234 aa, Unknown
  Bacterial polypetide isolated from the Sargasso Sea
MDVKLSLPLLPLRDIVVFPSMVIPLFVGRDKSITALNEVMKKDKKIILVTQKNSEIDDPKKTDVFMYGCEGSILQLLKLPDGTVKVLVEGTKRVKILDFKDNEKFITCDYTYYHDVLTKDEDLFPLAATALRRLEKLTSINKKISSETINTVKQLKDPSQIADNIASHITTTISEKQQIFETVDVKKRLNAIIKIMENETSIIGVEKKIRGRVKTQMEKTQREYYLNEQLKAIQ

SEQ ID NO: 140244 - protein, 253 aa, Unknown
  Bacterial polypetide isolated from the Sargasso Sea
ESDKDIQALRRTMISQVESYVRITKKVPAEVVNTLASIKESGRLVDTIVAHMSLKLDEKQKILEQINIKERLEYVIGLIEVEIDMIEVEQKVRGRVKDQMEKSQKEYYLNEQMKAIQKELGDLDNANNEFDELEEKIKQSGMTKEADEKASSELKKLQMMSPMSAEATVVRNFLDVLVSAPWKKKTKAKVSLDQAHEILDEDHYGLKTVKERIIEYLAVQKRVKKLKGPILCLVGPPGVGKTSLGASIARATG

SEQ ID NO: 140245 - protein, 176 aa, Unknown
  Bacterial polypetide isolated from the Sargasso Sea
MAWTAAGGDILFIESSKMKGKGVLTLTGQLGEVMKESASAAFTYVKSHTDILNLKDDFADKMDIHVHCPAGAIPKDGPSAGVGMFTSLVSLLTNKPVKSKVAMTGEITLRGNVLAIGGVKEKVTAAHRAGIKTIILPHANKRDLEEIPEHIKKDLSFHFAKELMDVIDVAIPNLKK

SEQ ID NO: 140246 - protein, 140 aa, Unknown
  Bacterial polypetide isolated from the Sargasso Sea
LFEKKDFHIHVPEGATPKDGPSAGIGMVTSIVSSITNIPVKRDVAMTGEVTLTGQVLPIGGLKEKLIAAHRAGIKQVLIPKENEKDLVDMPKKIIDEIKIIPVEYADEVLKIALTKELKKTEWVEVDISKKDDKSQASIQ

SEQ ID NO: 140247 - protein, 36 aa, Unknown
  Bacterial polypetide isolated from the Sargasso Sea
MSLGGVRDEAEIRGHRRTYIGIFTRKNYSNDEKSWN

SEQ ID NO: 140248 - protein, 172 aa, Unknown
  Bacterial polypetide isolated from the Sargasso Sea
KLGDVMQESVKAAKSYVRSKCLEFGVTPPLFEKKDFHIHVPEGATPKDGPSAGIAMVTSIVSSITKVPVKREIAMTGEVTITGQVLPIGGLKEKLLAAHRAGVKKVLIPKENEKDLVDVPKKVKDDIEIVPVETADEVIKIALTKELKPTEWTEVDKLTETKKDDKSQASIQ

SEQ ID NO: 140249 - protein, 331 aa, Unknown
  Bacterial polypetide isolated from the Sargasso Sea
AIARPKGDIDVRRSDDHPPVLTSSRYCRVPAHDRAVFVGREKSIRALEAVMAEDKQIILVTQKEADTEDPNADCLYTIGTLGSILQLLKLPDGAVKVLVEGGERVVIDQQSLNSNDGFLAVDAEILEQKGYLGADTEGLARAAVQQFDQYIKFNKKVASEVLSAIEQVTEADKIADMIASHLAINIEEKQDLLQHLDIHKRLERIFQLMEEEIGALQVEKRVRNRVKRQMEKTQREYYLNEQMKAIQKELGDGEDGRGELEELSAQLEEAKMPRAAREKADAELRKLKNMGPMSAEATVVRNYLDWILAVPWQKSSRLKKDIIKAREILDA

SEQ ID NO: 140250 - protein, 276 aa, Unknown
  Bacterial polypetide isolated from the Sargasso Sea
MNLPLLPLRDIVVFPSMVIPLFVGRDKSINALNDVMTSEKKILLVTQKNSEVDDPKRNDIFNYGCESRILQLLKLPDGTVKVLVEGVKRAKILDFAENDKFIKCDYEIQKDEINKDEDLTSLATIAVRRLEKLTSINKKVSSETVNTIKDLKDVSSIADHIASHLNMTISEKQQIFETFNVKKRLDAVIKVMENETSIIGVEKRIRGRVKNQMEKTQREYYLNEQLKAIQKELGEIEDGKDESTNLKKSILKSKMPKEVEKKCLSELKKLKNMSPM

SEQ ID NO: 140251 - protein, 107 aa, Unknown
  Bacterial polypetide isolated from the Sargasso Sea
VKRSVAMTGEITLRGRVLPIGGLKEKLLAALRGGLSTVLIPKENEKDLAEIPDNVKSGLNIIPVSVVDEVISNALTTEPVPVDIDEEETDQALAKNEEGSRNEIVKH

SEQ ID NO: 140252 - protein, 266 aa, Unknown
  Bacterial polypetide isolated from the Sargasso Sea
EDEKINIANKFLLPKQIKENGVKDGELELLDGTIKEIIRSYTRESGVRNLEREISKVTRKVVKKVVNNEEKKVKINQNNLNDFLGIKKFKYGELESKDKIGVVIGLAWTEFGGEILKIETVNMHGKGKMQITGKLGEVMQESVKAAKSFVRSKSLDYGIIPPLFEKKDFHIHVPEGATPKDGPSAGIAMVTSIVSSITKIPVNRKIAMTGEVTVTGQVLPIGGLKEKLLAAHRAGIEHVLIPKDNEKDLADVPKKVKEDIKVTPIE

SEQ ID NO: 140253 - protein, 292 aa, Unknown
  Bacterial polypetide isolated from the Sargasso Sea
MPKEVIEVIGEELSEYVGQPTFVNERLYESPPPGVVMGLAWTSLGGSTLFVETTGRLSLAALRFGKENAPGGSTKHDGDDQALGGDGSDGRGSGRGSGSLKVTGQLGNVMSESSAIALSFARQFLRTVDPHEDFLEVADLHMHVPEGATPKDGPSAGITMTTSLLSLASGQPVPPEFAMTGELTLTGKVIRVGGIKEKTIAAKRDGVESLIFPRQNESDYKELKPYLRAGLTAHFVDHYADVYRLIWGEPEHLCVGQHTTPFSFPSWPAERITTVHTPAEDLEPGTAIAVEG

SEQ ID NO: 140254 - protein, 284 aa, Unknown
  Bacterial polypetide isolated from the Sargasso Sea
VKEGELNLEDGTIKEIIRSYTRESGVRNLEREISKVTRKVVKKVVSGEVEKVHVNDKNIPDFLGIKKFKFGEVEDKDKTGIVIGLAWTEVGGEILKIETVNMPGKGRMQITGKLGDVMQESVKAAKSYVRSKSLEYGIIPPFFEKKDFHIHVPEGATPKDGPSAGIAMVTSIVSSITNIPVNKEVAMTGEVTITGQVLQIGGLKEKLLAAHRAGVKKVLIPKENEKDLVDIPKKVREDIKIIPVETADEVLKIALTKELKPVEWTEVDKISEGKKDDKSQASIQ

SEQ ID NO: 140255 - protein, 279 aa, Unknown
  Bacterial polypetide isolated from the Sargasso Sea
QKKSSTEDPDLKDLYKTGTLGNILQLLKLPDGTVKVLVEGKSRCVIKKLVKSDSHLSAIVNFIKNDDYSKEGSLHVVNKLATTFEQYVKLNGKINSEVLSTVSEITDASLLTDTIINHLFLDIKEKQTFLEMTNTIERVEKLTIKIDTEIGLLDTERKVRGRVKKQMEKTQREYYLNEQLKAIQKELGSSEDGKNEFDEIEDKIRLGKLTKEAKDKAFSELKKLKNMSPMSAEATVVRSYIDWLVTIPWTKINKVKSDISNARKILDNDHYGLEKVKDR

SEQ ID NO: 140256 - protein, 145 aa, Unknown
  Bacterial polypetide isolated from the Sargasso Sea
PPIFEKKDFHIHVPEGAIPKDGPSAGIAMVTSIISAVTEIPVNKDVAMTGEITLRGIVLPIGGLKEKLLAAHRAGIKKVLIPFENQKDLIEIPSVIKENIEIIPVKNVDEVLKIALTKNLKRVEWVEVEQISKKNNQKTSTTRRH

SEQ ID NO: 140257 - protein, 157 aa, Unknown
  Bacterial polypetide isolated from the Sargasso Sea
CKSFVRSKCLEYGIIPPIFEKKDFHIHVPEGATPKDGPSAGIGMVTSIVSSITNIPVRRDVAMTGEVTLTGQVLPIGGLKEKLLAAHRAGIKEVLIPKENEKDLVDMPKKIIDDIKITPVEFADQVIKIALTKELKPTEWVEVDMSKKDDKSQASIQ

SEQ ID NO: 140258 - protein, 107 aa, Unknown
  Bacterial polypetide isolated from the Sargasso Sea
KKDVAMTGEITLRGRVLPIGGLKEKMYAAVRAGIKTVLIPQENYNELEEFDKDVIKALKIIPVSDATSILKHTLTKSVIPLNLSESDILRAQKSAFQSENVNEKITH

SEQ ID NO: 140259 - protein, 241 aa, Unknown
  Bacterial polypetide isolated from the Sargasso Sea
MDVKTSSPLLPLRDIVVFPSMVIPLFVGRDKSISALNEVMKKEKKIILVTQKNSEIDDPKKTDIFMYGCEGSILQLLKLPDGTVKVLVEGVRRVKIIDFKDNEKFITCDFTPHNDLIDGDEDLYPLAVTAIRRMEKLTSINKKVSGETINTIKQLKDPSQIADNIASHITATISEKQQIFETIDVKKRLNAIIKIMENETSIIGVEKRIRGRVKTQMEKTQREYYLNEQLKAIQKELGEIE

SEQ ID NO: 140260 - protein, 173 aa, Unknown
  Bacterial polypetide isolated from the Sargasso Sea
KLEKLTSVNKKISSETISNIKQLKEPSKIADNIAAHLNCTISEKQQIFETLDVKKRLNSIIKIMENETSIIGVEKRIRGRVKTQMEKTQREYYLNEQLKAIQKELGEIEDGKDETSNLNKSILKAKMPKEVQKKCLSELKKLKNMSPMSAEATVVRNYLDWMIDVPWYKKDKR

SEQ ID NO: 140261 - protein, 283 aa, Unknown
  Bacterial polypetide isolated from the Sargasso Sea
DIVVFPGMVAPLFVGRKQSVNALNNVMTMDKKILLITQKDSEVDNPNFDNLYKYGTIAKVLQLLKLPDGTIKVLVEGIERAKLNSIDINKDYLIANIRLENKKTKINSKIKALTKVVIEQFEEYVKVNKKLSSDLNNNLKTINDPNKLSDLVSVNLSISLEQKQELLELLSLEERLDKIYSYLVSEIDSFQVEKKIKGRVKRQMEKTQKEYYLNEQMKAIQKELGENEEIDEISEIEKKIEDLKLSKEAKEKCKSEIKKLKNMSPMSAEATVIRNYLDWILSI

SEQ ID NO: 140262 - protein, 288 aa, Unknown
  Bacterial polypetide isolated from the Sargasso Sea
KENGVKEGELNLEDGTIKEIIRSYTRESGVRNLEREISKVTRKVVKKVVSGEVEKVQVNDKNIPDFLGIKKFKFGEVEDKNKTGIVIGLAWTEVGGEILKIETVNMPGKGRMQITGKLGDVMQESVKAAKSYVRSKSLEYGIIPPFFEKKDFHIHVPEGATPKDGPSAGIAMVTSIVSSITNIPVDREIAMTGEVTITGQVLQIGGLKEKLLAAHRAGVKKVLIPKENEKDLVDIPKKVREDIKIIPVETADEVLKIALTKELKPVEWTEVDKISEGKKDDKSQASIQ

SEQ ID NO: 140263 - protein, 247 aa, Unknown
  Bacterial polypetide isolated from the Sargasso Sea
MDVKISLPLLPLRDIVVFPSMVIPLFVGRDKSISALNEVMKKEKKIILVTQKNSEIDDPKKTDVFMYGCEGSILQLLKLPDGTVKVLVEGIKRVKILDFKDNEKFITCDYAHYQDILPKDEDLFPLASTALRRLEKLTSINKKISSETINTIKQLKEPSQIADNIASHITATISEKQQIFETVDVKKRLNAIIKIMENETSIIGVEKRIRGRVKTQMEKTQREYYLNEQLKAIKKELGEIEDGKDEK

SEQ ID NO: 140264 - protein, 235 aa, Unknown
  Bacterial polypetide isolated from the Sargasso Sea
MDVRTSLPLLPLRDIVVFPSMVTPLFVGRDKSISALNEVMKKDKKIILVTQKNSEIDDPKKTDIFMYGCEGNILQLLKLPDGTVKVLIEGVKRVKILDFKDNEKFISCDFTAHNDVINKEEDLYPLAATAVRRLEKLTSINKKISNETINNIKQLKDPSQIADNIASHIAATISEKQQIFETADVKKRLNAIIKIMENETSIIGVEKRIRGRVKTQMEKTQREYYLNEQLKAIQK

SEQ ID NO: 140265 - protein, 252 aa, Unknown
  Bacterial polypetide isolated from the Sargasso Sea
QKDAGDDNPVEESMYKIGVLANVLQVLKLPDGAVKILIEGKQRVEITELIDKRKFFEAVYKELPENDEPGEELEGLKRAVTQDFDRYSRLNKNISEESLTAIKKAEDPKKLSDTIAGHLTLTVEKKQELLETTEVAKRLEKILEIIQSELSVLRVEKKIKTRVKNQMEKTQREYYLNEQMKAIQKELGDNSEGPDEIAEIKEKIEKVKLSKEAREKAVGELKKLKSMSPMSAESAVVRNYLDWLLSIPWKKK

SEQ ID NO: 140266 - protein, 263 aa, Unknown
  Bacterial polypetide isolated from the Sargasso Sea
MNKNSFSPSLPLRDIVVFPGMIVPLFVGRDKSIKALNEVMKSNKKIILVTQKNAEIDDPVEEDLYSYGCESKVLQLLKLPDGTVKVLVEGIDRVKIIECKNEKEFLVTTTEVVKDKIDSKEDLLALSIAIVRKLEKLTNLNKKISSELFTSLKEQKNPTKIADHIAGQLNISIFDKQKLLEMIDLKSRLEKIMEHINNEINVISVEKRIRGRVKNQMEKTQREYYLNEQMKAIQKELGEIEDGKDEIAQLHRAIIKAKMTKEA

SEQ ID NO: 140267 - protein, 277 aa, Unknown
  Bacterial polypetide isolated from the Sargasso Sea
MNVKMTLPLLPLRDIVVFPSMVIPLFVGRDKSISALHEVMKKDKKIILVTQKNSEIDDPKNTDVFMYGCEGNILQLLKLPDGTVKVLVEGFKRVKLLDFKDNEKFISCEYTHQNDELEKNEDLMPLALTAVKRLEKLTLVNKKISNETIHNIKELKDPSKIADNIGSHLNSTISEKQQIFETFNVKKRLNAVIKIMENETSIIGVEKRIRGRVKTQMEKTQREYYLNEQLKAIQKELGEIEDGKDETSSLQKSILKAKMPKDVQKKCMSELKKLKNM

SEQ ID NO: 140268 - protein, 243 aa, Unknown
  Bacterial polypetide isolated from the Sargasso Sea
VKITKFIDDEKFINCSYESVAEIINKEEDLMPLAMTAIRRLEKLTSVNKKISSETINNIKQLKDSSKISDHITSHLSMMITEKQEIFETLDVKKRLNAVIKVMENEASIIGVEKRIRGRVKTQMEKTQREYYLNEQLKAIQKELGEIEDGKDETSNLNKAILKAKMPKDVQKKCMSELKKLKNMSPMSAEATVVRNYLDWMIDLPWQKKDQVSIDLKKSRSVLDEDHFGLEKVKERIIEFLAV

SEQ ID NO: 140269 - protein, 179 aa, Unknown
  Bacterial polypetide isolated from the Sargasso Sea
GRMQITGKLGDVMQESVKAAKSFVRSKSLEYGIIPPTFEKKDFHIHVPEGATPKDGPSAGIAMVTSIVSSIVNIPVDREIAMTGEVTVTGQVLPIGGLKEKLLAAHRAGVKKVLIPKENEKDLIDIPKKVREDIKIIPVDSADEVLKIALTKELKRVEWTEVEKISDSKKDEKSQASIQ

SEQ ID NO: 140270 - protein, 274 aa, Unknown
  Bacterial polypetide isolated from the Sargasso Sea
RAEKILNQDHYGMQKVKTRILEFIGISKLRKSTKGAILCFVGPPGVGKTSLGRSIARALGREFYRFSVGGLTDESELKGHRRTYIGAMPGRFIKALKSVKTGNPVILLDELDKMGQSYRGDPLSVLLEVLDPEQNREFMDHYLDLQYDLSNVLFIATANVLDTIPPALKDRLEIINLSGYISEEKIQIGTKYLIPKVLEESGLNKEQFRLPKKSLEKLIQEYTRETGVRGLEKQLKALSRGVALKVAKGEKSSKTVTPGDLKSLLGPALFPKDA

SEQ ID NO: 140271 - protein, 276 aa, Unknown
  Bacterial polypetide isolated from the Sargasso Sea
MSKNDFFPSLPLRDIVVFPSMIVPLFVGRDKSIKALNEVMKTNKKIVLVTQKNAEVDDPASEDLFKFGCESKILQLLKLPDGTVKVLVEGIDRIKILETKNEKNYLTSSIEIVKDKIESKEDLTAYALALVRKLEKLTNLNKKISLELMASLKDQKEPSKIADSIASQLNISINDKQKLLETLDLKLRLDKIMEHIDNEINVISVEKRIRGRVKNQMEKTQREYYLNEQLKAIQRELGEIEDGKDEVTHLHKSIIKAKMTKEATKKCLSELKSLNL

SEQ ID NO: 140272 - protein, 261 aa, Unknown
  Bacterial polypetide isolated from the Sargasso Sea
MPLRDIVVFPHMVIPLFVGRDKSITALNEVMKKDKKIVLVTQKNSEVDDPKKNDIFNYGCESSILQLLKLPDGTVKVLVEGISRVKINEFQDNSNFLSCSYEKLNEIINKDEDLMPLALNSIKKLEKLTSINKKISNETINNIKLLKDPSKISDNIASHLNATISEKQQVFETLDLKKRLNLINKIMDNETSIIGVEKRIRGRVKTQMEKTQREYYLNEQLKAIQKELGEIEDGKDETSSLNKAILRSKMPKEVEKKCMSE

SEQ ID NO: 140273 - protein, 220 aa, Unknown
  Bacterial polypetide isolated from the Sargasso Sea
EELELADGTIKEIIRSYTRESGVRNLEREISKVARKVVKKVVSGEEKKVSINYKNVHDFLGVKKFKYGEVESEDKVGIVTGLAWTEFGGEILKIETVHMPGKGRMQITGKLGDVMQESVKAAKSFVRSKSLEYGIIPPTFEKKDFHIHVPEGATPKDGPSAGIAMVTSIVSSITNNPVFKHIAMTGEVTITGQVLPIGGLKEKLLAAHRAGIKLSCNTKR

SEQ ID NO: 140274 - protein, 256 aa, Unknown
  Bacterial polypetide isolated from the Sargasso Sea
LEENFKITRKVVKKVVNNQDTKVLVNPNNINDFLGVKKFKYGEVESENKVGIVTGLAWTEFGGEILKIETVNMPGKGRMQITGKLGDVMQESVKAAKSFVRSKSLEYGIIPPIFEKKDFHIHVPEGATPKDGPSAGIAMVTSIVSSVTNNPVNREIAMTGEVTITGQVLPIGGLKEKLLAAHRAGIKHVLIPKDNEKDLTDIPEKVKSDIKITPVKHADEVLKIALIKDLKRAEWVEVQDITESKKEDDSKKILAN

SEQ ID NO: 140275 - protein, 245 aa, Unknown
  Bacterial polypetide isolated from the Sargasso Sea
RDIVVFPSMVVPLFVGRDKSINALNHVMTSEKKILLVTQKNSETDDPKRNDIFNYGCESRILQLLKLPDGTVKVLVEGVKRVKILEYTENDKFIKCDYEIQKDEFNKDEDLTSLSSVAVRRLEKLTSVNKKVSTETINNIKDLKDSSSIADHIASHLNMTISEKQQIFETFNIKKRLDAVIKVMENETSIIGVEKRIRGRVKNQMEKTQREYYLNEQLKAIQKELGEIEDGKDESTNLRKSILKS

SEQ ID NO: 140276 - protein, 238 aa, Unknown
  Bacterial polypetide isolated from the Sargasso Sea
SKVRVSLIAESSIDAKDGRNLAIFIKSKFHDYIKITKKIAPEVLASIDALDDLSRIIDSIAGQLPIEIKQKQEILEAVDFQLRAEILIAFIESQLDVMDVDKRIRNRVKGQMEKSQREYYLNEQIKAAQKELGDISEEGDEISQLEEDIAKAGMSKEALKKANNEFSKFKQMSPMSAEASVVRSYLDWLTSIPWKKKSKVKSNLTSATKILNEDHFGLDEVKERILEYLAVQQRVKKL

SEQ ID NO: 140277 - protein, 280 aa, Unknown
  Bacterial polypetide isolated from the Sargasso Sea
ALEAAMDADKQIMLVAQKSASDDDPACSDIYEIGTIANILQLLKLPDGTVKVLVEGVQRGRVENYLETEALFVANVQEIENESVDEREGEVLSKTLMTHFDQYVKLNKKVPPEIISSLSSIDETSRLADTIAAHMAIKIEEKQEVLETFLIRERLERLITFMASEIDLLQVEKRLRGRVKKQMEKSQREYYLNEQMKAIQNELGESEDGANEFDELAGRIEQSGMAKEAREKAESELKKLRMMSPMSAEATVVRNYIDWMLSVPWKKRSRVSKDLNKAEE

SEQ ID NO: 140278 - protein, 185 aa, Unknown
  Bacterial polypetide isolated from the Sargasso Sea
IETVTMPGKGRMQITGKLGDVMQESVKAAKSFVRSKCLEYGIIPPLFEKKDFHIHVPEGATPKDGPSAGVGMVTSIVSSITNIPVRKDLAMTGEVTLTGQVLQIGGLKEKLLAAHRAGIKEVLIPKENEKDLVDMPKKIMDDIKITPVEHADQVIKIALTKELKPTEWVEVDITKKDDKSQASIQ

SEQ ID NO: 140279 - protein, 212 aa, Unknown
  Bacterial polypetide isolated from the Sargasso Sea
YLLRRQREENSLTEDELHMRDEAILTIVQNYTREAGVRQLEREVGKFARKVARRIAGGKLKRIDASPADVREILGRPRVHPERMAEHDTLGVATGMFYTPMGGDIMFVEASVMPGEGGFVLTGQLGDVMKESGRAALSFSKANAKHLGIPEDSLNGHEVHIHVPAGAIPKDGPSAGITMATALVSAVSGRKVRRDVAMTGELTLTGRVLPIG

SEQ ID NO: 140280 - protein, 270 aa, Unknown
  Bacterial polypetide isolated from the Sargasso Sea
LRDIVVFPSMVIPLFVGRDKSITALNETMKQGKKIILVTQKNSEIDDPKKNDVFMYGCESNILQLLKLPDGTVKVLVEGNKRVKIVDFKDDEKFITCSFEYLEDQIDKNEDLMPLATTAVRRLEKLTSINKKISNESINSIKELKDPSKIADNIAAHLNTTISEKQQMFETVDVKKRLNTIIKIMENETSIIGVEKRIRGRVKTQMEKTQREYYLNEQLKAIQKELGEIEDGKDETSNLNKAILKAKMPKEVQKKCMSELKKLRNMSPNV

SEQ ID NO: 140281 - protein, 265 aa, Unknown
  Bacterial polypetide isolated from the Sargasso Sea
IRGYTKESGVRNLEREISKIARKVVKKIVAGEEKEVNVDSKNLSDFLGVAKFNFGELEADNKVGIVVGLAWTEYGGEILKIETVTMPGKGRMQITGKLGDVMQESVKAAKSFVRSKCLEYGIIPPVFEKKDFHIHVPEGATPKDGPSAGVGMVTSIVSSITNIPVRKDLAMTGEVTLTGQVLQIGGLKEKLLAAHRAGIKEVLIPKENEKDLVDMPKKIMDDIKITPVEHADQVIKIALTKELKPTEWVEVEISKKEDKSQASIQ

SEQ ID NO: 140282 - protein, 274 aa, Unknown
  Bacterial polypetide isolated from the Sargasso Sea
MNIKFLPVLPLRDIVVFPGMVAPLFVGRKQSVNALNNVMTGDKKILLITQKDSEVDNPNFDNLYKYGTIAKVLQLLKLPDGTIKVLVEGIERAKLNSIDITKDFLSANIKLENKKTKINSKIKALTKVVIEQFEEYVKVNKKLSSDLNNNLKSINDPNKLSDLVSVNLSISLAQKQELLELINLEERLDKIYTYLVSEIDSFQVEKKIKGRVKRQMEKTQKEYYLNEQMKAIQKELGENEDIDEISEIENKIENIKLSKEAKEKCKSEIKKLKN

SEQ ID NO: 140283 - protein, 315 aa, Unknown
  Bacterial polypetide isolated from the Sargasso Sea
VNALNSVMNGDKKIFLLSQKNSEVDNPTKDNLYTYGTVAKVLQLLKLPDGTLKVLVEGLYRARVSKLSFNSDFTIATITEIKDGNKKSSKIKALQKLIIEQFEEYQKINKKIAIDLVSNIKNITDANKIVDIIVSNINISLEQKQEILEIENLEERLNKIYSYLVSEIDSFQVEKKIKGRVKRQMEKTQKEYYLNEQMKAIQKELGENEEIDEITELEKKINDYKLTKEAKEKCKSELKKLKSMSPMSAEATVIRNYLDWVLSIPWNNPQTISKNINSASKILEADHYGLDKVKDRILEYLAVQKRMDKLRGPIL

SEQ ID NO: 140284 - protein, 138 aa, Unknown
  Bacterial polypetide isolated from the Sargasso Sea
DFHIHVPEGATPKDGPSAGIAMVTSIVSSITNIPVNREIAMTGEVTITGQVLQIGGLKEKLLAAHRAGVKKVLIPKENEKDLVDIPKKVREDIKIIPVETADEVLKIALTKELKPVEWTEVDKISEGKKDDKSQASIQ

SEQ ID NO: 140285 - protein, 276 aa, Unknown
  Bacterial polypetide isolated from the Sargasso Sea
MNSPVLPLRNIVVFPNMVVPLFVGRDKSINALEQVMDKDQELLFLSQKNSEVDDPSEKDLFKIGTRGKILQLLKLPDGTVKVLVEGLARCKVKKIEFTSDYITADIEEFENSEVISDTIKALGRSVVSKYETYANINNKTSSEVLTSVKDIEDENKLADTVASQIAINIQEKQKILEEIDLEKRLNMILSYIEGELSVLQVEKKIRRRVKNQMEKTQKEYYLNEQMKAIQKELEDGEGGASEDIAELTEKINKTKLSKEAEEKAHNELKKLKQMSP

SEQ ID NO: 140286 - protein, 224 aa, Unknown
  Bacterial polypetide isolated from the Sargasso Sea
MNVKMNLPLLPLRDIVVFPSMVIPLFVGRDKSINALNNVMTSDKKILLVTQKNSEIDDPKRTDVFNYGCESRILQLLKLPDGTVKVLVEGVKRAKILDFIEEDKFIKCDYELQKDEVSKDEELMSLSAIAIRRLEKLTSINKKIPSETLNSIKDLKDPSSISDHIASHLNMTISEKQQIFETFNVKKRLDSIIKVMENETSIIGVEKRIRGRVKNQMEKTQREY

SEQ ID NO: 140287 - protein, 160 aa, Unknown
  Bacterial polypetide isolated from the Sargasso Sea
MKESATAALTYVRSHTDILGIPDDFHEKTDIHVHVPAGAIPKDGPSAGVSMFTSIVSLMTGKPVKAKVAMTGEITLRGNVLPIGGVKEKVTAAHRSGIKHIILPDHNKKDLEDIPEHIKKDLNFYFAKEIMDVIDVAIPGLNGRKKRTPRKTTSKVKKVS

SEQ ID NO: 140288 - protein, 185 aa, Unknown
  Bacterial polypetide isolated from the Sargasso Sea
VNMPGKGRMQITGKLGDVMQESVKAAKSYVRSKSLDFGIIPPIFEKKDFHIHVPEGATPKDGPSAGIGMVTSIVSSITQIPVRRDIAMTGEVTITGQVLPIGGLKEKLLAAHRAGIKQVLIPKENEKDLTDIPKKVKEDIKITSVEFVEEVLKIALTKELKRVEWVEVEKISSEKKKDETQASIQ

SEQ ID NO: 140289 - protein, 117 aa, Unknown
  Bacterial polypetide isolated from the Sargasso Sea
MTQNAPAAEAAAFPVLPLRDIVVFPHMIVPLFVGREKSIRALEEVMNADRQIMLVTQINAADDDPEPDALYRIGTIANVLQLLKLPDGTVKVLVEGKSRAQIDDIRLENDFYEANAS

SEQ ID NO: 140290 - protein, 274 aa, Unknown
  Bacterial polypetide isolated from the Sargasso Sea
MEIKHSLPLLPLRDIVVFPSMVIPLFVGRDKSITALNEVMKNNKKIILVTQKNSEVDDPKKNDVFIHGCESSILQLLKLPDGTVKVLVEGLKRVKIIDFKDEEKFISCTYEHNNDLLSENEDLMPMAMTAIRRLEKLTSINKKISSETINNIKGLKDPSKIADNIASHLNCTISEKQQIFETTDVKKRLSGVIKIMENETSIIGVEKRIRGRVKTQMEKTQREYYLNEQLKAIQKELGEIEDGKDETSNLNKAIQKAKMPKEVQKKCMSELKKL

SEQ ID NO: 140291 - protein, 219 aa, Unknown
  Bacterial polypetide isolated from the Sargasso Sea
VQKGEKSSKTVKPGDLKSLLGPALFPKDAFKSPEHPGIAQGLAWTPSGGSILNIEAIALQGEKAELKLTGQLGEIMQESSKIAHSLVRSILNEQKDHRIGLDHPVHLHVPEGATPKDGPSAGISMATAIHSLALKKTVKKDLAMTGELTLTGQVLPVGGIREKLVGARLGGIKQIILPRANKPQYEELPDYIKEDIQIEFVERYAEVSNIALGIKPEEK

SEQ ID NO: 140292 - protein, 182 aa, Unknown
  Bacterial polypetide isolated from the Sargasso Sea
GGDILFIESTRMEGKGKLTLTGQLGEVMKESATAGLTFVRAHASTFGINSNFNEETDIHVHVPAGAIPKDGPSAGVSMVTSLVSLMTNTPVKDKIAMTGEITLRGNVLPIGGVKEKVTAAHRAGIKEVLLPELNRKDLEDVPEHVSKDLTFHFAKEIWDVLKVALPMVAKKRNKKKSVNNKK

SEQ ID NO: 140293 - protein, 280 aa, Unknown
  Bacterial polypetide isolated from the Sargasso Sea
ETVMEENKEIVLLTQKKSSIEDPDSKDLFNMGTLGTILQMLKLPDGTVKVLVEGKFRCEIKEIISTDDYLSAKLNVLKKDVSLENNHDDINNHLKKSFERFSKLNSKINSDVLSTIYNIDSSDVLSDTIVNHLVFSIDEKQSFLEMTDAVERVKTLTTKIEKEIEILSSERKIRSNVKKQMEKTQREYYLNEQLKAIQKELGTSDDGKNEFDEFEDKINKAKLSKEAKEKALSELKKLRNMGPMSAEATVVRSYIDWLVSIPWKKTNKVKSDIVNARKIL

SEQ ID NO: 140294 - protein, 173 aa, Unknown
  Bacterial polypetide isolated from the Sargasso Sea
RTNANRLGIYSSVFKETDIHVHVPEGAVPKDGPSAGVTITTSLVSAFTGIPVLREVAMTGEVTLRGKVLPIGGLKEKLLAAKRGMMKTVLIPAKNEKDLTEVPEEIKTELQILSVENMDTVLERALECVPISVSDPEEVNKDERKLSEEESLVPQQKGNLTEPPFEVPNFPQH

SEQ ID NO: 140295 - protein, 328 aa, Unknown
  Bacterial polypetide isolated from the Sargasso Sea
YAMSTNKQIVLAAQKKAKTNDPKEEDIYQVGTVSTILQLLRLPDGTVKVLVEGQRRTKITHFLKQDKYYLVEACDYSESINNSVENEALIRTVKSSFENYVRLNKRIPPEMLMSIAQVDSDSRLSDTLVSHLTNLKIGEKQALLEQMDPGKRLETIYGFIQAEIEIMRVEKKIRARVKRQMEKTQKEYYLNEQMAAIQKELGDKDDLRAEIQEMEKKIKTKKLSKEASERVKQEIRKLKMMSPMSAEATVVRNYIDTIVNLPWGVYTKEHIDIQLAEEILDRDHFGLEKVKDRILEYLSVRQLVKEMKGPILCLVGPPGVGKNFLAKS

SEQ ID NO: 140296 - protein, 198 aa, Unknown
  Bacterial polypetide isolated from the Sargasso Sea
GQNFGGEILKIETVNMPGKGRMQITGKLGDVMQESVKAAKSYVRSKSLEYGIIPPIFEKKDFHIHVPEGATPKDGPSAGIAMVTSIVSSITNIPVDREIAMTGEVTVTGQVLPIGGLKEKLLAAHRAGVKKVLIPKENEKDLVDVPKKVREDIKIVPVESADEVLKIALTKELKAVEWTEVEKLSDNKKDEKSQASIQ

SEQ ID NO: 140297 - protein, 294 aa, Unknown
  Bacterial polypetide isolated from the Sargasso Sea
VEGNDRAHFKKLTRKQGCDIAHVEVIEDLDEQAAAGEDAVELKAMMRTLLSQFEGLVKANKKIPPELISSFSNIKLPGRLADGIAAHLTMRIDMRQEILEALEITKRLELMQDLLSQELEMVAVEKRVHERVKESVETSQRQYYLTEKIKAIQKELMETDDSGEAIDEINQLERQIEKVGMPKDAKEKAIAELNKLKMMPPMSAEATVCRNYLEAMIQVPWKKKSSVKRELSQAEAILEEDHYGLEKVKERIIEYLAVQKRVKKLKGPILCLVGPPGVGKTSLGVSMANATGRK

SEQ ID NO: 140298 - protein, 120 aa, Unknown
  Bacterial polypetide isolated from the Sargasso Sea
MIENNIPVLPLRDIVVFPHMVVPLFVGRDKSVKALEKVMAGDKRIMLITQKSASVDDPKKDDLFDFGTIANVLQLLKLPDGTVKVLVEGLQRASINMFTDNEDYLVSNIDLIDENNDSSD

SEQ ID NO: 140299 - protein, 114 aa, Unknown
  Bacterial polypetide isolated from the Sargasso Sea
MTHVNTEYPVLPLRDIVVFPHMIVPLFVGREKSIKALEDVMNDDKQILLTTQKNAADDDPGKNDVFSFGTIGTVLQLLKLPDGTVKVLVEGAYRAKITSFTENEAFFEAFAEKI

SEQ ID NO: 140300 - protein, 201 aa, Unknown
  Bacterial polypetide isolated from the Sargasso Sea
MAWTEFGGEILKIETVHMPGKGRMQITGKLGDVMQESAKAAKSFVRSKSLDYGIIPPTFENKDFHIHVPEGATPKDGPSAGIAMVASIVSSITNIPINREIAMTGEVTITGQVLQIGGLKEKLLAAHRAGIKHVLIPKDNEKDLVDIPEKVKNDVKVTPVKHVDEVLKIALTKELKKIEWVEVQNITKTDQKKDSEKILTN

SEQ ID NO: 140301 - protein, 257 aa, Unknown
  Bacterial polypetide isolated from the Sargasso Sea
NLEREISKVARKVVKKIVAHEETKVNVNENNLSGFLGVKKHKFGEAETENKVGIVTGLAWTEFGGEILKIETVNMPGKGKMQITGKLGDVMQESVKAAKSYVRSKSLEYGIIPPIFEKKDFHIHVPEGATPKDGPSAGIAMVTSIVSSITSIPVNREIAMTGEVTVTGQVLPIGGLKEKLLAAHRAGIKQVLIPKENEKDLVDIPQKVKDDIKITPVEMVDEVLKIALTKEFKKVQWTEIDNVADSKPEDKSQAIIQ

SEQ ID NO: 140302 - protein, 251 aa, Unknown
  Bacterial polypetide isolated from the Sargasso Sea
KPLLPLRDIVVFPSMVIPLFVGRDKSITALNEVMKGDKKIILVTQKDSEVDDPKKNDIFAYGCESNILQLLKLPDGTVKVLVEGIKRVKIIDFKDDEKYISCSYENLKEIIAKEEDLLPLALTAIRRLEKLTSINKKISSETINNIKQLKDPSKIADNIASHLNASILEKHQIFETLDVKKRLNGVIKIMENETSIIGVEKRIRGRVKTQMEKTQREYYLNEQLKAIQKELGEIEDGKDETANLKKSIQKA

SEQ ID NO: 140303 - protein, 190 aa, Unknown
  Bacterial polypetide isolated from the Sargasso Sea
GEILKIETVTMPGKGRMQITGKLGDVMQESVKAAKSFVRSKCLEYGIIPPLFEKKDFHIHVPEGATPKDGPSAGVGMVTSIVSSITNIPVRKDLAMTGEVTLTGQVLQIGGLKEKLLAAHRAGIKEVLIPKENEKDLVDMPKKIMDDIKITPVEHADQVIKIALTKELKPTEWVEVDITKKDDKSQASIQ

SEQ ID NO: 140304 - protein, 171 aa, Unknown
  Bacterial polypetide isolated from the Sargasso Sea
EGKGKLTLTGQLGDVMKESATAGLTFVRAHANTFGIDSNFNEKTDIHVHVPAGAIPKDGPSAGVSMVTSLVSLMTNTPVKDKVAMTGEITLRGNVLPIGGVKEKVTAAHRAGIKEVILPELNRKDLEDVPKHVSKDLTFHFAKEIWDVLKVALPGTAKKRNKKPAVNNKKT

SEQ ID NO: 140305 - protein, 308 aa, Unknown
  Bacterial polypetide isolated from the Sargasso Sea
LSSQKRSDIDDPSIKDVNTVGTLANILQLVTLPDGTVKLLVEGVSRVDLLDIRSDEYFKADYCPLDEFGDESDKDIQALRRTMISQVESYVRMTKKVPAEVVNTLASIKESGRLVDTIVAHMSLKLDEKQKILEQINIKERLEYVIGLIEVEIDMIEVEQKVRGRVKDQMEKSQKEYYLNEQMKAIQKELGDLDNANNEFDELEEKIKQSGMTKEADEKASSELKKLQMMSPMSAEATVVRNFLDVLVSAPWKKKTKAKVSLDQAHEILDEDHYGLKTVKERIIEYLAVQKRVKKLKGPILCLVGPPG

SEQ ID NO: 140306 - protein, 257 aa, Unknown
  Bacterial polypetide isolated from the Sargasso Sea
DEPQKKISITPKRVREYLGVPKYKHGKVEEKNEIGITSGLAWTQAGGELLTTEVTVMKGTGKVQLTGKLGDVMKESAHAALSYVRTNANRLGIYSSVFKETDIHVHVPEGAVPKDGPSAGVTITTSLVSAFTGIPVLREVAMTGEVTLRGKVLPIGGLKEKLLAAKRGMMKTVLIPAKNEKDLTEVPEEIKTELQILSVENMDTVLERALECVPISVSDPEDDNKDERKLSEEESLVPQQKGNLTEPPFEVPNFPQH

SEQ ID NO: 140307 - protein, 286 aa, Unknown
  Bacterial polypetide isolated from the Sargasso Sea
GREFYRFSVGGLTDESELKGHRRTYIGAMPGRFIQALKSVKTGNPVILLDELDKMGQSYRGDPLSVLLEVLDPEQNREFMDHYLDLHYDLSNVLFIATANVLDTIPPALKDRLEIINLSGYINEEKIQIGTKYLIPKVLEDSGLNKEQFRLPKKTLEKLIQEYTRETGVRGLEKQLKALSRVVALKVAKGEKSSKTVTPGDLKSLLGPALFPKDAFKSLEHPGIAQGLAWTPSGGSILNIEAIALQGEKAELKLTGQLGEVMQESSKIAHSLVRSILNGQKDHRIG

SEQ ID NO: 140308 - protein, 175 aa, Unknown
  Bacterial polypetide isolated from the Sargasso Sea
ITGKLGDVMQESVKAAKSFVRSKSLDYGIIPPIFEKKDFHIHVPEGATPKDGPSAGIGMVTSIVSSITKNPVDKNIAMTGEVTITGQVLPIGGLKEKLLAAHRAGINQVIIPKENEKDLIDIPKKVREDIKITPVENVDEVLKIALKNELKKVEWTEVESISKSEKDQKSQASIQ

SEQ ID NO: 140309 - protein, 141 aa, Unknown
  Bacterial polypetide isolated from the Sargasso Sea
AKTDLHVHLPEGATPKDGPSAGLPLIMAIISSFTKISVKHNVGMTGEITLRGHVTEIGSLKEKLIAAKRGLLDTVLIPDENQKDLLDVPDEIKKGLEIIIIKNVKEALRLALVTHPQDIKDQQKDVKDISWTRDSGSQANA

SEQ ID NO: 140310 - protein, 237 aa, Unknown
  Bacterial polypetide isolated from the Sargasso Sea
MDVKISSPLLPLRDIVVFPSMVIPLFVGRDKSITALNEVMKKDKKIILVTQKNSEIDDPKKTDVFMYGCEGSILQLLKLPDGTVKVLVEGIKRVKILDFKDNEKFIICDYTHFNDVLPKDEDLFPLAATALRRLEKLTSINKKISNETINSIKQLKDPSQIADNIASHITATISEKQQIFETVDVKKRLNAIIKIMENETSIIGVEKRIRGRVKTQMEKTQREYYLNEQLKAIQKEL

SEQ ID NO: 140311 - protein, 163 aa, Unknown
  Bacterial polypetide isolated from the Sargasso Sea
MSPENKKPLLPLRDIVIFPSVVVPLFVGRKKSIRALEEVMKTDKSIVLVAQKNSEVDDPQEKDIFSYGCLSKILQLLKLPDGTVKVLVEGLSRAKINEITDENKKFLSCKIEKIENEKETEENKLYALNLIKKFEKLSSISKKDSIDFVKTLKNLKQPGQIAD

SEQ ID NO: 140312 - protein, 226 aa, Unknown
  Bacterial polypetide isolated from the Sargasso Sea
LGDFLGVKKFKFGELEEQDKIGIVTGLAWTEFGGEILKIETVNMPGKGRMQITGKLGDVMQESVKAAKSFVRSKCLEFGIIPPTFEKKDFHIHVPEGATPKDGPSAGIAMVTSIVSSITKIPVKREIAMTGEVTITGQVLPIGGLKEKLLAAHRAGIKQVLIPKDNEKNLVDIPKKVIDDIKITPVSSADEVLKIALTKELKPTDWVEVDKISDNKKSEKTQASIQ

SEQ ID NO: 140313 - protein, 268 aa, Unknown
  Bacterial polypetide isolated from the Sargasso Sea
MEVKHKSPLLPLRDIVVFPGIVIPLFVGRDKSITALNEVMKDNKKIILVTQKNSEVDDPKKTDVFMYGCESSILQLLKLPDGTVKVLVEGLKRVKIVDFKDDDKFITCSYEHYNDIFVDDEELMPLAITAVRRLEKLTSINKKISSETITKIKELKDPAKIADNIASHLNVTISERQQIFETVDVKKRLNSVIKIMENETSIIGVEKKIRGRVKTQMEKTQREYYLNEQLKAIQKELGEIEDGKDETSNLNKAIQKAKMPKEVQKNAC

SEQ ID NO: 140314 - protein, 228 aa, Unknown
  Bacterial polypetide isolated from the Sargasso Sea
MAKNLVPVLPLRDIVVFPNMVAPLFVGRAQSVNALNHVMTGDKKIFLLSQKNSKVDNPDKENLYSFGTVAKIIQLLKLPDGTLKVLVEGIHRAKVNKINFNKEFITASITEINQKAKKNSNIKALQKLIIEQFVEFQKINKKVSQDVINNVKTINDPDKIVDIIVSNISISLSQKQEILEIINTEERLNKIYGYLVSEIDSFQVEKKIKGRVKRQMEKTQKEYYLNEQ

SEQ ID NO: 140315 - protein, 249 aa, Unknown
  Bacterial polypetide isolated from the Sargasso Sea
LFVGRKKSIKALEEVMKTDKSIVLVAQKNSEVDDPKEEDIYSFGCLSKILQLLKLPDGTVKVLVEGLERVKVKSLKKEEKKYLNCEIEVVPSTQDNQTSKTLAANLIKKFEKLTNLNKKDSSDFAKNLKTLNSSSEIADNICSNLNLQLFEKQQLLEISDLTRRLEKIYEVIEKETSVITMEKRIRGRVKNQMEKTQREYYLNEQLKAIQKELGEIEEGKDEISNLSNSIVKAKMTKEAQTKCLSELKK

SEQ ID NO: 140316 - protein, 189 aa, Unknown
  Bacterial polypetide isolated from the Sargasso Sea
EILKIETVTMPGKGRMQITGKLGDVMQESVKAAKSFVRSKCLEYGIIPPLFEKKDFHIHVPEGATPKDGPSAGIGMVTSIVSSITNIPVRKDIAMTGEVTLTGQVLPIGGLKEKLLAAHRAGIKEVLIPKENEKDLVDMPKKIIDEVKITPVEFADEVLKIALTKELKKTEWVEVDLSKKDDKSQASIQ

SEQ ID NO: 140317 - protein, 251 aa, Unknown
  Bacterial polypetide isolated from the Sargasso Sea
MDVKISLPLLPLRDIVVFPSMVIPLFVGRDKSISALNEVMKKDKKIILVTQKNSEIDDPKKTDVFMYGCEGNILQLLKLPDGTVKVLVEGIKRIKILDFKDNEKFITCDYTYFNDVLPKDEDLFPLASTALRRLEKLSSINKKISNETINTIKQLKDPSQIADNIASHITASISEKQQIFETVDVKKRLNAIIKIMENETSIIGVEKRIRGRVKTQMEKTQREYYLNEQLKAIQKELGEIEDGKDETTSLN

SEQ ID NO: 140318 - protein, 158 aa, Unknown
  Bacterial polypetide isolated from the Sargasso Sea
VHMPGKDRMQITGKLGDVMQESVKAAKSFVRSKSLEYGIIPPTFEKKDFHIHVPEGATPKDGPSAGVAMVTSIVSSITKNPVDRKVAMTGEVTITGQVLQIGGLKEKLLAAHRAGIQQVIIPKDNEKDLVDIPKKVKEDIKITPVETVDEVLKIALTK

SEQ ID NO: 140319 - protein, 113 aa, Unknown
  Bacterial polypetide isolated from the Sargasso Sea
MENILDSQTLPVLPLRDIVVFPHMVVPLFVGRDKSVKALEQVMGKDKKIMLITQKRASVDDPKKDDLFEIGTVANVLQLLKLPDGTVKVLVEGISRASINQYSGNEEYLVADI

SEQ ID NO: 140320 - protein, 231 aa, Unknown
  Bacterial polypetide isolated from the Sargasso Sea
VNDGNIHDFLGVKKFKYGEVESEDKIGIVTGLAWTEFGGEILKIETVHMPGKGRMQITGKLGDVMQESVKAAKSFVRSKSLEYGIIPPIFEKKDFHIHVPEGATPKDGPSAGIAMVTSIVSSITNNPVHKHVAMTGEVTITGQVLPIGGLKEKLLAAHRAGIKQVIIPKENEKDLVDIPKKVREDIKITAVENVDEVLKIALKNELKKVEWTEVENISKTSKEQKSQASIQ

SEQ ID NO: 140321 - protein, 176 aa, Unknown
  Bacterial polypetide isolated from the Sargasso Sea
QITGKLGDVMQESVKAAKSFVRSKSLEYGIIPPIFEKKDFHIHVPEGATPKDGPSAGIAMVTSIVSSITNNPVHKHVAMTGEVTITGQVLPIGGLKEKLLAAHRAGIKQVIIPKENEKDLVDIPKKVREDIKITAVENVDEVLKIALKKELKKVEWTEVENISKTNKEQKSQASIQ

SEQ ID NO: 140322 - protein, 273 aa, Unknown
  Bacterial polypetide isolated from the Sargasso Sea
MSKTDFLPTLPLRDIVVFPGMIVPLFVGRDKSIKALNEVMKSNKKIILITQKNAEIDDPSVEDLYSFGCESKILQLLKLPDGTVKVLVEGFERIKIQECKNDDEFLTSAIEIVKDKIDSKEDSLAFSIAIVRKLEKLTNLNKRISSELFTSLKQQKDPSKIADHIAGQLNISIFEKQKLLETIDLKERLEKLMEHINNEINVISVEKRIRGRVKNQMEKTQREYYLNEQMKAIQKELGEIEEGKDEIGHLQKLIIKAKMTKEATKKCLSELKK

SEQ ID NO: 140323 - protein, 183 aa, Unknown
  Bacterial polypetide isolated from the Sargasso Sea
MPGKGRMQITGKLGDVMQESVKAAKSYVRSKSLEYGIIPPFFEKKDFHIHVPEGATPKDGPSAGIAMVTSIVSSITNIPVNREIAMTGEVTITGQVLQIGGLKEKLLAAHRAGVKKVLIPKENEKDLVDIPKKVREDIKIIPVETADEVLKIALTKELKPVEWTEVDKISEGKKDDKSQASIQ

SEQ ID NO: 140324 - protein, 284 aa, Unknown
  Bacterial polypetide isolated from the Sargasso Sea
AEKFLLEKQIKNNGVKDGELEITDGTIKEIIRNYTRESGVRNLEREISKVIRKAVKKVVNNEEKKVLINDKNLSDFLGVKKFKYGELESEDRVGIVTGLAWTEFGGEILKIETVHMPGKGRMQITGKLGDVMQESVKAAKSFVRSKSLEYGIIPPIFEKKDFHIHVPEGATPKDGPSAGVGMVTSIVSSITKNPVNRKIAMTGEVTITGQVLQIGGLKEKLLAAHRAGIKHVIIPKDNEKDLVDIPTKVREDIKITPVETVDEVLKIALKNELKRVEWTEVDNL

SEQ ID NO: 140325 - protein, 250 aa, Unknown
  Bacterial polypetide isolated from the Sargasso Sea
MDVKISLPLLPLRDIVVFPSMVIPLFVGRDKSISALNEVMKKDKKIILVTQKNSEIDDPKKTDVFMYGCEGSILQLLKLPDGTVKVLVEGIKRVKILDFKDNEKFITCDYTTFNDVLSKDEDLFPLAATALRRLEKLTSINKKISSETINTIKQLKDPSQIADNIASHITATISEKQQIFETVDVKKRLNAIIKIMENETSIIGVEKRIRGRVKTQMEKTQREYYLNEQLKAIQKELGEIEDGKDETTSL

SEQ ID NO: 140326 - protein, 132 aa, Unknown
  Bacterial polypetide isolated from the Sargasso Sea
MIENNIPVLPLRDIVVFPHMVVPLFVGRDKSVKALEKVMAGDKRIMLITQKSASVDDPKKDDLFDFGTIANVLQLLKLPDGTVKVLVEGLQRASINMFTDSEDYLVSNIDLIDENNDSSDKKLRALSKSITD

SEQ ID NO: 140327 - protein, 260 aa, Unknown
  Bacterial polypetide isolated from the Sargasso Sea
MNVKSTLPLLPLRDIVVFPSIVIPLFVGRDKSITALNETMNNNKKIILATQKNSEVDDPKKTDIFMYGCESKILQLLKLPDGTVKVLVEGIQRVKIIDFKDDDKFITCTYENNKDYIKIDENLLPLAMTAVRRLEKLTSINKKISSETINNIKQLNDPAKIADNIASHLNTTILEKQQIFETVDVKNRLNGVIKIMENETSIIGVEKRIRGRVKTQMEKTQREYYLNEQLKAIQKELGEIEDGKDETFSLNKAIQKAKMP

SEQ ID NO: 140328 - protein, 242 aa, Unknown
  Bacterial polypetide isolated from the Sargasso Sea
QRAKVNKINFNKEFITASITEINQKTKKNSNIKALQKLIIEQFVEFQKINKKVSQDVINNVKILSDPDKIVDIIISNISISLSQKQEILQMINTEERLNKIYGYLVSEIDSFQVEKKIKGRVKRQMEKTQKEYYLNEQMKAIQKELGENEDLDEIAELEKKLNQYNLSKEAKEKCTSEIKKLKNMSPMSAEATVIRNYLDWVTSIPWNNPDPISQNINKASIILENDHYGLDKVKERILEYL

SEQ ID NO: 140329 - protein, 238 aa, Unknown
  Bacterial polypetide isolated from the Sargasso Sea
MSSNNFKPLLPLRDIVIFPSTIVPLFVGRKKSIKALEEVMKTDKSIVLVTQKNSEVDDPKDQDIYSYGCLSKILQLLKLPDGTVKVLVEGIDRVKINSIKNEEKKYLSCEINKVSSTGDNEQSKNLSQSLIKKFEKLSNLSKKDVADFTKNLKSLTKTSDIADNISSNLNIQLFEKQKLLETFDLTKRLEKIYEIIEKETSVISMEKKIRGRVKNQMEKTQREYYLNEQLKAIQKELG

SEQ ID NO: 140330 - protein, 228 aa, Unknown
  Bacterial polypetide isolated from the Sargasso Sea
EKNISDYLGIKKFKYGEVENEDKVGVVTGLAWTEFGGEILKIETVNMPGKGRMQITGKLGDVMQESAKAAKSYVRSKSLDYGVIPPIFEKKDFHIHVPEGATPKDGPSAGIAMVTSIVSSITDIPVNRNIAMTGEVTITGQVLQIGGLKEKLLAAHRAGINHVLIPKDNEKDLVDLPKKVKEDIKITPVSVVDDVLKLALTKELKRVEWVEVDNLSKAKDKSEKVLTN

SEQ ID NO: 140331 - protein, 249 aa, Unknown
  Bacterial polypetide isolated from the Sargasso Sea
KITRKVVKKVVNNEETKVDVNEKNISDFLGIKKFKYGEAENENRVGVVTGLAWTEFGGEILKIETVNMPGKGRMQITGKLGDVMQESVKAAKSFVRSKSLDYGIIPPIFEKKDFHIHVPEGATPKDGPSAGIAMVTSIVSSITDIPIDRNIAMTGEVTITGQVLQIGGLKEKLLAAHRAGIKHVLIPSENEKDLVDVPKKVREDIKITPVKIVDDVLKIALTKELKKIDWAEVDNLSKSDDKTEKVLTN

SEQ ID NO: 140332 - protein, 220 aa, Unknown
  Bacterial polypetide isolated from the Sargasso Sea
MPLAITAVRRLEKLSSINKKISTETINNIKQLKDASKIADNIASHLNATISEKQQIFETIDVKKRLNGVIKIMENEASIIGVEKRIRGRVKTQMEKTQREYYLNEQLKAIQKELGEIEDGKDETSNLNKAIQKAKMPKEVQKKCMSELKKLKNMSPMSAEATVVRNYLDWMIDIPWHKKDKVDIDLNKALKILDEDHFGLEKVKERIIEFLAVQKRMDKI

SEQ ID NO: 140333 - protein, 262 aa, Unknown
  Bacterial polypetide isolated from the Sargasso Sea
GEFDLTEGTVQEVIRSYTRESGVRNLEREISKVARKAVKKVVNGELEKVNVNKDNLSDYLGVKKYKYGEVETENRIGIVTGLAWTEHGGEILKIETVNMPGKGRMQITGKLGDVMQESVKAAKSFVRSKSLEYGIIPPLFEKKDFHIHVPEGATPKDGPSAGVGMVTSIVSSITNNPIDREIAMTGEVTITGQVLQIGGLKEKLLAAHRAGIKRVVIPKDNEKDLIDIPKKVREDIKIIPVSTVDEVLKIALKNELKRVEWT

SEQ ID NO: 140334 - protein, 239 aa, Unknown
  Bacterial polypetide isolated from the Sargasso Sea
MDDVIKVNKDLYPILPLRDIVVYPNMVVPLFVGREKSIQALEEVMNNDRELFLVAQKDSTTEDPTEDNLYTHGTVASIMQLLKLPDNTVKVLVEGTSRAKIRNFIPGEKFHQVEVDLVSEIVLDDPEIEALARSCLMQFESYTKINRKISTDTFNTVSEIDDYSKIADTIASNLQIKLSQKQQILEINNLKERFELILSFLEGEIDVLQTEKRIRGRVKRQMEKTQREYYLNEQMKAIQ

SEQ ID NO: 140335 - protein, 172 aa, Unknown
  Bacterial polypetide isolated from the Sargasso Sea
KLGDVMQESVKAAKSYVLSKSLEFGIIPPIFEKKDFHIHVPEGATPKDGPSAGIGMVTSIVSSITKIPVNKEIAMTGEVTITGQVLPIGGLKEKLLAAHRAGIKQVLIPKDNEKDLADIPNKVKEDIKITPVEIVDEVLKIALMKEFQKVEWSEIDNLSKSKKEDKSQASIQ

SEQ ID NO: 140336 - protein, 242 aa, Unknown
  Bacterial polypetide isolated from the Sargasso Sea
MSEDSPTEDITPRTRYQMLPLRDVVVFPHMVLPLFVGREKSINALEEAVQSGKQIFLAAQHDAADDDPAPENIFEIGTVANILQLLKLPDGTVKVLVEGVSRAGIVNYVETEESFVVDAAPIGEGDFDEREGEVLMRTVTSEFEQYVKLNSKIPPEVLTSLSGIEDPGRLADTIAAHLTLRNDEKQKILELGDVRERLEHILGIMESEIDLLQVEKRLRGRVKKQMEKSQREYYLNEQMKAI

SEQ ID NO: 140337 - protein, 214 aa, Unknown
  Bacterial polypetide isolated from the Sargasso Sea
LEENVRQVTVTNPTKQFPVLPLRDIVVFPHMIVPLFVGRDKSVRALEDVMQDDKQILLVAQKSAAQDDPEADDIYDVGTVSTVLQLLKLPDGTVKVLVEGSHRAKITSYLDNPDFFQVEAETIEESLVDDEDVQGLSRSVVTQFEQYIKLNKKIPPEVLVSINQIENAEKLADTVASHLALKISEKQELLEISSVTERLERVFSYMEAEIGVLQ

SEQ ID NO: 140338 - protein, 137 aa, Unknown
  Bacterial polypetide isolated from the Sargasso Sea
FHIHVPEGATPKDGPSAGVGMVTSIVSSITKIPVRRDIAMTGEVTITGQVLPIGGLKEKLLAAHRAGIKEVLIPKDNEKDLTDIPEKVKKDIKLTTVEMVDDVLKIALTKELKKIDWVEVEKISDGKKDDKSQASIQ

SEQ ID NO: 140339 - protein, 271 aa, Unknown
  Bacterial polypetide isolated from the Sargasso Sea
KEIIRSYTRESGVRNLEREISKVARKVVKKVVSGEEKKVLVNDKNVHDFLGVKKFKYGEVESEDKVGIVTGLAWTEFGGEILKIETVHMPGKGRMQITGKLGDVMQESVKAAKSFVRSKSLEYGIIPPIFEKKDFHIHVPEGATPKDGPSAGIAMVTSIVSSITNNPVHKHIAMTGEVTITGQVLPIGGLKEKLLAAHRAGIKQVVIPKENEKDLVDIPKKVREDIKITIVENVDEVLKIALKNELKRVEWTEVENISKGDKDQKSQASIQ

SEQ ID NO: 140340 - protein, 142 aa, Unknown
  Bacterial polypetide isolated from the Sargasso Sea
FEKKDFHIHVPEGATPKDGPSAGIAMVTSIVSSITKIPVNREIAMTGEVTITGQVLPIGGLKEKLLAAHRAGIKQVLIPKDNEKNLVDIPKKVIDDIKITPVNTADDVLKIALTKELKPTDWVEVDKISENKKSEKTQASIQ

SEQ ID NO: 140341 - protein, 318 aa, Unknown
  Bacterial polypetide isolated from the Sargasso Sea
PATLADFAASMTTASGKELQEVLETRNIKTRIEKALNLLRHELEVAKLQFKISQRVEDRMSQQQREFFLREQLKEIKKELGITKDGSESETEKYEARIKKLKLTEEAKERINEEMDKLRLIEPASPEYNVTRTYLDWLTILPWGVFSKDYFNIQRAAKILNRDHYGLNDVKDRILELISVGIINGDLAGSIVLLVGPPGTGKTSVGQSIARALGRKFYRFSLGGMRDEAEIKGHRRTYIGALPGKFINAIKTSKTANPVIMLDEIDKIGASFQGDPASALLEVLDPEQNKDFLDHYLDVRFDLSKVLFICTANQTDTI

SEQ ID NO: 140342 - protein, 151 aa, Unknown
  Bacterial polypetide isolated from the Sargasso Sea
MIENDIPVLPLRDIVVFPHMVVPLFVGRDKSVKALEKVMIGDKRIMLITQKSASVDDPKKDDLFDFGTIANVLQLLKLPDGTVKVLVEGIQRASINMFTDNEDYLVSNIDLIDENNDSSDKKLRALSKSITELFDKYVNLNKKIPPEVLGT

SEQ ID NO: 140343 - protein, 162 aa, Unknown
  Bacterial polypetide isolated from the Sargasso Sea
KAAKSYVRSKCLDFGIIPPTFEKKDFHIHVPEGATPKDGPSAGIAMVTSIVSSITKIPVNKDIAMTGEVTVTGQVLPIGGLKEKLLAAHRAGIKEVLIPKENKKDLFDIPKKVKDDIKITTVETADEVLKIALTKNLKSVEWVEVDSISDNKKSEKTPASIQ

SEQ ID NO: 140344 - protein, 235 aa, Unknown
  Bacterial polypetide isolated from the Sargasso Sea
MEVKVTQPLLPLRDIVVFPSMVIPLFVGRDKSITALNEVMKDNKKIVLVTQKNSEVDDPKKNDVFIYGCESNILQLLKLPDGTVKVLVEGIKRVKIIDFKDEEKFISCSFEYQKEIIPNNEDLLPLALTAVRRLEKLTSINKKISSETISNIKQLKDPSKIADNIASHLNSTISEKQQIFETLDVKKRLSGVIKIMENETSIIGVEKRIRGRVKTQMEKTQREYYLNEQLKAIQK

SEQ ID NO: 140345 - protein, 252 aa, Unknown
  Bacterial polypetide isolated from the Sargasso Sea
MKATYIKPLLPLRDIVIFPSMVIPLFVGREKSIRALQEVMKSDKSIVLVTQKNSEVDDPESKDLYAYGCLSKVLQLLKLPDGTVKVLVEGEKRVKILKYNDNDGEKFLKCEVEVAEDTNISKDLELFALSLIKKYEKLSILNKKDFNKEGLKNLKNPSQIANNLSSDLSIQISEKQELLEMIDLKKRLEKIHSLIEKETSVVSVEKKIRGRVKNQMEKTQREYYLNEQLKAIQKELGEIDEGKDELTNLSRA

SEQ ID NO: 140346 - protein, 132 aa, Unknown
  Bacterial polypetide isolated from the Sargasso Sea
IHVPEGATPKDGPSAGIAMVTSIVSSITNIPVRKDLAMTGEVTLTGQVLPIGGLKEKLLAAHRAGIKEALIPKENEKDLIDIPKKIIDEIKITPVEFADEVIKIALTKELKKTEWVEVDISKKEDKSQASIQ

SEQ ID NO: 140347 - protein, 172 aa, Unknown
  Bacterial polypetide isolated from the Sargasso Sea
KLGDVMQESVKAAKSFVRSKSLEYGIIPPFFEKKDFHIHVPEGATPKDGPSAGIAMVTSIVSSITNIPVNREIAMTGEVTITGQVLQIGGLKEKLLAAHRAGVKKVLIPKENEKDLVDIPKKVREDIKIIPVETADEVLKIALTKELKPIEWTEVDKITEGKKDDKSQASIQ

SEQ ID NO: 140348 - protein, 199 aa, Unknown
  Bacterial polypetide isolated from the Sargasso Sea
MTQAGGELIPVEATLIPGSGLTLTGQLGDVMKESAQTALSYVRSILDDLIGEGGEIFSQSEVHIHVPAGATPKDGPSAGVTMATALVSIATGIPVRGDVAMTGEVTLRGRVLAVGGVREKSLAALRSGITDIIVPRQSMSEVGEIPKELRRRLNFIPVTHMREVIEAALSRPPLWKDRPSHAQVASPPAVHATFKGSGQ

SEQ ID NO: 140349 - protein, 98 aa, Unknown
  Bacterial polypetide isolated from the Sargasso Sea
GEITLRGRVWPIGGLKEKLLAALRGGIKTVLIPKDNEKDLADIPENVKRGLEIIPVTTVDEVLDRALTEKLVPIEWPDVDPISVSDHSEKDVGGVVTH

SEQ ID NO: 140350 - protein, 151 aa, Unknown
  Bacterial polypetide isolated from the Sargasso Sea
IEMSRVRYYTSVIEKKDFHIHVPEGATPKDGPSAGIGMVTSIVSSITNIPVKRDVAMTGEVTLTGQVLPIGGLKEKLIAAHRAGIKEVLIPKENEKDLVDMPKKIVDEIKITPVEFADEVLKIALTKELKKIEWVEVDMSKKDDKTQASIQ

SEQ ID NO: 140351 - protein, 269 aa, Unknown
  Bacterial polypetide isolated from the Sargasso Sea
MEVKHTSPLLPLRDIIVFPSMVIPLFVGRDKSITALNEVMKNNKKIILVTQKNSEVDDPKKTDIFMYGCESNILQLLKLPDGTVKVLVEGIKRVKIIDFKDDDKFIMCSYEQCNDIISKDEDLTPLSITAIRRLEKLTSINKKISSEVISNIKELKDPSKIADNIASHLNSTISEKQQIFETQDVKKRLNGVIKIMENETSIIGVEKRIRGRVKTQMEKTQREYYLNEQLKAIQKELGEIEDGKDETSNLNKAIQKAKMPKEVQKKCMS

SEQ ID NO: 140352 - protein, 165 aa, Unknown
  Bacterial polypetide isolated from the Sargasso Sea
LSKVEKKIRGRVKTQMEKSQKEYYLNEQMKALKKELGEIDETEEAEELEIKINEAGMTKEAQEKALTELQKYKMMSPMSAEASVVRGYIDWMLNIPWKKKSKIRSDLNAASNVLNEDHFGLEEVKERILEYLAVQKRVKKLKGPVLCLVGPPGVGKTSLGESIAR

SEQ ID NO: 140353 - protein, 152 aa, Unknown
  Bacterial polypetide isolated from the Sargasso Sea
SLEYGIIPPFFEKKDFHIHVPEGATPKDGPSAGIAMVTSIVSSITNIPVNREIAMTGEVTITGQVLQIGGLKEKLLAAHRAGVKKVLIPKENEKDLVDIPKKVREDIKIIPVETADEVLKIALTKELKPVEWTEVDKISEGKKDDKSQASIQ

SEQ ID NO: 140354 - protein, 150 aa, Unknown
  Bacterial polypetide isolated from the Sargasso Sea
MIENSIPVLPLRDIVVFPHMVVPLFVGRDKSVKALEKVMAGDKRIMLITQKSASVDDPKKDDLFDFGTIANVLQLLKLPDGTVKVLVEGLQRASINIFTDNEDYLVSNIDLIDENNDSSDKKLRALSKSIAELFDKYVNLNKKIPPEVLG

SEQ ID NO: 140355 - protein, 265 aa, Unknown
  Bacterial polypetide isolated from the Sargasso Sea
MEVKLTQPLLPLRDIVVFPSMVIPLFVGRDKSITALNEVMKADKKIILVTQKNSEVDDPKKNDVFSYGCESNILQLLKLPDGTVKVLVEGIKRVKIIDFKDDEKFITCTYENQKDVLNKDEDLLPLALTAVKRLEKLTSVNKKISSETINNIKQLKDPSKIVDNIVSNLNASISEKQQIFETLDVKKRLNAAIKMMESETSIIGVEKRIRGRVKTQMEKTQREYYLNEQLKAIQKELGEIEDGKDETTNLKKSIQKAKMPKEVRR

SEQ ID NO: 140356 - protein, 304 aa, Unknown
  Bacterial polypetide isolated from the Sargasso Sea
MSTKTTYLILPLRDIVIFPHMIAPLFVGRTKSINAIEAVMEENKEIVLLTQKKPSIEDPKEKDLYKVGTIGNILQMLKLPDGTVKVLVEGKSRCVVKSIKKSSNYLSSDTVLLKSDEFSSTRNNEIISNLLDLFERYVKLNGKISTEILSTIADIKDPNTLSDTIINHLVFNIEEKQSFLEMINPIERVESLILKIKNEIEILSSEKKIRSRVKTQMEKTQREYYLNEQLKAIQKELGTSEDGKNEFDEIEDKINNGKLTKEAKEKALSELKKLKNMSAMSAEATVSRSYIDWLVSIPWTKTKK

SEQ ID NO: 140357 - protein, 203 aa, Unknown
  Bacterial polypetide isolated from the Sargasso Sea
MGGTGIVIGLAWTEVGGEILKIETVNMPGKGRMQITGKLGDVMQESVKAAKSFVRSKSLEYGIIPPFFEKKDFHIHVPEGATPKDGPSAGIAMVTSIVSSITNIPVNREIAMTGEVTITGQVLQIGGLKEKLLAAHRAGVKKVLIPKENEKDLVDIPKKVREDIKIIPVETAGEVLKIALTKELKPIEWSEVDKISKGEKEDK

SEQ ID NO: 140358 - protein, 223 aa, Unknown
  Bacterial polypetide isolated from the Sargasso Sea
MVNFKDSFCVLPLRDIVVFPNMIVPLFVGRSKSIKALDFAEKNEKEIFLVAQKDANTDEPNIRDIYKFGTVASILQLLRLPDGTVKVLVEGLERAKISHFTDNKDFFEAYIDHVPNKNVIDKEIDALSRTAMNQFESYVKLNRKVPPELLVSLNQINDHSKLADTMSAHLNIKLSDKQTLLETSSVKDRLNRIVEFIDQEIGVLSVEKKIRSRVKKQMDKTQK

SEQ ID NO: 140359 - protein, 46 aa, Unknown
  Bacterial polypetide isolated from the Sargasso Sea
YGIIPPIFEKKDFHIHVPEGATPKDGPSAGIAMVTSIVSSITNIPV

SEQ ID NO: 140360 - protein, 276 aa, Unknown
  Bacterial polypetide isolated from the Sargasso Sea
FPGMVAPLFVGRKQSVNALNHSMTTDKRIFLLAQKNSETDNPNIKDLYKYGTIAKVLQLLKLPDGTIKVLVEGIERAKLKSLNSNKDYIAANIDQINKKVKLNPKIKALIKVVLEQFEEYIKVNKKLPTDLNNNLKTINDPNKIADLISVNLSISLQQKQELLELTSLEQRLDKIYSYLVSEIDSFQVEKKIKGRVKRQMEKTQKEYYLNEQMKAIQKELGENEESDEISEIEKKLEQIKLSKEALEKCKSELKKLKSMSPMSAEATVIRNYLDWV

SEQ ID NO: 140361 - protein, 219 aa, Unknown
  Bacterial polypetide isolated from the Sargasso Sea
GLAWTQAGGELLTTEVTVMKGTGKVLLTGKLGDVMKESAHAALSYVRTNANRLGIYSSVFKETDIHVHVPEGAVPKDGPSAGVTITTSLVSAFTGIPVLREVAMTGEVTLRGKVLPIGGLKEKLLAAKRGMMKTVLIPAKNEKDLTEVPEEIKTELQILSVENMDTVLERALECVPISVSDPEEDNKEERKLSEEESLVPQQKGNLTEPPFEVPNFPQH

SEQ ID NO: 140362 - protein, 271 aa, Unknown
  Bacterial polypetide isolated from the Sargasso Sea
KEIIRNYTRESGVRNLEREISKVTRKVVKKIVNEEEKKVEVNEENIPNFLGVKKFKFGELEQENRVGIVIGLAWTEFGGEILKVETVNMPGKGRMQITGKLGDVMQESVKAAKSFVRSKSLEYGIIPPTFEKKDFHIHVPEGATPKDGPSAGIAMVTSIVSSITNIPVNRELAMTGEVTVTGQVLPIGGLKEKLLAAHRAGVKRVLIPKENEKDLIDVPKKVREDIKIIPVENADEVIKMALTKEPKPIEWTEVEKLSESKKDEKSQASIQ

SEQ ID NO: 140363 - protein, 270 aa, Unknown
  Bacterial polypetide isolated from the Sargasso Sea
MDVKTSSPLLPLRDIVVFPSMVIPLFVGRDKSISALNEVMKKEKKIILVTQKNSEIDDPKKTDIFMYGCEGSILQLLKLPDGTVKVLVEGVRRVKIIDFKDNEKFITCDFTPHNDVIDGDEDLYPLAVTAIRRMEKLTSINKKVSSETINTIKQLKDPSQIADNIASHITATISEKQQIFETIDVKKRLNAIIKIMENETSIIGVEKRIRGRVKTQMEKTQREYYLNEQLKAIQKELGEIEDGKDENTSLNKAILKSKMPKDIEKKCLQE

SEQ ID NO: 140364 - protein, 260 aa, Unknown
  Bacterial polypetide isolated from the Sargasso Sea
YTRESGVRNLEREISKVTRKVVKKVVNGEVEKVQVNDKNVPDFLGIKKFKYGEVEDKNKTGIVIGLAWTEVGGEILKIETVNMPGKGRMQITGKLGDVMQESVKAAKSFVRSKSLEYGIIPPFFEKKDFHIHVPEGATPKDGPSAGIAMVTSIVSSITNIPVNREIAMTGEVTITGQVLQIGGLKEKLLAAHRAGVKKVLIPKENEKDLVDVPKKVREDIKIIPVETADEVLKIALTKELKPVEWTEVEKISDDKKDDKS

SEQ ID NO: 140365 - protein, 234 aa, Unknown
  Bacterial polypetide isolated from the Sargasso Sea
MELKVNLPLLPLRDIVVFPSMVIPLFVGRDKSITALNETMKQDKKIILVTQKNSEVDDPKKNDIFTYGCESNILQLLKLPDGTVKVLVEGNRRVKIVDFKDDEKFITCGFEYYEDQIDKNDDLLPLATTAVRRLEKLTSINKKISSETINSIKELKDPSKIADNIASHLNTTISEKQQMFETADVKKRLNIVIKIMENETSIIGVEKRIRGRVKTQMEKNQREYYLNEQLKAIQ

SEQ ID NO: 140366 - protein, 129 aa, Unknown
  Bacterial polypetide isolated from the Sargasso Sea
PEGATPKDGPSAGIGMVTSIVSSITNIPVRRDVAMTGEVTLTGQVLPIGGLKEKLLAAHRAGIKEVLIPKENEKDLVDMPKKIIDDIKITPVEYADQVIKIALTKELKPTEWVEVDISKKDDKSQASIQ

SEQ ID NO: 140367 - protein, 182 aa, Unknown
  Bacterial polypetide isolated from the Sargasso Sea
VTMPGKGRMQITGKLGDVMQESVKAAKSFVRSKCLEYGIIPPIFEKKDFHIHVPEGATPKDGPSAGVAMVTSIVSSITNIPVRKDVAMTGEVTLTGQVLQIGGLKEKLLAAHRAGIKEVLIPKENEKDLVDMPKKIIEDIKITPVEHADQVIKIALTKELKPTEWVEVDISKKDDKSQASIQ

SEQ ID NO: 140368 - protein, 145 aa, Unknown
  Bacterial polypetide isolated from the Sargasso Sea
PPFFEKKDFHIHVPEGATPKDGPSAGIAMVTSIVSSITNIPVNREIAMTGEVTITGQVLQIGGLKEKLLAAHRAGVKKVLIPKENEKDLVDIPKKVREDIKIIPVETADEVLKIALTKELKPVEWTEVDKISESKKDDKSQASIQ

SEQ ID NO: 140369 - protein, 234 aa, Unknown
  Bacterial polypetide isolated from the Sargasso Sea
MDIKFTLPLLPLRDIVVFPSMVIPLFVGRDKSISALNEVMKKEKKIILVTQKNSEIDDPKKTDVFMYGCEGSILQLLKLPDGTVKVLIEGLKRVKITDFRDNDKFIMCDYSIHNDIVNKEDDLNSLASTAVRRLEKLTSINKKISSEVINTIKQLKEPSQIADNIASHVNATISEKQQIFETNDVKKRLNLIIKIMENETSIIGVEKRIRGRVKTQMEKTQREYYLNEQLKAIK

SEQ ID NO: 140370 - protein, 157 aa, Unknown
  Bacterial polypetide isolated from the Sargasso Sea
AKSFVRSKCLEYGIIPPLFEKKDFHIHVPEGATPKDGPSAGVGMVTSIVSSITNIPVRKDLAMTGEVTLTGQVLQIGGLKEKLLAAHRAGIKEVLIPKENEKDLVDMPKKIMDDIKITPVEHADQVLKIALTKELKPTEWVEVDITKKDDKSQASIQ

SEQ ID NO: 140371 - protein, 159 aa, Unknown
  Bacterial polypetide isolated from the Sargasso Sea
KAAKSFVRSKCLEYGIIPPVFEKKDFHIHVPEGATPKDGPSAGIGMVTSIVSSITNIPVRRDLAMTGEVTLTGQVLPIGGLKEKLLAAHRAGIKEVLIPKENEKDLVDMPKKIIDDIKITSVEYADQVVKIALIKELKPTEWVEVDISKKDDKSQASIQ

SEQ ID NO: 140372 - protein, 177 aa, Unknown
  Bacterial polypetide isolated from the Sargasso Sea
MSITGKLGDVMQESVKAAKSFVRSKSLEYGIIPPIFEKKDFHIHVPEGATPKDGPSAGVAMVTSIVSSITKIPVNREIAMTGEVTVTGQVLPIGGLKEKLLAAHRAGIKTVLIPKDNEKDLVEIPKKVKEDIKLIPVETADQVIKIALTKELKKVEWNDVENISKSKRDEKTQASIQ

SEQ ID NO: 140373 - protein, 202 aa, Unknown
  Bacterial polypetide isolated from the Sargasso Sea
MSDMVEGSVFPVLPLRDIVVFPHMIVPLFVGREKSVQALEGVMNDDKKILLVTQKNAGDDDPKPEDIYQVGTIGTVLQLLKLPDGTVKVLVEGTQRAKISNFKDNEQFFEASAELILDEDDSKEHDALARSVISQFEQYIKLNKKIPPEVLVSLNQIEEPSKLADTVASHLALKIAEKQELLELSTVAERLEKATHSWKQKS

SEQ ID NO: 140374 - protein, 159 aa, Unknown
  Bacterial polypetide isolated from the Sargasso Sea
SYVRSKSLEFGIIPPIFEKKDFHVHVPEGATPKDGPSAGIAMVTSIISSITGIPVNKTIAMTGEVTLRGHVLPIGGLKEKLLAAHRARIATVIIPEDNKKDLVEIPKNILDNIEIKTVKTVEEVLKIALTKELKPVEWIEVETLPKSKSVDKPTAGSTH

SEQ ID NO: 140375 - protein, 213 aa, Unknown
  Bacterial polypetide isolated from the Sargasso Sea
NLGELEADNKVGIVTGLAWTEYGGEILKIETVTMPGKGRMQITGKLGDVMQESVKAAKSFVRSKCLEYGIIPPLFEKKDFHIHVPEGATPKDGPSAGIGMVTSIVSSLTNIPVRKDVAMTGEVTITGQVLPIGGLKEKLLAAHRAGIKEAIIPKENEKDLVDMPKKIIDEIKITPVEYADEVLKIALTKELKRTEWVEVDLSKKDDKSQASIQ

SEQ ID NO: 140376 - protein, 268 aa, Unknown
  Bacterial polypetide isolated from the Sargasso Sea
MIDFRGYIDDEKVQIAKKHLIPKQVKENGLTSKQVKFNDTGIKEIISSYTRESGVRSLEREISNVLRKIAVDVVNKKLKTASISKKSVNEYLGIPKFQSDLAERTTKPGVVTGMAWTAAGGDILFIESSKMKGKGILTLTGQLGDVMKESASAAFTYVKSHTDILNLEDDFADKMDIHVHCPAGAIPKDGPSAGVGMFTSLVSLLANKPVKSKVAMTGEITLRGNVLAIGGVKEKVTAAHRAGIKTIILPHANKRDLEEIPEHIKKDL

SEQ ID NO: 140377 - protein, 242 aa, Unknown
  Bacterial polypetide isolated from the Sargasso Sea
QEVMKTDKSIILITQKNSEIDDPVGKDLYQFGCLSKVLQLLKLPDGTVKVLVEGEKRVRIVKHGEAKDNFLTCEVELAEDNNVSKELEPLALGLVKKFERLQVLSKKDFNETTNNLKNLKNPSQIANNISSNLNIQIFEKQELLEITDLKKRLEKIHSLIEKEISVLSVEKKIRGRVKNQMEKTQREYYLNEQLKAIQKELGEIDEGKDELSSLSNAITDAKMPKIAKEKCLSELKKLKSMS

SEQ ID NO: 140378 - protein, 280 aa, Unknown
  Bacterial polypetide isolated from the Sargasso Sea
GEFELSDGTIKEIIRNYTRESGVRNLEREISKVARKVVKKVVNGEEKKVTVNNDNISDFLGVKKFKYGELESSDKIGIVTGLAWTEFGGEILKIETVHMPGKGKMQITGKLGDVMQESVKAAKSFVRSKSLEYGVIPPLFEKKDFHIHVPEGATPKDGPSAGIAMVTSIVSSITNNPVNREIAMTGEVTVTGQVLPIGGLKEKLLAAHRAGIKKVIIPKDNEKDLIDIPKKVKEDIKIIPVETADEVVKLALKNELKRVEWTEVENISGAGKEKSQASIQ

SEQ ID NO: 140379 - protein, 191 aa, Unknown
  Bacterial polypetide isolated from the Sargasso Sea
LKIESAMMPGKGKMQITGKLGDVMQESVKAAKSYIRSKSLEFGIIPPIFEKKDFHVHVPEGATPKDGPSAGIAMVTSIVSSITGIPVDKNIAMTGEVTLRGHVLPIGGLKEKLLAAHRARISKVIIPEDNKKDLTEIPKNIMDDLTITTVKTVDEVLKVALVKELMPVEWIDAENLAKSKTGEKVTTGSPH

SEQ ID NO: 140380 - protein, 259 aa, Unknown
  Bacterial polypetide isolated from the Sargasso Sea
MDIKYNSPVLPLRDIVVFPSMVIPLFVGRDKSIAALNQVMKNEKKIVLVTQKNSEVDDPKKNDVFLYGCECNILQLLKLPDGTVKVLVEGNKRVKITEFKEETNFITCEFVYQNDVIEKDASLLTLALTAVKRLEKLNTINKKLSQDTVINIRQLKDPSKIADNIATHLNSTISEKQQIFEELDVKKRLNSVIKIMENEASIIGVEKRIRGRVKTQMEKTPREYYLNEQLKAIQKELGEIEDGKDETSNLNKLILKARM

SEQ ID NO: 140381 - protein, 284 aa, Unknown
  Bacterial polypetide isolated from the Sargasso Sea
VKEGELDIADGTIKEIIRSYTRESGVRNLEREISKVTRKVVKKVVNGEVEKVQVNEKNVPDFLGIKKFKYGEVEDKNKTGVVIGLAWTEVGGEILKIETVNMPGKGRMQITGKLGDVMQESVKAAKSFVRSKSLEYGIIPPIFEKKDFHIHVPEGATPKDGPSAGIAMVTSIVSSITNIPVNREIAMTGEVTITGQVLQIGGLKEKLLAAHRAGVKKVLIPKENEKDLVDIPKKVREDIKIIPVETADEVLKIALTKELKPVEWTEVEKISDDKKDDKSQASIQ

SEQ ID NO: 140382 - protein, 237 aa, Unknown
  Bacterial polypetide isolated from the Sargasso Sea
KKVVSGEEKKVNVSEKNIPDFLGVKKFKYGEVESEDKVGIVTGLAWTEFGGEILKIETIHMPGKGKMQITGKLGDVMQESVKAAKSFVRSKSLEYGIIPPIFEKKDFHIHVPEGATPKDGPSAGIAMVTSIVSSITNNPVHKHVAMTGEVTITGQVLPIGGLKEKLLAAHRAGIKKVVIPKENEKDLVDIPKKVREDIKITPVDNVDEVLKIALTKELKRIEWTEVENISKTGKDQK

SEQ ID NO: 140383 - protein, 265 aa, Unknown
  Bacterial polypetide isolated from the Sargasso Sea
IQESLGVRNLEREISKVTRKVVKKVVNGEEKKVSIDKKNLPDFLGVKKFKYGELEDKDKVGIVTGLAWTEFGGEILKIETVNMPGKGRMQITGKLGDVMQESVKAAKSFVRSKSLEYGIIPPLFEKKDFHIHVPEGATPKDGPSAGIGMVTSIVSSITNNPINREIAMTGEVTITGQVLPIGGLKEKLLAAHRAGIKHVIIPKDNEKDLVDIPKKVKEDIKITPVETVDEVLKIALTKELKRVEWTEVENISKTKKEDKSQASIQ

SEQ ID NO: 140384 - protein, 310 aa, Unknown
  Bacterial polypetide isolated from the Sargasso Sea
SKLFEENPSIPSEASFAIKNIHSSSFLVNFVSSNMNISVAEKFKILSINDLKKRALRCLKFMDVEFQKLSLKNDIQSKVRNDLDQQQREYFLNQQLKTIQEELGGSSNHQDIDEMKLKSKSKKWNKEVGNHFNKELIKLQRMNSQAADYSIQRNYLDLMLDLPWNEYSKDNFSLNNAQKTLNKDHYGLDDVKRRIIEQIAVMKLRGDMNSPILCFYGPPGVGKTSLGKSIAESLGREYVRISLGGLRDEAEIRGHRKTYIGAMPGRIVQNLKRVKTSNPVFVLDEIDKLSIGNQGDPSSAMLEVLDPEQN

SEQ ID NO: 140385 - protein, 238 aa, Unknown
  Bacterial polypetide isolated from the Sargasso Sea
VKKKKVIVNDTNVHDFLGVKKFKYGEVESDDKIGIVTGLAWTEFGGEILKIETVHMPGKGKMQITGKLGDVMQESVKAAKSFVRSKSLEYGIIPPIFEKKDFHIHVPEGATPKDGPSAGIAMVTSIVSSITNNPVHKHIAMTGEVTITGQVLPIGGLKEKLLAAHRAGIKQVIIPKENEKDLMDIPKKVREDIKITAVESVDEVLKIALKNELKRVEWTEVENISEANKDQKSQASIQ

SEQ ID NO: 140386 - protein, 129 aa, Unknown
  Bacterial polypetide isolated from the Sargasso Sea
DGPSAGLAMVTSIVSVLTGIPVRKDLAMTGEVTLRGNALAIGGLKEKLLAALRGGIKTVLIPEENEKDLVDIPDNVKTSLEIIAVKNVSEVLKIALTESPSPIEWDEAAEEAAAAKALEEQKQSQTIKH

SEQ ID NO: 140387 - protein, 189 aa, Unknown
  Bacterial polypetide isolated from the Sargasso Sea
IETVNMPGKGRMQITGKLGDVMQESVKAAKSFVRSKSLEYGILPPIFEKKDFHIHVPEGATPKDGPSAGIAMVTSIVSSITNNPVNREIAMTGEVTITGQVLAIGGLKEKLLAAHRAGIKHVLIPKDNEKDLADIPEKVKNDIKISPIKHADEALKIALTKEFKRVEWVEVQDIAESKKEDDSEKILTN

SEQ ID NO: 140388 - protein, 291 aa, Unknown
  Bacterial polypetide isolated from the Sargasso Sea
MIKNILPVLPLRDIVVFPNMVAPLFVGRKHSVNALNSVMLGEKKIFLLSQKNSDVDNPDEKNLYKYGTVAKVLQLLKLPDGTLKVLVEGQNRAKVSKLTFNKDFIVATITDIKNSYKKNSSIKALQKLTVEQFEEYQKYNKKINIDLVNNIKTYSEANKVADVISANINISLEQKQEILEIESVEDRLNKIYSHLTTEIDSFQVEKKIKGRVKRQMEKTQKEYYLNEQMKAIQKELGESEDIDEVSELEKKIEEYSLSKEAKEKCKSEIKKLKSMSPMSAEATVIRNYLEW

SEQ ID NO: 140389 - protein, 449 aa, Unknown
  Bacterial polypetide isolated from the Sargasso Sea
LDTVPMLKRMEKVLPLLRKEVEVGRLQKELSAEVNKQIGERQREFFLKEQLKLIQQELGISKDDKSADREEFLARLEGKTLTAAAQKRIDEELNKLSILEAGSPEYAVTRNYLDWATALPWGIQGQDKLDLGHARKVLDKHHAGMDDIKQRITEFLAVGAFKGEIAGSIVLLVGPPGVGKTSIGKSIAESLGRPFYRFSVGGMRDEAEIKGHRRTYIGAMPGKLVQALKEAEVMNPVIMLDEIDKMGTSYQGDPASALLETLDPEQNVEFLDHYLDLRLDLSKVLFVCTANTLDSIPGPLLDRMEVIRLSGYITEEKLAIAKRHLWPKQLEKAGVPKARLSISDAALRTVIEGYAREAGVRQLEKQLGKLVRKSVVKLLENPEAKIRIGAKDLEEALGMPVFRNERVLAGTGVITGLAWTSMGGATLPIEATRIHTLNRGFKLTGQLGD

SEQ ID NO: 140390 - protein, 261 aa, Unknown
  Bacterial polypetide isolated from the Sargasso Sea
MNYPVLPLRDIVIFPHMIVPLFVGRDKSVLALEEAMSKKKEIVLLSQKDPRTEDPKKKDLFDVGTIGKILQLLKLPDGTVKVLVEGKKRVKVTKICFEESFLKADVKTVVESADNNVDKTKINVLHTVFEDFINLNKKTNNELINVISEIKDPGHLSDTIASNLNLEISEKQKFLENFNVSKRIEGLIIKLETEIGSLQAENKVRSRVKRQMEKIQREYYLNEQLKAIQKELGTSEDGKNEFQELDEKIKKVKLSKEALKR

SEQ ID NO: 140391 - protein, 204 aa, Unknown
  Bacterial polypetide isolated from the Sargasso Sea
MVENNIPVLPLRDIVVFPHMVVPLFVGRDKSVKALEKVMTGDKRIMLITQKSASVDDPKKDDLFDFGTIANVLQLLKLPDGTVKVLVEGLQRASINMFTDNEDYLVSNIDLIDENNDSSDKKLRAISKSITDLFDKYVNLNKKIPPEVLGTINEIDDLAKLSDTIASHLSIKLSDKQEILEAIDLTERFEKIMNFIQAELDVMQ

SEQ ID NO: 140392 - protein, 250 aa, Unknown
  Bacterial polypetide isolated from the Sargasso Sea
MNSESKKPLLPLRDIVIFPSIVVPLFVGRKKSIKALEEVMKSDKSVVLVTQKNSEVDDPGEKDIYSYGCLSKVLQLLKLPDGTVKVLVEGLARVKILEIEDDTKKFLCCKSQIIESENENEEHKIFATNLIKKFEKLSTLNKKDVSDFTKGLKSLKNATQLADNICSNLNIQIFEKQALLEMTDLKKRLEKIYQLIEKETSVISMEKRIRGRVKNQMEKTQREYYLNEQLKAIQKELGEIEDGKDEISNL

SEQ ID NO: 140393 - protein, 519 aa, Unknown
  Bacterial polypetide isolated from the Sargasso Sea
MVDSEGTVVTTADLPEKVPVLPAFHRPIFPGILSPISVDNQTSQWLREQISEDKMIAVVMVKPDKLREDQDMLVNASQLYRLGTLAYVLNWVELPDQSCQFMLSTLQRIKIKRYQRKQQHYQAEIGYFEDKKIKLTEELKAGAAAIVSTLKELIPQNPTFSQEMFHLLNQVDINDPVMLADLAASMTNAKSEDLQKILETENLEQRIENTLLLLREEYDLSLLKEQISQKIDERVSKQQRDFFLREQLREIQQELGLEQERKSLELRRFRERFENLDLNEEALKRVDDEMHRYSMLDEHSPELQIVHQYLDCIASLPWKQYSHDRLSLSRAEKILNQDHYGMQKVKTRILEFIGVSKLRKTTKGAILCFAGPPGVGKTSLGRSIARALGREFYRFSVGGLTDESELKGHRRTYIGAMPGRFIQALKSVKTGNPVILLDELDKMGQSYRGDPLSVLLEVLDPEQNREFMDHYLDLHYDLSNVLFIATANVLDTIPPALKDRLEIINLSGYINEEKIQIGT

SEQ ID NO: 140394 - protein, 216 aa, Unknown
  Bacterial polypetide isolated from the Sargasso Sea
KYGEVETENRIGVVTGLAWTEFGGEILKIETVNMPGRGKMQITGKLGDVMQESVKAAKSFVRSKSLDYGIIPPVFEKKDFHIHVPEGATPKDGPSAGIAMVTSIVSSITKIPVNRKIAMTGEVTVTGQVLAIGGLKEKLLAAHRAKIEHVLIPKENEKDLVDIPKKVREDIKITPVEFVDEVLKIALTKELRKTEWVEVENISKTKNDDKSQVLTN

SEQ ID NO: 140395 - protein, 255 aa, Unknown
  Bacterial polypetide isolated from the Sargasso Sea
VKENELDLEDGTIKEIIRSYTRESGVRNLEREISKVSRKVVKKVVNGEKSKVNVNKNNLPDFLGVKKFKYGEVEAQDRIGIVTGLAWTEFGGEILKIETVNMPGKGRMQITGKLGDVMQESVKAAKSFVRSKSLDYGIIPPVFEKKDFHIHVPEGATPKDGPSAGIAMVTSIVSSITKNPVDKNIAMTGEVTITGQVLPIGGLKEKLLAAHRAGINQVIIPKENEKDLIDIPKKVREDIKITVVENVDEVLKISS

SEQ ID NO: 140396 - protein, 258 aa, Unknown
  Bacterial polypetide isolated from the Sargasso Sea
REIGKVCRKVVTKLVRNGKDRKITVTSKLVKELLGVPVHQRDYKADQNEVGIAMGLGVTQMGGELMLIEAVLMPGSGKTVLTGKLGEVMQESAKAAFSFVRSNTQLLGIDEEDFAKSDLHIHIPDGAIPKDGPSAGLPLMIAIISAFTKNPVNNEVAMTGEITLRGQITEIGGLKEKLLAARRGLLTKVLIPEDNKKDLDEIPKEIMEGLKVIPLNKIQDALEHALENFPLIEKALPEQPLVISENLSPETNPQTPVA

SEQ ID NO: 140397 - protein, 153 aa, Unknown
  Bacterial polypetide isolated from the Sargasso Sea
KSLEYGIIPPIFEKKDFHIHVPEGATPKDGPSAGIAMVTSIVSSITSNPVHKHIAMTGEVTITGQVLPIGGLKEKLLAAHRAGIKQVIIPKENEKDLTDIPKKVREDIKITAVESVDEVLKIALKNELKRVEWTEVENISEANKDQKSQASIQ

SEQ ID NO: 140398 - protein, 307 aa, Unknown
  Bacterial polypetide isolated from the Sargasso Sea
YTEDEKINIANKYLLPKQIKDNGVKDGEMNLTDGTIKDIIRYYTRESGVRNLEREISKITRKVVKKVVNNESKDVTVNDKNLGDFLGVKKFKFGELEEQNKIGIVTGLAWTEFGGEILKIETVNMPGKGRMQITGKLGDVMQESVKAAKSFVRSKCLEFGIIPPIFEKKDFHIHVPEGATPKDGPSAGIAMVTSIVSSITKIPVKREIAMTGEVTITGQVLPIGGLKEKLLAAHRAGIKQVLIPKDNEKNLVDIPKKVIDDIKIAPVSTADEVLKIALTKELKPTDWVEVDKISENKKSEKTQASIQ

SEQ ID NO: 140399 - protein, 171 aa, Unknown
  Bacterial polypetide isolated from the Sargasso Sea
AGGDILFIESSKMKGKGILTLTGQLGDVMKESASAAFTYVKSHTDILNLEDDFADKMDIHVHCPAGAIPKDGPSAGVGMFTSLVSLLTNKPVKSKVAMTGEITLRGNVLAIGGVKEKVTAAHRAGIKTIILPHANKRDLEEIPEHIKKDLSFHFAKEVMDVIDVAIPNLKK

SEQ ID NO: 140400 - protein, 341 aa, Unknown
  Bacterial polypetide isolated from the Sargasso Sea
MSKIKSDLPLIPLRDVVVFPGIVTTLFVGRAKSVEALNIAMTSNKKLVLVSQKDAGNEDPKVEDIYQYASISNLLQLIKLPDGTMKVLVEGYKRCSIDKIIEKDSYTIARVTEEDDLPVKENESKNLVRLIKAKFEDYISVTKRIPPEIVSTVDSLDELSRLMDTITGHLSIETSKKQEILETLDLKERAEKVLTFIESQLDVVDVEKKVRDRVKKQMEKSQREYYLNEQIKAAQKELGEIGEEGDELENLEKKIHEVGMTKEALKKAKSELAKFKHMAPSSAEASVVRTYLDCLVDVPWKKKSKVKTDIKASMEILEEDHYGLEEVKERIVEYLAVQNKS

SEQ ID NO: 140401 - protein, 142 aa, Unknown
  Bacterial polypetide isolated from the Sargasso Sea
FEKKDFHIHVPEGATPKDGPSAGIAMVTSIVSSITKVPVKREIAMTGEVTITGQVLPIGGLKEKLLAAHRAGVKKVLIPKENEKDLVDVPKKVKDDIEIIPVETADEVIKIALTKELKPTEWTEVDKLTETKKDDKSQASIQ

SEQ ID NO: 140402 - protein, 167 aa, Unknown
  Bacterial polypetide isolated from the Sargasso Sea
VECTAIDSGEGKGALKTTGQLGDVMKESSAIAHTFTRSFLETKDPGNEYLANTSLHVHVPAGATPKDGPSAGITITTSLLSLAMGKPVKPNLAMTGELTLTGRVLPIGGVKEKTIAARRSGVKTIIFPSGNKKDYDELSEDIREGLEAHFVSTYEEVYHQALDWESS

SEQ ID NO: 140403 - protein, 174 aa, Unknown
  Bacterial polypetide isolated from the Sargasso Sea
AWPGHPWGGATLSIEANVVHSKQRGFKLTGQLGDVMKESAEIAYSYVASNLELFSLSKEQLDDAFVHLHVPEGATPKDGPSAGITMATALLSLLMKKRVPRKVAMTGELTLTGQVLAVGGIREKVIAARRVGIKEIILPEACRRDFDELPDYLKHGLSVHFAEQYSDVFRILWA

SEQ ID NO: 140404 - protein, 279 aa, Unknown
  Bacterial polypetide isolated from the Sargasso Sea
MNLKDGTIKEIIRNYTRESGVRNLEREISKVTRKVVKKVVNDEEKSVEVNDKNISEFLGVKKYKFGELETENKVGIVIGLAWTEFGGEILKVETVNMPGKGRMQITGKLGDVMQESVKAAKSFVRSKSLEYGIIPPTFEKKDFHIHVPEGATPKDGPSAGIAMVTSIVSSIANIPVDREIAMTGEVTVTGQVLPIGGLKEKLLAAHRAGVKKVLIPKDNEKDLIDIPKKVREDIKIIPVDSADEVLKIALTKELKPVEWTEVEKISESKKDEKSQASIQ

SEQ ID NO: 140405 - protein, 465 aa, Unknown
  Bacterial polypetide isolated from the Sargasso Sea
SFDGLNTIGTVANVLRYITSPEDGAHHLICQGVERFRLIAPVAGLGFRAARVEMLPDTTLRDSAVDARTLVLRQRAGEMIGLLPNAGGELVRALDAIESPGLLADTVAGLLEIPPGRKQEILETLDLCKRLDKVLDAVAGRIEVLRLSQEIGEQTRGRIDQRQREMMLREQLRTIQQELGENVESREEARKLAEAIDAAHMPPDVEAHARKELGRLERMPEASSEYSISVSYLEWLTELPWALAPEAPIDIARARQILDDAHFGLEKVKRRILEYLGVRKLNPQGKAPILCFLGPPGVGKTSLGQSIAQALARPFVRVSLGGVHDESEIRGHRRTYIGAMPGNIVQAIRKAGARNCVMLLDELDKLGHGVHGDPGAAMLEVLDPEQNATFRDNYLGVPFDLSAVVFVATANQLEGIPGPLRDRLEILDLPGYTEAEKFQIARRFLVPRELEACGLTPAQCELSDE

SEQ ID NO: 140406 - protein, 234 aa, Unknown
  Bacterial polypetide isolated from the Sargasso Sea
MISENSKPLLPLRDIVIFPSIVTPLFVGRKKSIKALEEVMKLDKSIVLVTQKNSEVDDPKEEDLYSFGCLSKILQLLKLPDGTVKVLVEGIERVKILELDNENKKYFNCKISIVSSEKNDEDSKVFATSLIKKFEKLSSLSRKDIVDFTKSLKMITSPSKIADNICSNLNIQISDKQHLLEMVDVKKRLEKIYEIIEKETSVITMEKKIRGRVKNQMEKTQREYYLNEQLKAIK

SEQ ID NO: 140407 - protein, 238 aa, Unknown
  Bacterial polypetide isolated from the Sargasso Sea
GEKEKVNVNKNNLSDFLGVKKFKYGEVEAQDRVGIVTGLAWTEFGGEILKIETVNMPGKGRMQITGKLGDVMQESVKAAKSFVRSKSLDYGIIPPVFEKKDFHIHVPEGATPKDGPSAGIGMVTSIVSSITKNPVDKNIAMTGEVTITGQVLPIGGLKEKLLAAHRAGINQVIIPKENEKDLIDIPKKVREDIKITPVEYVDEVLKIALKNELKKVEWTEVENISKSEKDQKSQASIQ

SEQ ID NO: 140408 - protein, 233 aa, Unknown
  Bacterial polypetide isolated from the Sargasso Sea
VQVSDKNIPDFLGIKKFKFGEVEDKDKTGIVIGLAWTEVGGEILKIETVNMPGKGRMQITGKLGDVMQESVKAAKSYVRSKSLEYGIIPPFFEKKDFHIHVPEGATPKDGPSAGIAMVTSIVSSITKIPVKREIAMTGEVTITGQVLQIGGLKEKLLAAHRAGVKKVLIPKENEKDLVDIPKKVREDIKIIPVETADEVLKIALTKELKPVEWTEVDKISEGKKDDKSQASIQ

SEQ ID NO: 140409 - protein, 242 aa, Unknown
  Bacterial polypetide isolated from the Sargasso Sea
MKTTIELPLLPLRDVVVYPHMVIPLFVGREKSIEALEAAMTGDKQILLLAQKNPADDDPGEDALYRVGTIATVLQLLKLPDGTVKVLVEGEQRGAVERFMEVDGHLRAEVALIDEVEAPERESEVFVRSLLSQFEQYVQLGKKVPAEVLSSLNSIDEPSRLVDTMAAHMALKIEQKQDILEIIDLSARVEHVLALLDGEIDLLQVEKRIRGRVKEQMERSQREYYLNEQMKAIQKETRDGEE

SEQ ID NO: 140410 - protein, 174 aa, Unknown
  Bacterial polypetide isolated from the Sargasso Sea
TGKLGDVMQESVKAAKSFVRSKSLEYGIIPPIFEKKDFHIHVPEGATPKDGPSAGIGMVTSIVSSITNNPVYKHIAMTGEVTITGQVLPIGGLKEKLLAAHRAGIKQVIIPKENEKNLVDIPKKVREDIKITPIENVDEVLKIALKKELKRVEWTEVENISKTAKDQKSQASIQ

SEQ ID NO: 140411 - protein, 306 aa, Unknown
  Bacterial polypetide isolated from the Sargasso Sea
TEDEKINIANKYLLPKQIKDNGVKEGEMKLADDTIKEIIRSYTRESGVRNLEREISKVTRKVVKKVVNNEEKSVVVNEKNIPDFLGIKKFKFGELEAKDKVGIVIGLAWTEFGGEILKVETVNMPGKGRMQITGKLGDVMQESVKAAKSYVRSKCLEFGVTPPLFEKKDFHIHVPEGATPKDGPSAGIAMVTSIVSSITKVPVKREIAMTGEVTITGQVLPIGGLKEKLLAAHRAGVKKVLIPKENEKDLVDVPKKVKDDIEIVPVETADEVIKIALTKELKPTEWTEVDKLTETKKDDKSQASIQ

SEQ ID NO: 140412 - protein, 255 aa, Unknown
  Bacterial polypetide isolated from the Sargasso Sea
MEVKLSQPLLPLRDIVVFPSMVIPLFVGRDKSITALNEVMKSDKKIILVTQKNSEVDDPKKNDVFSYGCESNILQLLKLPDGTVKVLVEGIKRVKIIDFKDDEKFITCTYEHQKDVLTKDEDLLPLALTAVRRLEKLTSVNKKISSETISNIKQLKDPSKIVDNIVSNLNASISEKQQIFETLDVKKRLNAAIKMMESETSIIGVEKRIRGRVKTQMEKTQREYYLNEQLKAIQKELGEIEDGQDETTNLKKSIQ

SEQ ID NO: 140413 - protein, 254 aa, Unknown
  Bacterial polypetide isolated from the Sargasso Sea
MDIKVNLPLLPLRDIVVFPSMVIPLFVGRDKSITALNEVMKNEKKIVLVTQKNSEVDDPKKTDVFSYGCESNILQLLKLPDGTVKVLVEGTKRVKIIDFKDDNKFITCTFEYLNDQFDKNEDLMPLATTAVRRLDKLNTINKKISSETINSIKELKNPSAIADNIASHLSTTISEKQQIFETSDVKKRLNAVIKIMENETSIIGVEKRIRGRVKTQMEKTQREYYLNEQLKAIQKELGEIEDGKDETSNLNKAI

SEQ ID NO: 140414 - protein, 282 aa, Unknown
  Bacterial polypetide isolated from the Sargasso Sea
MDVKISLPLLPLRDIVVFPSMVIPLFVGRDKSISALNEVMKKDKKIILVTQKNSEIDDPKKTDVFMYGCEGSILQLLKLPDGTVKVLVEGIKRVKILDFKDNEKFITCDYTHYNDVISKDEDLFPLAATALRRLEKLTSINKKISSETINTIKQLKDPSQIADNIASHITATISEKQQIFETVDVKKRLNAIIKIMENETSIIGVEKRIRGRVKTQMEKTQREYYLNEQLKAIQKELGEIEDGKDETTSLNKAITRAKMPKEVEKKCLQELKKLKNMSPMSA

SEQ ID NO: 140415 - protein, 106 aa, Unknown
  Bacterial polypetide isolated from the Sargasso Sea
MFLKLRKDMKSPILCLFGPPGVGKTSLGKSIAKSINREYVRVSLGGLRDEAEIRGHRKTYIGAMPGRIIQSVRKSGTSNPVFVLDEIDKISSGSQGDPSSALLRVA

SEQ ID NO: 140416 - protein, 264 aa, Unknown
  Bacterial polypetide isolated from the Sargasso Sea
KENGLTTKQVKINDTGIKEIISSYTRESGVRSLEREISNVLRKIAVDVVNKKLKTASISKKTVNEYLGIPKFQSDLAERTTKPGVVTGMAWTAAGGDILFIESSKMKGKGVLTLTGQLGDVMKESASAAFTYVKSHTDILNLKDDFADKMDIHVHCPAGAIPKDGPSAGVGMFTSLVSLLTNKPVKSKVAMTGEITLRGNVLAIGGVKEKVTAAHRAGIKTIILPHANKRDLEEIPDHIKKDLSFHFAKEVMDVIDVAIPNLKK

SEQ ID NO: 140417 - protein, 108 aa, Unknown
  Bacterial polypetide isolated from the Sargasso Sea
QQEVDRVALPEDLQNNGEHYGLKVKGDSMIEAGIADGDTVIIKKVSNVDNGQIAVVLIDDQEATLKRVRKKGNTIALEAANRNYGTKIYAANRIKIQGKLVSLYRNFH

SEQ ID NO: 140418 - protein, 290 aa, Unknown
  Bacterial polypetide isolated from the Sargasso Sea
LFFSSLKKIVLTLQENNRTIKKAKKSNPKISNEPQIKENIAEETKNNKQQDLLLPKENPLKEVPKENIDVKSEEQKEKNVMPSTELLDRALDDGASLTESELSQIASLLEDKLEEFGIEATVESVLPGPVVTRFEIQPAPGTKASKITNIAQDIARSLSVSSVRVVEVIEGKSFVGIEIPNNNRKMVRLTEILSSKAFKSSPSNLSVALGQDISGNPIVVDLSKMPHMLVAGTTGSGKSVGLNAMLLSLLFKSDPEDVRLILVDPKMLELAVYDGIPHLLTPVITDRQMQ

SEQ ID NO: 140419 - protein, 213 aa, Unknown
  Bacterial polypetide isolated from the Sargasso Sea
MLTKKQKELFVYLNNYISSNDISPSFEEMKNAVNLKSKSGIHRLITSLEQRGYIKRLKHKARAMEITKDLPNKNVKSINSYKEESFLNIPLVGSIAAGEAIEAINSPDSMISVPRSLVSKNSTYFGLKVKGLSMIDEGIFDGDIAIIKKTNSAENGKIAAVLTLDNQVTLKKVKMTNQKIFLIPANKAYQIKEHSLGDVQIQGTLSGIIRKYN

SEQ ID NO: 140420 - protein, 152 aa, Unknown
  Bacterial polypetide isolated from the Sargasso Sea
MLTKKQKELFEFLKIYISSNEMCPSFEEMKEAVNLKSKSGIHRLITSLEQRGYIKRLKHKARAVEITKDLPNFKNISNQTNTDSNFINIPLIGSIAAGDAIEAIENSDQFITVPNSLVSKNFKYFGLKIKGLSMIDEGIFDGDIAVIKKTNN

SEQ ID NO: 140421 - protein, 87 aa, Unknown
  Bacterial polypetide isolated from the Sargasso Sea
LKVEGDSMIEAGINDGDTVIVKKTDVADNGKIVVALIDDHEAMLKRIRRKGKTVALESANKNYETKIFGPDRVKVQGILVSLYRNFQ

SEQ ID NO: 140422 - protein, 46 aa, Unknown
  Bacterial polypetide isolated from the Sargasso Sea
MLTKKQKNLLLFINKKLRSSGVSPSYEEMKQSLNLKSKSGIHRLIS

SEQ ID NO: 140423 - protein, 47 aa, Unknown
  Bacterial polypetide isolated from the Sargasso Sea
MLTKKQKNLLLFINKKLRSSGVSPSYEEMKDSLNLKSKSGIHRLISA

SEQ ID NO: 140424 - protein, 127 aa, Unknown
  Bacterial polypetide isolated from the Sargasso Sea
DADIPVLGSIAAGTPIEAIQNEVTRIPLPENIEKKGEFFGLKVSGDSMIEAGINDGDTVIIKKTDTAENGKIVVALIDGHEAMLKRLRIKGKTVALESANRNYETKIFGPDRVKVQGILVSLYRNFH

SEQ ID NO: 140425 - protein, 56 aa, Unknown
  Bacterial polypetide isolated from the Sargasso Sea
MLTKKQKNLLLFINKSLRSSGVSPSYDEMKKSLNLKSKSGIHRLISALQERGFIKR

SEQ ID NO: 140426 - protein, 99 aa, Unknown
  Bacterial polypetide isolated from the Sargasso Sea
MKIYKIIGEHYGLKVKGDSMIEAGINDGDTVIVKKTSNVDSGQIAVVLIDDQEATLKRVRKKGNTIALEAANRNYGTKIYAANRIKIQGKLVSLYRNFH

SEQ ID NO: 140427 - protein, 52 aa, Unknown
  Bacterial polypetide isolated from the Sargasso Sea
MLTKKQKNLLLFINKKLRSSGVSPSYEEMKQSLNLKSKSGIHRLISALEERR

SEQ ID NO: 140428 - protein, 139 aa, Unknown
  Bacterial polypetide isolated from the Sargasso Sea
VIKGGLDKSKRNSSKVSVLGSIAAGTPIEAIQHEVDKVALPEDLQKNGEYFGLKVKGDSMIEAGINDGDTVIIKKTSTADTGQIAVVLIDEQEATLKRIRKKGNTIALEAANKNYDTKIYASNRIKIQGRLISLYRNFH

SEQ ID NO: 140429 - protein, 130 aa, Unknown
  Bacterial polypetide isolated from the Sargasso Sea
DNKSTDVSVLGSIAAGTPIEAIQQEVDRVALPEDLQNNGEHYGLKVKGDSMIEAGIADGDTVIIKKVSNVDNGQIAVVLIDDQEATLKRIRKKGNTIALEAANRNYGTKIYAANRIKIQGKLVSLYRNFH

SEQ ID NO: 140430 - protein, 133 aa, Unknown
  Bacterial polypetide isolated from the Sargasso Sea
DANKINKNEISVLGSIAAGTPIEAIQNEVSRIPLPSNIENNGEFFGLKVKGDSMIEAGISDGDTVIIKKADKAENGKIVVALIDDHEAMLKRIRIKGKTVALESANRNYETKIFGPDRVKVQGVLISLYRNFN

SEQ ID NO: 140431 - protein, 48 aa, Unknown
  Bacterial polypetide isolated from the Sargasso Sea
MLTKKQKNLLLFINKKIRSSGVSPSYEEMKNSLNLKSKSGIHRLITAL

SEQ ID NO: 140432 - protein, 97 aa, Unknown
  Bacterial polypetide isolated from the Sargasso Sea
MLTKKQKILFEYLDKYIDGSGISPSFEEMKQALGLKSKSGIHRLITSLEERGYIRRIKHKARAMEIVKNQKESSEKYENFKNQNTLIPLLGSIPAGT

SEQ ID NO: 140433 - protein, 112 aa, Unknown
  Bacterial polypetide isolated from the Sargasso Sea
MDLDEITLSEKIPIVEPAYVPNDSLWEELYGLSQIKADLAFDLWDIDGGEIPGQMENGEIVVAIPDIGLKWDHPDLIDNVWQNLGEDVDGDGVVLEFINNEWVFDPDDENGV

SEQ ID NO: 140434 - protein, 211 aa, Unknown
  Bacterial polypetide isolated from the Sargasso Sea
MLTKKQKELFVYLRDYIYSNDISPSFEEMKNAVNLKSKSGIHRLITSLEQRGYIKRLKHKARAMEITKELQNNSSNVNPTENSFLNIPLVGSIAAGEAIEAINSSNSMISVPKSLVSKHSTYFGLKVKGLSMIDEGIFDGDIAIIKKTTSAENGKIAAVLTLDNEITLKKIKMTNQKIYLIPANKAYDIKEHKIGEVQIQGTISGIIRKYN

SEQ ID NO: 140435 - protein, 90 aa, Unknown
  Bacterial polypetide isolated from the Sargasso Sea
HFGLKVSGDSMIEAGINDGDTVIVKKTNTANNGQIVVALIDDHEAMLKRIRKKGKVVALESANKRYETKIFGPDRVKVQGVLVSLYRNFQ

SEQ ID NO: 140436 - protein, 47 aa, Unknown
  Bacterial polypetide isolated from the Sargasso Sea
MLTKKQKNLLIFINKKIRSSGISPSYEEMKNSLNLKSKSGIHRLIQL

SEQ ID NO: 140437 - protein, 110 aa, Unknown
  Bacterial polypetide isolated from the Sargasso Sea
MLTKKQKELLNYIHKFQSKNGVTPSYEEMKSALNLKSKSGIHRLVLALEERGFVKRLAHKARALEIIKDGISNIKVSEKRKDNLVVGNFINNSNEDNHKLSTLPLLGKIA

SEQ ID NO: 140438 - protein, 45 aa, Unknown
  Bacterial polypetide isolated from the Sargasso Sea
MLTRKQLELFNFLKKHLSASDIAPSFDEMKDALNLKSKSGIHRLV

SEQ ID NO: 140439 - protein, 151 aa, Unknown
  Bacterial polypetide isolated from the Sargasso Sea
ANDIYNSFSPSVIKGGLSETNKTNKNDISVLGSIAAGTPIEAIQNEVSRIPLPSNIENNGEFFGLKVKGDSMIEAGISDGDTVIIKKADRAENGKIVVALIDGHEAMLKRIRIKGKTVALESANRNYETKIFGPDRVKVQGVLISLYRNFN

SEQ ID NO: 140440 - protein, 149 aa, Unknown
  Bacterial polypetide isolated from the Sargasso Sea
DIYNSFSPSVIKGGLDEEKPISDDTEVPVLGKIAAGTPVEAIQNEVSRIPLPSNLEKNGDYFGLKVQGDSMIDAGINEGDTVIIKRADTADNGKIVVALIDEQEAMLKRIRKKGKVVALESANKNYETKIFGPDRVKVQGILVSLYRNF

SEQ ID NO: 140441 - protein, 88 aa, Unknown
  Bacterial polypetide isolated from the Sargasso Sea
VVKATGESMRDAGIFPNDLLVVDRSITPKSGHVVIACIQSELLVKRLKIIRDKCFLVAENKAFDPIEVKDDDELIIWGVVTRVIHSLT

SEQ ID NO: 140442 - protein, 52 aa, Unknown
  Bacterial polypetide isolated from the Sargasso Sea
MLTKKQKNLLLFINKKLRSTGVSPSYEEMKESLNLKSKSGIHRLISALEERG

SEQ ID NO: 140443 - protein, 158 aa, Unknown
  Bacterial polypetide isolated from the Sargasso Sea
MLTSKQAKLLDYLTNTLKNNNISPSFDEMRKYLGLSSKSGVHRLISSLEERGFIMRLHNKARAIKIIKEDKLAPNFHDKVSNSYSNNYKIFIYGSISAGTPLEAIQNSEGHLNVPTGMIKNNNQHYALKVSGESMINAGILDGDIAVLKKLMMLLMVT

SEQ ID NO: 140444 - protein, 47 aa, Unknown
  Bacterial polypetide isolated from the Sargasso Sea
MLTKKQKNLLLFINKKLRSSGVSPSYEEMKQSLNLKSKSGIHRLISA

SEQ ID NO: 140445 - protein, 173 aa, Unknown
  Bacterial polypetide isolated from the Sargasso Sea
FIRRLPHKARALEVVKLPETASANDIYNTFSPSVIKGGLDQENPNDKDAEIPVLGKIAAGTPVEAIQNEVARIPIPVNLEKNGEYFGLRVEGDSMIEAGISEGDTVIIKKTDTADNGKIVVALIDNHEAMLKRIRRKGKTVALESANRNYETKIFGPDRVKVQGVLVSLYRNF

SEQ ID NO: 140446 - protein, 127 aa, Unknown
  Bacterial polypetide isolated from the Sargasso Sea
KKIFNINSLGKISAGGPIEAVPDQDILELEHMFSNEKCYALKVQGDSMIDAGIHDNDWVIVEKTNKISNSKVAVILIDNQDVTLKYYKLLNKDTVELIPANKKFDSTIYHISRISIQGIVIGQIRVY

SEQ ID NO: 140447 - protein, 174 aa, Unknown
  Bacterial polypetide isolated from the Sargasso Sea
GFIKRLAHKARALEVVKLPETASANDIYNSFSPSVIKGGLSDVNTSKNNEISVLGSIAAGTPIEAIQNEISRIPLPSNIENNGEFFGLKVKGDSMIEAGINDGDTVIIQKADRAENGKIVVALIDDHEAMLKRIRIKGKTVALESANRNYETKIFGPDRVKVQGVLVSLYRNFN

SEQ ID NO: 140448 - protein, 191 aa, Unknown
  Bacterial polypetide isolated from the Sargasso Sea
MLTKKQKELFDYLSDYMKNNQISPSFEEMKEAVNLKSKSGIHRLISSLEERGFIKRLKHKARAMEIIDKNVTINENVSNSIEIPLIGSIAAGEAIEAIENTSELISVPISMTSPNAKYFGLKVRGLSMIDEGIFDGDIAVIRKTNNVENGKIAAVLTLDNEVTLKIIKFNKDSVALIPAKQTFETKEYKTG

SEQ ID NO: 140449 - protein, 123 aa, Unknown
  Bacterial polypetide isolated from the Sargasso Sea
PVLGSIAAGTPIEAIQNEVTRIPLPENIEKNGEFFGLKVSGDSMIEAGINDGDTVIIKKTDAAENGKIVVALIDDHEAMLKRLRRKGKTVALESANRNYETKIFGPDRVKVQGILVSLYRNFH

SEQ ID NO: 140450 - protein, 154 aa, Unknown
  Bacterial polypetide isolated from the Sargasso Sea
ASANDIYNSFSPSVIKGGLDEGNSSNKDTEISVLGNIAAGTPIEAIQNEVSRIPLPENIEKNGQFFGLKVSGDSMIEAGINDGDTVIIKKTDTAENGKIVVALIDDHEAMLKRLRRKGKTVALESANKNYETKIFGPDRVKVQGILVSLYRNFH

SEQ ID NO: 140451 - protein, 56 aa, Unknown
  Bacterial polypetide isolated from the Sargasso Sea
MLTKKQKNLLLFINKKLRSSGVSPSYEEMKDSLNLKSKSGIHRLISALEGRGFIKR

SEQ ID NO: 140452 - protein, 198 aa, Unknown
  Bacterial polypetide isolated from the Sargasso Sea
MTTSISEINNILKDQGINSIAQWLPNARPSDRNGNIFLNRYYVVEFESVKSDMDKIINNLMALDVIMVSERIPIVEPAYVPNDSLWDELYGLSQIKAHLAFDLWDIDGGEIPGKMENGEIVVAIPDIGLKWDHPDLIDNVWQNLGEDVDGDGVVLELINNEWVFDPDDENGVDDDGDGYVDNFVGYDVAIGDNNPIPY

SEQ ID NO: 140453 - protein, 103 aa, Unknown
  Bacterial polypetide isolated from the Sargasso Sea
KVALPEDLQKNGEYFGLKVKGDSMIEAGINDGDTVIIKKTSTADTGQIAVVLIDEQEATLKRIRKKGNTIALEAANKNYDTKIYASNRIKIQGRLISLYRNFH

SEQ ID NO: 140454 - protein, 121 aa, Unknown
  Bacterial polypetide isolated from the Sargasso Sea
MLTKKQKELFEFLKSYISSNEICPSFEEMKEAVNLKSKSGIHRLITSLEQRGYIKRLKHKARAMEITKDLPNFKNISNQNDNDFNFINIPLIGSIAAGEAIEAIENSDQFITVPNSLFLKI

SEQ ID NO: 140455 - protein, 194 aa, Unknown
  Bacterial polypetide isolated from the Sargasso Sea
MLTKKQKELLEYIQNYQVKSGVTPSYEEMKAALNLKSKSGIHRLVIALEERGFVRRLAHKARALEVIKDAISNVKVSEKTNKNIIVGDFTGSSNDENGKLSTLPLLGKIAAGTPIEAIQHNDSSVDVPKEMMPIGESYALTVEGESMINEGIYDGDTVLIKKTNLVENGDIAVALIDESEATLKRIRKKGHSIA

SEQ ID NO: 140456 - protein, 108 aa, Unknown
  Bacterial polypetide isolated from the Sargasso Sea
DVEENLDISDVLNKKNVFALTVNGDSMIDACIADGDMVLMEPVADSSFLKNGTIVSAMVPGLGTTLKYFVKRGGQIFLEAANPNYEPIVVDLNQISIQGKLLAVWRKV

SEQ ID NO: 140457 - protein, 63 aa, Unknown
  Bacterial polypetide isolated from the Sargasso Sea
MLTRKQKELFDYLKNYISNNQISPSFEEMKIAVNLKSKSGIHRLITSLEQRGFIKRLKHRARA

SEQ ID NO: 140458 - protein, 208 aa, Unknown
  Bacterial polypetide isolated from the Sargasso Sea
MLTKKQKELYDYLKNYISSNEISPSFEEMKSAVNLKSKSGIHRLITSLEERGFIKRLKHKARAMEIINKDNIDNENSLSNSINIPLIGAIAAGEAIEAIENTDEFVSVPSSMTSPNAKYFGLKVRGLSMIDKGIFDGDIAVIKKTNNVENGKIAAVITEDNEVTLKTIKFDRNKVLLIPANQSFQTKEYKAGEIQVQGTLSGIIRKYN

SEQ ID NO: 140459 - protein, 79 aa, Unknown
  Bacterial polypetide isolated from the Sargasso Sea
MINAGINDGDVVVIKETNRAMNGDIVVALIEDQEATLKRFFVRGEAIALEAANPAYETRTFPHEKIKVQGRLVGLLRTY

SEQ ID NO: 140460 - protein, 138 aa, Unknown
  Bacterial polypetide isolated from the Sargasso Sea
KGGLDEEQTNSDEVEVPVLGKIAAGTPVEAIQNEVSRIPLPNNLEKNGDYFGLKVQGDSMIDAGIHEGDTVIIKRTDTADNGKIVVALIDEHEAMLKRIRKKGKVVALESANRNYETKIFGPDRVKVQGVLVSLYRNF

SEQ ID NO: 140461 - protein, 165 aa, Unknown
  Bacterial polypetide isolated from the Sargasso Sea
MLTRKQKELLDYLTAHAEKSEVSPSFDEMRVALGLASKSGIHRLVSGLEERGHIRRLANRARAIEILKPVTSAAADLGRSVAAAADAVSLPLLGKIAAGTPIEALSDPSNQLEVPASMLGRGEHFALEIVGDSMMEAGILDGDTVVIERAETANHGDIVVALIQR

SEQ ID NO: 140462 - protein, 138 aa, Unknown
  Bacterial polypetide isolated from the Sargasso Sea
EPTTHYSIPLYESKIPAGFPSPAQDYVEQTLDLNELCIKRPAATYFVRVEGDSMIEAGIHPDDILVVDRSVTPLHGDIVIAQVNGEFTVKELALVPEVQLIPRNKAYPPITFTDDAELTLFGVVTNIVRQMSRSKRAL

SEQ ID NO: 140463 - protein, 202 aa, Unknown
  Bacterial polypetide isolated from the Sargasso Sea
MRTILTDKETKVYNFILKYQEKYGRSPLLKEIAKGIGIKSKGVAHRYIKSLEKSKLISKDHNKHRGLHTINSFYSINSLKLKIFGKIAAGGPIEAVQDKNILELEHIFANEKCYALKVQGDSMIDAGIYDGDWVIIEKQNKIAKSKIAVILIDNQDVTLKYIKQVDKNYMELIPANKKHTSKKYNINRIAIQGIVIGQIRVY

SEQ ID NO: 140464 - protein, 60 aa, Unknown
  Bacterial polypetide isolated from the Sargasso Sea
AVHKTQEVRNGQVVVARLDEDVTVKRFQRKGSQVWLLPENEELSPIEVDLSCQQLTIEGM

SEQ ID NO: 140465 - protein, 208 aa, Unknown
  Bacterial polypetide isolated from the Sargasso Sea
MLTKKQKELYDFLKNYISNNEISPSFEEMKSAVNLKSKSGIHRLITSLEERGFIKRLKHKARAMEIINKDNIADENSFSNSINIPLIGAIAAGEAIEAIENADEFVSVPSSMTSPNAKYFGLKVKGLSMIDKGIFDGDIAVIKKTNNVENGKIAAVITQDNEVTLKTIKFDRDKVLLIPANQSFQTKEYEAGEIQVQGTLSGIIRKYN

SEQ ID NO: 140466 - protein, 208 aa, Unknown
  Bacterial polypetide isolated from the Sargasso Sea
MLTKKQKELYDYLKNYISNNEISPSFEEMKSAVNLKSKSGIHRLITSLEERGFIKRLKHKARAMEIINKDNFSDENSFSNSINIPLIGAIAAGEAIEAIENADEFVSVPSSMTSPNAKYFGLKVKGLSMIDKGIFDGDIAVIKKTNNVENGKIAAVITQNNEVTLKTIKFDRNKVLLIPANQSFQTKEYEAGEIQVQGTLSGIIRKYN

SEQ ID NO: 140467 - protein, 169 aa, Unknown
  Bacterial polypetide isolated from the Sargasso Sea
RLAHKPRALEVVKLPENASAHDLFNNFTPSVIKGGLDKSTGKSTKVSVLGAIAAGTPIEAIQHEVDKVNLPADFNKNDDHFGLRVKGDSMIEAGINDGDTVIIKKTTHADNGQIAVVLIDNEEATLKKIRKKGNTIALESANKKYDTKIYAAKRIKIQGKLVSLYRNFN

SEQ ID NO: 140468 - protein, 298 aa, Unknown
  Bacterial polypetide isolated from the Sargasso Sea
MANHAPVLSELTNGELQIEGLPTKSVVPHRETIDAVANGILDGDFNAIAYFAGRDPAFAIMGDLIAGYDTPKQYQEYCMHGGGKEMLQKIYDSVLPNKIHVLGCGPYGKEALVSKVPINGVADLKGVKIRSPEGLAADVFRRAGASPSSIPFSEVYTSLEKGIVDAADASVYINNHASGFHKIAKYPLYPGIHSMANLQTIINKKVFNKLSKQNQTALTIWTYWTWTAKLRDAGLDGRAQVAKDKAAGDLTIIDWPVSERAKFRKIAVEAWNSAASKSPLAKEALESNLSYMKKIGLL

SEQ ID NO: 140469 - protein, 207 aa, Unknown
  Bacterial polypetide isolated from the Sargasso Sea
MLTKKQKELFDYLKKYISNNQISPSFEEMKKAINLKSKSGIHRLITSLEERGFIKRLKHKARAMEIIYKDNLDNTSLSNSINIPLIGVIAAGEAIEAIEQTDEFVSVPISMTSPNAKYFGLKVNGLSMVDKGIFDGDIAVIKKTNNVENGKIAAVLTQNNEVTLKTIKFEKNKVLLIPANQSFQTKEYDLGEIQVQGSLSGIIRKYN

SEQ ID NO: 140470 - protein, 206 aa, Unknown
  Bacterial polypetide isolated from the Sargasso Sea
MLTKKQKELFDYLKEYISNNQISPSFEEMKEAVNLKSKSGIHRLISSLEERGFIKRLKHKARAMEIVDKEIKNNISIDSINIPLIGAIAAGEAIEAIENTNDFISVPVSMTSPNAKYFGLKVKGLSMIDEGIFDGDIAVIRKTNNVENGKIAAILTQDNEVTLKTIKFDKDKVILIPANQSYQTKEYKVGEIQVQGTLSGIIRKYI

SEQ ID NO: 140471 - protein, 225 aa, Unknown
  Bacterial polypetide isolated from the Sargasso Sea
MLTKKQKELLEYIQSYQIKSGVTPSYEEMKAALNLKSKSGIHRLVIALEERGFVRRLAHKARALEVIKDAISTLKVSDKTNKNIIVGDFTGSNKDENSKLSTLPLLGKIAAGTPIEAIQHNDTSVDVPKEMMPIGESYALTVEGESMINEGIYDGDTVLIKKTNLVENGDIAVALIDDSEATLKRIRKKGQSIALESANPIYETRILSAHRVKIQGKLIGLLRKY

SEQ ID NO: 140472 - protein, 65 aa, Unknown
  Bacterial polypetide isolated from the Sargasso Sea
MRPLTKRQAQILELIKVFIKDTGMPPTRAEIAQTLGFKSANAAEEHLKALAKKGVIKMKPGASRG

SEQ ID NO: 140473 - protein, 723 aa, Unknown
  Bacterial polypetide isolated from the Sargasso Sea
MTTSISEINNILKDQGVNSIAQWLPNARPTDRNGNIFLNRYYVVEFESVKNDMDEIINDLMVLDVIMVSERIPIVEPAYVPNDSLWDELYGLSQIKAHLAFDLWDIDGGEIPGQMENGEIVVAIPDIGLKWDHPDLIDNVWQNLGEDVDGDGVVLEFINNEWVFDPDDENGVDDDGDGYVDNFVGYDVAIGDNNPIPLRLNHVHGTKVAGNVSAMTNNGIGLASVGYSVKLMGVNANNNIDEPWYLTHTNQAVLASAQMGADIINCSWVSGYSTANDNFYQSIHNGYDSIILGAAGNGVYNGGVSDTTDFNPRYPAGYDNVVSVTAMGDDDSFNCWSNVHETVDISAPGEFIICAYTYDDTLYALGTGTSYATPLTAGAIALVKSVIPDADNETIISKVINTAVPYPDMDRSCGGQSIEGLVGSGQLNIHRAILACTYPELIPSEIQYQTDDGFINPGDTVIVDITITNSLGFEPASNVVVTLSTTDPSFNIINGQFAGDDGTLYAGEELTGQFIFTSDHNASLGDIPFNIHFDAILENGSSYENDVELWISLSLDLFGFPIEGVNVQGGTIITDLDGNTFNEIYYGSDSVVYGKWMGGLDVNGFPFDAGAEISTSISSGDLDGDGDKEVVFGTSNGFVYAITKTGTVHMSYQQEDHIVDVPVLSDLDQDGDMEVIFISSNDSSSTLYALHDTGDNVTGFPVIFSEKIAACPSIADLNNNMVL

SEQ ID NO: 140474 - protein, 160 aa, Unknown
  Bacterial polypetide isolated from the Sargasso Sea
VIRKEVHKDAFKNVKIIDIINSMRDAGINVAANYIFGLPEETKESLEFTYNFAEETNTEMVNFYSAMAYPGSPLYLESKKNNVLLPKTYSGYSQHSYDTQNLPSKHLSAAEILAFRDKSWDKYHTNPKYLKLLEKKFGLNAVNNLKETTKIKLKRKLLGD

SEQ ID NO: 140475 - protein, 158 aa, Unknown
  Bacterial polypetide isolated from the Sargasso Sea
KLPETASANDIYNSFSPSVIKGGLDEEQTTSDEVEVPVLGKIAAGTPVEAIQNEVSRIPLPNNLEKNGDYFGLKVQGDSMIDAGIHEGDTVIIKRTDTADNGKIVVALIDEHEAMLKRIRKKGKVVALESANRNYETKIFGPDRVKVQGVLVSLYRNF

SEQ ID NO: 140476 - protein, 186 aa, Unknown
  Bacterial polypetide isolated from the Sargasso Sea
IHRLINALEERGFIRRLAHRARAIEIIKLPTSSTINPKGNFQPEVIEGNKEKDLFSLNEESIEVRMMGKIAAGTPIAAIEYEKNKISVPGSMVGTGDHYALEIEGDSMIGAGILDKDKAIIKKVDDALSGQIVVALVDGEEATLKRLRKKGNTIALEPANSAYETKIYGPERIQIQGILVGILRSY

SEQ ID NO: 140477 - protein, 164 aa, Unknown
  Bacterial polypetide isolated from the Sargasso Sea
ARALEVVKLPENASAHDLFNSFTPSIIKGGLDKSASKSSKVSVLGSIAAGTPIEAIQQEVDKVNLPADFNKNDDHFGLRVKGDSMIEAGINDGDTVIIKKSSNADNGQIAVVLIDNEEATLKRIRKKGNTIALESANKKYGTKIYAAKRIKIQGKLVSLYRNFN

SEQ ID NO: 140478 - protein, 224 aa, Unknown
  Bacterial polypetide isolated from the Sargasso Sea
MPAHVPELITLASDPNVEITKLLRMAKVVARLLQQPEAIIWLDHELQGYPDGCGVPRYRQRRGNLAYWQAGSHHLLSVANTERAVQWQTCPLSLPASELAELAATGKALRVRFPPELMSLLMAEIGTEREVEICMPTVQVRALIAAVQERVLDWALALAASGVQGDSMSVTPQERQVAPVSIHIGGNATGVQIQLNSPGGHQQQTVSGEQKTDALSSCWPGSSR

SEQ ID NO: 140479 - protein, 103 aa, Unknown
  Bacterial polypetide isolated from the Sargasso Sea
MLTKKQKELYDYLDHYIKSNQISPSFEEMKKAVNLKSKSGIHRLITSLEQRGFIKRLKHKARAMEITKKLYQNDSNESSYEIPLLGAIAAGNPMEAMKTQMNI

SEQ ID NO: 140480 - protein, 213 aa, Unknown
  Bacterial polypetide isolated from the Sargasso Sea
MLTKKQKELFVYLNNYISSNEISPSFEEMKNAVNLKSKSGIHRLITSLEQRGYIKRLKHKARAMEITKDLPNKNIKSINSAKEESFLNIPLVGSIAAGEAIEAINSSDSMISIPKSLVSKNSTYFGLKVKGLSMIDEGIFDGDVAIIKKTNSAENGKIAAVLTLDNEITLKKVKMTNQKIYLIPANKAYQIKEHNLGDIQIQGTLSGIIRKYN

SEQ ID NO: 140481 - protein, 151 aa, Unknown
  Bacterial polypetide isolated from the Sargasso Sea
MLTFQQEKLLKFIIDYQKQNNVTPSFDEMKDGLGLKSKSGIHRIVSALEERGYIKKLNNRARAIEIIKNVNLIDTESGNNKNNIISIPILGKIAAGLPIEAISDNTNYIELPETLLKKGEYFILNVEGDSMIEAGIFDGDQVVIRKANDAN

SEQ ID NO: 140482 - protein, 147 aa, Unknown
  Bacterial polypetide isolated from the Sargasso Sea
MLTKKQKNLLLFINKKLRSTGVSPSYEEMKESLSLKSKSGIHRLISALEERGFIKRLAHKARALEVIKLPETASANDIYNSFSPSVIKGGLDEENLNNSNDTEIPVLGKIAAGTPVEAIQNEVSRIPLPANIEKDGEFFGLKVQGGF

SEQ ID NO: 140483 - protein, 153 aa, Unknown
  Bacterial polypetide isolated from the Sargasso Sea
MLNLTAQQIKVFDVIKESLQSNGYPPTRAEIAKILDFKSVNAAESHIKALVKKGVIEKVPGSSRGIKLVEEISGIPLIGSVAAGSPITAYENVEKTIHSNPLNKSVDFFLRVQGESMIDAGILDNDLVGVRKTKNAENGEIVVARLEDEVTLK

SEQ ID NO: 140484 - protein, 108 aa, Unknown
  Bacterial polypetide isolated from the Sargasso Sea
IQNEVARIPLPNNLEKNGDYFGLKVQGDSMIEAGIHEGDTVIIRRTDIADNGKIVVALIDEHEAMLKRIRKKGKVVALESANRNYETKIFGPDRVKVQGVLVSLYRNF

SEQ ID NO: 140485 - protein, 135 aa, Unknown
  Bacterial polypetide isolated from the Sargasso Sea
MLTKKQKNLLIFINKKLRSTGISPSYEEMKQSLNLRSKSGIHRLISALEERGFIKRLAHKARALEVVKLPETASANDIYNSFSPSVIKGGLDEENSTSKGTEVPVLGKIAAGTPVEAIQNEVARVPLPENIEKKG

SEQ ID NO: 140486 - protein, 64 aa, Unknown
  Bacterial polypetide isolated from the Sargasso Sea
MLTKKQKNLLLFINKRLRSSGVSPSYEEMKESLNLKSKSGIHRLISALEERGFIKRLAHKARAL

SEQ ID NO: 140487 - protein, 96 aa, Unknown
  Bacterial polypetide isolated from the Sargasso Sea
NLEKNGDYFGLKVQGDSMIEAGIHEGDTVIIKRTDTADNGKIVVALIDEHEAMLKRIRKKGKVVALESANKNYETKIFGPDRVKVQGVLVSLYRNF

SEQ ID NO: 140488 - protein, 86 aa, Unknown
  Bacterial polypetide isolated from the Sargasso Sea
MLTKKQRNLLIFINKKIRSTGVSPSYEEMKNSLNLKSKSGIHRLISALEERGFIKRLAHKARALEVIKLPENASAHDLFNSFTPSV

SEQ ID NO: 140489 - protein, 108 aa, Unknown
  Bacterial polypetide isolated from the Sargasso Sea
ISDNTNYIELPESLLKKGEYFILNVEGDSMIEAGIFDGDQVVIRKANDANNGEIVVALIDNNEATLKRIFKRGQQVALQPENSNYKTVIYGPDRIQIQGVLKHLIRGY

SEQ ID NO: 140490 - protein, 223 aa, Unknown
  Bacterial polypetide isolated from the Sargasso Sea
KNLLLFINRKLRSSGVSPSYEEMKNSLNLKSKSGIHRLISALEERGFIKRLAHKARALEVIKLPETASANDIYNSFSPSVIKGGLDEENLKKTDVNDSSEIPVLGSIAAGTPIEAIQNEVSRIPLPNNIEKNGEFFGLKVTGDSMIDAGINDGDTVIVKKTETADNGKIVVALIDDNEAMLKRIRRKGKTVALESANRNYETKIFGPDRVKVQGILVSLYRNF

SEQ ID NO: 140491 - protein, 125 aa, Unknown
  Bacterial polypetide isolated from the Sargasso Sea
MLTKKQKNLLLFINKKIRSTGVSPSYEEMKNSLNLKSKSGIHRLISALEERGFIKRLAHKARALEVIKLPENASAHDLFNSFTPSVIKGGLDKNANKSTKISVLGSIAAGTPIEAIQQEVDKVNL

SEQ ID NO: 140492 - protein, 119 aa, Unknown
  Bacterial polypetide isolated from the Sargasso Sea
MLTKKQKNLLIFINKKIRSSGVSPSYEEMKNSLNLKSKSGIHRLISALEERGFIKRLAHKARALEVIKLPENASAHDLFNSFTPSVIKGGLDKGVSKSTKVSVLGSIAAWNTNRSNTTR

SEQ ID NO: 140493 - protein, 53 aa, Unknown
  Bacterial polypetide isolated from the Sargasso Sea
MLTKKQKNLLIFINKKIRSTGISPSYEEMKNSLNLKSKSGIHRLISALEERGF

SEQ ID NO: 140494 - protein, 196 aa, Unknown
  Bacterial polypetide isolated from the Sargasso Sea
MLTKKQKELLDYITLVNKKFGISPSYDEMKDKLKLKSKSGIHRIISALEERGFIRKLANKARAIEIIQNNKNISPTNEPMNKIIEIPLYGKIAAGTPIEAISNASSYIPTPTNMVNKGEHYALEISGESMIGSGINDKDIAIIKRTTMANNGQIVVALIDKTEATLKKFKKTSSKIVLIPSNDLYQSQSYDLPRVK

SEQ ID NO: 140495 - protein, 140 aa, Unknown
  Bacterial polypetide isolated from the Sargasso Sea
MLTKKQKNLLLFINKKLRSSGVSPSYEEMKQSLNLKSKSGIHRLISALEERGFIKRLAHKARALEVIKLPETASANDIYNSFSPSVIKGGLDDEKPVSDEMEVPVLGKIAAGTPVEAIQNEVSRIPLPNNLEKNGDYFGL

SEQ ID NO: 140496 - protein, 139 aa, Unknown
  Bacterial polypetide isolated from the Sargasso Sea
MLTKKQKNLLLFINKKIRSSGVSPSYEEMKNSLNLKSKSGIHRLISALEERGFIKRLAHKARALEVLKLPETASANDIYNSFSPSVITGGLDSHKPKKNIHEIPVLGNIAAGTPIEAIQNEVNRIAIPEELAKEGNILV

SEQ ID NO: 140497 - protein, 171 aa, Unknown
  Bacterial polypetide isolated from the Sargasso Sea
KRLAHKARALEVVKLPETASANDIYNSFSPSVIKGGLDEEINNSDEMEVPVLGKIAAGTPVEAIQNEVSRIPLPNNLEKNGDYFGLKVQGDSMIEAGIHEGDTVIIKRTDTADNGKIVVALIDEHEAMLKRIRKKGKVVALESANRNYETKIFGPDRVKVQGVLVSLYRNF

SEQ ID NO: 140498 - protein, 90 aa, Unknown
  Bacterial polypetide isolated from the Sargasso Sea
DYFGLKVQGDSMIEAGINEGDTVIIKRTDTADNGKIVVALIDEHEAMLKRIRKKGKVVALESANKNYETKIFGPDRVKVQGVLVSLYRNF

SEQ ID NO: 140499 - protein, 107 aa, Unknown
  Bacterial polypetide isolated from the Sargasso Sea
MLTKKQKNLLLFINKKLRSSGVSPSYEEMKDSLNLKSKSGIHRLISALEERGFIKRLAHKARALEVIKLPETASANDIYNNFSPSVIKGGLDEDKTTSDEYEVPSFR

SEQ ID NO: 140500 - protein, 93 aa, Unknown
  Bacterial polypetide isolated from the Sargasso Sea
KNGDYFGLKVQGDSMIEAGINEGDTVIIKRTDTADNGKIVVALIDEHEAMLKRIRKKGKVVALESANKNYETKIFGPDRVKVQGVLVSLYRNF

SEQ ID NO: 140501 - protein, 168 aa, Unknown
  Bacterial polypetide isolated from the Sargasso Sea
MINLTEQQFKIFDVIKGHVNDYGYPPTRAEIAKIMGFKSVNAAESHIKALVKKGVLLKVPDSSRGLKLVEEYSGIPIVGRVAAGSPISAVENIEKYIPTNPISSPVDFFLRVKGDSMKDIGIIENDLVGVKKASTAENGSVVVARLEDEVHLKILYRNGTIKLVAENK

SEQ ID NO: 140502 - protein, 105 aa, Unknown
  Bacterial polypetide isolated from the Sargasso Sea
MLTKKQKNLLIFINKKLRSTGISPSYEEMKESLNLRSKSGIHRLISALEERGFIKRLAHKARALEVVKLPETASANDIYNNFSPSVIKGGLDENNSTKEGTEVPV

SEQ ID NO: 140503 - protein, 152 aa, Unknown
  Bacterial polypetide isolated from the Sargasso Sea
MQTIFIIAFHQSVIKGGLDETANKTNDTEIPVLGKIAAGTPVEAIQNEVARIPLPENIEKKGEYFGLKVQGDSMIEAGINDGDTVVIKKTDTADNGKIVVALIDDHEAMLKRIRRKGKTIALESANRNYETKIFGPDRVKVQGVLVSLYRSF

SEQ ID NO: 140504 - protein, 93 aa, Unknown
  Bacterial polypetide isolated from the Sargasso Sea
MLTKKQKNLLLFINKKLRSSGISPSYEEMKQSLNLKSKSGIHRLISALEERGFIKRLAHKARALEVVKLPETASANDIYNSFSPSVIKGGLDT

SEQ ID NO: 140505 - protein, 172 aa, Unknown
  Bacterial polypetide isolated from the Sargasso Sea
IKRLAHKARALEVIKLPETASANDIYNSFSPSVIKGGLDEEKPLSDDVEVPVLGKIAAGTPVEAIQNEVSRIPLPSNLEKNGDYFGLKVQGDSMIEAGINEGDTVIIKRTDTADNGKIVVALIDEHEAMLKRIRKKGKVVALESANKNYETKIFGPDRVKVQGVLVSLYRNF

SEQ ID NO: 140506 - protein, 117 aa, Unknown
  Bacterial polypetide isolated from the Sargasso Sea
IAAGTPVEAIQNEVSRIPLPNNLEKNGDYFGLKVQGDSMIEAGIHEGDTVIIRRTDTADNGKIVVALIDEHEAMLKRIRKKGKVVALESANRNYETKIFGPDRVKVQGVLVSLYRNF

SEQ ID NO: 140507 - protein, 154 aa, Unknown
  Bacterial polypetide isolated from the Sargasso Sea
TTISDMPSSTRPVVSANSPTAPIESVYANEIPVMGRIAAGVPIEAISEISHNVAVPGQILRGGGDHFALEVKGDSMINAGINDGDVVVIKETNRAMNGDIVVALIEDQEATLKRFFVRGEAIALEAANPAYETRTFPHEKIKVQGRLVGLLRTY

SEQ ID NO: 140508 - protein, 190 aa, Unknown
  Bacterial polypetide isolated from the Sargasso Sea
KSNLGIHRLISALEERGFIKRLAHKARALEVVKLPETASANDIYNSFSPSVIKGGLSDVNNSKNNEISVLGSIAAGTPIEAIQNEVSRIPLPSNIENNGEFFGLKVKGDSMIEAGINDGDTVIIQKADRAENGKIVVALIDDHEAMLKRIRIKGKTVALESANRNYETKIFGPDRVKVQGVLVSLYRNFN

SEQ ID NO: 140509 - protein, 108 aa, Unknown
  Bacterial polypetide isolated from the Sargasso Sea
MLTKKQKNLLIFINKKIRSSGISPSYEEMKNSLNLKSKSGIHRLISALEERGFVKRLAHKARALEVVKLPENASANDIFNSFTPSVIKGGLDQNKNKSTDVSVLGSML

SEQ ID NO: 140510 - protein, 186 aa, Unknown
  Bacterial polypetide isolated from the Sargasso Sea
MLTKKQNELLIYIHQNLRETGVAPSYEEMKDALDLRSKSGIHRLINALEERGFIRRLANRARAIEIIKLPTSSTINPKGNFQPEVIEGNKEKDLFSLNEESIEVRMMGKIAAGTPITAIEYEKNKISVPGSMLGTGDHYALEIEGDSMIGAGILDKDKAIIKKVDDALSGQIVVALVDGEEATLKR

SEQ ID NO: 140511 - protein, 111 aa, Unknown
  Bacterial polypetide isolated from the Sargasso Sea
EAIQNEVSRIPLPANIEKDGEFFGLKVQGDSMIEAGINDGDTVIVKKADTADNGKIVVALIDDHEAMLKRIRRKGKTVALESANRNYETKIFGPDRVKVQGILVSLYRNFQ

SEQ ID NO: 140512 - protein, 114 aa, Unknown
  Bacterial polypetide isolated from the Sargasso Sea
MLTKKQKNLLIFINKKIRSSGISPSYEEMKNSLNLKSKSGIHRLISALEERGFVKRLAHKARALEVIKLPENASANDIFNTFTPSVIKGGLDKNNNKSTDISVLGSIAAGTPIE

SEQ ID NO: 140513 - protein, 87 aa, Unknown
  Bacterial polypetide isolated from the Sargasso Sea
MLTKKQKNLLLFINKKLRSSGVSPSYEEMKASLNLKSKSGIHRLISALEERGFIKRLAHKARALEVIKLPETASANDIYNSFSPKCY

SEQ ID NO: 140514 - protein, 151 aa, Unknown
  Bacterial polypetide isolated from the Sargasso Sea
MLTKKQKNLLLFINKKIRSSGVSPSYEEMKNSLNLKSKSGIHRLISALEERGFIKRLAHKARALEVLKLPETASANDIYNSFSPSVIKGGLDTENQKNDVSEIPVLGKIAAGTPIEAIQNEVSRVALPESLSKNGEHFGLKVSGDSMIEAG

SEQ ID NO: 140515 - protein, 187 aa, Unknown
  Bacterial polypetide isolated from the Sargasso Sea
IHRLISALEERGFIKRLAHKARALEVIKLPETASANDIYNSFSPSVIKGGLDEENLNNSNDTEIPVLGKIAAGTPVEAIQNEVSRIPLPANIEKEGEFFGLKVQGDSMIEAGINDGDTVIVKKADTADNGKIVVALIDDHEAMLKRIRRKGKTVALESANRNYETKIFGPDRVKVQGILVSLYRNFQ

SEQ ID NO: 140516 - protein, 128 aa, Unknown
  Bacterial polypetide isolated from the Sargasso Sea
MLTKKQKNLLLFINKKLRSSGISPSYEEMKSSLNLKSKSGIHRLISALEERGFIKRLAHKARALEVLKLPETASANDIYNSFSPSVIKGGLDEVNSKNNGTELPVLGNIAAGTPIEAIQNEVTRIPCL

SEQ ID NO: 140517 - protein, 184 aa, Unknown
  Bacterial polypetide isolated from the Sargasso Sea
HRLISALEERGFIKRLAHKARALEVVKLPETASANDIYNSFSPSVIKGGLDEENQNSDSKEVPVLGKIAAGTPIEAIQNEVSRVPLPSNIEKNGEYFGLKVQGDSMIEAGINEGDTVIVKKTNTADNGKIVVALIDDHEAMLKRIRRKGKTVALESANKNYETKIFGPDRVKVQGILVSLYRNF

SEQ ID NO: 140518 - protein, 197 aa, Unknown
  Bacterial polypetide isolated from the Sargasso Sea
MINLTEQQFKIFDVIKGHVNDYGYPPTRAEIAKIMGFKSVNAAESHIKALVKKGVLLKVPDSSRGLKLVEEYSGIPIVGRVAAGSPISAVENIEKYIPTNPISSPVDFFLRVKGDSMKDIGIIENDLVGVKKASTAENGSVVVARLEEEVTLKRFVQENGKIKLVAENKNYNDILIDQNSGFSLEGIAVGVVREGVL

SEQ ID NO: 140519 - protein, 213 aa, Unknown
  Bacterial polypetide isolated from the Sargasso Sea
MLTKKQHELLLFLEERISLSGVTPSFEEMKKKVGLKSKSGIHRLISGLEERGFIKKLPFKARAIEILKPSNTKQRLSDHKNAKNKDHIVKLPVVGRIAAGLPIEAIESGENCLHVPKKLTKGADSFVLEIKGESMIDAGINDGDFAIIKKQSIAINGDIVVALTNENEATLKRFRKRGDTIALEAANEAFETRIYSAGQITIQGILIGLIRQY

SEQ ID NO: 140520 - protein, 120 aa, Unknown
  Bacterial polypetide isolated from the Sargasso Sea
LGKIAAGTPVEAIQNEVSRIPLPNNLEKNGEYFGLKVQGDSMIEAGINEGDTVIVKKSDTAENGKIVVALIDDHEAMLKRIRRKGKTIALESANSNYETKIFGPDRVKVQGVLVSLYRNF

SEQ ID NO: 140521 - protein, 73 aa, Unknown
  Bacterial polypetide isolated from the Sargasso Sea
MLTKKQKNLLLFINRKLRSSGVSPSYEEMKNSLNLKSKSGIHRLISALEERGFIKRLAHKARALEVIKLPETA

SEQ ID NO: 140522 - protein, 150 aa, Unknown
  Bacterial polypetide isolated from the Sargasso Sea
MLTKKQKNLLLFINKKIRSTGVSPSYEEMKNSLNLKSKSGIHRLISALQERGFIKRLAHKARALEVLKLPETASANDIYNSFSPSVIQGGLDTTNNKKNTNNIPVLGKIAAGTPIEAIQNEVSKVAIPEELSKNGEHFGLKVSGDSMIEA

SEQ ID NO: 140523 - protein, 92 aa, Unknown
  Bacterial polypetide isolated from the Sargasso Sea
MLTKKQKNLLIFINKKLRSTGISPSYEEMKQSLNLKSKSGIHRLISALEERGFIKRLAHKARALEVVKLPETASANDIYNSFSPSVIKGGLD

SEQ ID NO: 140524 - protein, 183 aa, Unknown
  Bacterial polypetide isolated from the Sargasso Sea
HRLISALEERGFVKRLAHKARALEVVKLPENASANDIFNTFTPSVIKGGLDKNNNKSTDVSVLGSIAAGTPIEAIQQEVDRVALPEDLQNNGEHYGLKVKGDSMIEAGIADGDTVIIKKVSNVDNGQIAVVLIDDQEATLKRVRKKGNTIALEAANRNYGTKIYAANRIKIQGKLVSLYRNFH

SEQ ID NO: 140525 - protein, 185 aa, Unknown
  Bacterial polypetide isolated from the Sargasso Sea
HRLISALEERGFIKRLAHKARALEVLKLPETASANDIYNSFSPSVIKGGLDTENTKKSVNEIPVLGKIAAGTPIEAIQNEVSKVSIPEELSKNGEHFGLKISGDSMIEAGINDGDTVIVKKTNTADNGQIVVALIDDHEAMLKRIRKKGKVVALESANKKYETKIFGPDRVKVQGILVSLYRNFQ

SEQ ID NO: 140526 - protein, 146 aa, Unknown
  Bacterial polypetide isolated from the Sargasso Sea
MLTKKQKNLLLFINKKLRSSGVSPSYEEMKASLNLKSKSGIHRLISALEERGFIKRLAHKARALEVIKLPETASANDIYNNFSPSVIKGGLDEENLSSDDAEVPVLGKIAAGTPVEAIQNEVSRIPLPSNLEKNGDYFGLKVQGDS

SEQ ID NO: 140527 - protein, 164 aa, Unknown
  Bacterial polypetide isolated from the Sargasso Sea
RALEVIKLPETASANDIYNSFSPSVIKGGLDEEKPMSNEAEVPVLGKIAAGTPVEAIQNEVSRIPLPNNLEKNGDYFGLKVQGDSMIEAGINEGDTVIIRRTDTADNGKIVVALIDEQEAMLKRIRKKGKVVALESANKNYETKIFGPDRVKVQGVLVSLYRNF

SEQ ID NO: 140528 - protein, 226 aa, Unknown
  Bacterial polypetide isolated from the Sargasso Sea
MLTKKQKNLLLFINKKIRSTGVSPSYEEMKNSLNLKSKSGIHRLISALQERGFIKRLAHKARALEVLKLPETASANDIYNSFSPSVIKGGLDVENDRQNLNKIPVLGQIAAGTPIEAIQNEVSKVSIPEELSKNGEHFGLKVSGDSMIEAGINDGDTVIVKKSNTADNGQIVVALIDDQEAMLKRIRKKGKVVALESANKRYETKIFGPDRVKVQGILVSLYRKFH

SEQ ID NO: 140529 - protein, 142 aa, Unknown
  Bacterial polypetide isolated from the Sargasso Sea
MLTKKQKNLLLFINKKLRSSGVSPSYEEMKQSLNLKSKSGIHRLISALEERGFIKRLAHKARALEVIKLPETASANDIYNSFSPSVIKGGLDEVNNNSDEMEVPVLGKIAAGTPVEAIQNEVSRIPLPSNLEKNGDYFGLKV

SEQ ID NO: 140530 - protein, 142 aa, Unknown
  Bacterial polypetide isolated from the Sargasso Sea
MVVGNFINNSNDDNHKLSTLPLLGKIAAGTPIEAIQQNDTSVDVPKEMMPIGESYALTVEGDSMINEGIHNGDTVLIKKTNLADNGEIVVALIDDSEATLKRIRKKGQSIALESANPIYETRILSAHRVKIQGKLIGLLRKY

SEQ ID NO: 140531 - protein, 82 aa, Unknown
  Bacterial polypetide isolated from the Sargasso Sea
MLTKKQKNLLLFINKKLRSTGVSPSYEEMKQSLNLKSKSGIHRLISALEERGFIKRLAHKARALEVIKLPETASANDIYNSF

SEQ ID NO: 140532 - protein, 188 aa, Unknown
  Bacterial polypetide isolated from the Sargasso Sea
MLTKKQKNLLIFINKKIRSTGVSPSYEEMKNSLNLKSKSGIHRLISALEERGFIKRLAHKARALEVLKLPETASANDIYNSFSPSVIKGGLDSDNTKKGIKEIPVLGNIAAGTPIEAIQNEVSKVTLPEELSKNDEHFGLKISGDSMIDAGINDGDTVIVKKANTANNGQIVVALIDDQEAMLKRIRK

SEQ ID NO: 140533 - protein, 87 aa, Unknown
  Bacterial polypetide isolated from the Sargasso Sea
MLTKKQKNLLLFINKKLRSSGVSPSYEEMKESLNLKSKSGIHRLISALEERGFIKRLAHKARALEVIKLPETASANDIYNNFFTSVI

SEQ ID NO: 140534 - protein, 113 aa, Unknown
  Bacterial polypetide isolated from the Sargasso Sea
MLTKKQKNLLMFINKKLRSSGVSPSYEEMKESLNLKSKSGIHRLISALEERGFIKRLAHKARALEVVKLPETASANDIYNSFSPSVIKGGLDDEGIEKNEVPVLGKIAAGTPS

SEQ ID NO: 140535 - protein, 81 aa, Unknown
  Bacterial polypetide isolated from the Sargasso Sea
MLTKKQKNLLIYINKKIRSSGISPSYEEMKNSLNLKSKSGIHRLISALEERGFVKRLAHKARALEVVKLPENASANDIFNS

SEQ ID NO: 140536 - protein, 137 aa, Unknown
  Bacterial polypetide isolated from the Sargasso Sea
MLTKKQKNLLIFINKKIRSSGISPSYEEMKNSLNLKSKSGIHRLISALEERGFVKRLAHKARALEVVKLPENASANDIFNSFTPSVIKGGLDKSKSNSSKVSVLGSIAAGTPIEAIQHEVDKVALPEDCKKMVNILV

SEQ ID NO: 140537 - protein, 66 aa, Unknown
  Bacterial polypetide isolated from the Sargasso Sea
MLTKKQKNLLLFINKKLRSTGVSPSYEEMRESLSLKSKSGIHRLISALEERGFIKRLAHKARALEV

SEQ ID NO: 140538 - protein, 97 aa, Unknown
  Bacterial polypetide isolated from the Sargasso Sea
MLTKKQKNLLIFINKKIRSSGISPSYEEMKNSLNLKSKSGIHRLISALEERGFVKRLAHKARALEVVKLPENASANDIFNTFTPSVIKGGLDKNNKK

SEQ ID NO: 140539 - protein, 43 aa, Unknown
  Bacterial polypetide isolated from the Sargasso Sea
KKGNLVYLHAENEDYSPIKVDLSFQSLTIEGLAVGVIRNGDWL

SEQ ID NO: 140540 - protein, 229 aa, Unknown
  Bacterial polypetide isolated from the Sargasso Sea
IFVLMLTKKQKNLLLFINKKLRSSGVSPSYEEMKESLNLKSKSGIHRLISALEERGFIKRLAHKARALEVIKLPETASANDIYNSFSPSVIKGGLDTNSHDNGNDLPVLGSIAAGTPIEAIQNEVTRIPLPENIENDGEFFGLKVSGDSMIDAGINDGDTVVIKKTETAENGKIVVALIDDHEAMLKRLRRKGKTVALESANRNYETKIFGPDRVKVQGVLVSLYRNFH

SEQ ID NO: 140541 - protein, 117 aa, Unknown
  Bacterial polypetide isolated from the Sargasso Sea
MLTKKQKNLLLFINKKLRSSGVSPSYEEMKASLNLKSKSGIHRLISALEERGFIKRLAHKARALEVIKLPETASANDIYNSFSPSVIKGGLDEENLSSDDLEVPVLGKIAAGTPVKL

SEQ ID NO: 140542 - protein, 176 aa, Unknown
  Bacterial polypetide isolated from the Sargasso Sea
GFIKRLAHKARALEVIKLPETASANDIYNSFSPSVIKGGLDDTNSKNKDEQDIPVLGNIAAGSPVEAIQNEVSRIPLPSNIEKNGEFFGLKVQGDSMIEAGINDGDTVIVKKTDTADNGKIVVALIDDHEAMLKRIRRKGKTIALESANRNYETKIFGPDRVKVQGILVSLYRNFQ

SEQ ID NO: 140543 - protein, 65 aa, Unknown
  Bacterial polypetide isolated from the Sargasso Sea
MLTKKQKNLLIFINKKIRSSGISPSYEEMKNSLNLKSKSGIHRLISALEERGFVKRLAHKARALE

SEQ ID NO: 140544 - protein, 112 aa, Unknown
  Bacterial polypetide isolated from the Sargasso Sea
MVEAIQNEVSRIPLPINLEKNGDYFGLKVQGDSMIEAGINEGDTVIIKRTDTADNGKIVVALIDEHEAMLKRIRKKGKVVALESANKNYETKIFGPDRVKVQGVLVSLYRNF

SEQ ID NO: 140545 - protein, 134 aa, Unknown
  Bacterial polypetide isolated from the Sargasso Sea
SNQNKTDENEIPVLGKIAAGTPVEAIQNEVSRIPLPTNIEKNGEFFGLKVQGDSMIEAGINDGDTVIVKKADTAENGKIVVALIDDHEAMLKRIRRKGKTVALESANRNYETKIFGPDRVKVQGILVSLYRNFS

SEQ ID NO: 140546 - protein, 162 aa, Unknown
  Bacterial polypetide isolated from the Sargasso Sea
EVIKLPETASANDIYNSFSPSVIKGGLDDSNLQKNNTDIPVLGNIAAGTPIEAIQNEVTRIPLPENIEKNGEFFGLKVQGDSMIEAGINDGDTVIVKKTDTAENGKIVVALIDDQEAMLKRIRRKGKTVALESANRNYETKIFGPDRVKVQGILVSLYRNFH

SEQ ID NO: 140547 - protein, 181 aa, Unknown
  Bacterial polypetide isolated from the Sargasso Sea
ISALEERGFIRRLAHKARALEVIKLPETASANDIYNSFSPSVIRGGLDEETQNNENPEIPVLGKIAAGTPIEAIQNEVSRIPLPSNLEKNGEFFGLKVQGDSMIEAGISEGDTVIIKKTDTADNGKIVVALIDDHEAMLKRIRRKGKTVALESANKNYETKIFGPDRVKVQGVLVSLYRNF

SEQ ID NO: 140548 - protein, 196 aa, Unknown
  Bacterial polypetide isolated from the Sargasso Sea
MLTKKQKQLLNYIGTFQSRNGVTPSYEEMKDALALKSKSGIHRLILALEERGFVKRLAHKARALEIIKDGITNLDLSSYRKNVVIADFKEQSLNLSENKVSTIPMLGKIAAGTPIEAIQHNEDMIDVPRELMSVGESYALKVEGDSMINEGIHDGDTVLIKKTNLAENGDIVVALIDDHEATLKRLRKKGQSIALK

SEQ ID NO: 140549 - protein, 152 aa, Unknown
  Bacterial polypetide isolated from the Sargasso Sea
SANDIYNNFSPSVIKGGLDEDQAPSDEVEVPVLGKIAAGTPVEAIQNEVARIPLPNNLEKNGDYFGLKVQGDSMIEAGIHEGDTVIIRRTDTADNGKIVVALIDEHEAMLKRIRKKGKVVALESANRNYETKIFGPDRVKVQGVLVSLYRNF

SEQ ID NO: 140550 - protein, 202 aa, Unknown
  Bacterial polypetide isolated from the Sargasso Sea
MLTKKQNELLIYIHQNLRETGVAPSYEEMKEALDLRSKSGIHRLINALEERGFIRRLAHRARAIEIIKLPTSSTVNSKGNFKPEVIEGNKEKDLFSLNEESIEVRMMGKIAAGTPIAAIEYEKNKISVPGSMIGTGDHYALEIEGDSMIGAGILDNDKAIIKKVDDALSGQIVVALVDGEEATLKRLKKKGNTIALEPANPA

SEQ ID NO: 140551 - protein, 69 aa, Unknown
  Bacterial polypetide isolated from the Sargasso Sea
MRPLTPRQAEILQLLKDYQAASGMPPTRAEIATQLGFKSANAAEEHLKALAKKGFIEMMPGTSRGIRLV

SEQ ID NO: 140552 - protein, 193 aa, Unknown
  Bacterial polypetide isolated from the Sargasso Sea
MPDNPLTKRQSQILEYIDSAIRDKGYPPTVREIGQAVGLNSPSTVHNHLNTLQDKGYLRRDPTKNRAIEVHWDAGSGAVIDRRPVTHVPLVGDVAAGSGVLAAQNVEEVMPLPSDLTGEGDLFMLRVRGDSMIEAGIFDGDFVVARKQETADPGEIVVAGISGEEATVKTFNREGSCIVLETANATMSPMRFE

SEQ ID NO: 140553 - protein, 130 aa, Unknown
  Bacterial polypetide isolated from the Sargasso Sea
MLTKKQKNLLLFINKKLRSSGISPSYEEMKESLNLKSKSGIHRLISALEERGFIKRLAHKARALEVVKLPETASATDIYNSFSPSVIKGGLDEDNLKNGDAIEVSVLGNIAAGTPIEAIQNEVSRVPLPS

SEQ ID NO: 140554 - protein, 67 aa, Unknown
  Bacterial polypetide isolated from the Sargasso Sea
MLTKKQKNLLLFINKKLRSTGVSPSYEEMKESLNLKSKSGIHRLISALEERGFIKRLAHKARALEVI

SEQ ID NO: 140555 - protein, 109 aa, Unknown
  Bacterial polypetide isolated from the Sargasso Sea
AIQNEVARIPLPENIEKKGEYFGLKVQGDSMIEAGINDGDTVVIKKTETADNGKIVVALIDDHEAMLKRIRRKGKTIALESANRNYETKIFGPDRVKVQGVLVSLYRSF

SEQ ID NO: 140556 - protein, 122 aa, Unknown
  Bacterial polypetide isolated from the Sargasso Sea
PVLGKIAAGTPVEAIQNEVSRIPLPANIEKNGEFFGLKVQGDSMIEAGINNGDTVIVKKADTAENGKIVVALIDDHEAMLKRIRRKGKTIALESANRNFETKIFGPDRVKVQGVLVSLYRNF

SEQ ID NO: 140557 - protein, 84 aa, Unknown
  Bacterial polypetide isolated from the Sargasso Sea
VQGDSMIEAGISEGDTVIVKKTDTAENGKIVVALIDDHEAMLKRIRRKGKTIALESANKNYETKIFGPDRVKVQGVLVSLYRNF

SEQ ID NO: 140558 - protein, 143 aa, Unknown
  Bacterial polypetide isolated from the Sargasso Sea
SVIKGGLDEENLNNSKDVEIPVLGKIAAGTPVEAIQNEVSRIPLPANIEKGGEFFGLKVQGDSMIEAGINDGDTVIVKKADTADNGKIVVALIDDHEAMLKRIRRKGKTVALESANRNYETKIFGPDRVKVQGILVSLYRNFQ

SEQ ID NO: 140559 - protein, 110 aa, Unknown
  Bacterial polypetide isolated from the Sargasso Sea
MLTKKQKNLLIFINKKIRSSGISPSYEEMKNSLNLKSKSGIHRLISALEERGFVKRLAHKARALEVVKLPENASANDIFNTFTPSVIKGGLDKNINKSTDVSVIGSMPLV

SEQ ID NO: 140560 - protein, 105 aa, Unknown
  Bacterial polypetide isolated from the Sargasso Sea
EVSRIPLPNNLEKNGDYFGLKVQGDSMIEAGIHEGDTVIIKRTDTADNGKIVVALIDEHEAMLKRIRKKGKVVALESANRNYETKIFGPDRVKVQGVLVSLYRNF

SEQ ID NO: 140561 - protein, 57 aa, Unknown
  Bacterial polypetide isolated from the Sargasso Sea
MRPLTPRQAEILQLLKDYQAASGMPPTRAEIATQLGFKSANAAEEHLKALAKKGLLK

SEQ ID NO: 140562 - protein, 156 aa, Unknown
  Bacterial polypetide isolated from the Sargasso Sea
MLTKKQKNLLIYINKKIRSSGISPSYEEMKNSLNLKSKSGIHRLISALEERGFVKRLAHKARALEVVKLPENASANDIFNSFTPSVIKGGLDKSKKNSSKVSVLGSIAAGTPIEAIQQEVDKVALPEDLQNNGEHFGLKIKGDSMIEARIKYGDTV

SEQ ID NO: 140563 - protein, 126 aa, Unknown
  Bacterial polypetide isolated from the Sargasso Sea
MLTKKQKNLLLFINKRLRSSGVSPSYEEMKHSLNLKSKSGIHRLISALEERGFIRRLAHKARALEVIKLPETASANDIYNSFSPSVIKGGLDNDDRDKENTEIPVLGKIAAGTPVEAIQNEVSRIP

SEQ ID NO: 140564 - protein, 88 aa, Unknown
  Bacterial polypetide isolated from the Sargasso Sea
MLTKKQKNLLLFINKKIRGTGVSPSYEEMKSSLNLKSKSGIHRLISALEERGFIKRLAHKARALEVVKLPETASANDIYNSFSPSVIR

SEQ ID NO: 140565 - protein, 183 aa, Unknown
  Bacterial polypetide isolated from the Sargasso Sea
MLTKKQKELLTYIQSFQNKNGVTPSYEEMKMALNLKSKSGIHRLIIALEERGFVKRLAHKARALEIIKDGISNIKLSNNNKKNLIIGNFTNKNIDTSNSKLSTLPLLGKIAAGTPIEAIQDNDTSVDVPKEMMPIGESYALTVEGDSMINEGIHDGDTVLIKKTNLAENGDIIVALIDDNEAT

SEQ ID NO: 140566 - protein, 216 aa, Unknown
  Bacterial polypetide isolated from the Sargasso Sea
MLTKKQKNLLLFINKKIRSTGVSPSYEEMKNSLNLKSKSGIHRLISALQERGFIKRLAHKARALEVLKLPETASANDIYNSFSPSVIKGGLDIENDKQNLNKIPVLGQIAAGTPIEAIQNEVSKVAIPEELSKNGEHFGLKVSGDSMIEAGINDGDTVIVKKSNTADNGQIVVALIDDQEAMLKRIRKKGKVVALESANKRYETKIFGPDRVKVQG

SEQ ID NO: 140567 - protein, 126 aa, Unknown
  Bacterial polypetide isolated from the Sargasso Sea
MLTKKQKNLLLFINKKLRSSGVSPSYEEMKESLNLKSKSGIHRLISALEERGFIKRLAHKARALEVIKLPETASANDIYNSFSPSVIKGGLDEEKPMSDDVEVPVLGKIAAGTPVEAIQNEVSRIP

SEQ ID NO: 140568 - protein, 130 aa, Unknown
  Bacterial polypetide isolated from the Sargasso Sea
MLTKKQKNLLLFINKKLRSSGVSPSYEEMKASLNLKSKSGIHRLISALEERGFIKRLAHKARALEVIKLPETASANDIYNHFSPSVIKGGLDTEKNLSSETEVPVLGKIAAGTPVEAIQNEVSRIPLPAI

SEQ ID NO: 140569 - protein, 225 aa, Unknown
  Bacterial polypetide isolated from the Sargasso Sea
MLTKKQKELLNYIQKFQSKNGVTPSYEEMKSALNLKSKSGIHRLILALEERGFVKRLAHKARALEIIKDGISNIKVSEKNKNNLVVGNFINNVKEDSHKLSTLPLLGKIAAGTPIEAIQQNDTSVDVPKEMMPIGESYALTVEGDSMINEGIHNGDTVLIKKTNIADNGDIVVALIDDNEATLKRIRKKGQSIALESANPIYETRILSAHRVKIQGKLIGLLRRY

SEQ ID NO: 140570 - protein, 203 aa, Unknown
  Bacterial polypetide isolated from the Sargasso Sea
MKNLTVKQQQILEYIKDHLNLTGFPPTRSDIANEMGYKSPNAAEDHLRALARKGAIEIIPGTSRGIRLPINEQLGLPIIGQVAAGFPILAEESIAGYSEVPSSFFTPSADYLLTVKGSSMIDIGIFEDDLLAVHKTDQAINGDIVVARIDNEVTVKRFEYQKGNSKIRLIAENPDFAPINVNLEEDDFSIEGISVGVIRRSMS

SEQ ID NO: 140571 - protein, 197 aa, Unknown
  Bacterial polypetide isolated from the Sargasso Sea
MINLTEQQFKIFDVIKGHVNDYGYPPTRAEIAKIMGFKSVNAAESHIKALVKKGVLLKVPDSSRGLKLVEEYSGIPIVGRVAAGSPISAVENIEKYVPTNPISSPVDFFLRVKGDSMKDIGIIENDLVGVKKASTAENGSVVVARLEDEVTLKRFVQENGKIKLVAENKNYDDILIDQNSGFSLEGIAVGVVREDVF

SEQ ID NO: 140572 - protein, 137 aa, Unknown
  Bacterial polypetide isolated from the Sargasso Sea
MLTKKQKNLLLFINKKLRSSGVSPSYEEMKQSLNLKSKSGIHRLISALEERGFIKRLAHKARALEVIKLPETASANDIYNSFSPSVIKGGLDEEKPMSDDIEVPVLGKIAAGTPVEAIQNEVSRIPLPSNLEKNGDY

SEQ ID NO: 140573 - protein, 177 aa, Unknown
  Bacterial polypetide isolated from the Sargasso Sea
RGFIKRLAHKARALEVVKLPETASANDIYNSFSPSVIKGGLDDSNLKNKDGSDIPVLGNIAAGTPVEAIQNEVTRIPLPSNIEKNGEYFGLKVQGDSMIEAGINDGDTVIVKKTDTADNGKIVVALIDDHEAMLKRIRRKGKTVALESANRNYETKIFGPDRVKVQGILVSLYRNFQ

SEQ ID NO: 140574 - protein, 201 aa, Unknown
  Bacterial polypetide isolated from the Sargasso Sea
MKTLTNRQKEILDLIKSYIVDYGFPPTRAEISKILGFKSANAAEQHLRAIEKKGYIQILSGASRGIVLSEDEEMGIPVIGLVAAGGPILAQENIEKRVPVSQSLLTESVDYYLRVKGDSMIDVGIYEEDLIGVKKTADIKVGKVVVARINDEVTVKTLKKFSSEEVILKAENKNYSDIKVNPLIDKLNFEGTCVGLLRNLS

SEQ ID NO: 140575 - protein, 203 aa, Unknown
  Bacterial polypetide isolated from the Sargasso Sea
MNDLTPKQRIVLNMIRDFMDEYGIPPTRMEIATELKFKSPNSAEEHLRALQKKGVIELIKSSSRGIRLKDSLREQIGLPLIGQVAAGNPVFAEENFESYVNIDPNYFSPKPHYLLRINGMSMKDAGIFDNDIVAVHRTSEIRSRQIVVARINDEVTVKRYTQNNSIVTLLPENDEFLPINVDLESEEMVIEGVVVGVLRSNVE

SEQ ID NO: 140576 - protein, 109 aa, Unknown
  Bacterial polypetide isolated from the Sargasso Sea
MLTKKQKNLLLFINKKLRSSGVSPSYEEMKASLNLKSKSGIHRLISALEERGFIKRLAHKARALEVIKLPETASANDIYNNFSPSVIKGGLDEENLSSDDAEVPVLGKI

SEQ ID NO: 140577 - protein, 225 aa, Unknown
  Bacterial polypetide isolated from the Sargasso Sea
MLTKKQKNLLLFINKKIRGTGVSPSYEEMKSSLNLKSKSGIHRLISALEERGFIKRLAHKARALEVVKLPETASANDIYNSFSPSVIRGGLSDISKSKKNEISVLGSIAAGTPIEAIQNEVSRIPLPSNIENNGEFFGLKVKGDSMTEAGINDGDTVIIKKADKAENGKIVVALIDDHEAMLKRIRIKGKTVALESANKNYETKIFGPDRVKVQGVLISLYRNFN

SEQ ID NO: 140578 - protein, 64 aa, Unknown
  Bacterial polypetide isolated from the Sargasso Sea
TPTARDGQIVVARMEDEVTVKRIKRSGQHTLKLLPENKDFEPIVVDLRSTECAIEGISVGIIRH

SEQ ID NO: 140579 - protein, 120 aa, Unknown
  Bacterial polypetide isolated from the Sargasso Sea
MLTKKQKNLLIFINKKIRSTGVSPSYEEMKNSLNLKSKSGIHRLISALEERGFIKRLAHKARALEVIKLPETASAHDLFNSFTPSVIKGGLDQSSNKSTKVSILGSIAAGTPIEAIQHEV

SEQ ID NO: 140580 - protein, 88 aa, Unknown
  Bacterial polypetide isolated from the Sargasso Sea
FGLKVQGDSMIEAGINEGDTVIIKRTDTADNGKIVVALIDEHEAMLKRIRKKGKVVALESANKNYETKIFGPDRVKVQGVLVSLYRNF

SEQ ID NO: 140581 - protein, 115 aa, Unknown
  Bacterial polypetide isolated from the Sargasso Sea
MLTKKQKNLLLFINKRLRSTGVSPSYEEMKESLNLKSKSGIHRLISALEERGFIKRLAHKARALEVVKLPETASANDIYNSFSPSVIRGGLDDKNLENKSGSEIPVLGILQRALP

SEQ ID NO: 140582 - protein, 88 aa, Unknown
  Bacterial polypetide isolated from the Sargasso Sea
MLTKKQKNLLIYINKKIRSSGISPSYEEMKNSLNLKSKSGIHRLISALEERGFVKRLAHKARALEVVKLPENASANDIFNSFTPSVIK

SEQ ID NO: 140583 - protein, 202 aa, Unknown
  Bacterial polypetide isolated from the Sargasso Sea
MLTPSETKTLKFIQKYCIEKGCSPTLTEIADGIGIKSRGVVHRYIKSLESKKLLSVASNRKRGICLNLEAYENQSIAPIIPLLGRIAAGQPIEAIEDRHEINLADFIMDPDRFALQVTGESMMDAGILDGDTVIIKHQNTANNGDIVVALIDGLEATLKRFKRLPKGMILLIPENKSMEAIAYEAERIQIQGVVVGQLRSYQ

SEQ ID NO: 140584 - protein, 226 aa, Unknown
  Bacterial polypetide isolated from the Sargasso Sea
MLTKKQNELLIYIHQNLRETGVAPSYEEMKDALDLRSKSGIHRLINALEERGFIRRLAHRARAIEIIKLPTSSTINPKGNFQPEVIEGNKEKDLFSLNEESIEVRMMGKIAAGTPIAAIEYEKNKISVPGSMVGTGDHYALEIEGDSMIGAGILDKDKAIIKKVDDALSGQIVVALVDGEEATLKRLRKKGNTIALEPANSAYETKIYGPERIQIQGILVGILRSY

SEQ ID NO: 140585 - protein, 128 aa, Unknown
  Bacterial polypetide isolated from the Sargasso Sea
MIQKSLLLGKIAAGTPVEAIHNEVSRIPLPANIEKDGEFFGLKVQGDSMIEAGINDGDTVIVKKADTADNGKIVVALIDDHEAMLKRIRRKGKTVALESANRNYETKIFGPDRVKVQGILVSLYRNFQ

SEQ ID NO: 140586 - protein, 202 aa, Unknown
  Bacterial polypetide isolated from the Sargasso Sea
MLTPSETKTLKFIQKYCIEKGCSPTLTEIADGIGIKSRGVVHRYIKSLESKKLLSIASNRKRGICLNLEAYENQSIAPIIPLLGRIAAGQPIEAIEDRHEINLADFIMNPDRFALQVTGESMMDAGILDGDTVIIKHQNTANNGDIVVALIDGIEATLKRFKRLPKGMILLIPENKSMEAIAYEAERIQIQGVVVGQLRSYQ

SEQ ID NO: 140587 - protein, 89 aa, Unknown
  Bacterial polypetide isolated from the Sargasso Sea
YFGLKVQGDSMIEAGINEGDTVIVKKSDTAENGKIVVALIDDHEAMLKRIRRKGKTVALESANKNYETKIFGPDRVKVQGVLVSLYRNF

SEQ ID NO: 140588 - protein, 94 aa, Unknown
  Bacterial polypetide isolated from the Sargasso Sea
MLTKKQKNLLVFINKKIRSSGISPSYEEMKNSLNLKSKSGIHRLISALEERGFVKRLAHKARALEVVKLPENASANDIFNTFTPSVIKGGLDKE

SEQ ID NO: 140589 - protein, 94 aa, Unknown
  Bacterial polypetide isolated from the Sargasso Sea
MLTKKQKNLLLFINKKLRSTGVSPSYEEMKESLNLKSKSGIHRLISALEERGFIKRLAHKARALEVIKLPETASANDIYNSFSPSVIKGGLDEE

SEQ ID NO: 140590 - protein, 130 aa, Unknown
  Bacterial polypetide isolated from the Sargasso Sea
MLTKKQKNLLLFINKKLRSSGVSPSYEEMKQSLNLKSKSGIHRLISALEERGFIKRLAHKARALEVIKLPETASANDIYNSFSPSVIKGGLDEEQTTSDEVEVPVLGKIAAGTPVEAIQNEVSRIPLPNN

SEQ ID NO: 140591 - protein, 239 aa, Unknown
  Bacterial polypetide isolated from the Sargasso Sea
MRTFIEHECTIFVLMLTKKQKNLLIFINKKLRNSGVSPSYEEMKDSLNLKSKSGIHRLISALEERGFIKRLAHKARALEVIKLPETASANDIYNSFSPSVIRGGLDDNNNLNENAVPVLGDIAAGTPIEAIQNEVTRIPLPDNIEKKGEYFGLKVSGDSMVEAGINDGDTVIIKKTDTAENGKIVVALIDDHEAMLKRLRRKGKTIALESANRNYETKIFGPDRVKVQGVLVSLYRNFH

SEQ ID NO: 140592 - protein, 151 aa, Unknown
  Bacterial polypetide isolated from the Sargasso Sea
MKLNKNIIIDNIKTIFYALVIAIIIRSLIIQPFYIPSSSMEPNLLVGDRLFVTKYSYGFSKHSFPFSPPFFKGRIFNNSPSRGDVVVFKTPADNRTDYIKRLIGLPGDKIQFIDGDLYINNNQVLKTIKSKNELIYCGNQNIKTNKFEEKL

SEQ ID NO: 140593 - protein, 200 aa, Unknown
  Bacterial polypetide isolated from the Sargasso Sea
AIFIALVIRSFIFEPFNIPSGSMKPNLLVGDFIFVSKYSYGFSKHSLPFSIPLIPGKIFSNIPERGDIVVFKTPQNNRTDYIKRVIGLPGDKIEIKNGIIFINGSEILRKKLNDFIDTDNKTTNKRVRMYNEYFFNKEINILDITDNGIADNTQLFNVPENHFFVMGDNRDNSQDSRFISTVGFIPYENLVGKAQFIFFS

SEQ ID NO: 140594 - protein, 221 aa, Unknown
  Bacterial polypetide isolated from the Sargasso Sea
MDFTVLLILITFISGICLLLSKSKNSSNTLYSAFQFFGSLFPILFIVLFIRSFIVEPYKIPSGSMIPTLLIGDFILVKKYQYGIRAPVINKVILENEKPNYGDIIVFQYPQNKKINYIKRVVALPGDSIRYIEKELFVNGKKYTQKQEIMYPSSSQYSTKDVYKETNTYNSYNILKSTNPSQNFEYQVPEGTYFVLGDNRDNSNDSRYWGPVPYENLIGKA

SEQ ID NO: 140595 - protein, 215 aa, Unknown
  Bacterial polypetide isolated from the Sargasso Sea
QPFYIPSSSMEPTLLVGDRLFVTKYTYGYSKHSFPFSPPILNKRIMFSAPERGDVIVFKTPADNRTDYIKRLIGLPGDKIQFIDSNLYLNNSEILKSKINNKTTIFCGDKSIDVYRFEEKLSNGKKFHTVYLKDYTYQNSDVFTVPKDNYFFLGDNRDCSKDSRYLTSVGYVHKDNLVGKAQFIFFSSDKKIGSFIEFWKWHKSIRFNRTFNKIN

SEQ ID NO: 140596 - protein, 172 aa, Unknown
  Bacterial polypetide isolated from the Sargasso Sea
PGKIFSNIPERGDVVVFKTPENNRTDYIKRVIGLPGDKIKIKNGIIFINGSEILRKKINDFIDTDNNTSNKRVRMYNEYFFNKEINILDITDNGMADNTQLFNVPDNHFFVMGDNRDNSQDSRFISTVGFIPYENLVGKAQFIFFSLENARFLQLWKWPNSIRYERIFQKIQ

SEQ ID NO: 140597 - protein, 189 aa, Unknown
  Bacterial polypetide isolated from the Sargasso Sea
YGYSRYSFPFGIVPLPENRVFASEPKRGDVAVFKLPSNTNINYIKRVMGLPGDKIQMKSGKLFINGSLVIQEEDGFYRHIIKNKFEQILEQKKERLNEDKSYAILNLNDYQVMDNTKEFVVPNDKYFVMGDNRDNSLDSRANGGWFVPLENFVGKANIIFFSITDDTRFWQIWKWPFNIRYNRIFKKIS

SEQ ID NO: 140598 - protein, 232 aa, Unknown
  Bacterial polypetide isolated from the Sargasso Sea
TIFYALIIAVLIRSIIIQPFYIPSSSMEPNLLIGDRLFVSKYSYGYSKHSFPFSPPLFKGRILKSLPKRGDVVVFKTPSDNRTDYIKRLIGLPGDKIKFIDGDLHINGNQILKTRISTTNNVYCGSKAISVNTFVEKLPNGKKYNSVYAKRYIYKNSDNFVVPNNHYFFLGDNRDCSKDSRFLSEVGYVHEDNLVGKAQFIFFSSDYRKGSIFKFWKWPDILRMKRFFKKIN

SEQ ID NO: 140599 - protein, 242 aa, Unknown
  Bacterial polypetide isolated from the Sargasso Sea
WIPSGSMKDTLLIGDFLFVNKMAYGYSYASCPSIIIPRFGINVDAEDFCGFVKRNNERLFGGQPQRGDVVVFRHPVTGRDYIKRLIGLPGDKVQIKDGKISINDQKVETVDAGIFVETYAPQGPFRNQPRCSNNPKKFGEDCEKFRIKSTLPDGRSFFNLETFKGENIGNSIYNVPSGHYFFMGDNRDNSLDSRVGQVQGGVGFVPYENLVGRADRVMFSSAGRSMLFFWTWRSNRFFKAVQ

SEQ ID NO: 140600 - protein, 232 aa, Unknown
  Bacterial polypetide isolated from the Sargasso Sea
MKSILIAIFIALLIRSFIFEPFNIPSGSMKPNLLVGDFIFVSKYSYGFSKHSLPFSIPLIPGKIFSNTPERGDVVVFKTPENNRTDYIKRVIGLPGDKIEIKNGIIFINGSEILRKKLNDFIDTDNKTSNKRVRMYNEYFFKKEIKILDITDNGIADNTQLFNVPDNHFFVMGDNRDNSQDSRFISTVGFIPYENLVGKAQFIFFSLENARFLQIWKWPNSIRYERIFQKIQ

SEQ ID NO: 140601 - protein, 77 aa, Unknown
  Bacterial polypetide isolated from the Sargasso Sea
MIFDFQTILFFITLFLGLSWLIGKRILKKDSEFYEVCGAMFPILLLIFLFRSFAYEPFRIPSASMMPTLERGDFILV

SEQ ID NO: 140602 - protein, 210 aa, Unknown
  Bacterial polypetide isolated from the Sargasso Sea
NFFSENIKTLIYALIIAVIIRSLLVQPFYIPSSSMEPTLLVGDRLFVTKYTYGYSKHSFPFSPPILNKRIMFSSPERGDVIVFKTPADNRTDYIKRLIGLPGDKIQFIDSNLYLNNSEILKSKINNKTTIFCGNKSIDVYRFEEKLSNGKKFHTVYLKNYTYQNSDVFTVPKDHYFFLGDNRDCSKDSRYLTSVGYVHQDNLVGKAQFIF

SEQ ID NO: 140603 - protein, 216 aa, Unknown
  Bacterial polypetide isolated from the Sargasso Sea
MVGIFSKNVLLKKTGRGWFVPVFLIFVLRTFIYEPYQIPSGSMIPGLKVGDFILVNKHSYGLKVNRIGSTFALSADPEYGDVVVFIPPHVNVPYIKRLIGKPGDTIGYLNKKIYVNGKAIQQELISTSEEETFLKETLANSDRIIRIVGGSSSYPEEFTVPANHYFVMGDNRDNSSDSRFWGFVPRENFMGTGELIWMSWECWTCLPSFERAGFIQ

SEQ ID NO: 140604 - protein, 128 aa, Unknown
  Bacterial polypetide isolated from the Sargasso Sea
MSINFPLLLVIAVAVCGFLALVDLILLAPRRRAAIAAYQGRVDDPDDRVLERLSKEPLLVEYGKSFFPVLAIVLVLRSFLVEPFQIPSGSMKPTLEVGDFILVNKFAYGIRLPVIDEKSSRWTTRNAA

SEQ ID NO: 140605 - protein, 233 aa, Unknown
  Bacterial polypetide isolated from the Sargasso Sea
MKEKKFIKIIIENVKTIFGALLIALFIRSFFFQPFYIPSSSMEPTLLIGDRIFVSKYTYGFSKHSFPFSPSFFNGRILYKSPQRGDAVVFKTPEDNRTDFIKRLIGLPGDKIQFYQGNIILNDKIIDRKKTQIYNKISCGKYSFETNAFIENLPNGKKYTAVYNKVGTLQNTSKFKIPKDHFFFLGDNRDCSRDSRFDTIGFVHKDNLVGKAQLIFFSNDTIKSRVLKFWNLN

SEQ ID NO: 140606 - protein, 149 aa, Unknown
  Bacterial polypetide isolated from the Sargasso Sea
DYIKRLIGLPGDKIQFIDANLYLNSSEILKSKIPLKTKIYCGDRTIDVLKFEEKLPNGKKFHTVYLKNYTYQNSDVFTVPDDHYFFLGDNRDCSKDSRFLSSVGYVHKDNLVGKAQFIFFSSDKKIGSFIEFWKWHKSIRFKRTFNVIN

SEQ ID NO: 140607 - protein, 198 aa, Unknown
  Bacterial polypetide isolated from the Sargasso Sea
MFEISRVNKKKDKIVVKKRVSSGSSGIIDFVKTIIYALVLAGLIRTLLFQPFWIPSGSMKPNLLVGDFIFVNKFAYGYSRHSCPFSLCPIKNRVFGSEPTRGDIVVFRHPTNGKDFVKRLIGLPGDKVRLKQGRVYLNGNLIPIQKIDDFQEEKQKQGPLGSVPRCSNEPVPFGLDCLKNQFSESLPNKISYSILDIG

SEQ ID NO: 140608 - protein, 122 aa, Unknown
  Bacterial polypetide isolated from the Sargasso Sea
MKKIILENLKTILYALFIAILIRSLLLQPFYIPSSSMEPSLLVGDRLFVTKLSYGYSKHSFPFSLGPIKNRIFFSEPERGDIIVFKTPADNRTDYIKRLIGLPGDKIQFIDGNLYLNNVEIL

SEQ ID NO: 140609 - protein, 156 aa, Unknown
  Bacterial polypetide isolated from the Sargasso Sea
ENNIPSRGDVVVFRYPENPKIPYIKRIIGLPGDKIAYYNKTLYINDVLAEQITNGAYYAFGSGTPMKGSLLISEDLGNIEHEILIDPERNSLEFVTQVPDSHYFVLGDNRDNSKDSRYWGFVPEENLVGRAFLVWMNWDGKNKPVVNFNRIGKFIK

SEQ ID NO: 140610 - protein, 106 aa, Unknown
  Bacterial polypetide isolated from the Sargasso Sea
MIFDFQTILFFITLFLGLSWLIGKRILKKDSEFYEVCGAMFPILLLIFLFRSFAYEPFRIPSASMMPTLERGDFILVNKFAFNIRMPLTGKTIFTNKEPKRGDVLV

SEQ ID NO: 140611 - protein, 176 aa, Unknown
  Bacterial polypetide isolated from the Sargasso Sea
GSMLPGLKVGDFILVKKFTYGIKVNRTGPPIAFGKDPQLGDVVVFIPPHDHRPFVKRLIGKPGDRITYINKKIYVNGKPINQKLLSEKDNLRIYEELLNDRTIQIQQITSRINYPDEWEVPKDMYFVVGDNRDNSNDSRYWGFVPRENFMGTADYIWMSWECWTCAPSFKRAGKIN

SEQ ID NO: 140612 - protein, 205 aa, Unknown
  Bacterial polypetide isolated from the Sargasso Sea
MKLDKNFFSENIKTLFYALIIAVIIRSLLIQPFYIPSSSMEPTLLVGDRLFVTKYTYGYSKHSFPFSPPILNKRIMFSSPERGDVIVFKTPADNRTDYIKRLIGLPGDKIQFIDSNLYLNNSEILKSKINNKTTIFCGDKSIDVYRFEEKLSNGKKYHTVYLKNYTYQNSDVFTVPKDHYFFLGDNRDCSKDSRYLTSVGYVHKD

SEQ ID NO: 140613 - protein, 238 aa, Unknown
  Bacterial polypetide isolated from the Sargasso Sea
NSFFGNLKSILIAIFIALLIRSFIFEPFNIPSGSMKPNLLVGDFIFVSKYSYGFSKHSLPFSIPLIPEKILSNIPERGDVVVFKTPENNRTDYIKRVIGLPGDKIEIKNGIIFINGSEILRKKLNDFIDTDNETNNKRVRMYNEYFFNKEINVLDIADNGIADNTQLFNVPENHFFVMGDNRDNSQDSRFISTVGFIPYENLVGKAQFIFFSLENARFLQIWKWPNSIRYERIFQKIQ

SEQ ID NO: 140614 - protein, 142 aa, Unknown
  Bacterial polypetide isolated from the Sargasso Sea
MKLDKNFFSENIKTLIYALIIAVIIRSLLVQPFYIPSSSMEPTLLVGDRLFVTKYTYGYSKHSFPFSPPILNKRIMFSSPERGDVIVFKTPADNRTDYIKRLIGLPGDKIQFIDSNLYLNNSEILKSKINNKTTIFCGDKKY

SEQ ID NO: 140615 - protein, 164 aa, Unknown
  Bacterial polypetide isolated from the Sargasso Sea
RGDVIVFKTPADNRTDYIKRLIGLPGDKIQFVDSNLYLNNSEILKSRINNKTTIFCGDKSIDVYRFEEKLSNGKKFHTVYLKDYTYQNSDVFTVPKDHYFFLGDNRDCSKDSRYLTSVGYVHKDNLVGKAQFIFFSSDKKIGSFIEFWKWHKSIRFNRTFNKIN

SEQ ID NO: 140616 - protein, 207 aa, Unknown
  Bacterial polypetide isolated from the Sargasso Sea
MKSIFIAIFIALLIRSFIFEPFNIPSGSMKPNLLVGDFIFVSKYSYGFSKHSLPFSIPLISRKIFSNIPERGDVVVFKTPENNRTDYIKRVIGLPGDKIEIKNGIIFINGSEILRKKLNDFIDTDNKASNKRVRMYNEYFFNKEINILDITDNGIVDNTQLFNVPENHFFVMGDNRDNSQDSRFISTVGYIPYENLVGKAQFIFFSL

SEQ ID NO: 140617 - protein, 221 aa, Unknown
  Bacterial polypetide isolated from the Sargasso Sea
MKLDKNFFSENIKTLIYALIIAIIIRSLLVQPFYIPSSSMEPTLLVGDRLFVTKYTYGYSKHSFPFSPPILNKRIMFSSPERGDVIVFKTPADNRTDYIKRLIGLPGDKIQFIDSNLYLNNSEILKSKINNKTTIFCGDKNIDVYRFEEKLSNGKKFHTVYLKDYTYQNSDVFTVPKDHYFFLGDNRDCSKDSRYLTSVGYVHKDNLVGKAQFIFFSSDKR

SEQ ID NO: 140618 - protein, 215 aa, Unknown
  Bacterial polypetide isolated from the Sargasso Sea
MIKKKNKKKESSFFEFLKTIFYAVIIAVIFRSLFFEPYNIPSGSMLPNLLIGDYLFVSKYSYGYSRYSFPFGIVPLPENRVFASEPKRGDVAVFKLPSNTNINYIKRVIGLPGDKIQMKSGKLFINGSLVIQEEDGFYRHIIKNKFEQILEQKKERLNKDKSYAILNLNDYQVMDNTKEFVVPNDKYFVMGDNRDNSLDSRANGGWFVPLENFVG

SEQ ID NO: 140619 - protein, 235 aa, Unknown
  Bacterial polypetide isolated from the Sargasso Sea
NIKTLIYALIIAVIIRSLLVQPFYIPSSSMEPTLLVGDRLFVTKYTYGYSKHSFPFSPPILSKRIMFSSPERGDVIVFKTPADNRTDYIKRLIGLPGDKIQFIDSNLYLNNSEILKSKINNKTTIFCGDKSIDVYRFEEKLSNGKKFHTVYLKNFTYQNSDVFTVPKDHYFFLGDNRDCSKDSRYLTSVGYVHKDNLVGKAQFIFFSSDKRRGSFIEFWKWHKSIRFNRTFNKIN

SEQ ID NO: 140620 - protein, 171 aa, Unknown
  Bacterial polypetide isolated from the Sargasso Sea
MKLDKNFFSENIKTLIYALIIAVIIRSLLVQPFYIPSSSMEPTLLVGDRLFVTKYTYGYSKHSFPFSPPILNKRIMFNSPERGDVIVFKTPADNRTDYIKRLIGLPGDKIQFIESNLYLNNSEILKSKINNKTTIFCGDKSIDVYRFEEKISNDKKFHTVYLKELYLSKFR

SEQ ID NO: 140621 - protein, 238 aa, Unknown
  Bacterial polypetide isolated from the Sargasso Sea
MTKTKKNSFFSNFKSISIAIFIALLIRSFVFEPFNIPSGSMKPNLLVGDFIFVSKYSYGYSKHSLPFSIPLIPRKIFSNIPERGDVVVFKTPQDNRTDYIKRVIGLPGDKIEIKNGIIFINGSEILRKKLDKFIDTDKNITRNEKRVDKYKEYFFNKEIDVLNLYDNFMYDNTQLFVVPENHFFVMGDNRDNSIDSRSNDVGFIPFENLIGKARFIFFSLENSRFFQIWKWPNSIRYE

SEQ ID NO: 140622 - protein, 198 aa, Unknown
  Bacterial polypetide isolated from the Sargasso Sea
MLIGTIVSLLIWLIGKFIKNNFLKTSGRSWFIPIFLIFILRTFAYEPYQIPSGSMIPGLKVGDFILVNKHSYGLKLERTGKAFAFDKNPEYGDVVVFIPPHKPVPFVKRLIGKPGDKISYINKKLYINSKPIPQTFYKSESDLVFYIENINNKDIQVQHMKSRPSSAPSEWIVPKDMYFAVGDNRDNSNDSRYWGYIP

SEQ ID NO: 140623 - protein, 246 aa, Unknown
  Bacterial polypetide isolated from the Sargasso Sea
MAFLILLMIFVTAGDLGILLLVGSIVSFLLMMVGLIAKNTEIAKTGRGWFLPFFLIFILRTFLFEPYQIPSGSMLPGLKVGDFILVKKFTYGIKVNRTGPPIAFGKDPELGDVVVFIPPHDHRPFVKRLIGKPGDRITYINKKLYVNGKPINQKLLSEKDNLRIYEELLKDRTIQIQQITSRINYPEEWEVPKGMYFVVGDNRDNSNDSRYWGFVPRENFMGTADYIWMSWECWTCAPSFKRVGKI

SEQ ID NO: 140624 - protein, 170 aa, Unknown
  Bacterial polypetide isolated from the Sargasso Sea
MYSSPERGDVVVFKTPVDNRTDYIKRLIGLPGDKIQFIDSNLYLNNSEILKSKILNKSKIYCGNRTIDVYKFEEKLPNGKKFHTVYLKDYTFQNSDIFIVPEDHFFFLGDNRDCSKDSRFLTSVGYVHKDNLVGKAQFIFFSSDKKIGSVFAFWKWHKSIRFSRTFDKIN

SEQ ID NO: 140625 - protein, 201 aa, Unknown
  Bacterial polypetide isolated from the Sargasso Sea
GHPKRGDIVVFKYPEDPRLDYIKRAVGLPGDKITYDPVAKQVTIQPGCSSGQACGNALPVTYSNVEPSDFVQTFSRQNGGEATSGFWQLPKGESKADGIRLTERKETLGEVTHRILTVPIAQDQVGMYYRQSGLPLATWIVPPGHYFMMGDNRDNSADSRYWGFVPEANLVGKATAIWMSFEKQEGEWPTGVRLSRIGSIQ

SEQ ID NO: 140626 - protein, 182 aa, Unknown
  Bacterial polypetide isolated from the Sargasso Sea
FPFSLGPIKNRIFFSEPQRGDVIVFKTPADNRTDYIKRLIGLPGDKIQFIDGNLYLNNIEILKSKINKNLQIYCGKTVVDTNVFKETLLNKKEYLTTYYKNGSYQNSDEYLVPKDHYFFLGDNRDCSKDSRFLTSVGYVHKDNLVGKAQFIFFSTNIREGSIFNFWNWKNILRTERFFKKII

SEQ ID NO: 140627 - protein, 158 aa, Unknown
  Bacterial polypetide isolated from the Sargasso Sea
FKTPADNRTDYIKRLIGLPGDKIQFINGDLYLNDNQVLKTIKSKNEILYCGNSKFSARTFEEKLPNGKTYIASYRIDYSFMNSDEYLVPENHYFFLGDNRDCSKDSRFLSEVGYVHKNNLVGKAQLLFFSSDPRIGSIVKFWKWNKILRINRFFKKIL

SEQ ID NO: 140628 - protein, 168 aa, Unknown
  Bacterial polypetide isolated from the Sargasso Sea
MKLDKNFFSENIKTLIYALIIAVIIRSLLVQPFYIPSSSMEPTLLVGDRLFVTKYTYGYSKHSFPFSPPILNKRIMFSAPERGDVIVFKTPADNRTDYIKRLIGLPGDKIQFIDSNLYLNNSEILKSKINNKTTIFCGDKIIDVYRFEEKLSNGKKFHTVYLKDYTLS

SEQ ID NO: 140629 - protein, 211 aa, Unknown
  Bacterial polypetide isolated from the Sargasso Sea
MKLDKNFFSENIKTLIYALIIAVIIRSLLVQPFYIPSSSMEPTLLVGDRLFVTKYTYGYSKHSFPFSPPILNKRIIFSSPERGDVIVFKTPADNRTDYIKRLIGLPGDKIQFIDSNLYLNNSEILKSKVNNKTTIFCGDKSIDVYRFEEKLSNGKKFHTVYLKDYTYQNSDVFTVPKDHYFFLGDNRDCSKDSRYLTSVGYVHKDNLVGKA

SEQ ID NO: 140630 - protein, 247 aa, Unknown
  Bacterial polypetide isolated from the Sargasso Sea
MAFLILLMIFVTAGDLGILLLVGSIVSFLLMIVGLITKNTEIIKTGRGWFLPFFLIFILRTFLFEPYQIPSGSMMPGLKVGDFILVKKFTYGIKVNRTGSPIAFGKDPELGDVVVFIPPHDHRPFVKRLIGKPGDRITYIKKKIYVNGKPINQKLLSEEDNVRIYEEMLDDKTIQIQQITSRINYPEEWVVPKDMYFVVGDNRDNSNDSRYWGFVPRENFMGTADYIWMSWECWTCAPSFKRAGKIN

SEQ ID NO: 140631 - protein, 245 aa, Unknown
  Bacterial polypetide isolated from the Sargasso Sea
MKIDKSFFSENIKTLFYALVIAIVIRSLLIQPFYIPSSSMEPTLLVGDRLFVTKYSYGYSKHSFPFSPPILSKRVMFNSPERGDVVVFKTPADNRTDYIKRLIGLPGDKIQFIDSNVYLNSSEILKSKTPSKSNIYCGSEIIDVYKFEEKLPNGKKFHTVYLKEYTFQNSDVFTVPDNHYFFLGDNRDCSKDSRYLTSVGYVHKDNLVGKAQFIFFSSDRQVGSIFEIWKWHKSIRFNRTFDKIN

SEQ ID NO: 140632 - protein, 297 aa, Unknown
  Bacterial polypetide isolated from the Sargasso Sea
MNFALILFVLVILTGVAWVADKLVFMPQRRRAADAVVAEFDRQQARVGERFADENAAQTRARLRDDKLRQPWWLEYSASFFPVILVVFVVRSFVVEPFKIPSGSMVPTLLVGDFILVNKFDYGLRLPITNTKVTEGRPLERGDVVVFRYPKDESVDYIKRVIGLPGDTVAYQDKQLTINGKPVPETPLPDYLDEERLGYAKQFEEDIDGRKNAILNNPAVPPFIVGAEDYPYRDNCTYNARGVICKVPPGNYFMMGDNRDNSADSRYWGFAPDKNIVGRAFFIWMNFSDLKRIGPFH

SEQ ID NO: 140633 - protein, 247 aa, Unknown
  Bacterial polypetide isolated from the Sargasso Sea
MAFLILLMIFVTAGDLGILLLVGSIVSFLLMMVGLIAKNTEIAKTGRGWFLPFFLIFILRTFLFEPYQIPSGSMLPGLKVGDFILVKKFTYGIKVNRTGPPIAFGKDPELGDVVVFIPPHDHRPFVKRLIGKPGDRITYINKKIYVNGKPINQKLLSEKDNLRIYEELLNDRTIQIQQITSRINYPEEWEVPKDMYFVVGDNRDNSNDSRYWGFVPRENFMGTADYIWMSWECWTCAPSFKRAGKIN

SEQ ID NO: 140634 - protein, 248 aa, Unknown
  Bacterial polypetide isolated from the Sargasso Sea
MNLALILVSLTAISGAVILTDILFWKNKLKEKSPTKVILEYSYAFFPVLLLVVVMRSFVFEPFRIPSGSMKPTLLVGDFIFVKKYSYGLRLPVLEKKILDIEKPRRGDVAVFRLPSDPSINYIKRVIGLPGDKIIYQDHKLTINGDEVAMNRDSSNPLHEMKPQFIEVIDDNRHTIITSNANFSIGEGYYEVPKNSYFMMGDNRDNSRDSRFIGSIPEEYLVGKAARIWMHMDGFEWPDIKRIGRKIE

SEQ ID NO: 140635 - protein, 240 aa, Unknown
  Bacterial polypetide isolated from the Sargasso Sea
MAKTKKSLGGSVIETIKTIVYALILAGIFRSLFFQPFWIPSGSMKDTLLIGDFLFVNKMAYGYSYASCPSIIIPRFGINVDAEDFCGFVKRNNERLFGGQPQRGDVVVFRHPVTGRDYIKRLIGLPGDKVQIKDGKISINDQKVETDDAGIFVETYAPQGPFRNQPRCSNNPKKFGEDCEKFRIKSTLPDGRSFFNLDTFKGENIGNSIYNVPSGHYFFMGDNRDNSLDSRIGQVQGGVG

SEQ ID NO: 140636 - protein, 224 aa, Unknown
  Bacterial polypetide isolated from the Sargasso Sea
AVIIRSLLVQPFYIPSSSMEPTLLVGDRLFVTKYTYGYSKHSFPFSPPILNKRIMFSSPERGDVIVFKTPADNRTDYIKRLIGLPGDKIQFIDSNLYLNNSEILKSKINNKTTIFCGNKSIDVYRFEEKLSNGKKFHTVYLKDYTYQNSDVFIVPKDHYFFLGDNRDCSKDSRYLTSVGYVHKDNLVGKAQFIFFSSDKKIGSFIEFWKWHKSIRFNRTFNKIN

SEQ ID NO: 140637 - protein, 215 aa, Unknown
  Bacterial polypetide isolated from the Sargasso Sea
MAFLILLMIFVTAGDLGILLLVGSIVSFLLMVVGLIAKNIEITKTGRGWFLPFFLIFVLRTFIFEPYQIPSGSMLPGLKVGDFILVKKFTYGIKVNRTGPPIAFGKDPELGDVVVFIPPHDHRPFVKRLIGKPGDRITYINKKIYVNGKPINQKLLSEKDNLRIYEELLNDRTIQIQQITSRINYPEEWEVPKDMYFVVGDNRDNSNDSRYWGFV

SEQ ID NO: 140638 - protein, 190 aa, Unknown
  Bacterial polypetide isolated from the Sargasso Sea
SYGYSKHSFPFSPPILSKRVMFNSPERGDVVVFKTPADNRTDYIKRLIGLPGDKIQFIESKLYLNNSELLKSKTLSKSNIYCGSEIIDVFKFEEKLPNGKKFHTVYLKEYTYQNSDIFTVPDNHYFFLGDNRDCSKDSRYLTSVGYVHKDNLVGKAQFIFFSSDRKMGSIFEFWKWHKSIRFNRTFDKIN

SEQ ID NO: 140639 - protein, 245 aa, Unknown
  Bacterial polypetide isolated from the Sargasso Sea
MDFTVLLVLITFISGICLLLSQSNNSANSLYSILQFMGSLFPILFIVLFIRSFIVEPYKIPSGSMIPTLLIGDFILVKKYQYGVRAPIINKVIFENEKPSYGDIIVFQYPQNKKINYIKRVVALPGDSVRYIEKELFVNGKKYTQKQEILYPSSSQYSSEEVYKETNIYNSYNILKSTNPSQDFEYRVPEGTYFVLGDNRDNSNDSRYWGPVPYENLIGEAFYIWMFWNPSGSDTIIDRIGTSLD

SEQ ID NO: 140640 - protein, 245 aa, Unknown
  Bacterial polypetide isolated from the Sargasso Sea
MKLDKNFFSENIKTLFYALIIAIVIRSLFIQPFYIPSSSMEPTLLVGDRLFVTKYSYGYSKHSFPFSPPILSKRIMFKEPKRGDVVVFKTPADNRTDYIKRLIGLPGDKIQFIDANLYLNNNEILKSKVKIKTKIFCGNNSIDVFKFEEKLPNGKKFHSVYLKEFTYQNSDVFTVPKNHYFFLGDNRDCSKDSRYLTSVGYVHKDNLVGKARFIFFSSDRKIGSFFEFWKWHKSVRFKRTLNKIN

SEQ ID NO: 140641 - protein, 261 aa, Unknown
  Bacterial polypetide isolated from the Sargasso Sea
MKLDKKFFSENIKTLFYALIIAIIIRSLLVQPFYIPSSSMEPTLLVGDRLFVTKYSYGYSKHSFPFSPPILGKRIMFKSPKRGDVIVFKTPADNRTDYIKRLIGLPGDKIQFIDANLYLNSSEILKSKIPLKTKIYCGNKKIDVLKFEEKLPNGKKFHTVYLKNYTYQNSDVFIVPDDHYFFLGDNRDCSKDSRFLSSVGYVHKDNLVGKAQFIFFSSDKKIGSFIEFWKWHKSIRLKEPLMLLINENKVSRIRKKNKYCF

SEQ ID NO: 140642 - protein, 297 aa, Unknown
  Bacterial polypetide isolated from the Sargasso Sea
MNFALILFVLVILTGVAWVLDKLVFLPRRRKAADSAIEEFDRQQSRIDKRFADENAAQTRSKLRDEKLRQPWWLEYTASFFPVILAVFVVRSFVVEPFKIPSGSMVPTLLVGDFILVNKFEYGLRLPVTNTKITQGSPLSRGDVVVFRYPKDESVDYIKRVIGLPGDTVAYQDKQLTINGQPVPETPLPDFFDDERQNYAKQFEETIGNKKNAILNNPAVPPFVMGAYDYPYRDNCTYNSRGVICKVPPGHYFMMGDNRDNSADSRYWGFVPDQNIVGRAFFIWMNFSDLKRIGSFN

SEQ ID NO: 140643 - protein, 226 aa, Unknown
  Bacterial polypetide isolated from the Sargasso Sea
IKSKIISLIIEQSKSLFPIFFIVLILRSFIFEPFRIPSASMMPTLLIGDFILVNKYDYGLRLPVTHEKFFKNNIPERGDVVVFRYPENPKIPYIKRIIGLPGDKIAYYNKTIYINDEVVEQVTIGSYPAYGAGLPMRGSILVLEKLGEVENNILIDPERDSLEFVTKIPDSHYFVLGDNRDNSKDSRYWGFVPEENLVGKAFIIWMNWDGESKNIINYKRIGKSIK

SEQ ID NO: 140644 - protein, 217 aa, Unknown
  Bacterial polypetide isolated from the Sargasso Sea
DSEFYEVCGAMFPILLLIFYFRSFAYEPFRIPSASMMPTLERGDFILVNKFAFNIRMPLTGKTIFTNKEPKRGDVLVFDFPCDRDIKYIKRLIGLPGDEIAYRNKQLTINGESIISSYDSVFKDPKQYGSHVYNEAINGIDHQLLLTPSRRGREGVYTVPEGSYFVMGDNRDNSTDSRFDCPGFVPTDHIVGSATRIWFNWDFSTMPKWRRIGDKIK

SEQ ID NO: 140645 - protein, 113 aa, Unknown
  Bacterial polypetide isolated from the Sargasso Sea
MANYFSLILVALTLITGLIWLVDSLVFAPKRKARLQAAATEEGAGYGEDPQLPYLVDTSQQIFPVIAFVLVLRSFLYEPFQIPSGSMMPTLLVGDFILVEKFAYGVKDPVFRS

SEQ ID NO: 140646 - protein, 235 aa, Unknown
  Bacterial polypetide isolated from the Sargasso Sea
MSDKESTSSWIKSNLLTIFYAIIIALVIRTFLFQPFFIPSSSMEPGLLVGDRIFASKYDFGYSQHSFPFSLPIVKGRIFESSPKRGDVVIFKPPHTRNDYIKRLIGLPGDKIKIVNGIVHINSNPIEIEFIRKDDKGISIYKETLPSGKSYEVKDLGDKPQDNINEFLVPENHYYFMGDNRDNSNDSRFWGPVPTERIVAKAQIIFFSTKDGSWFIEFWRWPFDIQFERLFKLIK

SEQ ID NO: 140647 - protein, 305 aa, Unknown
  Bacterial polypetide isolated from the Sargasso Sea
MAAYFSIILVLVTLISGLIWLIDVLVFAPKRRESLALAKASQANLTEEAEYNIIREPTVVETAHSIFPVIAFVLILRSFIYEPFQIPSGSMMPTLLVGDFILVEKFSYGLKDPVWRTKLIETGEPKRGDVIVFKYPENPQIDYIKRVVGLPGDRIIYRNKQLMLQKACGAEQTHCPEPELVARTEISRGDFSQDGVPLIRFKEQLGEVAHDILINPSRPDMLGYFKREGNLPAGEFLVPEGHYFAMGDNRDNSTDSRFWGFVPEENLVGKAVAIWISFEFDRSKADFLPTWVPSGVRFERVGGIH

SEQ ID NO: 140648 - protein, 246 aa, Unknown
  Bacterial polypetide isolated from the Sargasso Sea
MIFDFQTILFFITLFLGLSWLIGKRILKKDSEFYEVCGAMFPILLIIFLFRSFAYEPFRIPSASMMPTLEKGDFILVNKFAYNIRMPLTGKTIFTNKEPKRGDVLVFDFPCDRDIKYIKRLVGLPGDEVVYRNKQLKINGESIISSYDSVFKDPKQYGSHVYNETIDGIDHRLLLTPSRRGREGTYTVPEGTYFVMGDNRDNSTDSRFECPGFVPSDHVVGSATRIWFNWDFSTFPKWDRIGDKIK

SEQ ID NO: 140649 - protein, 289 aa, Unknown
  Bacterial polypetide isolated from the Sargasso Sea
MASTFSLILVVVCAITGVIWCLDKMIWSKQRAAKIAVARAHGGAHLDEKTLAKVAPVPVWIEQTAGVFPVITLVLILRSFIFEPFQIPSGSMMPTLLVGDFILVEKFAYGLKDPVTNTKFLETGEPKRGDVVVFKYPLDTRVDYIKRVVGMPGDRVIYRNKELMIRPKCDEQEGKTCPGFQKLDVKFEQRGEFTQMGIPLDRYTEQLGEVSHETLRNPLMPDMVGRYYRQPGTYPDEWVVPEGQYFVMGDNRDNSTDSRFWGFVPEQNLVGKAVAIWISFEFEREEGSL

SEQ ID NO: 140650 - protein, 284 aa, Unknown
  Bacterial polypetide isolated from the Sargasso Sea
MSLNFPLLLVIAVAVCGLLALLDLVFFAPRRRAAIASYQGSVSQPDAVVVEKLNKEPLLVEYGKSFFPVLFIVLVLRSFLVEPFQIPSGSMKPTLDVGDFILVNKFSYGIRLPVIDKKVIPVGDPQRGDVMVFRYPSDPNVNYIKRVVGLPGDVVRYTSDKRLFINGESVAEKLLGAEPNTLGSAELYQEKLGAVEHQIRKEMSRYRAMPDGLWKVPAGHYFMMGDNRDNSNDSRYWDDPNIPKDLLGMVPDENIVGKAFAVWMSWPEPKLSHLPNFSRVGLIK

SEQ ID NO: 140651 - protein, 307 aa, Unknown
  Bacterial polypetide isolated from the Sargasso Sea
MAGYFAIFLVVLTLASGLIWLIDVLVFAPKRKVKVATAQAAAAGGLPLNVVEELGKPSYLAETAKEIFPLILAITIIRSFLYEPFQIPSGSMMPTLLVGDFILVEKFSYDVKDPVWRKPLITTGRPERGDVIVFKYPEQPTVDFIKRTVGLPGDRIVYKNKQLFIQPACTAADKSTCPGLEAVPLTLQAEGEFMDGELPTKRYSEQFGEHKHDILQHPFKSENLMQYYKQPGTAIEEFIVPEGHYFALGDNRDNSRDSRFWGFVPEENLVGKAVFIWMSFEFSDDPDNWLPSWVPVGVRFERLGKIK

SEQ ID NO: 140652 - protein, 245 aa, Unknown
  Bacterial polypetide isolated from the Sargasso Sea
MSLNFPLLLVIAVFICGLLGLIDLLFLAPRRRAAIANYQGSVSQPEMAVVERLNKEPLLVEYGKSFFPVLFIVLVLRSFLVEPFQIPSGSMKPTLEVGDFILVNKFSYGIRLPVIDKKVIAVGDPQRGDVMVFRYPSDPNVNYIKRVVGLPGDVVRYTNDKRLFVNGQPVAEQLVGSEPGTLGSAQLYKEKLGETEHLIRKEMSRYRMPPDQQWTVPAGHYFMMGDNRDNSNDSRFWDDPNIPKE

SEQ ID NO: 140653 - protein, 305 aa, Unknown
  Bacterial polypetide isolated from the Sargasso Sea
MAAYFSIILVLVTLISGLIWLVDVLVFAPKRRESLALAKASQANLTEEAEYNIIREPTVVETAHSIFPVIAFVLILRSFIYEPFQIPSGSMMPTLLVGDFILVEKFSYGLKDPVWRTKLIETGEPKRGDVIVFKYPENPQVDYIKRVVGLPGDRIIYRNKQLMIQKACGAEQTNCPEPELVARTEISRGDYSQDGVPLLRYKEQLGEVAHDILINPSRPDMLGYFKRDGNLPAGEFLVPEGHYFAMGDNRDNSTDSRFWGFVPEENLVGKAVAIWISFEFDRSKADFLPTWVPSGVRFERVGGIH

SEQ ID NO: 140654 - protein, 238 aa, Unknown
  Bacterial polypetide isolated from the Sargasso Sea
MFFITLFLGLSWLIGKRILKKDSEFYEVCGAMFPILLLIFLFRSFAYEPFRIPSASMMPTLERGDFILVNKFAFNIRMPLTGKTIFTNKEPKRGDVLVFDFPCDRDIKYIKRLIGLPGDEITYRNKQLTINGESIISSYDSVFKDPKQYGSHVYNESINGIDHQLLLTPSRRGREGIYTVPEGSYFVMGDNRDNSTDSRFDCPGFVPTDHIVGSATRIWFNWDFSTMPKWSRIGDKIK

SEQ ID NO: 140655 - protein, 61 aa, Unknown
  Bacterial polypetide isolated from the Sargasso Sea
TDIEIHANEVLSLKKRLNEIYSKHTGKSVDEVKSALERDNFMTADVAKSFGLIDEVVEKRS

SEQ ID NO: 140656 - protein, 122 aa, Unknown
  Bacterial polypetide isolated from the Sargasso Sea
MFSFFKKKKIIPHIRLSGVIGSAGRFKQGIDFSGQQEIIKKAFSFKKSENIAISINSPGGSPVQSHLIHDYIRQLAKKNKKKVIVFAEDVAASGGYLIACAGDEIYANSSSIVGSIGVISAS

SEQ ID NO: 140657 - protein, 253 aa, Unknown
  Bacterial polypetide isolated from the Sargasso Sea
GIIGSAGKFKQGMELANQRDTLKKAFSVKKITHVAISINSPGGSPVQSHLIYSYIRQLAEKNKVKVIIFAEDVAASGGYFIACAGDEIYANSSSIIGSIGVISASFGFKDLIQKIGVERRVYTAGKNKSTLDPFKEEKEEDIKRLKTIQLELHEDFIKIVKKSRGSKLKDPEKNNIFTGEFWTGKTSLRLGLIDGIGNADQILKEKFGDKVIIKSFEKPKGFIARKLSSSFVDPIEKLVNIIDEKSIWQRFGL

SEQ ID NO: 140658 - protein, 273 aa, Unknown
  Bacterial polypetide isolated from the Sargasso Sea
MKFISKFFKSDKPIINIIRMNGVIASGSKFPGSSNLSLESLEKQIERAFAGKKIAGVALIINSPGGSPVQSALISERIVELSSKNNIPVFAFVEDVAASGGYWLACSADEIFVMPASIVGSIGVISAGFGFVDVIKKIGVERRVFSKGENKGMLDPFQPQNPDDVKVITDLQEEIHNQFKDWVSKRRGNRLNKETIKKEGIFEAKIFSGVKACEIGLADSIGELKQVLRERIDEKVVFKEISGRKKLGQRLGLSSSRYYKVIDYIEEKIAFSR

SEQ ID NO: 140659 - protein, 185 aa, Unknown
  Bacterial polypetide isolated from the Sargasso Sea
MFSFFKKKKIISHIRLSGVIGNVGKFRQGIEYAGQEETIKKAFSVKKALAVAITINSPGGSPVQSHLIYKFIREQAKKNKKKVIIFAEDVAASGGYLIACAGDEIYANSSSIIGSIGVISASFGFKNLIEKIGVQRRVYTAGKNKSTLDPFLDEKEEDIKRLKSIQLELHQDFIDVVEESRGEKL

SEQ ID NO: 140660 - protein, 128 aa, Unknown
  Bacterial polypetide isolated from the Sargasso Sea
MFSIFKKKKIIPHIKLSGVIGNVGKFKQGIDFAGQEEIIKKAFSIKKAPAVAISINSPGGSPVQSHLIHDFIRSQAKKNKKKVIIFAEDVAASGGYLIACAGDEIYANQSSIVGSIGVIYSSFGFKDL

SEQ ID NO: 140661 - protein, 190 aa, Unknown
  Bacterial polypetide isolated from the Sargasso Sea
MVKLSGVIGSVGKFKQGIDFSGQEEIITKAFSLKKSPAVAISINSPGGSPVQSHLIHDHIRQLAKKNNKKVIVFAEDVAASGGYLISCAGDEIYANKSSIIGSIGVIYSSFGFKDLIGKIGVERRVYTAGKNKSTLDPFLDEKEEDIKRLKNIQLDLHKDFIDVVENSRASKLNKDKGIELFSGEFWSGR

SEQ ID NO: 140662 - protein, 100 aa, Unknown
  Bacterial polypetide isolated from the Sargasso Sea
MFSFFKKKKIVAHLKLSGVIGNAGKFKQGIDFAGQEELIKKAFSLKKAACVAISINSPGGSPVQSHLIYSFIRQQAKKHKKRVIVFAEDVAASGGYLISC

SEQ ID NO: 140663 - protein, 297 aa, Unknown
  Bacterial polypetide isolated from the Sargasso Sea
MNFKKLGSTDVDVSTICLGTMTWGEQNSKADGFEQMDYAIDNGVNFWDTAEIYAIPMREETYGETENIIGEWFKKSKKRDKVILATKVSGPTSKEYIRGGGCSYDKKSMSEALEKSLKRMQTDYIDLYQLHWPERNTNFFGKQGYEHDSNEKNWIAFEEILENLKKFVDAGKIRYVGLSNETAWGLAKCLELSKLKNLPKMMAVQNPYNLLNRTYEVGLAEISVREQSGLLAYSPLAFGYLTGKYRNNNIPKGSRIDLFKDFTRYNNENSIKAIEEYYKISQKFNLDFAQMSIKFCE

SEQ ID NO: 140664 - protein, 167 aa, Unknown
  Bacterial polypetide isolated from the Sargasso Sea
MFSFFKKKKIVSHLRLTGVIGNVGKFKQGIEYSSQEEMIKKAFSVKKAEAVAISINSPGGSPVQSHLIYKFIREQSTKNKKKVIVFAEDVAASGGYLIACAGDEIYANASSIIGSIGVIYSSFGFKDLIQKIGVQRRVYTAGKNKSTLDPFLDEKEEDIQRLKNIQL

SEQ ID NO: 140665 - protein, 362 aa, Unknown
  Bacterial polypetide isolated from the Sargasso Sea
DESLAAVYVNVSELGMYISSAFELANAVKNVRDSGKNVIAYAENFGNNAYLISSQANTIMINEYGGVNAVGFSRKREFYKDLYEKINLNYNVFVAGDFKSGPEPYTRNSMSEEDKLAWSEFADPLWNKMKEMMEAGRDLQQGTIQEYGDTLWERSLNNPEPAKIALELGMVDMVVTREELRHWMYEKFPNDENDKNELPDSVSIYEYLSIFEEDINDSENKIAVVNVEGAITTGEVQYGIAGSDTIVKNIRNAIKDDSVKALVLRVNSPGGSVWASELITNALDEFKSTGRPIVTSMGDIAASGGVWVTTYSDEIWAKEETLTGSIGVYGIVPTLDGIYDWAGIQVDGISSTKAGEWDERLA

SEQ ID NO: 140666 - protein, 240 aa, Unknown
  Bacterial polypetide isolated from the Sargasso Sea
MSKELDKYFKVYDVLKKRNRWRLIAILLLLTSAVFGFKTTFSNQFTDYVAIVDLTGIIRDDHKLIAVLNKIEHNKMARALILRINSPGGTMVGAEGLYHSIREISDKKPVVAVMGEVATSAGYMVALAADRIVARKTTITGSVGVLMQSADITNLLEKLGIKPQIVKSSELKAQPSPFEPFSSAAREISEIVVAYVHKYFLDLVSERRKLSITDARRLSDGRIFTGGQAIEKGLVDELGG

SEQ ID NO: 140667 - protein, 249 aa, Unknown
  Bacterial polypetide isolated from the Sargasso Sea
GKALVLRVNSPGGSVWASELITNALNEFKSTGRPIVTSMGDIAASGGVWVTTYSDEIWAKEETLTGSIGVYGIVPTLDGIYDWAGIQVDGISSTKAGEWDERLAMPNYVTESIQAGIDHTYDKFVSKVAENRNMAYKEVLSIAGGRIWSGKKALQLGLVDKIGDLEDAIDSAAQFADIDDYEIVSYVKEMDPFELFLNELLENLDSKVEINADLQALGEFLDARYKFIDPNKKINTAVYCFECEYFNSQ

SEQ ID NO: 140668 - protein, 181 aa, Unknown
  Bacterial polypetide isolated from the Sargasso Sea
MFSFFKKKKIIPHIKFSGVIGNVGKFKQGINFSGQEEIIKKAFSIKKSPAVAISINSPGGSPVQSHLIHDFIKNQAKKNKKKVIIFMEDVAASGGYLIACAGDEIYANKSSIVGSIGVIYSSFGFKDLIQKIGVQRRVYTAGKNKSTLDPFLDEREEDIQRLKKIQLDLHKDFIEVVENSR

SEQ ID NO: 140669 - protein, 224 aa, Unknown
  Bacterial polypetide isolated from the Sargasso Sea
KKPSVVVIKINSPGGSPVQSELIHNRIRNLSKKNNVKVITIAEDVAASGGYMLMCAGDTLIANKSSIVGSIGVISASFGFKKLIDKLGIKRRVFTKGDRKSFLDPFEEVSKKDIDKLIKVQDSIFENFKDLVSKNRKKRIDPKKVFNGEFWTGEQAKKLGLVDSNEELNSYIEKHYGKKLKIRNIEEKKSFIKNILNNQISNNDIIDRLKKALRENSFWSRYGL

SEQ ID NO: 140670 - protein, 183 aa, Unknown
  Bacterial polypetide isolated from the Sargasso Sea
MIGLYGEVDEERAAETTFSLMALRDLGQKQELQDPDDPESELETTYDPFDFIVSTWGGSAADMFSIYDTMRMVRDDCEISTLGLGKVMSAGVLLLAAGTKGKRRIGKNCRVMLHGVSAGQHGNISDLENEMAEAKWTQERLIACLSEETKMTKRHIKKLLAKRMNVYLTAEEALELGIADEIV

SEQ ID NO: 140671 - protein, 276 aa, Unknown
  Bacterial polypetide isolated from the Sargasso Sea
MGIFVNTFLKTFGNLLALGAFFIIIALFINFFKNNENFNDFKFTEGNKESNNIITILEVNGPIVNDSILPSNLFNFEIISPDKIKNYIDQINELETNILIVSINSPGGTVSASHEIYQLIKKLKSERKLKIYFHTTETLASGAYWFSLAADKIFANYGALIGSIGVKGPDWIYFDNPVSMSTGILGSSIETKNGIQIFSNTAGKSKDILNPFRKPTNDEKNQLKLTIDQIYEDFVVSVSKQRKIEINKIKNDIGAFIYNANEAKENYLIDGISNLE

SEQ ID NO: 140672 - protein, 258 aa, Unknown
  Bacterial polypetide isolated from the Sargasso Sea
FTGLSGIISSQSGLTGSGLAINNLEKLIDKLFADKKSPVVTLIINSPGGSPTQSSLIAKRIIDLAKEKNKKVLAFVEDVAASGGYWLACAADEIYIDQNSVIGSIGVISPGFGFVDLLKKVGIERRVYTSGKSKSFLDPFKEEKQEDIDRLKNIQEQIHDNFINYVKERRGSKLDQNKLDNIFSGLFWVGNKAIDLGLADGIGALKPILEEKFGKKIKIKMISQKKSFLQRRFSSSIFNSDEILNKIEERIMFSRFGL

SEQ ID NO: 140673 - protein, 233 aa, Unknown
  Bacterial polypetide isolated from the Sargasso Sea
DIIKKAFSVKKALAVAITINSPGGSPVQSHLIYKFIREQAKKNKKKVIIFTEDVAASGGYLIACSGDEIYANPSSIIGSIGVISASFGFKNLIEKIGVQRRVYTAGKNKSTLDPFLDEKEEDINRLKNIQLELHQDFIDVVEESRGSKLNKNSGIELFSGEFWTGKKAKELGLIDGLGNADQILREKFGDEVEIKKFGKPKGWLAKKLSSSQDHADKLISILEERSIWQRYGL

SEQ ID NO: 140674 - protein, 137 aa, Unknown
  Bacterial polypetide isolated from the Sargasso Sea
MISIVLFFFGENKQKYFSYLEGNKDSSEIIAILNLNGPIISEPPNFNNYNIFQNLEVIYPSLIKEYLKELEQINAKGLIISINSPGGGVSATQKIYNLIKDFKDKNNIPIFFHTKDILTSGSYWVALSGDKIFADYG

SEQ ID NO: 140675 - protein, 85 aa, Unknown
  Bacterial polypetide isolated from the Sargasso Sea
MFSIFKKKKIVPHIKLSGVIGNVGKFKQGIDFAGQEEIIKKAFSIKKAPAVAISINSPGGSPVQSHLIHDFIRSQAKKNKKKVIV

SEQ ID NO: 140676 - protein, 277 aa, Unknown
  Bacterial polypetide isolated from the Sargasso Sea
LVLTFIHMFSFFKKKVVVPHIRLAGVIGSAGRFRQGIDFSGQQEIIKKAFSFKKAKSIAISINSPGGSPVQSHLIHDYIRQLAKKNKKKVIVFAEDVAASGGYLIACAGDEIYANSSSIVGSIGVISASFGFQDAIKRIGVQRRVYTAGKNKSTLDPFKEEKPEDIERIKKLQLELHSDFINLVKKSRGSKLKDPDKNNTFTGEFWSGSTSLKLGLVDGIGNAEQILREKFGENIEIKKFEKQKGFLAKRLSSSLDNQVDTIVSAIEERALWQKFGL

SEQ ID NO: 140677 - protein, 230 aa, Unknown
  Bacterial polypetide isolated from the Sargasso Sea
FSVRSAKAVALIINSPGGSPVQSALIGQRIKDLAGKADVPVLAFCEDVAASGGYWIAASADEIYANGASVIGSIGVVSAGFGFDRAIEKIGVDRRVHTAGRNKMILDPFQPQRDEDVERLKELQADIHQQFINHVLDRRGARLQKPHDDLFSGAFWTGQRAADLGLIDGLGECRQVLRDRFGEDISFMLIGPKRKFLAGLGGLPGSLAGGIVDEAAEIATEKAMLSRFGL

SEQ ID NO: 140678 - protein, 147 aa, Unknown
  Bacterial polypetide isolated from the Sargasso Sea
MFSFFKKKKIISHIRLSGVIGNVGKFRQGIEYVGQEETIKKAFSVKKALAVAITINSPGGSPVQSHLIYKFIREQAKKNKKKVIIFTEDVAASGGYLIACAGDEIYANSSSIIGSIGVISASFGFKNLIEKNGVQRRVYTAGKNKST

SEQ ID NO: 140679 - protein, 142 aa, Unknown
  Bacterial polypetide isolated from the Sargasso Sea
MFSFLKKKVVVPHIRLAGVIGSAGRFRQGIDFSGQQEIIKKAFSFKKAKSIAISINSPGGSPVQSHLIHDYIKQLAKKNNKKVIVFAEDVAASGGYLIACAGDEIYANSSSIVGSIGVISASFGFQDAIKRIGVQRRVYTAG

SEQ ID NO: 140680 - protein, 296 aa, Unknown
  Bacterial polypetide isolated from the Sargasso Sea
ALFSLEEQRKARRWGIFFKSLTFIYLFFVVMVFVPFRSPSLQSDSSEHVALVALDGVIAADADANANSVVTGLRAAFEAKNSVGVILAINSPGGSPVQSGYINDEIFRLRELHPEKKIYSVIADVGASGGYYIASAADEIYADKASLVGSIGVVSGGFGFTSAMEKIGIDRRIYTAGESKGFLDPFSPEKEGDKVFWQGVLNVTHQQFIDVVQKGRGSRLVDDPEIFSGLIWSGEQAVTKGLIDGLGSVGYVAREVIGTEEIRSYTVQPHPFDEFARRLGVATKNTLRVLSSPLSY

SEQ ID NO: 140681 - protein, 68 aa, Unknown
  Bacterial polypetide isolated from the Sargasso Sea
MLKSFFSKSINIPTLRLSGVIGQAGFMRSGLNISALDKLIEKLFADKKSPAVCLIINSPGGSPTPSSL

SEQ ID NO: 140682 - protein, 289 aa, Unknown
  Bacterial polypetide isolated from the Sargasso Sea
MLANLRRRSHCENIIYTDWRRDNFLKAIVSIIGRDNPPKNIGIENDHVTLDMKEKIGSIFTFSVFKDVSKELMKLRMIKSNEEIEVIKNGARIADIGGQEIVKNIKEGATEIEIAIAGRDKMEREIAKTYPNAEYMDTWVWFQSGINTDGAHNPKTNRKLINGDILSLNTFPMISGYYTALERTLFLNKIDDASLKAWEANVKVHKRGLELIKPGVKCSDICNELNELFAELGYLQYRTFGYGHSFGVLSHFYGREAGLELREDIDTVLKENMVVSMEPMILIPEGKAG

SEQ ID NO: 140683 - protein, 184 aa, Unknown
  Bacterial polypetide isolated from the Sargasso Sea
MFTPNKTIISIDLKGMIASGSRAPLNMDNLNGLFSKVMKMKFDALSIVINSPGGSPVQSSLIAQKIREISDKKKVKCYCFVEDVAASGGYWLACAADELYADVNSIVGSIGVISGGFGFTDLIKKIGVERRIFTAGENKSFLDPFLKINKKDEEKLKKLQKLIHQNFIDWVSSRRKKKLSEKNK

SEQ ID NO: 140684 - protein, 192 aa, Unknown
  Bacterial polypetide isolated from the Sargasso Sea
MNEENAANPSSANNFLDEKLFKSRSISIFGQINEKVARSTAEKLLALSAESDEPITIFISSPGGHVESGDVIYDIIKFVKPEVKVVGTGWVASAATNIFLAAKKENRFSLPNTRYLVHQPSGGSRGDATDIAIQAEEILKTKARINKIISEETGRSLEQVEKDTDRDYWMSVKEAIEYGIVSKEITSIGDIG

SEQ ID NO: 140685 - protein, 73 aa, Unknown
  Bacterial polypetide isolated from the Sargasso Sea
MFKRFFSKNIQIPTLRLSGIISAQSGITGSGLAINNLDKLIEKLFSDKKAPAVAIIINSPGGSPTQSSLIAKK

SEQ ID NO: 140686 - protein, 269 aa, Unknown
  Bacterial polypetide isolated from the Sargasso Sea
MFSFLKKKKVISHLKLSGVIGNAGKFRQGIDYSSQEEIIKKAFSLKKALVVAITINSPGGSPVQSHLIYKLIKEQSKKTKKKVIVFAEDVAASGGYLIACAGDEIYANSSSIIGSIGVISASFGFKNLIEKIGVQRRVYTAGKNKSTLDPFLDEKEEDINRLKNIQLEIHQDFIDVVEESRKEKLNKNSGIELFSGEFWAGKKAKELGLIDGLGNAEQILREKYGDQIEIKKFEKSKGWLSKKLSSSENYTDKVISLLEERSIWQRYGL

SEQ ID NO: 140687 - protein, 261 aa, Unknown
  Bacterial polypetide isolated from the Sargasso Sea
MKKIFNFILKLFGKGKPIVPVLRFEGIIGTGGGIGKGKINAENLEPNIKKAFSESNPSAVAIIINSPGGSPVQSSLIYQRVRYLADKKDVPVMVFIEDVAASGGYWLSCIGDEIFADKSSIVGSIGVISASFGFTEAINKLGVERRVYTTGKSKGSLDPFKPEKKEDVQMLKNIMNDTQKAFVDLVSKRRGNKLSDDNTIFTGAFWSGEEAKKLGLIDEIGEIRTVLRERFGPKVKLKFITKKKGFLSGILQKCISSSHKQ

SEQ ID NO: 140688 - protein, 268 aa, Unknown
  Bacterial polypetide isolated from the Sargasso Sea
MLSFFKKKKIIPHIKLSGVIGNVGKFKQGIDFAGQEEIIKKAFSIKKSPAVAISINSPGGSPVQSHLIHDFIRLQAKKNKKKVIIFAEDVAASGGYLIACAGDEIYANQSSIIGSIGVIYSSFGFKDLINKIGVQRRVYTAGKNKSTLDPFMDEKKEDIERLKAIQLDLHKDFIEVVDNSRSTKLKKDSGIELFSGEFWSGRKAKELGLIDGIGNADQILREKFGDKIIIKKFEKSKGWLARKLSSENHTEQLINVLEERSIWQRYGF

SEQ ID NO: 140689 - protein, 155 aa, Unknown
  Bacterial polypetide isolated from the Sargasso Sea
MFSIFKIFKKKKIIPHIRLSGIIGSVGRFRQGINFASQQEIIDKAFSVKKALAIAISINSPGGSPVQSHLLYSYIKKLAKKNNKKVLVFTEDVAASGGYLIACAGDEIYANSSSIVGSIGVISASFGFQDAIKKIGVERRVYTAGKNKSTLDPFK

SEQ ID NO: 140690 - protein, 200 aa, Unknown
  Bacterial polypetide isolated from the Sargasso Sea
MADQPNSPDSSSRPDSREPNWERAALERIALAAVKEQRAARRWKIFFRFAFLAVFVLFAFALIDFSSDSKFSSSGRHTALVTIDGEIAAGVNANADDINTALDAAFEDDGTAGVVLRINSPGGSPVQAGMVYDEIRRLRAKHPDKPLYVVVTDMCASGGYYIASAADKIFVDKASIVGSIGVLMDGLQIGKPGTHERALA

SEQ ID NO: 140691 - protein, 312 aa, Unknown
  Bacterial polypetide isolated from the Sargasso Sea
ERYVKDLYENIKLNQHVFIAGEWKTAPEPFTRNDMSEEDKNAWNDFAEPLWNKMTSYIENARELPYGTLQNYGDSFWELAADEPEVSQIALKIGLVDKVFTEEEFRHWLFDKFPNEDNDINKLPDSISIYDYLSTIESEETKSKNKIAVIHIEGAITTGDSTYGIAGSDTIVKNIRKAIKDDAVKALVLRINSPGGGVYPSELITNALNEFKETDRPIVSSMGDIAASGGVWVTTLSDEIWAKNETLTGSIGVYATLPTFENLYDWVGVQVDGVSSTKAEEWDPRLSMPDNVTNGIQATVDNIYDKFCNKVF

SEQ ID NO: 140692 - protein, 241 aa, Unknown
  Bacterial polypetide isolated from the Sargasso Sea
MSGIIGNVGKFRQGIEYSGQEEIIKKAFSVKKALAVAITINSPGGSPVQSHLIYRFIREQAKKNKKKVIFFAEDVAASGGYLIACAGDEIYANSSSIIGSIGVISASFGFKNLIEKIGVQRRIYTAGKNKSTLDPFLDENEEDINRLKNIQLELHQDFIDVVEESRGSKLKKDSGIELFSGEFWTGKKSKDLGLIDGLGNAEQILREKFGEDIEIKKFGKSKGWLAKKNSSSEDHADKLIS

SEQ ID NO: 140693 - protein, 95 aa, Unknown
  Bacterial polypetide isolated from the Sargasso Sea
MLLSLVFKRFFSKDINIPTLRLSGVIGQAGIARSGLTITGIEKLIDKLFADKKSPAVALIINSPGGSPTQSSLIAKKIINLAKEKNKKVYAFVED

SEQ ID NO: 140694 - protein, 96 aa, Unknown
  Bacterial polypetide isolated from the Sargasso Sea
MFSFLKKKKIVSHIKLNGVIGNAGKFKQGIDFAGQEEIIKKAFSLKKAAAVAISINSPGGSPVQSHLIYGFIRQQAKKSNKKVIFLQKMLLHLGDI

SEQ ID NO: 140695 - protein, 60 aa, Unknown
  Bacterial polypetide isolated from the Sargasso Sea
MRGRQSPRGCPAQRHYPQPPRQSPVPISTVPSPCALNKLSASLPAINSPGGRLVATAGSA

SEQ ID NO: 140696 - protein, 258 aa, Unknown
  Bacterial polypetide isolated from the Sargasso Sea
KKKKIIPHIILNGVIGNVGKFRQGIDLSSQEEIIKKAFSIKKSPAVAISINSPGGSPVQSHLIHDFIKSQARKNKKKVIIFAEDVAASGGYLIACAGDEIYANQSSIIGSIGVIYSSFGFKDLIQKIGVQRRVYTAGKNKSTLDPFLEEKEEDINRLKNIQLDLHKDFIEVVEKSRSSKLKKDTGIELFTGEFWSGRKAKELGLIDDIGNPEEILKEKFGDKIVIKRFEKTKGWLAKKLSNEIYTNQIINALEERSIC

SEQ ID NO: 140697 - protein, 175 aa, Unknown
  Bacterial polypetide isolated from the Sargasso Sea
MSVYSSEKENDSKSDHRPMAFIDEKLFKSRCLTIFGEINDKLARTITERLLALASDSDDPISLYISSPGGHVESGDVIYDIIKFIKPPVRVIGTGWVASAATTIYLAAEKDKRFALPNTRFLIHQPLGGSRGDATDIAIQAEQMVRTKARINQLIAKETGQPLDRVAKDTDRDYG

SEQ ID NO: 140698 - protein, 237 aa, Unknown
  Bacterial polypetide isolated from the Sargasso Sea
GIDFAGQEELIKKAFSLKKAACVAISINSPGGSPVQSHLIYSFIRQQAKKHKKKVIVFAEDVAASGGYLISCAGDEIYANSSSIIGSIGVIYSSFGFTELIKKIGVERRVHTAGKNKSTLDPFLEEKNEDIERLKNIQLDLHKDFIDVVEKSRGSKLNKSDVELFSGEFWSGSKAKNLGLIDGIGDAHEILKDKFGEDVIIKKFEKSKGWLSQKLSSSSNQVDQIASILDERSIWQR

SEQ ID NO: 140699 - protein, 260 aa, Unknown
  Bacterial polypetide isolated from the Sargasso Sea
MFSFFKKKKVVPHVRLTGIIGSSGRFKQGMELANQREILKKAFSVKKISHVAISINSPGGSPVQSHLIYSYIRQLAEKNKIKVIVFAEDVAASGGYFIACAGDEIYANSSSIIGSIGVISASFGFKELIQKIGVERRVYTAGKNKSTLDPFKEEKEEDIKRLKNIQLELHEDFIKVVEKSRGSKLKDPEKNNIFTGEFWTGKASLKLGLIDGLGNADQILKEKFGDKVIIKTFEKPKGFLARKLSSSTQDPIEKLANIFE

SEQ ID NO: 140700 - protein, 268 aa, Unknown
  Bacterial polypetide isolated from the Sargasso Sea
MISFFKKKKIIPLIRLSGVIGSVGKFKQGIDFTGQEEIIKKAFAQKKSPAVAISINSPGGSPVQSHLIHDFIRYQAKKTKKKVIVFAEDVAASGGYLIACAGDEIYANQSSIVGSIGVIYSSFGFKELINKIGVQRRVYTAGKNKSTLDPFLDEKKEDIERLKNIQLDLHKDFIDVVEKSRSSKLKKNSDIELFTGEFWSGRKSLELGLIDGIGSANEILREQYGEDVVIKKFEKSKSWLARKLSSETQLEKIVNLVEEKNIWQKYGF

SEQ ID NO: 140701 - protein, 218 aa, Unknown
  Bacterial polypetide isolated from the Sargasso Sea
VAISINSPGGSPVQSHLIYDFIRSQAKKTKKKVIIFAEDVAASGGYLIACAGDEIYANKSSIVGSIGVIYSSFGFKDLIQKIGVQRRVYTAGKNKSTLDPFMEEKQDDIERLKSIQLDLHKDFIDVVEESRSTKLKKNIGIELFSGEFWSGRKAKDLGLIDGIGNADQILKEKFGEDVNIKKFEKAKGWLAKKLSSETQIDKTISILEERSIWQRYGF

SEQ ID NO: 140702 - protein, 272 aa, Unknown
  Bacterial polypetide isolated from the Sargasso Sea
MFFWRKKKSVVPVVRLSGVISSAPSLRRGLSLESIEPQLKKAFSVSSAKAVALIINSPGGSPVQSALIGQRILDLAGKADVPVLAFCEDVAASGGYWIAVSADKIYANGASVIGSIGVVSAGFGFDRAIEKIGVDRRIYTAGRNKMILDPFQPQRDEEVERLKALQVDIHQQFIDHVLDRRGARLQEPHDDLFSGAFWTGQRAVNLGLIDGLGECRQVLRDRFGEDINFMFIEPKRKFLAGLGGLPGSLAGGIVDEAAEIATEKAMLSRFGL

SEQ ID NO: 140703 - protein, 191 aa, Unknown
  Bacterial polypetide isolated from the Sargasso Sea
MFSFFKKKKIIPHVKLSGVIGNVGKFKQGIDFAGQEEILKKAFSIKKALAVAISINSPGGSPVQSHLIHDFIRYQAKKNKKKVIIFAEDVAASGGYLIACAGDEIYANQSSIVGSIGVIYSSFGFKNLIEKIGVQRRVYTAGKNKSTLDPFMDEKQEDIERLKNIQLDLHKDFIDVVEKSRGSKLNKNSGI

SEQ ID NO: 140704 - protein, 185 aa, Unknown
  Bacterial polypetide isolated from the Sargasso Sea
MTIRQLPVAPAGRPCAGVTSEPQPSALERWNGGIRAASDNDNSISIFDVVGRDYWDEGVTAKRISGALRSMNGADVTVNINSPGGDMFEGLAIYNLLREYHGKVTVKVLGIAASAASIIAMAGDDIQIGRGAFLMIHNCWVAAMGNRHDFAELSTYLEPFDTAMADIYAARSGLDMDTVQKLMDA

SEQ ID NO: 140705 - protein, 38 aa, Unknown
  Bacterial polypetide isolated from the Sargasso Sea
HTGKSVDEIKSALERDNFMTPDNAKSFGLIDKVVEKRE

SEQ ID NO: 140706 - protein, 83 aa, Unknown
  Bacterial polypetide isolated from the Sargasso Sea
MKLKIPFLPSKPSVAVVKMSGVISAGARAGLCDQTLNPILEKAFKKGQHQAVALLINSPGGSPVQSSLISSRIKRLAEENEMP

SEQ ID NO: 140707 - protein, 181 aa, Unknown
  Bacterial polypetide isolated from the Sargasso Sea
MFSFFKKKKIIPHIKLSGVIGNVGKFKQGIDFAGQEEIIKKAFSIKKAPVIAITINSPGGSPVQSHLIHDLIRSQAKRNKKKVIVFAEDVAASGGYLIACAGDEIYANQSSIIGSIGVIYSSFGFKDLIQKIGVQRRVYTAGKNKSTLDPFLEEKQEDIERLKNIQLDLHKDFIEVVKKVD

SEQ ID NO: 140708 - protein, 129 aa, Unknown
  Bacterial polypetide isolated from the Sargasso Sea
MFSFFKKKIIIPHVRLSGVIGSAGRFRQGIDFSGQQEIIKKAFSFKKSKHIAISINSPGGSPVQSHLIHDYIRQLAVKNKKKVIVFAEDVAASGGYLIACAGDEIYANSSSIVGSIGVISASFGFQGGN

SEQ ID NO: 140709 - protein, 141 aa, Unknown
  Bacterial polypetide isolated from the Sargasso Sea
MFSFFKKKKIVSHLRLTGVIGNVGKFKQGIEYSSQEEMIKKAFSVKKAEAVAISINSPGGSPVQSHLIYKLIREQSKKNKKKVIVFAEDVAASGGYLIACAGDEIYANASSIIGSIGVIYSSFGFKDLIQKIGVQRRVYTA

SEQ ID NO: 140710 - protein, 198 aa, Unknown
  Bacterial polypetide isolated from the Sargasso Sea
MSLISSKTRINIVGLRGVIGDLGRFQKGLTLENCAAILEKAFSFKRPSVVVIKINSPGGSPVQSELIHNRIRNLSKKNNVKVITIAEDVAASGGYMLMCAGDTLIANKSSIVGSIGVISASFGFKKLIDKLGIKRRVFTKGDRKSFLDPFEEVSKNDIDKLIKVQDSIFENFKDLVLKNRKKKIDQKKVFKWGVLDRR

SEQ ID NO: 140711 - protein, 65 aa, Unknown
  Bacterial polypetide isolated from the Sargasso Sea
MFKKIFSRNVQIPTLRLSGVIASQSGIMSSSLSINNLDKLIEKLFSDKKSPAVALIINSPGGSPT

SEQ ID NO: 140712 - protein, 113 aa, Unknown
  Bacterial polypetide isolated from the Sargasso Sea
SCPITTIVTGFAASMGSILSLAAEKGRRYAMPQAKIMIHQPLLMGYQGRATECEIQAREILKTRDHLVKLYSEQTGKSHEEIKKALDRDNWFTAEEALEYGLIDKVVHTRSEL

SEQ ID NO: 140713 - protein, 147 aa, Unknown
  Bacterial polypetide isolated from the Sargasso Sea
MFSFFKKKTTIPHVRLSGVIGSVGRFRQGIDFSGQQEIIKKAFSFKKAKCIAISINSPGGSPVQSHLIHDYIKQLAKKNKKKVIVFAEDVAASGGYLIACAGDEIYANSSSIVGSIGVISASFGFQDAIKKIGIQRRVYTAGKNKST

SEQ ID NO: 140714 - protein, 236 aa, Unknown
  Bacterial polypetide isolated from the Sargasso Sea
GLGGSSLNYGFPAHSDEQYFDAVIPKLRQARVSALLLPGIGTVDHLKMAHGCGVSTIRVATHCTEADVSEQHIGMAASMGLDTVGFLMMAHMLSAEKLLEQARLMQGYGANCIYCTDSAGYMLPDEVTEKISVLRAGLDADVEIGFHGHHNMGMAIANSLAAIEAGAGRIDGSVAGLGAGAGNTPLEVFVAVLERMGVNSGIDLYRIMDVAEDLVVPMMDQPIRVDRDALTLGYAG

SEQ ID NO: 140715 - protein, 252 aa, Unknown
  Bacterial polypetide isolated from the Sargasso Sea
MFSIFKKKTVIPHVRLTGVIGSAGRFRQGIDFSGQQEIIKKAFSFKKSKSVAISINSPGGSPVQSHLIHDYIRQLAKKNKKQVIVFAEDVAASGGYLIACAGDEIYANSSSIVGSIGVISASFGFQDAIKKIGIQRRVYTAGKNKSTLDPFKEEKEEDIERIKKLQLELHADFINLVKRSRGSKLKDPEKNNTFTGEFWSGSTSLKLGLIDGIGNAEQVLREKFGENAIIKKLEKPKGFIARKLSSSIDNQM

SEQ ID NO: 140716 - protein, 266 aa, Unknown
  Bacterial polypetide isolated from the Sargasso Sea
MNNQPSSQPPQNEREWKLIEKLLGQAQDEQRKSRRWGIFFKVLTFVYLFTLLVIVIPGKTGSAVTMAEAHVGIVDVNGVIAPDQEASADLIVTGLTRAFEAENTTAVLLKINSPGGSPVQSNQVYNAIKRLRAEYPEKKLYAAITDVGASGAYFIASAADEIYADPASIVGSIGVIMAGFGLEQAADKLGVERRVFTAGENKDLMDPFSPVKPAHRKHVQTMLDDIHQQFIAAVKKGRGNRLKVDGHPKLFSGLFWTGERAMDLGL

SEQ ID NO: 140717 - protein, 122 aa, Unknown
  Bacterial polypetide isolated from the Sargasso Sea
MFSFFKKKIIVPHIRLAGVIGSAGRFRQGIDFSGQQEIIKKAFSFKKAKSIAISINSPGGSPVQSHLIHDYIRQLAKKNNKKVIVFAEDVAASGGYLIACAGDEIYANSSSIVGSIGVISAS

SEQ ID NO: 140718 - protein, 255 aa, Unknown
  Bacterial polypetide isolated from the Sargasso Sea
MPTNVYFDTGTTNEQRLYEDLIVEQLKIYGQDVYYLPRKIANKDTIFGEDPASSFDDSYIIEMYVDNTDGYMGEQEIIKKFGLELRDDIVFTVSKARWETLVGNNSDLTTDRPQEGDLVYFPTTNAFFEIQFVEHEQPFYQQSALPVYKLSCTKFEYSSERLDTGISTIDSVEDSLSTDTMNFQFTLENEVGSFLLESDTGEISYLINEDFTMATQQPTDQGAAFETEAGTTTSSTGDDILDFSERNPFGEVDEY

SEQ ID NO: 140719 - protein, 232 aa, Unknown
  Bacterial polypetide isolated from the Sargasso Sea
MKKIFNFILKLFGKGKPIVPVLRFEGIIGTGSGIGKGKINAENLEPNIKKAFSESNPSAVAIIINSPGGSPVQSSLIYQRVRYLADKKDVPVMVFIEDVAASGGYWLSCIGDEIFADKSSIVGSIGVISASFGFTEAINKLGVERRVYTTGKSKGSLDPFKPEKKEDVQMLKNIMNDTQKAFVDLVSKRRGNKLSDDNTIFTGAFWSGEEAKKLGLIDEIGEIRSVLRERLG

SEQ ID NO: 140720 - protein, 135 aa, Unknown
  Bacterial polypetide isolated from the Sargasso Sea
MFSFFKKKIIIPHVRLSGVIGSVGRFRQGIDFSGQQEIIKKAFSFKKAKSVAISINSPGGSPVQSHLIHDYIRQLAKKNKKKVIIFAEDVAASGGYLIACAGDEIYANSSSIVGSIGVISASFGFQDAIKKIGIE

SEQ ID NO: 140721 - protein, 250 aa, Unknown
  Bacterial polypetide isolated from the Sargasso Sea
MKNLKSKEPLLSVKGIEKSYGHVRALQNVDIDIHAGEVLGLLGDNGAGKSTLIKILSGIVRPDKGKILRDGKEININSRKDSEEKAGVQTIYQDIALVKSMSILRNIFAGQERKTKFGFLKLKEMRDTTMQILNEHVKIAGITSPDLLIEELSGGQAQAVAIARAVHFQRDILLLDEPTSALSVRETNKVHSIMREIADAGNSCVFVTHNLYHAYQVCDRFVVFSHGAVVKSAIKENTSLNELTELILAN

SEQ ID NO: 140722 - protein, 308 aa, Unknown
  Bacterial polypetide isolated from the Sargasso Sea
VQQCGVAPTDDGFTVIAPGEEDADQDGPALASDPDLGFEGLQQFGPGLVQHAKLKLRTGLKATNFCLIDSPGMIDAPGGSTLDEGHERGYNFEASVRWFADRADVILLFFDPDKPGTTGETLSVLTNALSGCDHKLHIILNKADRFEKIHDFARAYGALCWNLSKVIPRKDLPQIYTTCIPPAEGEVREGHGDLANGLEDLRRTRDDVMAEVFRAPTRRVDNAVTRLRDAASVLLMHLDVCSAARSARRKELFALYAPSVLAAAACISGAGGLFVAGAVSPAVACGAGGLAATAGFHYVNAKNCRRNL

SEQ ID NO: 140723 - protein, 97 aa, Unknown
  Bacterial polypetide isolated from the Sargasso Sea
MFKKIFTKNIQIPTLRLSGIIASQAGIASSSLSINNLEKLIEKLFSDKKSPAVVIIINSPGGSPTQSSLIAKKIIDLAKEKKKQVIAFVEDVAASGG

SEQ ID NO: 140724 - protein, 130 aa, Unknown
  Bacterial polypetide isolated from the Sargasso Sea
EAFAICDTLRYVKPPVHTICIGQAMGTAAVILSAGTKGQRAALPHSSIVLHQPRSGAQGQATDIQIRAKEVLHNKAAMLEILSNNTGRTVDELSKDSDRMSYLTPQEAVEYGLIDRVLSSRKELPGSNSN

SEQ ID NO: 140725 - protein, 208 aa, Unknown
  Bacterial polypetide isolated from the Sargasso Sea
MGILFNVFLRTVGFFLAILLCVLIIIGISAYANYQEDIEFDLVRGNIESGNTIFILEINGPIIQSESSINDLVGMNIISPKAVKNNLDKIIKLNPNILIVSINSPGGTVSASNELYNHFKEFKKKSNSKIYFHSSEMLASGGYWSSLAGEKIYANYGAIIGSIGVKGPDWFFFNKPKLISSGILGHTIEVKDEIKVYSTNAGKSKEFI

SEQ ID NO: 140726 - protein, 222 aa, Unknown
  Bacterial polypetide isolated from the Sargasso Sea
MFSIFKKKKIVPHVRLTGVIGSAGRFNKGIDLAGQREILKKAFSLKKITHVAVSINSPGGSPVQSHLIYSYIRQLAEKSKVKVIIFAEDVAASGGYLISCAGDEIYANSSSIIGSIGVISASFGFKDLIKKIGIERRVYTAGKNKSTLDPFVDEKEEDVKRLKSIQLELHADFIKVVETSRGSKLKDPEKNNIFTGEFWTGKTALKIGLIDGIGNADQILKE

SEQ ID NO: 140727 - protein, 215 aa, Unknown
  Bacterial polypetide isolated from the Sargasso Sea
IINSPGGSPTQSSLIAEKIINLAKEKNKKVYAFVEDVAASGGYWLACAADEIYLDLNSIVGSIGVISPGFGFVDLIKKIGVERRVYTSGKSKSFLDPFKEEKKEDIDRLKSIQEQIHENFIEYVKSRRGSKLLSFAEDEIFSGLFWVGKKGVDLGLADGIGSINQIIREKYGNKAKIKLIDQKKSFLQKRLSSSINNNDIFNRLEEMIMWSRYGL

SEQ ID NO: 140728 - protein, 108 aa, Unknown
  Bacterial polypetide isolated from the Sargasso Sea
MYSIFKIFKKKRIVPHIRLSGIIGSVGRFKQGINFAGQQEIIDKAFSIKKALAIAISINSPGGSPVQSHLIYSYIRKLAQKNNKKVLVFAEDVAASGGYLIACAGDEI

SEQ ID NO: 140729 - protein, 133 aa, Unknown
  Bacterial polypetide isolated from the Sargasso Sea
NSPGGEIFSGFAIFDMLKFIECPITTVVTGFAASMGSVLSLAADEDRRFAMPQAKIMIHQPMLMGYQGRAADCEIQAKEILKTRDHLINLYSEQTGKDYEEIKQAIDRDNWFTSEEAMEFGLLDRIVKNRSEL

SEQ ID NO: 140730 - protein, 185 aa, Unknown
  Bacterial polypetide isolated from the Sargasso Sea
MGGAAGAPAETETSNSVILYGDIDEENAADLVTSLLRKRLHSKPEEPAMDMHFYLSSWGGSAADMFSIYDTMNLLKQNRDIYTYGLGKIMSAAVPILAAGTKGKRMIGKNCRVMIHGVIAGHHGPLFNLQNEMEEVKWTQEKYIDVLVRDTDMTRRYIKKLIDRKVNVYLDAKEAIELGIADEII

SEQ ID NO: 140731 - protein, 194 aa, Unknown
  Bacterial polypetide isolated from the Sargasso Sea
MLSFFKKKKIIPHIKLSGVIGNVGKFKQGIDFAGQEEIIKKAFSIKKAPAVAISINSPGGSPVQSHLIHDFIRSQAKKNKKKVIIFAEDVAASGGYLIACAGDEIYANQSSIVGSIGVIYSSFGFKDLINKIGVQRRVYTAGKNKSTLDPFMDEKKEDIERLKTIQLDLHKDFIEVVENSRSTKLKKDIGIELF

SEQ ID NO: 140732 - protein, 90 aa, Unknown
  Bacterial polypetide isolated from the Sargasso Sea
MLPFFKKKKIVPHLRLTGVIGNAGRFKQGIDFAGQEELIKKAFSIKKSLAVAISINSPGGSPVQSHLIYDFIRAQAKKNKKKGNCFRRRC

SEQ ID NO: 140733 - protein, 228 aa, Unknown
  Bacterial polypetide isolated from the Sargasso Sea
MLSFFKKKKIIPHIKLSGVIGNVGKFKQGIDFSGQEEIISKAFSVKKAPCVAITINSPGGSPVQSHLIYSLIKEQAKKNKKRVIVFAEDVAASGGYLIACAGDEIYANSSSIIGSIGVIYSSFGFTELIKKIGVERRVHTAGKNKSTLDPFLDEKKEDIERLKNIQLDLHKDFIEVVEKSRLSKLKKTEVELFSGEFWSGRKAKDLGLVDDIGNANQILREKFGEDIV

SEQ ID NO: 140734 - protein, 58 aa, Unknown
  Bacterial polypetide isolated from the Sargasso Sea
EIHANEVLSLKKRLNEIYSKHTGKSVDEIKSALERDNFMTPDNAKSFGLIDKVVGKRE

SEQ ID NO: 140735 - protein, 227 aa, Unknown
  Bacterial polypetide isolated from the Sargasso Sea
MFSFFKKKIIVPHIRLTGVIGSAGRFRQGIDFSGQQDIIKKAFSLKKAKSIAISINSPGGSPVQSHLIHDYIRQLAKKNNKKVIVFAEDVAASGGYLIACAGDEIYANSSSIVGSIGVISASFGFQDAIKRIGVQRRVYTAGKNKSTLDPFKEEKPEDIERIKKLQLELHSDFINLVKKSRGSKLKDPDKNNTFTGEFWSGSTSLKLGLVDGIGNAEQILREKLEKI

SEQ ID NO: 140736 - protein, 220 aa, Unknown
  Bacterial polypetide isolated from the Sargasso Sea
VVVIKINSPGGSPVQSELIHNRIRNLAKKNNVKVITIAEDVAASGGYMLMCAGDTLIANKSSIVGSIGVISASFGFKKLIDKLGIKRRVFTKGDRKSFLDPFEEVSKKDIDKLIKVQDSIFENFKDLVSKNRKKRIDPKKVFNGEFWTGEQAKKLGLVDSNEELNSYIEKHYGKKLKIRNIEEKKSFIKNILNNQLSNNDVIDQLIEALRENSFWSRYGL

SEQ ID NO: 140737 - protein, 230 aa, Unknown
  Bacterial polypetide isolated from the Sargasso Sea
MLRIPFLNKLNRRKTVSVVRLNGLISSGARGGISDSVLAPTLEKAFRKGNPSAVAFIINSPGGSPVQSSLVGDRIKRLSEETEVPTIAFVEDVAASGGYWIASAADEIYADHASIIGSIGVISSGFGLQELLSRYGIERRVYTAGKSKSMLDPFKKEKAEDVKRLKDILSQLHEVFISYVKGARDGKLSTDHDLFTGEIWLAARAKELGLIDGIGHVVPVLKERFGEKTR

SEQ ID NO: 140738 - protein, 258 aa, Unknown
  Bacterial polypetide isolated from the Sargasso Sea
VVRLSGVITQSTRLGQRGLSLEAVEPQLKKAFSVKRAKAVALIINSPGGSPVQSSLIGQRIRDLASRADLPVLAFCEDVAASGGYWLAVSADEIIANPASVIGSIGVVSAGFGFDKAIAKLGVERRVYTAGAAKMMLDPFQPVRDEEVARLKALQADIHKQFINHIEARRGSRLNGAHEDLFSGAFWTGQRAVELGLVDSLGECRQTILKRFGDDTEVMFIEPKRNFLAFGLPGMRGQLVQETADLAIERAYFSRFGL

SEQ ID NO: 140739 - protein, 223 aa, Unknown
  Bacterial polypetide isolated from the Sargasso Sea
SKNIAISINSPGGSPVQSHLIHDYIRQLAKKNEKKVIVFAEDVAASGGYLIACAGDEIYANSSSIVGSIGVISASFGFQDAIKKIGVQRRVYTAGKNKSTLDPFKEEKEEDIERIKKLQLELHSDFIEVVKKSRGSKLKDPEKNNTFTGEFWSGTASMKLGLIDGIGNAEQILREKFGEDIDIKKLEKPKSFIAKKLSSSIDNQIDNIASVLEERALWQKFGL

SEQ ID NO: 140740 - protein, 236 aa, Unknown
  Bacterial polypetide isolated from the Sargasso Sea
SGQEEIIKKAFSVKKALAVAITINSPGGSPVQSHLIYKFIREQAKKNKKKVIIFTEDVAASGGYLIACAGDEIYANSSSIIGSIGVISASFGFKNLIEKIGVQRRVYTAGKNKSTLDPFLDEKEEDINRLKNIQLELHQDFIDVVEESRGPKLNKSGIELFSGEFWTGRKAKELGLIDGLGNADQILRKKFGDEIEIKKFGKPKGWLAKKLSSSQDHTDKLISILEERSIWQRYGL

SEQ ID NO: 140741 - protein, 104 aa, Unknown
  Bacterial polypetide isolated from the Sargasso Sea
MFSIFKKKTVVPHVRLTGIIGSAGRFKQGMELANQRNILKKAFSVKKISHVAISINSPGGSPVQSHLIYSYIRELAKIKKVRVIIFAEDVAASGGYFIACAGDE

SEQ ID NO: 140742 - protein, 149 aa, Unknown
  Bacterial polypetide isolated from the Sargasso Sea
MFSIFKIFKKKKVIPHIRLSGIIGSVGRFRQGINFAGQQEIIDKAFSIKKASAIAISINSPGGSPVQSHLIYSYIKKLAKKNNKKVLVFAEDVAASGGYLIACAGDEIYANSSSIVGSIGVISASFGFQDAIKKIGVERRVYTAEKIRA

SEQ ID NO: 140743 - protein, 235 aa, Unknown
  Bacterial polypetide isolated from the Sargasso Sea
TETEANADFIISSLKNAFENNNTSGIILRINSPGGSPVQAGYINDEINRLKKLNPDIPVYAVITDLCASGGYYIAVAADKIFANKASIIGSIGVIISGFGFVDAIEKLGIERRILHSGDHKALMDPFSPLDFYEETHMQELLDEIHQQFISIVKSGRGDVLEDNEEIFSGLVWSGQRSLELGLIDDLASVNEIARDIIGTEYIINFTTRENYFDRFAKQVGTSIFQYINQPVIGE

SEQ ID NO: 140744 - protein, 80 aa, Unknown
  Bacterial polypetide isolated from the Sargasso Sea
MSFLSKLMFWKAGHPKVSILRLSGVIASGGGALRKNLNYETLEPVIKKAFADEKQNAVILCINSPGGSPVQSALIGKRIR

SEQ ID NO: 140745 - protein, 241 aa, Unknown
  Bacterial polypetide isolated from the Sargasso Sea
RLTGIIGSAGKFKQGLELANQRDILKKAFSVKKISHVAISINSPGGSPVQSHLIYSYIRQLADKNKVKVIVFAEDVAASGGYFIACAGDEIYANSSSIIGSIGVISASFGFKDLIQKIGVERRVYTAGKNKSTLDPFKEEKEEDIKRLKNIQLELHEDFINVVKKSRATKIKDPEKNNIFTGEFWTGKTSLTLGLIDGLGNADQVLKEKFGDKVIIKTFEKPKGFIARKLSSSIQDPVEKL

SEQ ID NO: 140746 - protein, 162 aa, Unknown
  Bacterial polypetide isolated from the Sargasso Sea
MFSIFKIFKKKKIVPHIRLSGIIGSVGRFRQGINFAGQQEIIDKAFSVKKALAIAISINSPGGSPVQSHLIYSYIKKLAKKNNKKVLIFAEDVAASGGYLIACAGDEIYANSSSIVGSIGVISASFGFQDAIKKIGVERRVYTAGKNKSTLDPFKEEKEDDI

SEQ ID NO: 140747 - protein, 252 aa, Unknown
  Bacterial polypetide isolated from the Sargasso Sea
KIIKSLNNKNVKALIIKINSPGGTVSATVELANIIKDFKNNKKVKIYFFTEEILASGGYWVATQGNKIFAKYGSVIGSIGVSGPNWYFYNKPKSISYGLIGQSIETEDGVEVYSQNAGDSKDLFNPFRKPKIQELNHLQKMVEEIYNDFAIEVSKTRKIELDRVKKNIGALIYTSNQAKENFLIDDVLDFNQLLNKISKEQNMLDYKIIENKLDYNMFEKFFLSKKSINICDKMNNVLLSVSPTYLRNCFIN

SEQ ID NO: 140748 - protein, 69 aa, Unknown
  Bacterial polypetide isolated from the Sargasso Sea
SAGFQGQATDIQIHAKDILSLKERLNKIYSKHTGKSINEISEALERDNFMTADEAKKFGLIDSVVEKRK

SEQ ID NO: 140749 - protein, 67 aa, Unknown
  Bacterial polypetide isolated from the Sargasso Sea
MNLPSNIIPTVFESGARGERALDIYSLLLKERIIFLGTPINDQIANLVVAQLLYLAREDADKDISLY

SEQ ID NO: 140750 - protein, 124 aa, Unknown
  Bacterial polypetide isolated from the Sargasso Sea
MFSIFKKKKIVPHVRLTGIIGSAGKFKQGMELANQRDILKKAFSVKKISHVAISINSPGGSPVQSHLIYSYIRQLAEKHKVKVIIFAEDVAASGGYFIACAGDEIYANSSSIIGSIGVISASFG

SEQ ID NO: 140751 - protein, 53 aa, Unknown
  Bacterial polypetide isolated from the Sargasso Sea
RVCPIETPEGPNIGLINSPGGLCPHQPVRLPGKPVPRGQGRQGHRRDRVPVRH

SEQ ID NO: 140752 - protein, 205 aa, Unknown
  Bacterial polypetide isolated from the Sargasso Sea
MFSFFKKKKIIPHIKLSGVIGNVGKFKQGIDFAGQEEIIKKAFSIKKSPAVAISINSPGGSPVQSHLIHDFIRSQAKKNKKKVIIFMEDVAASGGYLIACAGDEIYANQSSIVGSIGVIYSSFGFKELIQKIGVQRRVYTAGKNKSTLDPFMDEKQEDIERLKNIQLELHKDFIDVVEKSRSKKLKKDKGIELFSGEFWSGRKSL

SEQ ID NO: 140753 - protein, 79 aa, Unknown
  Bacterial polypetide isolated from the Sargasso Sea
MFSIFKIFKKKKIVPHIRLSGIIGSVGRFKQGINFAGQQEIIDKAFSIKKALAIAISINSPGGSPVQSHLIYSYIKKLA

SEQ ID NO: 140754 - protein, 103 aa, Unknown
  Bacterial polypetide isolated from the Sargasso Sea
MLSFFKKKKIIPHIKLSGVIGNVGKFKQGIDFSGQEDIITKAFSLKKAPCVAITINSPGGSPVQSHLIYSLIRQQAKKNKKKVIVFAEECSSLRWISNCLCWR

SEQ ID NO: 140755 - protein, 271 aa, Unknown
  Bacterial polypetide isolated from the Sargasso Sea
IFMFPFFKKKKIVSHIRLSGVIGNVGKFKQGIDYSSQEEIIKKAFSLKKAKAVAITINSPGGSPVQSHLIYKLIRNQADKYKKKVIVFAEDVAASGGYLIACSGDEIYANPSSIIGSIGVIYSSFGFKDLIQKIGVQRRVYTAGKNKSTLDPFLDEKEEDIKRLKNIQLELHQEFIDVVEESRKTKLKKDIGVELFSGEFWSGKKSKDLGLIDGLGNSEQILREKFGEDVEVKIFEKSKGWLAKKLSSSENQADKILNLIEERSIWQKYGF

SEQ ID NO: 140756 - protein, 267 aa, Unknown
  Bacterial polypetide isolated from the Sargasso Sea
MFSFFKKKKIIPHIKLSGVIGNVGKFRQGIDFAGQQEIIKKAFSIKKTLAVAISINSPGGSPVQSHLIHDYIRSQAKKKKKKVIVFMEDVAASGGYLIACAGDEIYANQSSIVGSIGVIYSSFGFKNLIEKIGVQRRVYTAGKNKSTLDPFMDEKQEDIERLKNIQLDLHKDFIDVVENSRSTKLKKNKGIELFSGEFWSGRKSLELGLIDGIGTVDQILREKFGEDVVIKKFEKTKGWLAKKLSSENNVDQLISIVERKIYLATIW

SEQ ID NO: 140757 - protein, 237 aa, Unknown
  Bacterial polypetide isolated from the Sargasso Sea
MFSFFKKKKIVSHLRLTGVIGNVGKFRQGIEYSGQEEIIKKAFSIKKALAVAITINSPGGSPVQSHLIYKLIREQAKKNKKKVIIFTEDVAASGGYLIACSGDEIYANSSSIIGSIGVISASFGFKNLIEKIGVQRRVYTAGKNKSTLDPFLDEKEEDINRLKNIQLELHQDFIDVVEESRGPKLIKNNGVELFSGEFWTGKKAKELGLIDGLGNADQILREKFGDDIEIKKLENPK

SEQ ID NO: 140758 - protein, 131 aa, Unknown
  Bacterial polypetide isolated from the Sargasso Sea
MFSFFKKKKIVAHLKLNGVIGNAGKFKQGIDFAGQEELIKKAFSLKKAICVAITINSPGGSPVQSHLIYSFIRQEAKKNKKKVIVFAEDVAASGGYLISCAGDEIYANSSSIIGSIGVIYSSFGFTEINKK

SEQ ID NO: 140759 - protein, 280 aa, Unknown
  Bacterial polypetide isolated from the Sargasso Sea
ILNYNNSAVGGNFYNHINPKQVKSYLENLKKLKIKILIIKINSPGGTVSATAELTNILSNFKEETGVEIFFFTNEILASGAYWIATSANKIFASYGSIIGSIGVSGPSWFYYNTPVSLSSGIFGQSIETKGGIEVYNQNAGQGKDLFNPYRKPENEEIIHLQRIVDEVYDDFVSKVSNSRKIDLSVVKNQIGAFIYSSNQAKQNFLIDDVIDYKTLIEYIIDENNFENYKIFENNTKSNLIGNFLSIYKVNNENINININICNKLYGTINVIIPLYLKEC

SEQ ID NO: 140760 - protein, 186 aa, Unknown
  Bacterial polypetide isolated from the Sargasso Sea
MFSFFKKKKIIPHIKLSGVIGNVGKFKQGIDFAGQEEIIKKAFSIKKAPAVAISINSPGGSPVQSHLIHDFIRLQAKKNNKKVIIFAEDVAASGGYLIACAGDEIYANKSSIVGSIGVIYSSFGFKDLINKIGVQRRVYTAGKNKSTLDPFMDEKEEDIERLKSIQLDLHKDFIEVVENSRSTKLK

SEQ ID NO: 140761 - protein, 220 aa, Unknown
  Bacterial polypetide isolated from the Sargasso Sea
VIINSPGGTFVSSKEIHDSLEKISMKIPTSAYMKEMATSGAYLASMGLQKIFANQGTITGSIGVILQTAQLTSLMEKIGVKPIVIKSGELKATPNPLEKLDEEKINYLKKIILQLQKEFIGIVKEKRNLNQTTIKEISTGRIFTSKQALKLNLIDFIGNETDALDWIKKEGGLDQKIDVIELDKKNSLYDIFNTTFLKNSLKPFNLNLNNGILAIWTPGL

SEQ ID NO: 140762 - protein, 224 aa, Unknown
  Bacterial polypetide isolated from the Sargasso Sea
MTASSPYYGDSAVMRTPPPDLPSLLLKERIVYLGLPLFSDDDAKRQLGMDVTELIIAQLLFLEFDNSEKPIYFYINSTGTSWYTGDAIGFETEAFAICDTLRYVKPPVHTICIGQAMGTAAVILSAGTKGQRAALPHASIVLHQPRSGAQGQATDIQIRANEVIHNKKAMLEILSHNTGKSVEQLSKDSDRMSYLNPHEAVDYGIIDRVLTSRKDLPSEKVLPT

SEQ ID NO: 140763 - protein, 92 aa, Unknown
  Bacterial polypetide isolated from the Sargasso Sea
MISFFRKKKIIPHIKLSGVIGNVGKFKQGIDFSGQEEIILKAFALKKAPCVAITINSPGGSPVQSHLIYNFIRQQAKKNKKKVIVFAEDVAA

SEQ ID NO: 140764 - protein, 147 aa, Unknown
  Bacterial polypetide isolated from the Sargasso Sea
MFSFFKKKKIVSHLKLSGVIGNAGKFKQGIDFAGQEELIKKAFSLKKASCVAISINSPGGSPVQSHLIYSFIRQQAKKYKKKVIVFAEDVAASGGYLISCAGDEIYANSSSIIGSIGVIYSSFGFTELIKKIGVERRVHTAGKNKST

SEQ ID NO: 140765 - protein, 123 aa, Unknown
  Bacterial polypetide isolated from the Sargasso Sea
MFSFFKKKKIVSHIRLSGVIGNVGKFKQGIDFAGQEEIIKKAFSLKKIKAVAISINSPGGSPVQSHLIYKFIRQQAKKHKVKVIVFAEDVAASGGYLIACAGDEIYANSSSIVGSIGGYLFFF

SEQ ID NO: 140766 - protein, 157 aa, Unknown
  Bacterial polypetide isolated from the Sargasso Sea
MLFFNVFFRTLGFLSALLIFLIIINFVLHFSNEQRKKQFVMTDGLPNSNNIIAKINLDGPIFNNNSNILGNNLYDYINPSQIKSYLEELKELQIKALIININSPGGTVSATAELEQIIYEFKKNTNTKVYFYTKEILASGGYWVATTADKIFASYGS

SEQ ID NO: 140767 - protein, 255 aa, Unknown
  Bacterial polypetide isolated from the Sargasso Sea
FKRFFSKDITIPTLRLSGVIGQAGITRSGLTITGIDKLINKLFADKKAPAVALIINSPGGSPTQSSLIAEKIIALSNEKNKKVYAFVEDVAASGGYWLACSADEIYLDLNSIVGSIGVISPGFGFVDLIKKIGVERRVYTSGKSKSFLDPFKEEKKEDIDRLKDIQGQIHENFIDYVKKRRGSRLLSANEEEIFSGLFWVGKKGVELGLADGIGSINQVIKEKFGKKAKIKIIDQKKSFLQKRLSSSINSNDIFN

SEQ ID NO: 140768 - protein, 219 aa, Unknown
  Bacterial polypetide isolated from the Sargasso Sea
MFKKKPLIVVVRLDGVIGAVSRFGSAGIDDANTQKLMEKAFEYEKAKAIVIKINSPGGSPTQSSLIASRIIKLSKDKKIPVIAFCEDVAASGGYWLACASEEIYADVNSIIGSIGVISASFGFSELISRYGIERRVYTAGEEKSMLDPFQPEKASDIKRLKVIQKAIFENFKNFVSERRGKRVEGKKIFNGEVWEAERAKNLGLIDDIGTMEDILERKY

SEQ ID NO: 140769 - protein, 262 aa, Unknown
  Bacterial polypetide isolated from the Sargasso Sea
PTFVYRVDSEVKQTIISGQGELHLTVTSERLKRRFGINIQLEEPKVPYRETILGKSESKYRHKKQSGGAGQFAEVWMRIESRPRGEGVEFTQSLVGQNVDRVFVPSVEKGVNTACSDGILAGCKVVDVKVDFYDGKMHPVDSKDIAFQTAGKHAFRDAFLKAQPCLLEPIMDIEVKVPEEFMGDIMGDISGKRGKIMGMDAEGSFQLIKAQVPQAELYHYATTVRSLTGGRGIHSESFSHYEKMPKEFEKKVIESRQSKDDE

SEQ ID NO: 140770 - protein, 78 aa, Unknown
  Bacterial polypetide isolated from the Sargasso Sea
MFSFFKKKKIIPHIKLSGVIGNVGKFKQGMDFSSQEEIIKKAFSLKKAPAVAISINSPGGSPVQSHLIHDYIRHLAKK

SEQ ID NO: 140771 - protein, 57 aa, Unknown
  Bacterial polypetide isolated from the Sargasso Sea
MANGGYGSLKKRLNEIYSKHTGKSVDQIKEALERDNFMTPENAKDFGLIDKVVEKRD

SEQ ID NO: 140772 - protein, 267 aa, Unknown
  Bacterial polypetide isolated from the Sargasso Sea
MFKRLFSKSIQIPVLRLSGIISAQSGITSSGLAINNLEKLIEKLFSDKKSPAVALLINSPGGSPTQSSLIAKKIIDLSKDKNKKVIAFVEDVAASGGYWLACAAEEIYIDQNSVIGSIGVISPGFGFVDLIKKVGIERRVYTSGKSKSFLDPFKEEKKEDINRLKDIQEQIHDNFIDYVKDRRGSKLDQNKLDDIFSGLFWVGKKAIDLGLADGIGSLNQVLEKKFGKKVKIKMISQKKSFLQRRLSSSILNSEEVLNKIEEKIMLS

SEQ ID NO: 140773 - protein, 260 aa, Unknown
  Bacterial polypetide isolated from the Sargasso Sea
MGFLSIFRKSQNVSVIPLNGIIAPNMGRRKGLNLNEIDKNIEDAFLVKNLKAVALRINSPGGSPVQSEMISKRIRSLSEKNNIPVIAFVEDVAASGGYWLACSADEIFASKASIIGSIGVVSSGFGFDKAIQKLGVERRLYTSGDNKAILDPFLPENKDDVNRLKGIQKELHNQFISFVKSRRGSKISNENKEIFTGAFWSGEKSLELGLIDSFGEMKAVLKERFGENVKIKEFAPKKKLFGFGSLLSGALDMLINKVEE

SEQ ID NO: 140774 - protein, 224 aa, Unknown
  Bacterial polypetide isolated from the Sargasso Sea
MKPNDFLEQFYTRRQSIINRLLIIVVVILLMFTASLQFQQNENFIAKITVEGIIKDRNDILEQLRNLDKDQNVKGLITVINSPGGTYVGSKEIHESIEKLGKKIPTVAYMREMATSGGYLVSLSSDRIFGNEGTITGSIGVILQTADISQLLSKLGINPVIIKSGDLKAVPNPAEEIDEKKLNYLKDVIKKMQTEFLNLVKNSRDISSSTLDLVSDGRIVTGKQ

SEQ ID NO: 140775 - protein, 193 aa, Unknown
  Bacterial polypetide isolated from the Sargasso Sea
MFKRLFSKSTTIPVLRLSGIISSQSGLTGSGLAINNLEKLIDKLFADKKSPVVVLIINSPGGSPTQSSLIAKRIIDLAKEKNKKVLAFVEDVAASGGYWLACAADEIYIDQNSVIGSIGVISPGFGFVDLLKKVGIERRVYTSGKSKSFLDPFKEEKQEDIDRLKNIQEQIHDNFINYVKERRGSKLDQNKLD

SEQ ID NO: 140776 - protein, 220 aa, Unknown
  Bacterial polypetide isolated from the Sargasso Sea
MISSVRKFFRRKPLVVVIRLDGVIGAVSRFGSGGLDDSNTKQLLEKAFEFEKAKAIAIKINSPGGSPTQSSLIASRILKLSKEKKIPVLCFCEDVAASGGYWLACAGEEIYSDINSIIGSIGVISASFGFSELISRYGIERRVYTAGEEKSMLDPFQPEKASDVKRLKSIQKAIFENFKFFVTERRGEKIKGKKIFNGEVWDAPRAKDLGLIDGIGMMED

SEQ ID NO: 140777 - protein, 252 aa, Unknown
  Bacterial polypetide isolated from the Sargasso Sea
WAREKKSIKTIVFRINSPGGSALASDEIWREVKLTNKTKKVIVSMGDVAASGGYYIAAPAECIFSEPTTITGSIGVFGMIPYTGKMLENYLGISFDRVQTNQHSVMSTNKKLSPKELEIIQNEVDLTYNQFLERVAKGRKMNKKQVDVIARGRVWTGRDALKIGLVDKIGGLNDAIKYATKKSKIDEAKIVYYPEVKENKLQNLIESFNDFEEIKHENHDISKELLKYYNQLKEIEKRKGIQMRLPYDIIIN

SEQ ID NO: 140778 - protein, 115 aa, Unknown
  Bacterial polypetide isolated from the Sargasso Sea
MFSFFKKKKVVPHVRLTGIIGSGGRFKQGMELANQRDILKKAFSVKKISHVAISINSPGGSPVQSHLIYSYIRQLAEKNKIKVIVFAEDVAASGGYFIACAGDEIYANSSSIIGS

SEQ ID NO: 140779 - protein, 181 aa, Unknown
  Bacterial polypetide isolated from the Sargasso Sea
MFSIFKKKKIIPHIKLSGVIGNVGKFRQGIDFASQEELIKKAFSIKKSPAVAISINSPGGSPVQSHLIHDLIKDESKKNNKKVIIFAEDVAASGGYLIACAGDEIYANQSSIVGSIGVIYSSFGFKDLIQKIGVQRRVYTAGKNKSTLDPFLDEKKEDIERLKNIQLDLHKDFIDVVEKSR

SEQ ID NO: 140780 - protein, 330 aa, Unknown
  Bacterial polypetide isolated from the Sargasso Sea
SSQADEIILNKYGQISSFGFSRKREYVKDLYENIKLNQHVFIAGEWKTAPEPFTRNDMSEEDKNAWNDFAEPLWNKMTSYIEDARELPYGTLQNYGDSFWELAADEPELSQIALKIGLVDKVFTEEEFRHWLFDKFPNEDNDINKLPDSISIYDYLSTIDSEETKSKNKIAVIHIEGAITTGDSTYGIAGSDTIVKNIRKAIKDDAVKALVLRINSPGGGVYPSELITNALNEFKETDRPIVSSMGDIAASGGVWVTTLSDEIWAKNETLTGSIGVYATLPTFENLYDWVGVQVDGVSSTKAEEWDPRLSMPDNVTNGIQATVDNIYDRL

SEQ ID NO: 140781 - protein, 166 aa, Unknown
  Bacterial polypetide isolated from the Sargasso Sea
MFSFFKKKKIISHLRLSGVIGNVGKFKQGIDFSGQEEIIKKAFSLKKASAIAVTINSPGGSPVQSHLIYKFIRQLAKKNKKKVLVFAEDVAASGGYLIACAGDEIYANSSSIIGSIGVIYSSFGFKELIKKFGIERRVHTAGKNKSTLDPFLEEKVKILKDLKIFN

SEQ ID NO: 140782 - protein, 178 aa, Unknown
  Bacterial polypetide isolated from the Sargasso Sea
MKHYFGKLRSLRLLGFRNPKPVVAVLRLSGVIGQTGNPLRQGLTSAALVRSIERAFALPKLKAVALQINSPGGSPVQSSLIFKRIRSMAEEKGIPVVAFAEDVAASGGYMLACAADEIFADESSVLGSIGVISAGFGFVELLEKVGIERRVHTEGKNKSMLDPFLNERPQDVRRLKEL

SEQ ID NO: 140783 - protein, 102 aa, Unknown
  Bacterial polypetide isolated from the Sargasso Sea
MFKRLFSRNVQIPTLRLSGIISSQSSITSSALAINNLEKLIEKLFADKKAPAVALIINSPGGSPTQSSLIAKKIINLAKEKNKKVLAFVEDVAASGGYWLAC

SEQ ID NO: 140784 - protein, 242 aa, Unknown
  Bacterial polypetide isolated from the Sargasso Sea
KQGIDFSGQEDIILKAFSVKKAPCVAITINSPGGSPVQSHLIYNFIRQQAKKNKKKVIIFAEDVAASGGYLIACAGDEIYANSSSIIGSIGVIYSSFGFTELIKKIGVERRVHTAGKNKSTLDPFLEEKKEDIERLKSIQLDLHKDFINVVEKSRGIKLNKTEVELFSGEFWSGSKAKDLGLIDEIGDANQVLKEKFGDDVVIKKFEKSKGWLTKKLSSSNDHLDRFTNILDEKSVWQRYGL

SEQ ID NO: 140785 - protein, 263 aa, Unknown
  Bacterial polypetide isolated from the Sargasso Sea
MLSFLKKKKIIPHIKLSGVIGNVGKFKQGIDFSGQEEIISKAFSVKKAPCVAITINSPGGSPVQSHLIYSLIKQQAKKNKKKVIVFAEDVAASGGYLIACAGDEIYANSSSIIGSIGVIYSSFGFTELIKKIGVERRVHTAGKNKSTLDPFLDEKKEDIERLKNIQLDLHKDFIEVVEKSRSSKLKKSEVELFSGEFWSGRKAKDLGLIDEIGNANQVLREKFGEDVVIKKFEKSKSWLSKKLSSSNEHVDQLANILEEKSVG

SEQ ID NO: 140786 - protein, 44 aa, Unknown
  Bacterial polypetide isolated from the Sargasso Sea
NNMKKEPSNYVVPTVIENTNRGERAFDIYSRLLKDRNYISWHSY

SEQ ID NO: 140787 - protein, 164 aa, Unknown
  Bacterial polypetide isolated from the Sargasso Sea
MLSFFKNKKIIPHIKLSGVIGNVGKFKQGIDFSGQEDIITKAFSLKKAPCVAITINSPGGSPVQSHLIYSLIRQQAKKNKKKVIVFAEDVAASGGYLIACAGDEIYANSSSIIGSIGVIYSSFGFTELIKKIGVERRVHTAGKNKSTLDPFLDEKKEDIERLKI

SEQ ID NO: 140788 - protein, 177 aa, Unknown
  Bacterial polypetide isolated from the Sargasso Sea
MADQPNSPDSSSRPDSREPNWERAALERIALAAVKEQRAARRWKIFFRFAFLAVFVLFAFALIDFSSDSKFSSSGRHTALVTIDGEIAAGVNANADDINTALDAAFEDDGTAGVVLRINSPGGSPVQAGMVYDEIRRLRAKHPDKPLYVVVTDMCASGGYYIASAADKIFVDKASIV

SEQ ID NO: 140789 - protein, 203 aa, Unknown
  Bacterial polypetide isolated from the Sargasso Sea
MLSHAVKRRLTRTVNRAWCLTPTPPMIKEAPVPKPKNRARHRPKASAKSNSWFRMQASNNSEADIFIYDEIGYWGVTAKQFVNDLRALGDVTHINLYINSPGGDVFDGIAIYNALKHHGAAITVHIDGLAASMASVIAMVGNPVIMPENTMMMIHKPWGFAGGDASDMRDYADLLDKVESVLIPAYAQKTGKSTEEIAAMLED

SEQ ID NO: 140790 - protein, 39 aa, Unknown
  Bacterial polypetide isolated from the Sargasso Sea
MPIGTPSVPYRLPGSQYERWVDIYTRLGVERILFLGQEV

SEQ ID NO: 140791 - protein, 223 aa, Unknown
  Bacterial polypetide isolated from the Sargasso Sea
AIVLRINSPGGTVGASQEISQAIKQIKKQTKLPIVASFGDVGASGAYWVALASDHMVANPGSLIGSIGVIMSSFDLTGFSEKSGISQNTVKSGKFKDLLSSWRDMGPEERKLLQNLVDDVHDQFITEFMTARKLSKKQAQTLADGRIFTGRQAVKLGVIDGVGSFQDALNIAQKMAKLSGEPNIINKAKPSLQDMFEMFQLNAMSDIPQTLLNKARFGDVKVH

SEQ ID NO: 140792 - protein, 65 aa, Unknown
  Bacterial polypetide isolated from the Sargasso Sea
MFSIFKKKKIVPHVRLTGIIGSAGKFKQGMELANQRDILKKAFSVKKISHVAISINSPGGSPVQS

SEQ ID NO: 140793 - protein, 115 aa, Unknown
  Bacterial polypetide isolated from the Sargasso Sea
MFSIFKKKKIIPHIKLNGVIGNVGKFKQGIDFAGQEEIIKKAFSLKKSPAVAISINSPGGSPVQSHLIHDYVKQLAKKNKKKVIIFAEDVAASVGYLIACCGDEIYANQSSIIGS

SEQ ID NO: 140794 - protein, 190 aa, Unknown
  Bacterial polypetide isolated from the Sargasso Sea
MKLKIPFLPSKPSVAVVKMSGVISAGTRSGLCDQTLSPILEKAFKKGQHQAVALLINSPGGSPVQSSLISSRIKRLAEENEMPVFAFIEDVAASGGYWLACAADEIYADTGSIIGSIGVISAGFGFQELIDKYGVERRVHTAGKSKSMLDPFKKEKPEDIKRLKRILSEMHELFITHVEETRSGKLTQED

SEQ ID NO: 140795 - protein, 230 aa, Unknown
  Bacterial polypetide isolated from the Sargasso Sea
KAFSVKRFSHVAIPINSPGGSPVQSHLIYSYIRELADKKKVKVLIFAEDVAASGGYFIACAGDEIFANSSSIIGSIGVISASFGFKDLIKKIGVQRRVYTAGKNKSTLDPFVDEKEEDVKRLKNIQLELHADFIKVVETSRGSKLKDPEKNNIFTGEFWTGKSALGLGLIDGIGNADQVLKEKFGDKVIIKNFEKRKGFLAKRLSSSISDPFDKIINNLEEKSMWQRFGL

SEQ ID NO: 140796 - protein, 232 aa, Unknown
  Bacterial polypetide isolated from the Sargasso Sea
MFWRTDAPRVSVLRLSGVIASGGSPLRKNLNYVSLEPVIKKAFLDKKQSAVILCINSPGGSPVQSALIGKRIRQLADKNKMPIIAFCEDVAASGGYWLASCADEIYADESSIIGSIGVISAGFGFTEAISKLGIERRVYTSGESKSVLDPFKKESPTDVARLRGLQNDIHEHFIAHVKSRRGKKLNEEEPLFTGLFWTGKKAKKLGLIDGIGAMQDILMEKFGDNVKIKQIT

SEQ ID NO: 140797 - protein, 33 aa, Unknown
  Bacterial polypetide isolated from the Sargasso Sea
MKDKIEEHMNNLIPMVVEQSNRGERAYDIYPRL

SEQ ID NO: 140798 - protein, 176 aa, Unknown
  Bacterial polypetide isolated from the Sargasso Sea
MFSFFKKKKIVSHLKLSGVIGNVGRFRQGIEYSSEEEIIKKAFSVKKALAVAITINSPGGSPVQSHLIYKLIKEQSKKTKKKVIIFAEDVAASGGYLISCAGDEIYANSSSIIGSIGVISASFGFKNLIEKIGIERRVYTAGKNKSTLDPFLDEKEEDINRLKNIQLEIHQDFIDV

SEQ ID NO: 140799 - protein, 170 aa, Unknown
  Bacterial polypetide isolated from the Sargasso Sea
MSFISSKTRINIVGLRGVIGDLGRFQKGLTLENCASILDKAFSFKKPAVVVIKINSPGGSPVQSELIHNRIRNLSKKNNVKVITIAEDVAASGGYMLMCAGDTLIANKSSIVGSIGVISASFGFKKLIDKLGIKRRVFTKGDRKSFLDPFEEVSKKDIDKLIKVQDSIFE

SEQ ID NO: 140800 - protein, 143 aa, Unknown
  Bacterial polypetide isolated from the Sargasso Sea
MSALLIFLIIISFILHFSNEQEKKQFVMTDGLPNSDNIIAKINLNGPIFNNNSNVLGNNLYDYINPSQVKSYLEELKELQIKALIININSPGGTVSATAELEQIIYEFKKNTNTKIYFYTKEILASGGYWVATTADKIFASIW

SEQ ID NO: 140801 - protein, 133 aa, Unknown
  Bacterial polypetide isolated from the Sargasso Sea
NALFAIYDTSQYIRNDITTICLGQAASAAAVLLAAGTPGKRMALPHARVLLHQPYGQAMGQATDIELAAREIDRMRDLLEGILARHTGQDLERIHTDTDRDFIMDAEAAKEYGIIDEVIDSREVAEDGPIRAA

SEQ ID NO: 140802 - protein, 67 aa, Unknown
  Bacterial polypetide isolated from the Sargasso Sea
MPGFWSRLKQRLNEIYVEHTGKALKDIEENLERDRFMDVHEAKEYGLIDAVITKRAQKEDTNESSDN

SEQ ID NO: 140803 - protein, 207 aa, Unknown
  Bacterial polypetide isolated from the Sargasso Sea
MLSFFKKKKIVPHIKLNGVIGNVGKFKQGIDFSAQEEIISKAFSLKKAPCVAITINSPGGSPVQSHLIYNFIRQKAKKNKKKVIVFAEDVAASGGYLIACAGDEIYANSSSIIGSIGVIYSSFGFTELIKKIGVERRVHTAGKNKSTLDPFLEEKKEDIERLKNIQLDLHKEFINVVEKSRGSKLKKSDVELFSGEFWSGKKARDLG

SEQ ID NO: 140804 - protein, 243 aa, Unknown
  Bacterial polypetide isolated from the Sargasso Sea
KFKQGIDFSGQEEIIKKAFSLKKAKCVAITINSPGGSPVQSHLIYSFIRQQAKKNNKQVIVFAEDVAASGGYLIACAGDEIYANSSSIIGSIGVIYSSFGFTELIKKIGVERRVHTAGKNKSTLDPFLEEKNEDKERLKNIQLDLHKDFIDVVEKSRGSKLKKSDIELFSGEFWSGSKSKTLGLIDGIGNAHEILKEKYGDDVIIKKFEKTKGWLSQKLSSSNQVDQFANILEERSIWQRYGF

SEQ ID NO: 140805 - protein, 99 aa, Unknown
  Bacterial polypetide isolated from the Sargasso Sea
MRRIFDKFGIPIFRKPKPVVAVLRFSGVIGQVGNPIRQGIYADGFIKPIEQAFNLKNLVCVAVQINSPGGSPVQSSLIFKRIRSLAEEKDVPVIALQRM

SEQ ID NO: 140806 - protein, 269 aa, Unknown
  Bacterial polypetide isolated from the Sargasso Sea
MFSFFKKKKIISHLKLSGVIGNVGRFRQGIEYSSEEEIIKKAFSVKKALAVAITINSPGGSPVQSHLIYKLIKEQSKKTKKKVIVFAEDVAASGGYLISCAGDEIYANSSSIIGSIGVISASFGFKNLIEKIGIERRVYTAGKNKSTLDPFLDEKDEDINRLKNIQLEIHQDFIDVVEESRKEKLNKNSGIELFSGEFWAGKKAKELGLIDGLGNAEQILREKYGDDLEIKKFGKSKGWLSKKLSSSENFTDKVISLLEERSIWQRYGL

SEQ ID NO: 140807 - protein, 210 aa, Unknown
  Bacterial polypetide isolated from the Sargasso Sea
MFSFFKKKKIVAHLKLSGVIGNAGKFKQGIDFAGQEELIKKAFSLKKAACVAISINSPGGSPVQSHLIYSFIRQQAKKHKKKVIVFAEDVAASGGYLISCAGDEIYANSSSIIGSIGVIYSSFGFTELIKKIGVERRVHTAGKNKSTLDPFLEEKNEDIERLKNIQLDLHKDFIDVVEKSRGSKLNKSDVEHFSGEFWSGSKAKNLGLMT

SEQ ID NO: 140808 - protein, 203 aa, Unknown
  Bacterial polypetide isolated from the Sargasso Sea
MFSFFKKKIIVPHIRLAGVIGSAGRFRQGIDFSGQQEIIKKAFSFKKAKSIAISINSPGGSPVQSHLIHDYIRQLAKKNNKKVIVFAEDVAASGGYLIACAGDEIYANSSSIVGSIGVISASFGFQDAIKRIGVQRRVYTAGKNKSTLDPFKEEKPEDIERIKKLQLELHSDFINLVKKSRGSKLKDPDKNNTFTGEFWSGST

SEQ ID NO: 140809 - protein, 87 aa, Unknown
  Bacterial polypetide isolated from the Sargasso Sea
MGFLSIFRKSQNVSVIPLNGIIAPNMGRRKGLNLNEIDKNIEDAFSANNLKAVALQINSPGGSPVQSEMISKRIRSLSEKKSIPVIA

SEQ ID NO: 140810 - protein, 280 aa, Unknown
  Bacterial polypetide isolated from the Sargasso Sea
LSRDYILLLKPVFKRFFSKDINIPLLRLSGVIGQSGITRSGLTITGIEKLIDKLFSYKKSPAVALIINSPGGSPTQSSLIAEKIINLSKEKNKKVYAFVEDVAASGGYWLACAADEIYLDLNSIVGSIGVISPGFGFVDLIKKIGIERRVYTSGKSKSFLDPFKEEKKEDIDRLKNIQEQIHENFIEYVKNRRGSKLLSSSEDEIFSGLFWVGKKGVELGLADGIGSINEIIKEKFGKKAKIKIIDQKKSFLQKRLSSSINNNDIFNRLEEMIMWSRYGL

SEQ ID NO: 140811 - protein, 131 aa, Unknown
  Bacterial polypetide isolated from the Sargasso Sea
MHPLRKSYQSIVTRTTTHSVKGPYPVFDNLPALFSANPVITRTATYIYACAEWIDDAFQGKELMLDIYSRLLNPTSVSLANHIVDISTGPDAGSYLAWNFNSGMAAIDAILSHLVGYQDIVLCSRNVYGGT

SEQ ID NO: 140812 - protein, 299 aa, Unknown
  Bacterial polypetide isolated from the Sargasso Sea
IVYSNGLSQIGYYLASSADSIFINGLSNIEWKGLGAQLMYFKSMLEKIGVRAEPIRVGKFKSAIEPFIMDSMSFENQYQLTQMLKDLWSNILTEVSIERNVSSEKLDKIADELGYLLPNEALKHGLIDGIKYEDEITSYLNQMVGGSCNLISTQKYNKSYKNYTSGTSKIVVVNAEGAIVDANTESDISSVKYCKLFDDILKDNNIKAVVLRINSPGGSALASEKLWRKLKLISAKLPLIVSMGNYAASGGYYMACAGDTILAEKNTITGSIGVFGLMFNVSKLNNKIGVRVEKVKTNQ

SEQ ID NO: 140813 - protein, 167 aa, Unknown
  Bacterial polypetide isolated from the Sargasso Sea
MEADYLIDRRRLKRRITFWRTAAIILIIAAVAVGAQKYADPKAGNYIARLKITNFIHNDIERLAAIEKVRSDENVKALIVRINSPGGTVVGGEALYEALNRVRKQKPVIAIMDELATSAGYMVAIASDRVIAHAGTITGSIGVLMQTAEVTDLLYKLGIKVEAIKSS

SEQ ID NO: 140814 - protein, 176 aa, Unknown
  Bacterial polypetide isolated from the Sargasso Sea
MSFLSFIRKSQIVSTIALSGIIAPNMGRRKGLNLYELDKVIEQAFSVKNLKAVALQINSPGGSPVQSEMISKRIRDLSENKNIPVLAFVEDVAASGGYWLACAADEIFASKASIIGSIGVVSSGFGFDKAIKKIGVDRRLYTSGENKAILDPFLPENKDDIKRLKDIQKELHNQFI

SEQ ID NO: 140815 - protein, 251 aa, Unknown
  Bacterial polypetide isolated from the Sargasso Sea
LKGMIASGSRAPLNMDNLNGLFSKIMKMKFDALSIVINSPGGSPVQSSLIAQKIREISDKKKVKCYCFVEDVAASGGYWLACAADELYADVNSIVGSIGVISGGFGFTDLIKKIGVERRIFTAGENKSFLDPFLKVNKKDEEKLKKLQKLIHQNFIEWVSLRRKKKLSEKNKKIIFSGSFWLANEAKDLGLIDGIASESSFFKSKFGEKTKIKKIKQPKSLKQKLGLGINSLNSEDFITKLKEELLFNKFG

SEQ ID NO: 140816 - protein, 179 aa, Unknown
  Bacterial polypetide isolated from the Sargasso Sea
MKKIFNFILKLFGKGKPIVPVLRFEGIIGTGGGIGKGKINAENLETNIKKAFSESNPSAVAIIINSPGGSPVQSSLIYQRVRYLADKKDVPVLVFIEDVAASGGYWLSCIGDEIFADKSSIVGSIGVISASFGFTEAINKLGVERRVYTTGKSKGSLDPFKPEKKEDVQMLKNIMNDTQ

SEQ ID NO: 140817 - protein, 85 aa, Unknown
  Bacterial polypetide isolated from the Sargasso Sea
MFKRFFSKSTTIPVLRLSGIISSQSGLTGSGLAINNLEKLIDKLFADKKSPVVGLVINSPGGSPTQSSLIAKRIIDLAKEKNKKV

SEQ ID NO: 140818 - protein, 232 aa, Unknown
  Bacterial polypetide isolated from the Sargasso Sea
MIVNYPPRVMVVTMSGIIAHESELSAGMSLQALDHSLLSGDGAIEAARRNGELINLDRFEEVLSRAFRATRCRAVALVINSPGGSPAQSSLLYNRLRELRQRHKKTKLITYVQASGLSPLPKLALRPGLPRHHLHHLHHLLRPHLPSQVTPTASATSSEQDSAASGGYYIACAADEIVCDTNSLVGSIGVVSRGFGYVRALKKQARAPPTSTNLTPISARSPPDLAPISARS

SEQ ID NO: 140819 - protein, 261 aa, Unknown
  Bacterial polypetide isolated from the Sargasso Sea
AVLQLSGVIGEAGMMRRGGLNLADLEDNIEQAFDIPRLKAVAICINSPGGSPVQSALIAGRIRELAKEKKVRVYAFCDDVAASGGYWLACAADEIYANGASIVGSIGVISASFGFPELMKRLGVERRVYTAGENKRRLDPFLPENRKDVTHLKSLQKDLHAQFKSYVQERRGKRLKGPDKVLFSGDFWSGTKGLELGLVDGLGDFRSVMRKKFGNDVRFYPIEEKKGFLAKRLGMSVKSEHWADDLVGAIEERAFWNRYGL

SEQ ID NO: 140820 - protein, 268 aa, Unknown
  Bacterial polypetide isolated from the Sargasso Sea
MFSFFKKKKIVSHLKLSGVIGNAGKFKQGIDFAGQEEVIKKAFSLKKAVCVAISINSPGGSPVQSHLIYSFIRQQAKKTKKKVIVFAEDVAASGGYLISCAGDEIYANSSSIIGSIGVIYSSFGFTDLIKKIGVERRVHTAGKNKSTLDPFLEEKNEDIERLKNIQLDLHKDFIDVVEESRGSKLNKSEVELFSGEFWSGSKAKNLGLIDGLGNAHEILKEKFGEDVTIKKFEKSKGWLSQKLSSSNNQVDQIANILDERSIWQRYGF

SEQ ID NO: 140821 - protein, 126 aa, Unknown
  Bacterial polypetide isolated from the Sargasso Sea
MFSFFKKKKIVAHLKLSGVIGNVGKFKQGIDFAGQEELIKKAFSLKKATCVAISINSPGGSPVQSHLIYSFIRQQAKKNKKKVIVFAEDVAASGGYLISCSGDEIYANSSSIIWIYRGHILFFWIY

SEQ ID NO: 140822 - protein, 239 aa, Unknown
  Bacterial polypetide isolated from the Sargasso Sea
MVVKINSPGGTVTATSELETLITNFKKKTNTEVYFYTNEILTSGGYWIATTADKIFANYGSIIGSIGVSGPSWYYYDKPISISSGILGQSIETENGIQIFDQISGSSKDLYNPFRKPTAKELDHLKTLINEIYDDFLFKVSNSRKIELVTLKKEIGALIFTSKQAKDNYLIDDIMSFEKLKKKIIIDNNYKNYKIIHSKSPNNLLGNYLDSYFNRSHLKICNKLNSNFVSIFPIFLKNC

SEQ ID NO: 140823 - protein, 87 aa, Unknown
  Bacterial polypetide isolated from the Sargasso Sea
MFSIFKKKIIIPHVRLAGVIGSAGRFRQGIDFSGQQDIIKKAFSFKKAKSIAISINSPGGSPVQSHLIHDYIRQLAKKNNKKVIVLQ

SEQ ID NO: 140824 - protein, 162 aa, Unknown
  Bacterial polypetide isolated from the Sargasso Sea
MADQPNSPDSSSRPDSREPNWERAALERIALAAVKEQRAARRWKIFFRFAFLAVFVLFAFALIDFSSDSKFSSSGRHTALVTIDGEIAAGVNANADDINTALDAAFEDDGTAGVVLRINSPGGSPVQAGMVYDEIRRLRAKHPDKPLYVVVTDMCASGGYYI

SEQ ID NO: 140825 - protein, 246 aa, Unknown
  Bacterial polypetide isolated from the Sargasso Sea
MFSPNKTIISIDLKGMIASGSRAPLNMDNLNGLFSKVMKMKFDALSIIINSPGGSPVQSSLIAQKIREISDKKKVKCYCFVEDVAASGGYWLACAADELYADVNSIVGSIGVISGGFGFTDLIKKIGVERRIFTAGENKSFLDPFLKINKKDEEKLKKLQKLIHQNFIDWVSSRRKKKISEKNKKFIFSGSFWLANEAKDLGLIDGITSESSFFKSKFGEKTKIKKIKQPKSLKQKLGLGINSLNS

SEQ ID NO: 140826 - protein, 151 aa, Unknown
  Bacterial polypetide isolated from the Sargasso Sea
MFSFFKKKKIVAHLKLSGVIGNAGKFKQGIDFSGQEEIIKKAFSLKKAKCVAITINSPGGSPVQSHLIYSFIRQQAKKNNKQVIVFAEDVAASGGYLIACAGDEIYANSSSIIGSIGVIYSSFGFTELIKKIGVERRVNTAGKNKSTLDPF

SEQ ID NO: 140827 - protein, 99 aa, Unknown
  Bacterial polypetide isolated from the Sargasso Sea
MFSFFKKKKIVAHLKLSGVIGNAGKFKQGIDFAGQEEIIKKAFSLKKAKCVAITINSPGGSPVQSHLIYSFIREQAKKNNKKVIVFAEDVAASGGYLIA

SEQ ID NO: 140828 - protein, 128 aa, Unknown
  Bacterial polypetide isolated from the Sargasso Sea
MIFFSVFFRTLGFLSALLIFIIIINLLLHFSNELEKKQFVMTEGIPSSNNIIANINLNGPIFNNNNNVLGNNLYDYINPLQVKSYLEELKELEIEALIININSPGGTVSATAELEQIIYEFKEQTNTK

SEQ ID NO: 140829 - protein, 268 aa, Unknown
  Bacterial polypetide isolated from the Sargasso Sea
MFSFFKKKKIIPHIRLTGVIGSVGKFKQGIDFNGQEEIIKKAFAIKKSPAVAISINSPGGSPVQSHLIYSFIRRLAKKEKKKVIVFAEDVAASGGYLIACAGDEIYANSSSIIGSIGVIYSSFGFKDLIQKIGVQRRVYTAGKNKSTLDPFMDEKKEDIDRLKNIQLDLHKDFINVVEASRGSKLKKDLGIELFSGEFWSGSRSKELGLIDGIGDANHILKEIYGEDIVIKKFEKSKGWLAKRLSSENYIDSLSNVIEEKSIWQRYGF

SEQ ID NO: 140830 - protein, 268 aa, Unknown
  Bacterial polypetide isolated from the Sargasso Sea
MISFFKKKKIVPLIRLSGVIGNVGKFKQGIDLTGQEELIKKAFAVKKSPAVAISINSPGGSPVQSHLVHDFIRQQAKKNKKKVIIFAEDVAASGGYLISCAGDEIYANQSSIIGSIGVIYSSFGFKELIEKIGIQRRVYTAGKNKSTLDPFLEEKKEDIERLKNIQLDLHKNFIKVVENSRSTKLKKDNGIELFSGEFWSGKKALELGLIDGIGNSNEVLREKYGDDIIIKNFEKSKGWLARKLSSESQVEMLINSIEEKSIWQKYGF

SEQ ID NO: 140831 - protein, 260 aa, Unknown
  Bacterial polypetide isolated from the Sargasso Sea
MLSFFKKKKIIPHIRLSGVIGNVGKFKQGIDFAGQEEIIKKAFSIKKAPVVAISINSPGGSPVQSHLIHDFIRSQAKKNKKKVIIFAEDVAASGGYLIACAGDEIYANQSSIVGSIGVIYSSFGFKDLINKIGVQRRVYTAGKNKSTLDPFMDEKKEDIERLKTIQLDLHKDFIDVVEKSRSSKLKKDSGIELFSGEFWSGRKAKELGLVDGIGNVDQILREKYGEKIIIKKFEKAKGWLARKLSSENHADQVISILEER

SEQ ID NO: 140832 - protein, 264 aa, Unknown
  Bacterial polypetide isolated from the Sargasso Sea
MFSPQKTIVSIDLKGMIASGSRAPLNMDNLNGLFSKLMKMKFNALSIVINSPGGSPVQSSLIAQKIREISAKKKVKCYCFVEDVAASGGYWLACAADEIYADINSIVGSIGVISGGFGFTDLIKKIGVERRIFTAGENKSFLDPFQKVNKKDEDKLIKLQKLIHQNFIDWVSSRRKKKLNDKNKKIIFSGSFWLANEAKDLGLIDGITSESAFFKSKFGEKTKIKKIKQPKSLKQKLGLGINSFNSEDLITKAKEELLFNKFGI

SEQ ID NO: 140833 - protein, 247 aa, Unknown
  Bacterial polypetide isolated from the Sargasso Sea
VGKFKQGIDFSSQEEILKKAFEIKKAPAVAISINSPGGSPVQSHLIHDFIRYLAKKNKKKVIIFAEDVAASGGYLIACSGDEIYANQSSIVGSIGVIYSSFGFKDLIQKIGVQRRVYTAGKNKSTLDPFLDEKAEDIERLKNIQLELHKDFIQVVEKSRSSKLKKETGIELFSGEFWSGRKAKELGLVDGIGNANQILRQKFGDEVIIKKFEKPKGWLARKLSASENHADKVISILEERSIWQRYGF

SEQ ID NO: 140834 - protein, 194 aa, Unknown
  Bacterial polypetide isolated from the Sargasso Sea
MFWIFKKKKVVPHVRLTGIIGSAGRFKQGMDLSSQQEILKKAFSFKKPKHVAISINSPGGSPVQSHLIYSYIRQLADENKTKVIIFAEDVAASGGYFIACAGDEIYANSSSIIGSIGVITASFGFKEMIKKIGVERRIYTAGKNKSTLDPFVDEKEEDVQRLKKLQLELHGDFIKIVEKSRGKKLKDPEINNIF

SEQ ID NO: 140835 - protein, 268 aa, Unknown
  Bacterial polypetide isolated from the Sargasso Sea
MLSFFKKKKIIPHIKLVGVIGNVGKFKQGIDFSGQEDIITKAFSLKKAPCVAITINSPGGSPVQSHLIYSLIRQQAKKNKKKVIVFAEDVAASGGYLIACAGDEIYANSSSIIGSIGVIYSSFGFTELIKKIGVERRVHTAGKNKSTLDPFLDEKKEDIERLKNIQLDLHKDFIEVVEKSRSSKLKKSEVELFSGEFWSGRKAKDLGLIDDIGNANQILREKFGEDVVIKKFEKSKSWLSKKLSSSNDHVDQLANILEEKSVWQKYGL

SEQ ID NO: 140836 - protein, 278 aa, Unknown
  Bacterial polypetide isolated from the Sargasso Sea
MSDDSLAKIVDSLVEERTSERKFKLLSRVFFVILLLIIFYLSFSNPMDDNIYQSEHTAVIKLDGVIANNGTINTETTLELIRKAFNNDLCKNIILKINSPGGSATQSKIIYDEILKLKKNANKQIFSVIEDVGASGGYYIAASADKIFASNSSIVGSIGVRIDSLNFKSLFNKLGIKSQTISSGKDKLILDPFQDMTEEHKTHLTKLANSIHNEFISDIKISRDNLIKDDIAFSGLFWTGNEALGIGLIDQISSLYDVNRDYFNNSKLITYNKKPSIF

SEQ ID NO: 140837 - protein, 616 aa, Unknown
  Bacterial polypetide isolated from the Sargasso Sea
MAKTKKKNDIGAFSRLGNFLGNIWYFIRVGRDFFWKAIRFTLATSIFLFVVAAILISILDPLFDNETKPKADGKVVVFSPDGIVVDQQIPKSQDQFTSFLGDEEVITYEFKHLVDFFEKFKEDEKVSGMIFDPSGLQISSAYAIPLAKKIKEAAQAGKEIIIRAESLSIYGDTAYLLSSGATEISASKYSAFALDGFTSTRLYQKDFFEKFLLTPRVFTAGDWKTGPEDWTRSNMSQEQKDNSYYIDRFWNAYKNFVKETRDVDLQWYADESYKDLIAGNVSFENANLEWNIIDYQEEEDDFNDRMLEKFGAAEDDEDELNAIYYRDYLKTFEKAKKSKSKNVIKVITVEGAITTGPVQLGIAGSDGLVKMLKAAHENENTKAIVLRVNSPGGSVVASEYIRWEIEKAQNKGIPIVVSMGSLAASGGYWVSSMADKIYAEENTITGSIGVYGRLLSLEKILEWAGLNYDSNKTTEFGDFNPVAEDWPEEIIETFQANIDETYMNFTTQTSKDRDIPLEKVLEIARGRVWYGEDAVEIGLVDEIGTLEEAINFTAESILEVDDFKVDYVKPAKNSNSLNFAISLTEAISEFVNGKELSKGKMRKEINVLCRECSLID

SEQ ID NO: 140838 - protein, 617 aa, Unknown
  Bacterial polypetide isolated from the Sargasso Sea
MVKKKKETNEGFLHKVGKFLVAAWGYIVVGRDYFWKAVRFTLATGIFLYIAISIVISLISPLWQESNEIDPTGKVVVFSPQGVVVDQPPTPPPAQWWEDIDGVIPSQNGTIYYPYQDMLEYFEDFKNDERVDAMIFDPSGLGVSIVYALPIAKKMKEAVDAGKEIVVRSDFLTDGTYLLASTATEISIPTYAGISINGFGGARQYLKNFFEKFLITPRIFAAGDFKTGPEPYTSDRMSDEAKANLAFYDPLWKKWKDFVYENREIDLQWLADESYKQIIDGSVDPLESPLVWGAVDVIEESDAFDDRMKEKFGTAEDDDEALNAVYYRSYLASFEEDMPSKSKNEIKVVTVEGTIMGGPVVYGQAGSDGIVEMLKEAHEDENTKAIVLRVNSPGGSVVDSDYMRWEIEKAQEKGIPVVVSMGTLAASGGYWISSLADKIYAEPDTITGSIGVYGTLFSFEKIFDWMGINYDGYSTTKWGAFDLTAMDWPEEFENLVRAGIYSTYDKFTSQVSNDRGIPIERVREIAKGRVYSGEMALEIDLVDELGTLDDAIKYVAESAELEDYKVEHVIPPAPAANYMFQFDFIKNLFDTKQNNHFTAKDVYKNIRIYCFECEVVD

SEQ ID NO: 140839 - protein, 255 aa, Unknown
  Bacterial polypetide isolated from the Sargasso Sea
MSGVIGSAGRFKQGIDFSGQQEIIKKAFSFKKSKNIAISINSPGGSPVQSHLIHDYIRQLAKKNEKKVIVFAEDVAASGGYLIACAGDEIYANSSSIVGSIGVISASFGFQDAIKKIGVQRRVYTAGKNKSTLDPFKEEKEEDIERIKKLQLELHSDFIEVVKKSRGLKLKDPEKNNTFTGEFWSGTASMKLGLIDGIGNAEQILREKFGEDIDIKKLEKPKSFIAKKLSSSIDNQIDNIASVLEERALWQKFGL

SEQ ID NO: 140840 - protein, 255 aa, Unknown
  Bacterial polypetide isolated from the Sargasso Sea
MTGVIGSAGRFRQGIDFSGQQEIIKKAFSFKKAKNIAISINSPGGSPVQSHLIHDYIRQLAVKNKKKVIVFAEDVAASGGYLIACAGDEIYANSSSIVGSIGVISASFGFQDAIKKIGIQRRVYTAGKNKSTLDPFKEEKEDDIQRIKKLQLELHSDFINLVKKSRGSKLKDAEKNNIFTGEFWSGSASLKLGLIDGIGNAEQILREKFGENIEIKKLEKPKGFIARKLSSSLDNQIDSIANAIEERAMWQKYGL

SEQ ID NO: 140841 - protein, 295 aa, Unknown
  Bacterial polypetide isolated from the Sargasso Sea
MYLSIDAPQSSTIRRYYIKQKNLINIIMLSFFKKKKIIPHIILNGVIGNVGKFRQGIDFSNQEEIIKKAFSIKKSPAVAISINSPGGSPVQSHLIHDLIRSQAIKNKKKVIIFAEDVAASGGYLIACAGDEIYANQSSIVGSIGVIYSSFGFKDLIQKIGVQRRVYTAGKNKSTLDPFLEEKNEDIERLKNIQLDLHKDFIDVVEKSRSSKLKKDSGIELFSGEFWSGRKAKELGLIDDIGNPEKVLKEKFGEKIIIKKFEKTKGWLAKKLSNEINTNQIINALEERSIWQRYGF

SEQ ID NO: 140842 - protein, 105 aa, Unknown
  Bacterial polypetide isolated from the Sargasso Sea
MSLISSKTRINIVGLRGVIGDLGRFQKGLTLENCASILDKAFSFKKPSVVVIKINSPGGSPVQSELIHNRIRNLSKKNNVKVITIAEDVAASGGYMLMCAGDTLI

SEQ ID NO: 140843 - protein, 267 aa, Unknown
  Bacterial polypetide isolated from the Sargasso Sea
MFSFFKKKKIVAHLKLSGVIGNAGKFKQGIDFAGQEEIIKKAFSLKKAKCVAITINSPGGSPVQSHLIYSFIRQQAKKNNKQVIVFAEDVAASGGYLIACAGDEIYANSSSIIGSIGVIYSSFGFTELIKKIGVERRVHTAGKNKSTLDPFLEEKNEDIERLKNIQLDLHKDFIDVVEKSRGTKLKKSEVELFSGEFWSGSKSKTLGLVDGIGNAHEILKEKFGDDVIIKKFEKTKGWLSQKLSSSNQIDQFANILDERSIWQRYGF

SEQ ID NO: 140844 - protein, 334 aa, Unknown
  Bacterial polypetide isolated from the Sargasso Sea
DKILWFKPIGVVVDKAISPSSSIDSLILGSTNTQQHELNDLLDVLNSAAEDENLDAIYINVSELGMYYASAFEIANAVKNIKDNGKRIIAYGENIGNNAYLISSQADEIILNKYGQISSFGFSRKREYVKDLYENIKLNQHVFIAGEWKTAPEPFTRNDMSEEDKNAWNDFAEPLWNKMTSYIEDARELPYGTLQNYGDSFWELAADEPELSQIALKIGLVDKVFTEEEFRHWLFDKFPNEDNDINKLPDSISIYDYLSTIDSEETKSKNKIAVIHIEGAITTGDSTYGIAGSDTIVKNIRKAIKDDAVKALVLRINSPGGGVYPSELITNAIK

SEQ ID NO: 140845 - protein, 119 aa, Unknown
  Bacterial polypetide isolated from the Sargasso Sea
MFSFFKKKKIVSHLKLSGIIGNVGKFKQGIDFSGQEEIIKKAFSLKKASAIAVTINSPGGSPVQSHLIYKFIRQLAKKNKKKVLVFAEDVAASGGYLIACSGDEIYANSSSIIGSIGVI

SEQ ID NO: 140846 - protein, 268 aa, Unknown
  Bacterial polypetide isolated from the Sargasso Sea
MFSFFKKKKIVSHLRLTGVIGNVGKFKQGIEYSSQEEMIKKAFSVKKAEAVAISINSPGGSPVQSHLIYKFIREQSKKNKKKVIVFAEDVAASGGYLIACAGDEIYANASSIIGSIGVIYSSFGFKDLIQKIGVQRRVYTAGKNKSTLDPFLDEKEEDIQRLKNIQLELHQEFINVVEESRSTKLNKTDVELFSGEFWSGKTSLKLGLIDGIGNAEQILREKFGEDVEIKKFEKSKGWLAKKLSSSEDHADKLISVLEERSIWQKYGF

SEQ ID NO: 140847 - protein, 142 aa, Unknown
  Bacterial polypetide isolated from the Sargasso Sea
MFSFFKKKKIVPYIRLRGVIGNVGKFKQGIDFNGQEEIIKKAFSIKKTEVVAISINSPGGSPVQSHLIYKYIRELAKKNKKKVIVFAEDVAASGGYLIACAGDEIYANSSSIIGSIGVIYSSFGFKELIKKIGVQRRIYTAG

SEQ ID NO: 140848 - protein, 181 aa, Unknown
  Bacterial polypetide isolated from the Sargasso Sea
MKNYFEFIFRLFIKKKPIVPVLRFDGVIGTGGGFGKGRINAENLETNIKKAFSENKPSAVAIIINSPGGSPVQSSLIYQRVRYLADKKDVPILVFIEDVAASGGYWLSCIGDEIFADKASIVGSIGVISASFGFTEAIEKLGVERRVYTTGKSKGSLDPFKPEKSEDVKMLKNIMNDTQKA

SEQ ID NO: 140849 - protein, 268 aa, Unknown
  Bacterial polypetide isolated from the Sargasso Sea
MFSFFKKKKIIPHIKLSGVIGNVGKFKQGIDFAGQEEIIKKAFSIKKSPAVAISINSPGGSPVQSHLIHDFIRSQAKKNKKKVIIFMEDVAASGGYLIACAGDEIYANQSSIVGSIGVIYSSFGFKELIQKIGVQRRVYTAGKNKSTLDPFMDEKQEDIERLKNIQLELHKDFIDVVEKSRSKKLKKDKGIELFSGEFWSGRKSLELGLIDGIGTADQILREKFGDDVNIKKFEKSKGWLAKKLSSESHTDQVISILEERSIWQRYGF

SEQ ID NO: 140850 - protein, 268 aa, Unknown
  Bacterial polypetide isolated from the Sargasso Sea
MLSFLKKKKIIPHIKLSGVIGNVGKFKQGIDFAGQEEIIKKAFSIKKAPAVAISINSPGGSPVQSHLIHDFIRSQAKKNRKKVIIFAEDVAASGGYLIACAGDEIYANQSSIVGSIGVIYSSFGFKDLINKIGVQRRVYTAGKNKSTLDPFMDEKKEDIERLKTIQLDLHKDFIEVVENSRSTKLKKDAGIELFSGEFWSGRKAKELGLIDGIGNADQVLREKFGEKIIIKKFEKAKGWLARKLSSENHTEQAISILEERSIWQRYGF

SEQ ID NO: 140851 - protein, 264 aa, Unknown
  Bacterial polypetide isolated from the Sargasso Sea
MFSSQTTIVSIDLKGMIASGSRAPLNMDNLNGLFSKLMKMKFHALSIVINSPGGSPVQSSLIAQKIREISAKKKVKCYCFVEDVAASGGYWLACAADEIYADVNSIVGSIGVISGGFGFTDLIKKIGVERRIFTAGEHKSFLDPFQKVNKKDEAKLIKLQKLIHQNFIDWVSSRRKKKLIDKNKKIIFSGSFWLANEAKDLGLIDGITSESAFFKSKFGEKTKIKKIKQPKSLKQKLGLGINSFNSEDLITKAKEELLFNKFGI

SEQ ID NO: 140852 - protein, 268 aa, Unknown
  Bacterial polypetide isolated from the Sargasso Sea
MLSFFKKKKIVPHIRLTGVIGNAGRFKQGIDFAGQEELIKKAFSIKKSLAVAISINSPGGSPVQSHLIYDFIRAQAKKNKKKVIVFAEDVAASGGYLIACAGDEIYANSSSIVGSIGVIYASFGFKDLIQKVGVERRVYTAGKNKSTLDPFVDAKEEDINRLKNIQLDLHKDFINVVETSRGAKLKKDKGIELFSGEFWSGSKSKELGLIDGIGNANQILKDKFGDDVIIKKFEKSKGWLAKRISSENQIDKIANVIEERSIWQRYGL

SEQ ID NO: 140853 - protein, 459 aa, Unknown
  Bacterial polypetide isolated from the Sargasso Sea
MASQADQILLHPEGGMFLEGFSVYRSYLRAFLEKIRVTMHVFRAGENKSAVEPYLRDDMSEEERRVVSRWLDGLWTTYTELAESGRELPAGTMDQFIASFATQLGASDNDLAETMLAAGWVDMLADHGQMEDALAEWVGATDADGYAEVIPLDRYVEDVKIRRSLREENLPLIAIIPVEGTLMPGDSEEGMAGSDTINGYIDTVLEAEDLAAIVLRVNSPGGSVFASDLIRRKLSEVADAGIPIVVSMGTVAASGGYWIAAEADEIWALPTTLTGSIGAFTAFPTIEGIVDYIGVTVDGVGTTPLAGAASFNRGLSTEMASIVQALAYGAYDDFIELVASGRDMSEQAVRDVADGLVWTGAEAVDRGLVDELGGLNEAVAAAARLADLEQWRTARTRVPPSFESLLLQELSGSFGIVATPLGGWFESLVSAFKPTIKSLSSMRDPMHVYAQCLACAPLL

SEQ ID NO: 140854 - protein, 265 aa, Unknown
  Bacterial polypetide isolated from the Sargasso Sea
MKLKIPFLPSKPSVAVVKMSGVISAGARSGLCDQTLSPILEKAFKKGQHQAVALLINSPGGSPVQSSLISSRIKRLAEKNEMPVFAFVEDVAASGGYWLACAADEIYADTGSIIGSIGVISAGFGFQELIDKYGVERRVHTAGKSKSMLDPFKKEKPEDIKRLKRILSEMHELFIKHVEETRGGKLTQEDNIFTGEIWLGEKAEQLGLIDGIGHLDTVIKEKFGKKTRIKIYGQKKNFLQRFGVNLINEAGVYLEERAAFARFGL

SEQ ID NO: 140855 - protein, 233 aa, Unknown
  Bacterial polypetide isolated from the Sargasso Sea
EIIKKAFSIKKSLVVAISINSPGGSPVQSHLLYKFIREQAKKHKKKVIVFTEDVAASGGYLIACAGDEIYANPSSIVGSIGVIYSSFGFKDLIKKIGIQRRVYTAGKNKSTLDPFLEEKEEDINRLKSIQLELHEEFINVVEESRAAKLKKDSGVELFSGEFWSGKKAKELGLIDGLGNADQILKEKFGEDVEIKKFEKSKGWLAKKLSSSEYQTEKLINILEERSIWQRYGF

SEQ ID NO: 140856 - protein, 212 aa, Unknown
  Bacterial polypetide isolated from the Sargasso Sea
MLEQLANQFLAMNAKSARNLVGSLSRLQKGGFSITDDQGAVDATEKPRISTASLGYGMSGRNYDSKPFHFIDGIAIIPVMGTLVHKLSYSSSWATGYNVIVGMFDAANADPDVEGILLAINSPGGTVAGCFDATDHIAQNKGDKPVWAIYDDMACSGAMCIASVADKRLTTQTAISGSVGVVQIHASYEEMLAESGLAVTLIYSGSHKVDGN

SEQ ID NO: 140857 - protein, 122 aa, Unknown
  Bacterial polypetide isolated from the Sargasso Sea
MFSIFKKKKIIPHIKLNGVIGNVGKFKQGIDFAGQEEIIKKAFSLKKSPAVAISINSPGGSPVQSHLIHDYVKQQAKKHKKKVIIFAEDVAASGGYLIACCGDEIYANQSSIIGSIGVIYSS

SEQ ID NO: 140858 - protein, 271 aa, Unknown
  Bacterial polypetide isolated from the Sargasso Sea
MFKRIFSKNTSIPVLRLSGIISSQSGLTGSGLAINNLEKLIDKLFADKKSPVVCLIINSPGGSPTQSSLIAKRIIDLAKEKNKKVLAFVEDVAASGGYWLACAADEIYIDQNSVIGSIGVISPGFGFVDLLKKVGIERRVYTSGKSKSFLDPFKEEKKEDIDRLKNIQEQIHDNFINYVKNRRASKLDQNKLDDIFSGLFWVGNKAIDLGLADGIGAIKPILEEKFGKKIKIKIISQKKSFLQRRFSSSIFNSDEILIKIEERIMFSRFGL

SEQ ID NO: 140859 - protein, 269 aa, Unknown
  Bacterial polypetide isolated from the Sargasso Sea
MFSFFKKKKIISHIKLSGIIGNVGKFRQGIEYSSEEEIIKKAFSVKKALAVAIIINSPGGSPVQSHLIYKLIKEQSKKTKKKVIVFAEDVAASGGYLISCAGDEIYANSSSIIGSIGVISASFGFKNLIEKIGIERRVYTAGKNKSTLDPFLDEKDEDINRLKNIQLEIHQDFIDVVEESRKEKLNKNSGIELFSGEFWAGKKAKELGLIDGLGNAEQILREKYGDDLEIKKFGKSKGWLSKKLSSSENFTDKVISLLEERSIWQRYGL

SEQ ID NO: 140860 - protein, 287 aa, Unknown
  Bacterial polypetide isolated from the Sargasso Sea
MKFLKRLIPFRKRDPQVSVIRLSGIIGSAGNFNRGLNLKSVESNIEAAFDQKNASAVALIINSPGGSPVQADLIQKRIRDLADEKDKPVFVFCEDVAASGGYWIALAANEIYANASSIIGSIGVVSAGFGFTEAISKIGVERRIYSTGDKKGMLDPFQPENSDHVAHLKSLQGEIFHLFQDWVKSRRGAKLKGSSEELFSGAFWTGIKAKELGLIDGLGDMRTIMRERFGENVKFKIFEKKAGFLSRFGLSGKMESGSASALIDDFLDGIEARALGTDLGYEISPTR

SEQ ID NO: 140861 - protein, 611 aa, Unknown
  Bacterial polypetide isolated from the Sargasso Sea
MSKVKSIWSKADAFLSTTRKLILNTFTVLVLIFVTVAIFGAFGAMFTGDEEIDTENKVLWFKPIGVVVDNATSSAPSFDDIFASNSVKQHELDDLLKVLDNAATDESLAAVYINVSELGMYYASAFEIANAVKNIKDNGKRVIAYAEDYGNAAYLISSQATDVMINNYGQVSAFGFARKREYYKDLYKNIKLNYHVFVAGDYKSGPEPYTRTSMSEEDKLAWNEYANPLWEKMTNMIETSRNLPKGTMQQYGDSIWDLSIENPETAEIALNVGLVDQIVTREELRHWMFEEFPNEENDKNEYPDAVYIYEYLSTIEEEEKVSKNKIAVINVEGAITTGEATYNIAGSDTIVSNIRKAIKDENVKALVLRVNSPGGSVLASELIINSLNEFKETGRPIVSSMGDIAASGGVWVTTLSDEIWAKPETLTGSIGVYGLIPTLDGIYEWAGIQVDGVSTTKAGEWDSRLAMPDYVNKAIQASIDNSYDKFVSKVAENRMMPYKEILAVAGGRIWSGQKALELGLVDRIGNIKDAIESSAELADIDDYEVVSYEKPMDPFEIILSELLDNLDVRVNVDKNIASLLKIINSDYKFIDKEKDINIASYCFQCEFLEAK

SEQ ID NO: 140862 - protein, 136 aa, Unknown
  Bacterial polypetide isolated from the Sargasso Sea
MSFISSKTRINIVGLRGVIGDLGRFQKGLTLENCASILDKAFSFKKPSVVVIKINSPGGSPVQSELIHNRIRNLSKKNNVKVITIAEDVAASGGYMLMCAGDILIANKSSIVGSIGVISASFGFKKLIDKLGIKRR

SEQ ID NO: 140863 - protein, 154 aa, Unknown
  Bacterial polypetide isolated from the Sargasso Sea
MFKKIFSSTVDIPTLRLSGVIGQAGFMRSGLSSSNLDKLITKLFSDKKAPAVALIINSPGGSPTQSSLIAKKILELANRKKKKIYAFVEDVAASGGYWLACIADEIYIDENSIVGSIGVISPGFGFVNLIKKAGIERRMYTSGKSKSFLDPFQK

SEQ ID NO: 140864 - protein, 268 aa, Unknown
  Bacterial polypetide isolated from the Sargasso Sea
MFSIFKKKKIIPHIKLNGVIGNVGKFKQGIDFAGQEEIIKKAFSLKKSPAVAISINSPGGSPVQSHLIHDYVKQQAKKHNKKVIIFAEDVAASGGYLIACCGDEIYANQSSIIGSIGVIYSSFGFTELISKIGVQRRVYTAGKNKSTLDPFMKEKDEDIERLKNIQLDLHKDFIEVVEKSRGTKLKKDMGIELFSGEFWSGRKAKELGLIDGIGNADQILKEKFGDDVIIKKFEKAKGWLARKLSSESSTEQVINILEERSIWQRYGF

SEQ ID NO: 140865 - protein, 87 aa, Unknown
  Bacterial polypetide isolated from the Sargasso Sea
MNYSEEFKKYATKHHGVNSMYYDKILSSMTPYIIEERQLNVAQMDVFSRLMMDRIIFLGTAINDSVANIIQAQLLFLESTDKEKDIQ

SEQ ID NO: 140866 - protein, 268 aa, Unknown
  Bacterial polypetide isolated from the Sargasso Sea
MNIFSSKISINVVSLRGVIGDLGRFQKGLTIDNCSSLLERAFTFKKPKIVIININSPGGSPVQSELIYNKIRELAEKNKTKVITVAEDVAASGGYMLMCSGDYLIANKSSIVGSIGVISASFGFKKLIDKLGIKRRVFTKGDRKSFLDPFEEVSKKDINKLIKVQDSIFENFKNLVSKNRKKKIKPSQVFNGEFWTGEQAKSLGLVDSNEELNVYLSKTYGKNLKIKKIEGKKSFVKNLLGSSSPSNDLVDHLFERLNESSYWSKYGL

SEQ ID NO: 140867 - protein, 298 aa, Unknown
  Bacterial polypetide isolated from the Sargasso Sea
ELNLVYYRPYLASFDDELPSKSKNEIKVVTVEGTIMGGDVLFGQAGSKGVVAMLKEAHEDEETKAIVLRVNSPGGSVVDSDYMRWEIKKAQDKGIPVIVSMGSLAASGGYWISSLADKIYAEADTITGSIGVYGTLFSFEKIYDWMGINYDGYSTTKYGAFDFTAMDWPEEFSAAFKAGIDQIYVDFTTQTSIDRDIPIEKVREIARGKVYSGEMALEIGLVDEIGTLHDAVEFAASQAELEDYKLDYVKPPAAAPVNPFEVPSLIKSYFEGQTGFNLENRNMYNNIKIYCLECEAVN

SEQ ID NO: 140868 - protein, 210 aa, Unknown
  Bacterial polypetide isolated from the Sargasso Sea
MLKSLFSKSINIPTLRLSGVIGQSGLTKSGLNINSLDKLIDKLFMDKKCKAVALIINSPGGSPTQSSLIAEKIIKKSKEKNKKIITFVEDVAASGGYWLACAGDEIYININSIVGSIGVISPGFGFVDLLKKIGVERRVYTSGKSKSFLDPFKDAKKEDIDRLKNIQEQIHDNFINYVKSRRGSKIKEKDFDEIFSGLFWVGQKAIDLGL

SEQ ID NO: 140869 - protein, 268 aa, Unknown
  Bacterial polypetide isolated from the Sargasso Sea
MFSFFKKKKIVAHLKLSGVIGNAGKFKQGIDFAGQEELIKKAFSLKKAACVAISINSPGGSPVQSHLIYSFIRQQAKKHKKKVIVFAEDVAASGGYLISCAGDEIYANSSSIIGSIGVIYSSFGFTELIKKIGVERRVHTAGKNKSTLDPFLEEKNEDIERLKNIQLDLHKDFIDVVEKSRGSKLNKSDVELFSGEFWSGSKAKNLGLIDGIGDAHEILKDKFGEDVIIKKFEKSKGWLSQKLSSSSNQVDQIASILDERSIWQRYGF

SEQ ID NO: 140870 - protein, 115 aa, Unknown
  Bacterial polypetide isolated from the Sargasso Sea
MISFFRKKKIVPHIKLSGVIGNVGKFKQGIDFSGQEEIISKAFTLKKAPCVAITINSPGGSPVQSHLIYNFIRQQAKKNKKKVIVFAEDVAASGGYLIACAGDKIYANSSSIIGS

SEQ ID NO: 140871 - protein, 614 aa, Unknown
  Bacterial polypetide isolated from the Sargasso Sea
MSKIKSIWSQADKFLTLARKILVNTVTAIVLIVITFSILGGVGSMFSPEEEIDTENKVLWFKPIGVVVDSSVNSSPSFSFDSLALGGGTVQQHELEDLLKVLDMAAEDESLAAVYVNVSELGMYISSAFELANAVKNVRDSGKNVIAYAENFGNNAYLISSQANTVMINEYGGVNAVGFSRKREFYKDLYEKINLNYNVFVAGDFKSGPEPYTRNSMSEEDKLAWSEFADPLWNKMKDMMEAGRDLQEGTIQEYGDTLWERSLDNPEPAQIALELGMVDMVVTREDLRHWMYDKFPNDENDKNELPDSISIYEYLSIFEEDTIDSDNKIAVVNVEGAITTGEVQYGIAGSDTIVTNIRNAIRDDSVKALVLRVNSPGGSVWASELITNALNEFKSTGRPIVTSMGDIAASGGVWVTTYSDEIWAKEETLTGSIGVYGIVPTLDGIYNWAGIQVDGISSTKAGEWDERLAMPSYVTKSIQAGIDHTYDKFVSKVAENRNMAYKEVLSIAGGRIWSGKKALQLGLVDKIGDLEDAVDSAAQFAGIDDYEIVSYAKEMDPFELFLNELLDNLDSKVEINEDLQALGKFLDARYKFIDPNKKINTAVYCFECEYFNSQ

SEQ ID NO: 140872 - protein, 274 aa, Unknown
  Bacterial polypetide isolated from the Sargasso Sea
MLLSPVFKKFFSKNINIPTLRLTGVIGQGGIAKSGLTITGIEKLIEKLFADKKAPAVALIINSPGGSPTQSSLIAERIINLSKEKNKKVFAFVEDVAASGGYWLACAADEIYLDINSIVGSIGVISPGFGFVDLIKKIGIERRVYTSGKSKSFLDPFKEEKKEDIDRLKNIQEQIHENFIDYVKRRRGAKLSSSNEDEVFSGLFWVGKKGVELGLADGLGSINEVIKEKFGKKAKIKIIDQKKSFLQKRLSSSINSNDIFNRLEEMIMWSRYGL

SEQ ID NO: 140873 - protein, 270 aa, Unknown
  Bacterial polypetide isolated from the Sargasso Sea
MFSFLKKKIIIPHIRLAGVIGSAGRFKQGIDFSGQQEIIKKAFSFKKAKSVAISINSPGGSPVQSHLIHDYIKQLAKKNKKKVIVFAEDVAASGGYLIACAGDEIYANSSSIVGSIGVISASFGFQDAIKKIGVQRRVYTAGKNKSTLDPFREEKEEDIERIKKLQLELHSDFIDVVKKSRGPKLKDPEKNNTFTGEFWSGSASMKLGLIDGIGNAEQILREKFGEDIVIKKLEKQKGFIAKKLSFSIDNQIDNIASVIEERALWQKFGL

SEQ ID NO: 140874 - protein, 145 aa, Unknown
  Bacterial polypetide isolated from the Sargasso Sea
MFSIFKKKTVVPHVRLTGIIGSAGRFKQGMELANQRDILKKAFSVKKISHVAISINSPGGSPVQSHLIYSYIRELADKKKVKVLIFAEDVAASGGYFIACAGDEIFANSSSIIGSIGVISASFGFKDLIQKIGVERRVYTAGKNK

SEQ ID NO: 140875 - protein, 152 aa, Unknown
  Bacterial polypetide isolated from the Sargasso Sea
AEKLLALSFESDEPITMYIGSPGGHVESGDTIFDMIRYIKPRVRTVGTGWVGSIATHIYLAPDKENRFALPNTRFLIHQPHGGFGGDASDIEIHAREIVKTRERINGVIAAQTGQSLDKVAEDTQRDYWMSAEESVDYGLVGKIISNIDDLS

SEQ ID NO: 140876 - protein, 233 aa, Unknown
  Bacterial polypetide isolated from the Sargasso Sea
LLRKAFSFKKPNHVAISINSPGGSPVQSHLIYSYIRQLAEENKTKVIIFAEDVAASGGYFIACAGDEIYANSSSIIGSIGVITASFGFKEMIKKIGVERRIYTAGKNKSTLDPFVEEKEEDVQRLKKLQLELHGHFIKVVEKSRGKKLKDPEKNNIFTGEFWSGETALKLGLIDGIGNADQTLREKFGKDVIIKKFEKPKGFIAKKLSSSIENQIDNLANVLEERSMWQKFGL

SEQ ID NO: 140877 - protein, 236 aa, Unknown
  Bacterial polypetide isolated from the Sargasso Sea
MFSFFKKKIIVPHIRLSGVIGSAGRFRQGIDFSGQQEIIKKAFSFKKAKNIAISINSPGGSPVQSHLIHDYIKQLAKKNNKKVIVFAEDVAASGGYLIACAGDEIYANSSSIVGSIGVISASFGFQDAIKKIGIQRRVYTAGKNKSTLDPFKEEKEDDIQRIKKLQLELHSDFINLVKKSRGAKLKEPEKNNIFTGEFWSGSASLKLGLIDGLGNAEQILREKFGENIFIKKLEKP

SEQ ID NO: 140878 - protein, 270 aa, Unknown
  Bacterial polypetide isolated from the Sargasso Sea
MFSIFKKKKVVPHVRLTGVIGSAGKFKQGMELANQRDILKKAFAVKKITHVAISINSPGGSPVQSHLIYSYIRQLAEKNKVKVIIFAEDVAASGGYFIACAGDEIYANSSSIIGSIGVISASFGFKDLIQKIGVERRVYTAGKNKSTLDPFKEEKEEDIKRLKTIQLELHEDFIKVVQNSRGSKLKDPEKNNIFTGEFWTGKTSLKLGLIDGIGNADQVLKEKFGEKVIIKTFEKPKGFIARKLSSSVKDPVEKLVNLIEEKSMWQKFGL

SEQ ID NO: 140879 - protein, 340 aa, Unknown
  Bacterial polypetide isolated from the Sargasso Sea
MIFFSVFFRTLGFLSALLIFIIIINLVLNFSNELEKKQFVMTEGIPSSNNIIANINLNGPIFNNNSNVLGNNFYDYINPSQVKSYLEELKELEIKVLIININSPGGTVSATAELEQIIYEFKEHTNTKVYFFTKEILASGGYWVATTADKIFASYGSIIGSIGVSGPSWFYYNTPTSLSSGIFGQTIETKEGIEVFNQNAGEGKDLFNPFRRPSSDEIKHLQNIVDDVYNDFITKVSKSRKIEISNLKNDIGALIYSSNQAKNNFLIDDILNYETLIKLIAKENKFDDYKIYENKVSNSILTNLLVKYENQTDYKYSLENICRNLETNINVVIPVYLKEC

SEQ ID NO: 140880 - protein, 241 aa, Unknown
  Bacterial polypetide isolated from the Sargasso Sea
GLAINNLEKLIDKLFADKKSPVVGLVINSPGGSPTQSSLIAKKIIDLAKEKNKKVLAFVEDVAASGGYWLACAADEIYIDQNSVIGSIGVISPGFGFVDLLKKVGIERRVYTSGKSKSFLDPFKEEKQEDIDRLKNIQEQIHDNFINYVKDRRGSKLDQNKLDDIFSGLFWVGNKAIDLGLADGIGAIKPILEEKFGKKIKIKIISQKKSFLQRRFSSSIFNSDEILNKIEERIMFSRFGL

SEQ ID NO: 140881 - protein, 264 aa, Unknown
  Bacterial polypetide isolated from the Sargasso Sea
MTNLNILIVEGNDPKNNEFFVKAAKASCSENFKNLVLKLEPSSKVKIINPAKDNDTKTALENIKNYDGLIFTGGAMRLNDMSDEIKKHLNFASNCFKYECKILAICWGLQVCCAAAGGKVAPGKNGAHIGIATDIEINDEGKKNPIYKDKKSKFTSPAFNYDEVCEIPDGATLLSSDKVNKVMGLHFKQEKSEIWGLQYHPDYEYWQMINLSIGRKDRILQNNHFDNENDFQNHLNYIKEEEKKLDFENRTFEIRNWLNYLKVS

SEQ ID NO: 140882 - protein, 415 aa, Unknown
  Bacterial polypetide isolated from the Sargasso Sea
MKYLKIIAFTLTSLFFSKLVVAETAPGYGSWDDVLKAADGGQVNVYMWGGSDAINGFVDDFYGVPLKEKYNITLNRVPLAGTVDAVNQVLSEKEAGVTGDGGSIDLIWINGENFWTLKQAKLLYGPFAAALPNSEFVAWDNPAVNLDFGRPVDGMESPWSSAQFHFMYDSARNNYDDMPRSYAELSDWIASNPGRFTYIRPGKGGFVGTRFVKQIFFELSGGQEQWVGPFNQALYDKWAPKVWELLNSWEKDLWRNGETYPKDNAEMHSLFANGEVDLDFTQSPRGAGPTNTAGTTPPTSRAFAFYENMIGDFNYWAIPYNAPNKAAALVYANLVLEPELQAAQVQPANGFCCGWGISTAKVTDAAGKAAIEEAQNNLGDAAEDQNILAKALVSDIAAEYQDLIEADWEANVLLK

SEQ ID NO: 140883 - protein, 119 aa, Unknown
  Bacterial polypetide isolated from the Sargasso Sea
MLSFFKKKKIIPHIKLTGVIGNVGKFKQGIDFSGQEDIIRKAFSLKKAPCVAITINSPGGSPVQSHLIYSLIRQQAKKNKKKVIVFAEDVAASGGYLIACAGDEIYANSSSIIGSIGVI

SEQ ID NO: 140884 - protein, 64 aa, Unknown
  Bacterial polypetide isolated from the Sargasso Sea
MFKKIFSKNVQIPTLRLSGVISAQSGITSSSLSINTLEKLIEKLFSDKKSPAVAIIINSPGGSP

SEQ ID NO: 140885 - protein, 463 aa, Unknown
  Bacterial polypetide isolated from the Sargasso Sea
KFIDETYKVSFKFNRKTYYGFKGDTLASALLANDIHLVGRSFKYHRPRGIMTAGSEEPNAIVQLHSNTSRTEPNVRATEIEIYEGLEASSQNCWPTVNFDIGGINNFLSPVLPAGFYYKTFMWPASFWEKYEYFIRKSAGLGKSPKESDPDIYEHKYIHCDVLIIGAGISGIMAAKIAAKNGFKTLLVDEKPYLGGSTIYQNSEHFKINNQLSSSWLEKEINEIKKIKNLEIKTRTSVAAFHGYNFLLARENLTDHLPLEQRNNKTRHRLLKIRAKKVITATGSLERPLIFNNNDRPGILLSSAIDKYANLFGVVCGEKNVLFTNNDSAYETAISLYQKGINIEAIIDNREEIDSKLIKEIEKNNIKIHKGYTIVNTFGYKRIKKVSIMKLSKDGQKVIGSKEYINCDCLGITGGWTPAVHLFTQSGGKLKFRDEDQVFIPNIYPSDQVSIGSCNGDFTLDEI

SEQ ID NO: 140886 - protein, 145 aa, Unknown
  Bacterial polypetide isolated from the Sargasso Sea
MFSFFKKKKIIPHIKLSGVIGNVGKFKQGIDFAGQEEIIKKAFSIKKAPAVAISINSPGGSPVQSHLIHDFIRLQAKKNNKKVIIFAEDVAASGGYLIACAGDEIYANKSSIVGSIGVIYSSFGFKDLINKIGVQRRVYTAGKNK

SEQ ID NO: 140887 - protein, 191 aa, Unknown
  Bacterial polypetide isolated from the Sargasso Sea
MFSIFKKKKIVPHVRLTGIIGSAGKFKQGMELANQRDILKKAFSVKKISHVAISINSPGGSPVQSHLIYSYIRQLAEKHKVKVIIFAEDVAASGGYFIACAGDEIYANSSSIIGSIGVISASFGFKDLIQKIGVERRVYTAGKNKSTLDPFKEEKEEDIKRLKTIQLELHEDFIKVVQKSRGSKLKGSRKK

SEQ ID NO: 140888 - protein, 247 aa, Unknown
  Bacterial polypetide isolated from the Sargasso Sea
HQILGRKKGLNIQDYNKLIEQAFQNKRNKAVVLVINSPGGSPVQSEFLADKIINLSKEKNIPVITFVEDVAASGGYWLACAADEIFASKASIIGSIGVISAGFGFDKALNKIGVDRRIYTAGKNKSLLDPFSPENKDDVKRLKSLQTKLHDHFISFIKLRRGKKIDLKNKDLFSGMFWSGQEALELGLIDGIGQVNSILKDRFGNNIKIKEFQNKKRFFDLGNLISVTFEVISNKIEEKLIFKKFGL

SEQ ID NO: 140889 - protein, 132 aa, Unknown
  Bacterial polypetide isolated from the Sargasso Sea
MFKKFFSRSTQIPTLRLSGIIAAQSGITGSGLAINNIEKLIDKLFSDKKSPAVALIINSPGGSPTQSSLIAKKIINLSKEKNKKVIAFVEDVAASGGYWLACAADEIYIDQNSVIGSIGVISPRLWICRSIK

SEQ ID NO: 140890 - protein, 266 aa, Unknown
  Bacterial polypetide isolated from the Sargasso Sea
FKKKTIIPHIRLSGVIGSAGRFRQGIDFSGQQEIIKKAFSFKKAKNIAISINSPGGSPVQSHLIHDYIRQLASKNKKKVIVFAEDVAASGGYLIACAGDEIYANSSSIVGSIGVISASFGFQDAIKKIGIQRRVYTAGKNKSTLDPFKEEKDEDIQRIKKLQLELHSDFINLVKKSRGSKLKEPEKNNIFTGEFWSGSASLKLGLIDGIGNAEQILREKFGENIEIKKLEKPKGFIARKLSASLDGQIDSIIEAVEERALWQKFGL

SEQ ID NO: 140891 - protein, 500 aa, Unknown
  Bacterial polypetide isolated from the Sargasso Sea
MNQIKSIFSWLNSFLEKARIIMLNIATAIVLIFFIILIFGPITSIESEVKDPSGRVLFIDPVGTVVDQEVFSSDFLLEIATGSSTEQIQTRDLIQLIRAAGQDEDVPAVLVDFSSTSFAGPTTAINIAKELKSLRDSGKRVIAFNDRLSTTSYLMASQASEIWLHPVGSISIRGIGGVRAYQKELYENLKINFHNYSQGDFKSAVESNTRTNMSENDKMQREDLLNPIWDEMKFLMAQGRGIEINDLQSFADEYIGFFGEAEIGNIAYALEKNIIDGTKSFPEFRQYMIEEFGLDEEAETETYKTISYNDYKKQINKDYSNSDNQIAVITVEGVIMEGEIMQGVAGANGIVNQIRTAHEDENTKAIVFRVNSPGGSVIASEMMRDELIAAKRKGINVIISMGDYAASGGVYISTPADYIFAEPTTITGSIGVAIAIPTFENAMDYIGVNFDGVFTSKYAGWDPTQAIDDNLDKIFESWGADVYDRFVNFVAESRSKSYED

SEQ ID NO: 140892 - protein, 268 aa, Unknown
  Bacterial polypetide isolated from the Sargasso Sea
MFSFFKKKKVIPHIKLSGVIGNVGKFKQGIDFAGQEEIIKKAFSIKKSPAVAISINSPGGSPVQSHLIHDFIRSQANKNKKKVIIFMEDVAASGGYLIACAGDEIYANQSSIVGSIGVIYSSFGFKDLIQKIGVQRRVYTAGKNKSTLDPFMDEKQEDIERLKNIQLELHKDFIDVVEKSRSKKLKKDKGIELFSGEFWSGRKSLELGLVDGIGSADQILKEKFGENVIIKKFEKSKGWLAKRLASEKNVDQLMTILEERSIWQRYGF

SEQ ID NO: 140893 - protein, 84 aa, Unknown
  Bacterial polypetide isolated from the Sargasso Sea
MRFSLPNARIMVHQPSGGYQGQVTDIEIQTNEIKKTKNRLNEIYSKHTGKKISEISKIMERDKYFSPEEAIQFGLIDKIIESRK

SEQ ID NO: 140894 - protein, 231 aa, Unknown
  Bacterial polypetide isolated from the Sargasso Sea
MIKKAFSLKKAVSVAISINSPGGSPVQSHLIYSFIRQQAKKQKKKVIVFAEDVAASGGYLISCAGDEIYANSSSIIGSIGVIYSSFGFTELIKKIGVERRVHTAGKNKSTLDPFLEEKNEDIERLKNIQLDLHKDFIDVVEKSRGSKLNKSDVELFSGEFWSGSKAKNLGLIDGIGNAHEILKEKFGEDVIIKKFEKSKGWLSQKLSSSSNQVDQIASILDERSIWQRYGF

SEQ ID NO: 140895 - protein, 270 aa, Unknown
  Bacterial polypetide isolated from the Sargasso Sea
MFSIFKKKKVVPHVRLTGIIGSAGRFKQGMELANQRDILKKAFSVKKISHVAISINSPGGSPVQSHLIYSYIRELADKKKVKVLIFAEDVAASGGYFIACAGDEIFANSSSIIGSIGVISASFGFKDLIQKIGVQRRVYTAGKNKSTLDPFVDEKEEDVKRLKNIQLELHADFIKVVETSRGSKLKDPEKNNIFTGEFWTGKSALRLGLIDGIGNADQILKEKFGDKVIIKNFEKRKGFLAKKLSSSISDPFDKIINNLEEKSMWQRFGL

SEQ ID NO: 140896 - protein, 330 aa, Unknown
  Bacterial polypetide isolated from the Sargasso Sea
MADQPNSPDSSSRPDSREPNWERAALERIALAAVKEQRAARRWKIFFRFAFLAVFVLFAFALIDFSSDSKFSSSGRHTALVTIDGEIAAGVNANADDINTALDAAFEDDGTAGVVLRINSPGGSPVQAGMVYDEIRRLRAKHPDKPLYVVVTDMCASGGYYIASAADKIFVDKASIVGSIGVLMDGFGFTGLMGKLGVDRRLHTSGENKGFYDPFSPETPKMDAHAQALLDQVHAQFIKAVKDGRGKRLHETPDMFSGLFWTGEKSVELGLADGYGTTDTVARDVLKAPDLVDYTVKESLTNRVARKFGAAVGGAAMKALTTGGASVSLR

SEQ ID NO: 140897 - protein, 51 aa, Unknown
  Bacterial polypetide isolated from the Sargasso Sea
IKAKLNEILAKHSGQKVDKVAKDSDRDNFMSPDEAVKYGLIDNVVDSRLKE

SEQ ID NO: 140898 - protein, 37 aa, Unknown
  Bacterial polypetide isolated from the Sargasso Sea
MDSNKIFSQLVPMVVEQTGRGERAFDIYSRLLKERII

SEQ ID NO: 140899 - protein, 40 aa, Unknown
  Bacterial polypetide isolated from the Sargasso Sea
MKKEPSNYVVPTVIENTNRGERAFDIYSRLLKDRIIFLGT

SEQ ID NO: 140900 - protein, 80 aa, Unknown
  Bacterial polypetide isolated from the Sargasso Sea
MNEEINSLIPMVVEQTPRGERAFDIFSRLLKDNVIFAVGPIEDHMANLINAQMLFLESENPNKDIYLYINSLWGINYIQD

SEQ ID NO: 140901 - protein, 78 aa, Unknown
  Bacterial polypetide isolated from the Sargasso Sea
IMIHQPLGGARGQASDIRIQADEILFLKERLNTELSERTGKDYETIKEDTDRDFYMSPNEAVEYGLIDLVLDKKPIKV

SEQ ID NO: 140902 - protein, 271 aa, Unknown
  Bacterial polypetide isolated from the Sargasso Sea
MSLELELFEERRRRTRRKSFFWGALLSGGLVLTAVLILNIDSVSYPHIAVFQVNGEIQDDPDRDNLLNEIAEDVNVRAVLLRINSPGGSVVGSEALYESIRDISKKKPVIALIGGIGASGAYIAALGSDYIFARGNSLVGSIGVMVQYPDVSELANRLGITVDVISSSDVKRSPHPLFPMDQVSRGFQEALIKDSFSWFKELIADRRGVSSEVLSEVSQGQLFTGRMAVDLDLVDGIGGQSDALRKLSSENEAFSNLLVREWVAEGSSGFP

SEQ ID NO: 140903 - protein, 211 aa, Unknown
  Bacterial polypetide isolated from the Sargasso Sea
MFSWFKNKSKKLKSSYDSLVNFQTPNLLTRVIHLGGEINDELCNKVVSQMLYLDAEDNSKPIYLKINSPGGSVTNALAIIDTIKYVKSDVVTICQSVSGGIATLLLAGGKKGSRFSTIPATIQVGEISNERDESGTATDAEKREIVKICYLIDKTLCEYTGQPIQMIKKIKKISRISPWEAIEYGLIDQILKSNTELYQYISHKKDFKYGK

SEQ ID NO: 140904 - protein, 90 aa, Unknown
  Bacterial polypetide isolated from the Sargasso Sea
MTRESFVPQSASAYGDYQRQRTMTLGDLLLENRIILLQGEIYDGNANELVMKLLYLQSENRRKDINFYINSPGGSVTATMAIYDTMQILS

SEQ ID NO: 140905 - protein, 77 aa, Unknown
  Bacterial polypetide isolated from the Sargasso Sea
SRIMVHQPSSGSQGQATDIQIHAKEILDLKNRLNKIYSKHTGKSVDEISTALERDNFMTAEEAKKFGLIDSVVEKRK

SEQ ID NO: 140906 - protein, 111 aa, Unknown
  Bacterial polypetide isolated from the Sargasso Sea
SSEIMTICVGQAASAGSLLLTAGSKDMRFSLPNSRIMVHQPSGGYQGQVTDIEIQTNEIKKTKEKLNQIYAKHTGNKIEDVEKIMERDKYFSPEEAVKFGLIDKIVENRKK

SEQ ID NO: 140907 - protein, 117 aa, Unknown
  Bacterial polypetide isolated from the Sargasso Sea
MTLCNIVSSKIMTICVGQAASAGSLLLTAGEKNMRFSLPNSRIMVHQPSGGYQGQVTDIEIQTNEIKKTKHRLNEIYSKHTGKKLDEISVIMERDKYFSPEEAIKFGLIDKIVENRK

SEQ ID NO: 140908 - protein, 77 aa, Unknown
  Bacterial polypetide isolated from the Sargasso Sea
VMIHQPLGSFQGQATDFDIQAKEILSIRARLNQILAKNTGQTIKKIESDTERDNFMTSDEALKYGIIDKILDARPED

SEQ ID NO: 140909 - protein, 287 aa, Unknown
  Bacterial polypetide isolated from the Sargasso Sea
MPFFNVFLRTLGFLIGITVFIILLNLLFYIFPEEKENFDFVEGNKESNNIIAILDLNGPIINNFNQSLVGDLFEYITPNRVKNYLSNLKKIKPNILIIKINSPGGTVTATASLEKIINDFKKENKIEIYFYSNEILASGGYWVATSGDKIYANYGSIIGSIGVSGPSWYYFDKPISVSRGIIGQKIETKNGIKVYDQNAGNSKDLYNPFRKPKDEELNHLNEIVMEIYDDFLIKVSNARKIEINILKNEIGALIYSATQAKKKFLIDDILDIDLLIDRIIKDKKFID

SEQ ID NO: 140910 - protein, 90 aa, Unknown
  Bacterial polypetide isolated from the Sargasso Sea
AAGEKGKRYSLPNSRIMVHQPSAGFQGQATDIQIHAKEILSLKERLNTIYSKHTGKSVEEIAKALERDNFMTADDAKKFGLIDSVVEKRK

SEQ ID NO: 140911 - protein, 83 aa, Unknown
  Bacterial polypetide isolated from the Sargasso Sea
NSRIMIHQPLGGFQGQASDFEIHAKEMLLVKKRVNEILSKHTGKTLKKVEQDTDRDNFLNAKEAKSYGIIDEILDTRPKTNGK

SEQ ID NO: 140912 - protein, 96 aa, Unknown
  Bacterial polypetide isolated from the Sargasso Sea
VRVPQGSVFTLPNSTIHMHQALGGAQGQASDIEIAAKEILRMQDKIRTILSTHTGQSYEKIARDSDRDFYLPAEEAKEYGLVDEVLGATAGAEKAK

SEQ ID NO: 140913 - protein, 102 aa, Unknown
  Bacterial polypetide isolated from the Sargasso Sea
CTGIAASMAAVLLCAGEKGKRSGLTHSRVMIHQPLGGAQGQASDIEITAREIGKLKKELYEIIASHTGQKYDKVYEDSDRDYWMKAPEAKKYGMIDEVLSKK

SEQ ID NO: 140914 - protein, 130 aa, Unknown
  Bacterial polypetide isolated from the Sargasso Sea
YAGLGIYDIMQHISCPVHTYCVGLAASMGSLLLSAGAPGCRHSLPHSRIMIHQPLGGAQGQCSDIQIQANEIQDLKNQLNGIYIKHSSKKEMTIEKIELETDRDNYLSPQQAIDMGLIDNIIDKSSPSKG

SEQ ID NO: 140915 - protein, 59 aa, Unknown
  Bacterial polypetide isolated from the Sargasso Sea
MSRDFEEKMNSLIPMVVEQTSKGERAYDIYSRLLKERIVFLVGPVNDAVASLVTAQLLF

SEQ ID NO: 140916 - protein, 63 aa, Unknown
  Bacterial polypetide isolated from the Sargasso Sea
MSRDLEEKMNSLIPMVVEQTSKGERAYDIYSRLLKERIVFLVGPVNDAVASLVTAQLLFLESE

SEQ ID NO: 140917 - protein, 51 aa, Unknown
  Bacterial polypetide isolated from the Sargasso Sea
RSKLNQILSKNTGQTIKKIQADTERDNFMQADDAKNMVLSIRYSYPESKNS

SEQ ID NO: 140918 - protein, 95 aa, Unknown
  Bacterial polypetide isolated from the Sargasso Sea
GSFLLAAGENGKRFSLPNSRIMVHQPSAGFQGQATDIQIHAKEILSLKDRLNKIYSKHTGKSVKEISEALERDKFMTAEEAKEFGLIDSVVEKRK

SEQ ID NO: 140919 - protein, 41 aa, Unknown
  Bacterial polypetide isolated from the Sargasso Sea
MSRELEEKMNSLIPMVVEQTSKGERAYDIYSRLLKERIVFF

SEQ ID NO: 140920 - protein, 79 aa, Unknown
  Bacterial polypetide isolated from the Sargasso Sea
MPNSRVMIHQPLGSFQGQATDFDIQAKEILNIRSRLNEILSKHTGQTLKKIQNDTERDNFMTSSDALKYGIIDEILESR

SEQ ID NO: 140921 - protein, 46 aa, Unknown
  Bacterial polypetide isolated from the Sargasso Sea
MINPHDLQMNTLVPMVVETTNRGERSYDIYSRLLKERIIFLTGGGR

SEQ ID NO: 140922 - protein, 63 aa, Unknown
  Bacterial polypetide isolated from the Sargasso Sea
SATDIEIHANEVLSLKKRLNEIYSSHTGKSVDEIKSALERDNFMTADVAQSFGLIDEVVEKRS

SEQ ID NO: 140923 - protein, 199 aa, Unknown
  Bacterial polypetide isolated from the Sargasso Sea
MSIEAEVFEQAKKRARRKGFLFALLLVFLILVTVIILNSFLDFERKGPHIARIKIDGPIFDDINLNRLIYELGLNSNVKALIVHINSPGGSVVGAESIFIALSELSREKPSVSVLGETATSGGYLIAAATDKIISRSNTLTGSIGVILQYPNFSKLLKNIGIDVNMIRSSDLKASINLFEQPTAKAIEKHQQVIDETFL

SEQ ID NO: 140924 - protein, 41 aa, Unknown
  Bacterial polypetide isolated from the Sargasso Sea
MKDIQSALIPMVIEQTPRGERSFDIYSRLLKERVIFLSGPI

SEQ ID NO: 140925 - protein, 28 aa, Unknown
  Bacterial polypetide isolated from the Sargasso Sea
MSNLVPMVVEQSSKGERAYDIYSRLLKE

SEQ ID NO: 140926 - protein, 190 aa, Unknown
  Bacterial polypetide isolated from the Sargasso Sea
MEKDEESQETDNLASKLLKSRTVVISQQVDAKLTSKVLSQLVLLEQEGDDQPVTVFINSPGGEIFSGFAIFDMLNFISCPVTTIVTGFAASMGSILSLAADRGRRYAMPQAKIMIHQPLLMGYQGRATECEIQAREILKTRDHLVKLYSEQTGKSNEEIKKALDRDNWFTAEEALENGLIDKVVHTRSEI

SEQ ID NO: 140927 - protein, 43 aa, Unknown
  Bacterial polypetide isolated from the Sargasso Sea
MTKIDEHMNALIPMVVEQTTRGERAFDIYSRLLKERIVFVVGP

SEQ ID NO: 140928 - protein, 62 aa, Unknown
  Bacterial polypetide isolated from the Sargasso Sea
KEVLSLKKRLNELYSKHTGQEVAAIEAALERDNFMSAEDAKKFGIIDSIQTKRSPQTDTKSE

SEQ ID NO: 140929 - protein, 136 aa, Unknown
  Bacterial polypetide isolated from the Sargasso Sea
GDINALFAIYDTSQYIRNDITTICLGQAASAAAVLLAAGTPGKRMALPHARVLLHQPYGQAMGQATDIELAAREIDRMRDLLEGILAHHTGQDLERIHTDTDRDFIMDAEAAKEYGIIDDVIDSREVAEDGPIRAA

SEQ ID NO: 140930 - protein, 99 aa, Unknown
  Bacterial polypetide isolated from the Sargasso Sea
ASSMGSFLLAAGEKGKRFSLPHSRIMVHQPSAGFQGQATDIQIHAKEILSLKERLNQIYSKHTGKSLKEISQALERDKFMTAEEAKNFGLIDSVVEKRK

SEQ ID NO: 140931 - protein, 31 aa, Unknown
  Bacterial polypetide isolated from the Sargasso Sea
MNDIQQALIPMVIEQTPRGERSFDIYSRLLK

SEQ ID NO: 140932 - protein, 61 aa, Unknown
  Bacterial polypetide isolated from the Sargasso Sea
MNLVPIVIEQSGKGERSFDIFSRLLRERIIFLTGAINDETASLICAQLLFLESENPEEPIN

SEQ ID NO: 140933 - protein, 72 aa, Unknown
  Bacterial polypetide isolated from the Sargasso Sea
HQPSAGFQGQATDIEIHANEVLSLKKRLNEIYSKHTGKSVDQIKEALERDNFMTPQNAKEFGLIDQVVEKRT

SEQ ID NO: 140934 - protein, 135 aa, Unknown
  Bacterial polypetide isolated from the Sargasso Sea
MRKDAPFHLRVSRRGRLSSNPSSAPGCVQVAYKVPGAYSADWVDLYNRLYRERILFLGQQVADDIANQMIGIMLYLDSEDNAKPITMYINSPGGSVTAGFAMFDTMRHIKSDVSAAPSFLCPARAYACVRARRPL

SEQ ID NO: 140935 - protein, 178 aa, Unknown
  Bacterial polypetide isolated from the Sargasso Sea
MSAKLLKSRTVIISQQVNSELSAKVLNQLVLLEQEDPKQGITVFINSPGGEIFSGFAIFDMLKFIECPITTVVTGFAASMGSVLSLAADEGRRFAMPQAKIMIHQPMLMGYQGRAADCEIQAKEILKTRDHLINLYSEQTGKDYEEIKQAIDRDNWFTSEEAMEFGLLDRIVKNRSEL

SEQ ID NO: 140936 - protein, 181 aa, Unknown
  Bacterial polypetide isolated from the Sargasso Sea
MDNLASKLLKSRTVVISQQVDAKLTSKVLSQLVLLEQEGEDQPLTVFINSPGGEIFSGFAIFDMLNFISCPVTTIVTGFAASMGSILSLAADKGRRYAMPQAKIMIHQPLLMGYQGRATECEIQAREILKTRDHLVKLYSEQTGKSHEEIKKALDRDNWFTAEEALEYGLIDKVVHTRSEI

SEQ ID NO: 140937 - protein, 34 aa, Unknown
  Bacterial polypetide isolated from the Sargasso Sea
MSNLVPMVVEQSNKGERAYDIYSRLLKERIIFNR

SEQ ID NO: 140938 - protein, 42 aa, Unknown
  Bacterial polypetide isolated from the Sargasso Sea
MNNKISEYMNNLVPMVVEQSNRGERAYDIYSRLLKDKDSICC

SEQ ID NO: 140939 - protein, 64 aa, Unknown
  Bacterial polypetide isolated from the Sargasso Sea
GQATDIEIHANEVLSLKKRLNEIYSKHTGKSIDEIKSALERDNFMTPDAAKEFGLVDKVVSKRE

SEQ ID NO: 140940 - protein, 178 aa, Unknown; identical to SEQ ID NO: 140935
  Bacterial polypetide isolated from the Sargasso Sea

SEQ ID NO: 140941 - protein, 549 aa, Unknown
  Bacterial polypetide isolated from the Sargasso Sea
WISRFLEKARIIMLNVVTAFVLIFFTIVIIGALTSLEPEVKDPSGRVLVIDPKGTVVDQEAFNSDFLFNIFTESSTDQIQTRDLIQLIRAAAEDEDIPAVFVDFSSTGFAGPTTAINIAKELKALRDSGKRVIAFNDRLSTTSYLMASQASEVWVHPVGSISVRGLGGMSPYQKELYENLKINFHNYSQGDFKSAVEPNTRTDMSENDRMQREAVLNPIWDKMKSLMAEGRGIESDDIQSFADDYVAFIGEAAIGNIAYAKANNIIDGTKSFPEFRQYMIQEFGLDEEAETETHKTISFIEYAKQIDEDFSDSDNQVAVITAEGAIMKGDISQGVAGANGIVKQIRSAHENKNTKAIVFRINSPGGSVIASEMMRDELFVAKGKGIDVIVSMGDYAASGGVYISTPADYIFAEPTTITGSIGVAIAIPTLENAMDHIGVNFDGVVTSKHGGWDPTKAIDEDLDKIFASWGIDVYDRFINFVAESRSQSYKEIKEIAGGRVWIATSAKKIDLIDEIGGIDNAITYAANMAELEDYKVEYYSEKLSSEEMI

SEQ ID NO: 140942 - protein, 319 aa, Unknown
  Bacterial polypetide isolated from the Sargasso Sea
MNYFFQVFSKTLGFLLAIIFLLVLISLFLFIFEGNKQKYFSYLEGNKNSSEIIAILNLNGPIISEPPNFNNYNIFQNLEVIYPSLIKEYLNELEQNNTKGIIISINSPGGSVSATQKIYNLVAEFKEKNNIPIYFHTKDILTSGSYWVALSGDKIFADYGSIIGSIGVRGPNWLYYNSPTMLSEGLFGRSVESKNGLKLFSNTAGMHKDIFNPFRKPTQKEMNKLQIMVDDIYSDFVNLVSINRKIEKNIIIDDIGAMIFNSKRAKINYLIDDEKNIDEIIELISKKLKLENGKILINKYEEKYNLFNLNYINFFNHKI

SEQ ID NO: 140943 - protein, 69 aa, Unknown
  Bacterial polypetide isolated from the Sargasso Sea
SAGYQGQATDIEIHANEVLSLKKRLNEIYSKHTGKSVDEINSALERDNFMTPDSAKDFGLVDKVVSKRD

SEQ ID NO: 140944 - protein, 59 aa, Unknown
  Bacterial polypetide isolated from the Sargasso Sea
AREVLYQRQRLNAMMAECTGRSIEDIVRDTDRDNFMSAHDAKAYGLVDEVLETRAQHKS

SEQ ID NO: 140945 - protein, 200 aa, Unknown
  Bacterial polypetide isolated from the Sargasso Sea
MNHFFKSNNSGTFEADNTSLVPLSIDWRKKGVVSSVKDQGKCGSCWSFSATGSIESINAITNGILLNISEQELIDCSINYGNNGCKGGSMDNAFKYVIKNGLCSENEYPYMAQDGQCQECKSIVNIEGYQDITPNNEKALKRVVSQQPVSVAIQANLKSFQMYSNGIYSDISCGDKLDHGVLIVGYGYDLFHDMGYWDCK

SEQ ID NO: 140946 - protein, 63 aa, Unknown
  Bacterial polypetide isolated from the Sargasso Sea
MVTNIDENQDAGGSCGSCWAWSITTAVEARVAQQKGHLVSLSPQQLVDCTRNVAFGGNMGAMS

SEQ ID NO: 140947 - protein, 236 aa, Unknown
  Bacterial polypetide isolated from the Sargasso Sea
MNEIGLIGKKIGMSREFYKTGQSVPVTVLKMEKARIIQLIDKEKRGYIAVQVGYGKIKSSKIKKPMKGFFAKKNTEPKKTLKEFRVSKLENFKEGNEFGIEIFKDIKFVDVRSKTIGKGFAGAMKRHNFSGLRATHGVSVSHRSHGSTGQRQDPGKVFKNKKMAGHMGDKLRTIQNIEIIRTDPENDLLYLKGSIPGSKNSEVLIKKSVKNINKLTMLEKIEALEKLKKIPEKKKK

SEQ ID NO: 140948 - protein, 91 aa, Unknown
  Bacterial polypetide isolated from the Sargasso Sea
MDIHPAHFHRNYKGYKNVKKTRTCKTFQSETTELPDSVDWRTNNAVTPVKNQGQCGSCWSFSATGAMEGAWAIHTGSLESLSEQQLIDCSL

SEQ ID NO: 140949 - protein, 215 aa, Unknown
  Bacterial polypetide isolated from the Sargasso Sea
TYNKTYDTTEAEKSAMKAWILNDEIIREHNAKKLSYWLGHNQFSDMTWEEFERHHMGTLFLNRAPKNSERHHLKGIGQPLDDAVDWVAKGAVTPVKNQARCGSCWVRTARPPPAPSLPSRPAAPRLICAHTRSPRAPIPPFCLPQAFSTTGSVEGAYQIANKELLSLSEEDLVQCDHNGDRARRPPPPRPSPRQGPSKGVIPTKRGVAPRRPLHC

SEQ ID NO: 140950 - protein, 198 aa, Unknown
  Bacterial polypetide isolated from the Sargasso Sea
AVEGITKIRTGRLVSLSEQEMVSCSKENMGCNGGLMDYAFKWIVKNGGIDSEFQYPYTGEGLRCNRFKLQMRVASIDGFEDVPPGDEKELEKAVAQQPVSIAIEADTKSFQLYAGGVYDSKECGESVDHGVLVVGYGFDKTPKESATHHKKHHKHYWKVKNSWGSQWGESGFIRMARRISSETGQCGITTSPSFPTKD

SEQ ID NO: 140951 - protein, 56 aa, Unknown
  Bacterial polypetide isolated from the Sargasso Sea
VLVVGWGNEDNTPYWLVKNSWGSSWGDNGYVKLRRTNSTNNSGMCGVALQPSYIVV

SEQ ID NO: 140952 - protein, 72 aa, Unknown
  Bacterial polypetide isolated from the Sargasso Sea
GIYSDLDCGTQLDHGVLVVGYGFDFDNDMDYWIIKNSWGNQWGENGYIRIQRNIEDSRGLCGIAMQPSIPIV

SEQ ID NO: 140953 - protein, 280 aa, Unknown
  Bacterial polypetide isolated from the Sargasso Sea
MADAKDWVTDGAVTPVKNQARCGSCWAFSTTGAVEGAYQIASGKLVSLSEQQLVSCDHNGDQGCNGGLMDNAFEYIEQNGISTEDDYPYTSGGGVTGTCDTSKVKPVVTVTGFTDVPSKDETALKSAIAQQPVSVAIEADKSAFQLYKSGVLDSTACGTKLDHGVLAVGYGTDGGKDYYKVKNSWGATWGESGYIRMVQGKNMCGIASQASYPTGAKSMGPTPPSPPGPSPPPAGKTHYGDPKDGCLTDEIEITIQGVTGDFCTSKCSLLKACPTDLPRG

SEQ ID NO: 140954 - protein, 321 aa, Unknown
  Bacterial polypetide isolated from the Sargasso Sea
DSLELNTFEFSQNYFMFWDKLEKANYFLENIIKSRDEAYESRLITHLLKAPVQDGGQWDMFVNLINKYGAVPKDVMPETNHSSKSGAMNYILTHKLREFGSILRKKPAKNSSALKKDMMETIYNLLAMFLGQPPDVINWSARNKDNRHIIISDMTPIDFCKKYADINIKDKICLIHAPMSNKKFNTMYTVEYLGNVVEGQIIKYLNVDIKELKKSAMDSIKNNEAVWFGCDVGKRFSRDMGVLDMGIYDYENVFQTSFKMNKQTRLEYGDSEMTHAMLLTGVDIKKRNSTKWKIENSWGTKSGNQGYMMMTDEWFDEYTYE

SEQ ID NO: 140955 - protein, 198 aa, Unknown
  Bacterial polypetide isolated from the Sargasso Sea
MKIMVGLNIDDYVCLINCPMSNKEYNKVYTVEHLGNVIEGSPIRYLNVESDVMKDASIKSIKDDHPVWFGCDVGKHFHRDLGVMDTDLFDYKMFYNTDFKMNKAERLEYGQSQMTHAMLFTGVDLDDNGKSIQWRVENSWGDKGGNKGYHIMSDDWFDEYNYEVVVHKDYLSDELNDIFQNAEAVPLKPWDPMGALAK

SEQ ID NO: 140956 - protein, 165 aa, Unknown
  Bacterial polypetide isolated from the Sargasso Sea
EYLGNVVEGQIIKYLNVDIKELKKSAMDSIKNNEAVWFGCDVGKRFNRDMGVLDMGIYDYDNVFQTSFKMNKKTRLEYGDSEMTHAMLLTGVDIKKRNSTKWKIENSWGTKSGNQGYMMMTDQWFDEYTYEVVIDKKYLNKKLLKYLNMEPVALAPWDPMGALAK

SEQ ID NO: 140957 - protein, 252 aa, Unknown
  Bacterial polypetide isolated from the Sargasso Sea
ASNEELNKLKNSMIEEIFKMLSMHLGTPPKSFNWQVRDKDKKFSRYENLTPQSFYEDHVGLNLDDYVCLINCPMSNKEYNKVYTVEHLGNVIEGSPIRYLNVESDVMKDASIKSIKDDHPVWFGCDVGKHFHRDLGVMDTDLFDYKMFYNIDFKMNKAERLEYGQSQMTHAMLFTGVDLDNNGKSIQWRVENSWGDKGGNKGYHIMSDDWFDEYNYEVVVHKDYLSDELNDIFQNAEAVPLKPWDPMGALAK

SEQ ID NO: 140958 - protein, 284 aa, Unknown
  Bacterial polypetide isolated from the Sargasso Sea
NLFRIYLGRKHNLRNFEFSQTYFMFWDKLEKSNYFLNSVIETVNETWDSRLMMHLLHSPIQDGGQWDMWVNLINKYGVVPKSEMPETYQSGKSMRMNSMITRKLREYAKELRDSINKQKREEVYALKNTMLSTIYKMLVIHLGEPPESFNWQVRDKKKGFHRFKNLTALSFFKEHVGIKLNDLVCLINCPMSDKEYDRVYTVEFLGNVIEGNPIRYLNVDIDVLKNASVESIKNNDPVWFGCDVGKYLHRTHGVMDTKLFDFNLFYGTEFSLDKASRLEYGESK

SEQ ID NO: 140959 - protein, 245 aa, Unknown
  Bacterial polypetide isolated from the Sargasso Sea
HQPLKKILMETIYNLLAMFLGQPPDVINWSTRNKDNKHFVISDMTPIDFCKKYADINIKDKVCLIHAPMSNKKFNTMYTVEYLGNVVEGQIIKYLNVDIKELKKSAMDSIKNNEAVWFGCDVGKRFSRDMGVLDMGIYDYENVFQTSFKMNKQTRLEYGDSEMTHAMLLTGVDIKKRNSTKWKIENSWGTKSGNQGYMMMTDEWFDEYTYEVVIDKKYLNKRLLKYLDMEPIALVPWDPMGALAR

SEQ ID NO: 140960 - protein, 158 aa, Unknown
  Bacterial polypetide isolated from the Sargasso Sea
EGQKIKYLNVEVAELKKSAMQSIKNNEAVWFGCDVGKRFSRDMGVLDMGIFDYENVFQTSFKMNKQTRLEYGDSEMTHAMLLTGVDVKNRKSSKWKIENSWGTKSGNKGYMMMTDEWFDEYTYEVVVDRKYLSKKLLKYIDIDPITLAPWDPMGALAK

SEQ ID NO: 140961 - protein, 268 aa, Unknown
  Bacterial polypetide isolated from the Sargasso Sea
DKLEKSNYFLESILSTVEENFDSRIVMHLLQTPTEDGGQWDMWKNLIKKYGVIPQAQMSESFSSSQSAEMNKMLARKLRENAHDLRKEFSKGASNEALNQLKNSMIEEIFKMLSMHLGTPPKSFNWQVRDKDKKFSRYDNLTPQSFYEDHVGLNLDDYVCLINCPMSNKEYNKVYTVEHLGNVVEGSPIRYLNVESDVMKEASIKSIKDDNPVWFGCDVGKHFHRDLGVMDTDLFDYEMFYSTDFKMNKAERLEYGQSQMTHAMLFTG

SEQ ID NO: 140962 - protein, 202 aa, Unknown
  Bacterial polypetide isolated from the Sargasso Sea
PTSFYKEHVGLALDEYVCLINCPMSDKEYNKVYTVDYLGNVAEGHPIRYLNVESHKMKEATIRSLQNDEPVWFGCDVSKHFNRDLGVMDIDLFDYDSFYDLEFGMDKAARLEYGDSQMTHAMLFTGVDLNSKNEPTKWRVENSWGNKGGDKGYHIMTDKWFDEYNYEVVVHKSCLPDDLLELFMKEEAVRLEPWDPMGALAK

SEQ ID NO: 140963 - protein, 270 aa, Unknown
  Bacterial polypetide isolated from the Sargasso Sea
DFDSRIVMHLLQTPTEDGGQWDMWANLIKKYGVIPQAEMSESFSSSQSAEMNKMLSRKLRENAHDLRKAFSKGASNEDLNQLKQKMIEEIFRMLSMHLGTPPKSFNWQVRNKDKNFSRYENLTPQSFYNDHVGLNLDDYVCLINCPMSNKDYNKVYTVEHLGNVVEGSPIRYLNVESDIMKEASIKSIKDDNPVWFGCDVGKHFHRDLGVMDTDLFDYEMFYGTDFKMNKAERLEYGQSQMTHAMLFTGVDLDDNGKSVKWRVENSWGDK

SEQ ID NO: 140964 - protein, 267 aa, Unknown
  Bacterial polypetide isolated from the Sargasso Sea
MASGRCWGFAGLNLMRLQVVDSLELNTFEFSQNYFMFWDKLEKANYFLENIIKSRDESYESRLINHLLKAPVQDGGQWDMFVNLINKYGAVPKDVMPETNHSSKSGAMNYILTHKLREFASILRKKPAKNSAALKKDMMETIYNLLAMFLGQPPDVINWSTRNKDNRHIVISDMTPIDFCKNYADINIKDKVCLIHAPMSNKKFNTMYTVEYLGNVVEGQIIKYLNVDIKELKKSAMDSIKNNEAVWFGCDVGKRFSRDMGVLDMGI

SEQ ID NO: 140965 - protein, 271 aa, Unknown
  Bacterial polypetide isolated from the Sargasso Sea
MASGRCWGFAGLNLMRLQVVDSLELNTFEFSQNYFMFWDKLEKANYFLENIIKSRHESYDSRLITHLLKAPVQDGGQWDMFVNLINKYGAVPKDVMPETNHSSKSGAMNYILTHKLREFASILRKKPAKNSSALKKDMMETIYNLLAMFLGQPPDVINWSTRNKDNRHIVISDMTPIDFCTKYADINIKDKVCLIHAPMSNKKFNTMYTVEYLGNVVEGQIIKYLNVDIKELKKSAMDSIKNNEAVWFGCDVGKRFSRDMGVLDMGIYDYE

SEQ ID NO: 140966 - protein, 197 aa, Unknown
  Bacterial polypetide isolated from the Sargasso Sea
FVKKYADINIKDKVCLIHAPMSNKKFNTTYTVEYLGNVIEGQEIKYLNVEIAELKKSAMQSIKNNEAVWFGCDVGKRFSRDMGVLDMGIFDYENVFQTSFKMNKQTRLEYGDSEMTHAMLLTGVDVKSRKSTKWKIENSWGTKSGNKGYMMMTDEWFDEYTYEVVVDKKHLSKKLLKYLDMEPVSLEPWDPMGALAK

SEQ ID NO: 140967 - protein, 272 aa, Unknown
  Bacterial polypetide isolated from the Sargasso Sea
MPTTNQKSSGRCWGFAGLNLFRIYLGRKYNLKDFQFSQSYFMFWDKLEKSNYFLESIINTADKHWNSRLVMYLLNAPIQDGGQWDMWVNLVNKYGVVPQSEMPESFSSSRSMRMNRMITRKLRENAKILRGLKNKKASFDDINNEKNQMLEQIYKMLVIHLGNPPNSFDWQTRDKKKNFLRFENLDPNSFYNEHIGLKLDDYVCLINCPMSDKEYNKVYTVNYLGNVIEGNSIRYLNVESEDMKRATINSLKDDQPVWFGCDVSKHLHRDLG

SEQ ID NO: 140968 - protein, 143 aa, Unknown
  Bacterial polypetide isolated from the Sargasso Sea
KKSAMDSIKNNEAVWFGCDVGKRFSRDMGVLDMGIYDYENVFQTSFKMNKQTRLEYGDSEMTHAMLLTGVDIKKRNSTKWKIENSWGTKSGNQGYMMMTDEWFDEYTYEVVIDKKYLNKRLLKYLDMEPVALAPWDPMGALAR

SEQ ID NO: 140969 - protein, 139 aa, Unknown
  Bacterial polypetide isolated from the Sargasso Sea
MDSIKNNEAVWFGCDVGKRFSRDMGVLDMGIYDYENVFQTSFKMNKQTRLEYGDSEMTHAMLLTGVDIKKRNSNKWKIENSWGTKSGNQGYMMMTDEWFDEYTYEVVIDKKYLNKRLLKYLDMEPVALAPWDPMGALAR

SEQ ID NO: 140970 - protein, 314 aa, Unknown
  Bacterial polypetide isolated from the Sargasso Sea
FRIYLGRKHNLKDFQFSQSYFMFWDKLEKSNYFLESILSTVEENFNSRIVMHLLQTPTEDGGQWDMWKNLISKYGVIPQAEMSESFSSSQSAEMNKMLARKLRENAHDLRKEFSKGASNEALNQLKNSMIEEIFKMLSMHLGTPPKSFNWQVRDKDKKFSRYDNLTPQSFYEDHVGLNLDDYVCLINCPMSNKEYNKVYTVEHLGNVVEGSPIRYLNVESDVMKDASIKSIKDDNPVWFGCDVGKHFHRDLGVMDTDLFDYEMFYSTDFKMNKAERLEYGQSQMTHAMLFTGVDLDDNGKSIKWRVENSWGDKG

SEQ ID NO: 140971 - protein, 295 aa, Unknown
  Bacterial polypetide isolated from the Sargasso Sea
FVNLIKKYGAVPKDVMPETNHSSKSGAMNYILTHKLREFASILRKKPAKNSSALKKDMMETIYNLLAMFLGQPPDVINWSTRNKDNRHIVISNMTPIDFCKKYGDINIKDKVCLIHAPMSNKKFNTMYTVEYLGNVVEGQLIKYLNVDIKELKKSAMDSIKNNEAVWFGCDVGKRFSRDMGVLDMGIYDYENVFQTSFKMNKQTRLEYGDSEMTHAMLLTGVDIKKRNSTKWKIENSWGTKSGNQGYMMMTDEWFDEYTYEVVIDKKYLNKKLLKYLDMEPVALSPWDPMGALAK

SEQ ID NO: 140972 - protein, 183 aa, Unknown
  Bacterial polypetide isolated from the Sargasso Sea
INCPMSDKEYNKVYTVDYLGNVAEGHPIRYLNVESQVMKEVAIRSLKNDDPVWFGCDVSKHFHRDLGVMDMDLFDYDSFYNLKFGMDKGARLEYGDSQMTHAMLFTGVDLNSKNNPTKWRVENSWGTKGGDKGYHIMTDKWFDEYNYEVVVHKSCLPEELLELFLREEAIRLEPWDPMGALAR

SEQ ID NO: 140973 - protein, 193 aa, Unknown
  Bacterial polypetide isolated from the Sargasso Sea
GLNLDDYVCLINCPMSNKEYNKVYTVEHLGNVVEGSPIRYLNVESDIMKDASIKSIVDDNPVWFGCDVGKHFHRDLGVMDTDLFDYEIFYNTDFKMNKAERLEYGQSQMTHAMLFTGVDLDNNGKSIKWRVENSWGVKGGNKGYHIMSDDWFDEYNYEVVVHKDYLTDELNDIFQNAESIPLKPWDPMGALAK

SEQ ID NO: 140974 - protein, 306 aa, Unknown
  Bacterial polypetide isolated from the Sargasso Sea
APVQMGVKWDMFVNLIEKYGAVPKDIMPETNHSSKSMAMNYILTHKLREFASILRKKSAKQSAKLKKEMIENIYNILAMFLGQPPAVINWSSRDKDNKYIAITDISPKEFCKKYADINIKDKVCLIHAPMSNKIFNRTYTVEYLGNVIEGQEIKYLNVNIDELKKSAMQSIKNNEAVWFGCDVGKRFSRDMGVLDMGIFDYENVFQTSFKMNKQTRLEYGDSEMTHAMLLTGVDIKKRNSNKWKIENSWGTKSGNKGYMMMTDEWFDEYTYEVVVDKKYLSKKIFKYLDLEPIALAPWDPMGALAK

SEQ ID NO: 140975 - protein, 318 aa, Unknown
  Bacterial polypetide isolated from the Sargasso Sea
MIKSFNKDCHSDSSLKISRNAATHNEVTDLAMDWDEYRKIDHTFSEQISGEMKITNQKSSGRCWGYAGLNLFRIYLGRKHGLRNFEFSQTYFMFWDKLEKSNYFLNSIIDTAQKSWDSRLIMHLLHNPIQDGGQWDMWVNLINKYGVVPKSEMPETYQSGKSMRMNRMITRKLREYAKKLREAVNNKTSAEEVIKLKNTMLLTVYKMLVVHLGEPPESFNWQVRDKKKNFHRYNDLTPKSFFSDHVGIELNNLVCLIDCPMSDKKYNRVYTVEYLGNVIEGNPIRYLNVEIDILKKATIESIKNNDPVWFGCDVSKYC

SEQ ID NO: 140976 - protein, 353 aa, Unknown
  Bacterial polypetide isolated from the Sargasso Sea
MPKNISLNDVKKYRNKFLRNNKNTASRNALIKNDLNTVSLNWENFSQINHHFSHLIEKELPATNQMASGRCWGFAGLNLMRLEVVKKLNLNNFEFSQNYFMFWDKLEKANYFLENIIKTRDHAYDSRLIMHLVKAPVQDGGQWDMFVNLIEKYGAVPKDVMPETNHSSKSMAMNYILTHKLREFASFLRKKSPKQSASLKKDMMETIYNLLAMLLGQPPEVVNWSARDKDNKYISIADLSPKEFVKKYADINIKDKVCLIHAPMSNKKFNTKYTVEYLGNVIEGQEIKYLNVEVTELKKSAMQSIKNNEAVWFGCDVGKRFSRDMGVLDMGIFDYENVFQTSFKMNKQTRLEY

SEQ ID NO: 140977 - protein, 295 aa, Unknown
  Bacterial polypetide isolated from the Sargasso Sea
CWGFAGLNLMRLSLAEKYNLKNFEFSQNYFMFCDKIEKSNYFLENILNTFDEAYDSRLMMYLLSSPIQDGGQWDMFVNLIEKYGVLPQSVMPESYQSSQSALMNRFITRKLREFGWTLREMNTKGAKLSELRKTKEEMLSTIYSMLCRCLGNPPETFSWQAKDKNKKLVRLNDLTPLDFYKEVGVKLKDKLCLIHAPMSNKKMNELYTVSYLGNVVGGQIINYVNVDIEDMKRAAIKSLKNNEAVWFGCDVGKMFHRDLGIMDVDLYDYESLFDTKFLMDKGKRLEYGDSLMTHA

SEQ ID NO: 140978 - protein, 313 aa, Unknown
  Bacterial polypetide isolated from the Sargasso Sea
LITHLLKAPVQDGGQWDMFVNLINKYGAVPKDVMPETNHSSKSGAMNYILTHKLREFASILRKKPAKNSSALKKDMMETIYNLLAMFLGQPPDVINWSTRNKDNRHIVISDMTPIDFCKKYADINIKDKVCLIHAPMSNKKFNTMYTVEYLGNVVEGQIIKYLNVDIKELKKSAMDSIKNNEAVWFGCDVGKRFSRDMGVLDMGIYDYENVFQTSFKMNKQTRLEYGDSEMTHAMLLTGVDIKKRNSTKWKIENSWGTKSGNQGYMMMTDEWFDEYTYEVVIDKKYLNKRLLKYLDMEPVALAPWDPMGALAR

SEQ ID NO: 140979 - protein, 439 aa, Unknown
  Bacterial polypetide isolated from the Sargasso Sea
MIKSFNKDCHSDSSLKMSRNAATHNEITDLAMNWDEYRKIDHTFSEQISGEMKITNQKSSGRCWGYAGLNLFRVYLGRKHGLRNFEFSQTYFMFWDKLEKSNYFLNSIIDTAQESWDSRLIMHLLHNPIQDGGQWDMWVNLINKYGVVPKSEMPETYQSGKSMRMNRMITRKLREYAKKLREAVNNKTSAEEVIKLKNKMLSTVYKMLVVHLGAPPESFNWQVRDKKKNFHRYNDLTPKSFFSDHVGIDINNLVCLIDCPMSDKEYNRVYTVEYLGNVIEGNPIRYLNVEIDILKRATIESIKNNDPVWFGCDVSKYLHRAHGVMDTKLFDFELFYGTSFPLDKASRLEYGESKMTHAMLFTGVDLDSNGNPKKWRVENSWGERNGEKGYYIMSDDWFDQYLYEVVIDKKYLASNIVEMYESQNAKLLPPWDPMGALAR

SEQ ID NO: 140980 - protein, 440 aa, Unknown
  Bacterial polypetide isolated from the Sargasso Sea
MPKNISLNDVKKYKNKFLRNNKNTASRNALIKNDLNTVALNWENFSQINHHFSHLIEKELPATNQMASGRCWGFAGLNLMRLEVVKKLGLANFEFSQNYFMFWDKLEKANYFLENIIKTRDHAYESRLIMHLVKDPVQDGGQWDMFVNLIEKYGAVPKDIMPETNHSSKSMAMNYILTHKLREFASILRKKSAKQSAKLKKEMIEIIYNLLAMFLGQPPEVVNWSSRDKDNKYIAIADISPKEFCKKYADINIKDKVCLIHAPMSNKRFNRTYTVEYLGNVIEGQEIKYLNVNIDELKKSAMQSIKNNEAVWFGCDVGKRFSRDMGVLDMGIFDYENVFQTSFKMNKQTRLEYGDSEMTHAMLLTGVDVKKRNSTKWKIENSWGTKSGNKGYMMMTDEWFDEYTYEVVVDKKYLSKKIFKYLDAEPITLAPWDPMGALAK

SEQ ID NO: 140981 - protein, 440 aa, Unknown
  Bacterial polypetide isolated from the Sargasso Sea
MAKNISLSTIKSFKNKFLRNNKNTASRNALIKNDLANVALNWENFSQINHNFSNLIKKELPATNQMASGRCWGFAGLNLMRLQVVDSLDLNTFEFSQNYFMFWDKLEKANYFLENIIKSRNESYESRLINHLLKAPVQDGGQWDMFVNLIEKYGAVPKDVMPETNHSSKSGAMNYILTHKLREFASILRKKPAKESSTLKKDMMETIYNLLAMFLGQPPDIINWSTRNKDNKHIVISDMAPKDFCKKYADINIKDKVCLIHAPMNNKKFNTMYTVEYLGNVVEGQIIKYLNVDIKELKKSSMESIKNNEAVWFGCDVGKRFSRDMGVLDMGIYDYENVFQTSFKMNKQSRLEYGDSEMTHAMLLTGVDIKKRKSTKWKIENSWGTKSGNQGYMMMTDEWFDEYTYEVVIDKKYLNKRLLKYLNMEPVALAPWDPMGALAK

SEQ ID NO: 140982 - protein, 340 aa, Unknown
  Bacterial polypetide isolated from the Sargasso Sea
RVNYFLESIIETADKNWNSRLIMHLLSNPIQDGGQWDMWVNLVDKYGVVPQSEMPESYSSSNSRYMNRLITRKLREDAMLLRNSVNKGSSASDVQQQKTDMLEEVYKMLTIHLGTPPNSFNWQTRDKKKNFLRFEGLTPTSFYKEHVGLALDEYVCLINCPMSDKEYNKVYTVDYLGNVAEGHPIRYLNVESHKMKEATIRSLQNDEPVWFGCDVSKHFNRDLGVMDIDLFDYDSFYDLEFGMDKAARLEYGDSQMTHAMLFTGVDLNSKNEPTKWRVENSWGNKGGDKGYHIMTDKWFDEYNYEVVVHKSCLPDDLLELFMKEEAVRLEPWDPMGALAK

SEQ ID NO: 140983 - protein, 440 aa, Unknown
  Bacterial polypetide isolated from the Sargasso Sea
MAKNISLSTIKTFKNKFLRNNKNTASRNALIKNDLSNVALNWENFSQINHNFSNLIKKELPATNQMASGRCWGFAGLNLMRLQVVESLELNTFEFSQNYFMFWDKLEKANYFLENIIKSRDESYESRLITHLLKAPVQDGGQWDMFVNLINKYGAVPKDVMPETNHSSKSGAMNYILTHKLREFASILRKKPAKNSSALKKDMMETIYNLLAMFLGQPPDVINWSNRNKDNRHIVISDMTPIDFCKKYADINIKDKVCLIHAPMSNKKFNTMYTVEYLGNVVEGQIIKYLNVDIKELKKSAMDSIKNNEAVWFGCDVGKRFSRDMGVLDMGIYDYENVFQTSFKMNKKTRLEYGDSEMTHAMLLTGVDIKKRNSTKWKIENSWGTKSGNQGYMMMTDEWFDEYTYEVVIDKKYLNKRLLKYLDMEPVALAPWDPMGALAR

SEQ ID NO: 140984 - protein, 447 aa, Unknown
  Bacterial polypetide isolated from the Sargasso Sea
MTKKISQDQIQQLREKFSSDDHVKVVRNAMIKTNSNELSMNWEKYRKIDHSFSHVISGEMPATNQKSSGRCWGFAGLNLFRVYLGRKHNLKDFQFSQSYFMFWDKLEKANYFLESILSTLEEDFDSRIVMHLLQTPTEDGGQWDMWANLIKKYGVIPQAEMSESFSSSQSAEMNKMLSRKLRENAHDLRKEFLKGVSSEDLNKLKHKMIEEIFRMLSMHLGTPPKSFNWQVRDKDKKFTRYENLTPQSFYTNHVGLNLDDYVCLINCPMSNKDYNKVYTVEHLGNVVEGNPIRYLNVESDIMKEASIKSIKDDNPVWFGCDVGKHFHRDLGVMDTDLFDYEMFYGTDFKMNKAERLEYGQSQMTHAMLFTGVDLDENGKSIKWRVENSWGDKGGNKGYHIMSDDWFDEYNYEVVVHKDYLSDELNDIFQNSDAIPLKPWDPMGALAK

SEQ ID NO: 140985 - protein, 328 aa, Unknown
  Bacterial polypetide isolated from the Sargasso Sea
LENIIKPRDHAYDSRLIMHLVKAPVQDGGQWDMFVNLIEKYGVVPKDVMPETNHSSKSMAMNYILTHKLREFASVLRKKSAKQSASLKKEMMETIYNLLSMFLGQPPEVVNWTTRDKDNKYISITDTSPKEFVKKYADISIKDKVCLIHAPMSNKKFNTTYTVEYLGNVIEGQEIKYLNVEIAELKKYAMQSIKNNEAVWFGCDVGKRFSRDMGVLDMGIFDYENVFQTSFKMNKQNRLEYGDSEMTHAMLLTGVDVKSKKSTKWKIENSWGTKSGNKGYMMMTDEWFDEYTYEVVVDKKYLSKKLLKYLDMKPVSLQPWDPMGALAK

SEQ ID NO: 140986 - protein, 447 aa, Unknown
  Bacterial polypetide isolated from the Sargasso Sea
MSKKISRSQIDLLGKKYFSDNHVKVVRNAMVKTNSNELSMDWEKYRKIDHTFSNVISGEMPATNQKSSGRCWGFAGLNLFRVYLGRKHNLKDFQFSQSYFMFWDKLEKSNYFLESILSTAEEDFDSRIVMHLLQTPTEDGGQWDMWKNLIKKYGVIPQAEMSESFSSSQSAEMNKMLARKLRENAHNLRKEFSKGASSETLNELKNSMIEEIFKMLSMHLGTPPKSFNWQVRDKNKKFSRYENLTPQSFYEEHVGLNLDDYVCLINCPMSNKEYNKVYTVEHLGNVVEGSPIRYLNVESDVMKDASIKSILDDNPVWFGCDVGKHFHRDLGVMDTDLFDYEMFYNTDFKMNKAERLEYGQSQMTHAMLFTGVDLDNNGKSIKWRVENSWGDKGGNKGYHIMSDDWFDEYNYEVVVHKDYLTDELNDIFQNAEPIPLKPWDPMGALAK

SEQ ID NO: 140987 - protein, 421 aa, Unknown
  Bacterial polypetide isolated from the Sargasso Sea
NIKNTASRNALIKNDLANVALNWENFSQINHNFSNLIKKELPATNQMASGRCWGFAGLNLMRLQVVDSLELNTFEFSQNYFMFWDKLEKANYFLENIIKSRDESYESRLITHLLKAPVQDGGQWDMFVNLINKYGAVPKDVMPETNHSSKSGAMNYILTHKLREFASILRKKPAKNSAALKKDMMETIYNLLAMFLGQPPDVINWSTRNKDNRHIVISDMTPIDFCKKYADINIKDKVCLIHAPMSNKKFNTMYTVEYLGNVVEGQIIKYLNVDIKELKKSAMDSIKNNEAVWFGCDVGKRFSRDMGVLDMGIYDYENVFQTSFKMNKQTRLEYGDSEMTHAMLLTGVDIKKRNSTKWKIENSWGTKSGNQGYMMMTDEWFDEYTYEVVIDKKYLNKRLVKYLDMEPISLAPWDPMGALAR

SEQ ID NO: 140988 - protein, 249 aa, Unknown
  Bacterial polypetide isolated from the Sargasso Sea
KEFQKILTKQGIKFLLENKVTSVKNKNNQVLVDFVDNKTNKKSSLECDKVLVSVGRKPYTEGLNLTKLGIKKDKAGRIEVNKNFQTSLENIYAIGDVIRGPMLAHKAEEEGIAVAEILAGQSGHVNYDVVPGVIYTSPEVAAVGKTEEDLKNLKINYKVGKFPFLANSRAKVNNESEGFVKILADAKTDKVLGVHIIGPHCGDMIAEMALAMEFGASSEDIARTCHAHPTHTEAIKEAALAVDKRPIHF

SEQ ID NO: 140989 - protein, 334 aa, Unknown
  Bacterial polypetide isolated from the Sargasso Sea
MSKHIFECIDAHTCGNPIRLVVSGGPKLKGETIKEKRQHFMAEYDWILRGLMFEPRGHDIMSGSFLYPPSNDDYDIAILFIETSGCLPMCGHGTIGTVTMMIEEGLVKPKNDGVVVLETPAGRVDAYYEMVNNKVTSVKIVNVPSFLYASNLIIDSSHLGSIKIDVSYGGNFYAIIDKQENFNTMDDFTASELGDMSREIRIKINENYTFLHPEDERINKCIHVLWTGEPSKENSTARNGVFYGEKAIDRSPCGTGTSARMAQWYSNGKLSIGDEFIHESIIGSQFIGRIEKETKVGDYNAIIPSIEGWAKIYGFNKIIIDPEDDPYAHGFQVI

SEQ ID NO: 140990 - protein, 149 aa, Unknown
  Bacterial polypetide isolated from the Sargasso Sea
MGLASGKLIKVPLKRMERWTDIMKVAQASPEMKAEDETAVKLEDGPAHSVVINDYQNAQFYGEVTIGGQTFNVVYDTGSSNLWVPSHNCGFLKCWLHSGSASNGRAALIGTCATTVCGYFSGGWGSRTDPRVDLRIWFPKAGVRNRPAG

SEQ ID NO: 140991 - protein, 302 aa, Unknown
  Bacterial polypetide isolated from the Sargasso Sea
MRSLGYNVTDRTIQRDLLKLEKYFPLICDDRNPPYGWSWQENAKEINLAAMDKVEALSLSLAEKYLEPLMPIENYERIRDLFDRANNTLECSEKNQLRRWRDRVRVLPQSQKLEPPSVNQEVQSNIYDSLLHKEQLDVQYLKANSRLPEKRTVNPLGIVLMGIVHRLICTMDPDFKIIRHLPLHRFKTANANGEPSIEPENFDIDDYLDKESLSFLRTEKQLKIELLFEDTTGFHLSETPVSKDQKYKEEKNGKIRISGTVADAEQLRWWILGFGENVEVIKPETLRSEIRKRAKLLYSIYE

SEQ ID NO: 140992 - protein, 431 aa, Unknown
  Bacterial polypetide isolated from the Sargasso Sea
MSGVPRAAERALTRSDYKTLGLAALGGALEFYDFIIFVFFAPAIGQLFFPHDIPDWLRQLQTFGIFAAGYLARPLGGVIMAHFGDLFGRKRMFTLSVLMMSVPTLLMGLLPTYDTIGILAPVLLLLFRVLQGAAVGGEVPGAWVFVSEHVPSRHIGYACGTLTAGLTAGILLGSLVAAGINSRYSSAEVGAFAWRIPFLLGGVFGLFSVYLRRWLHETPVFAEMKAKKALAAEIPLKAVLRDHGRAVIVSMLLTWMLSAAIVVVILMTPALLQKQFHLAPATTLFANSIATLCLTAGCITAGSLAGRIGAKRVLGIGGIGLAACYYLLFVQVAADASTLPLYYGIAGFMVGTIGAVPFVMVKSFPAVVRFSGISFSYNVAYAIFGGLTPVIVSLMMKSNPLAPVVYVAAICVLGAIAVQFSKDAKDVKATH

SEQ ID NO: 140993 - protein, 160 aa, Unknown
  Bacterial polypetide isolated from the Sargasso Sea
MNKCRPAIDIQDYQNTEYHAEIYVGNPGQKEIVIFDTGSSNLWVPNTVPWVWPWETGKNKYDHSKSSTYQENGEVFEIEYGSGSVSGVFSVDDVTIGDVTLEDYTFAEVDNTEGIQDVYSKGKFDGILGLGWDRISVGGVPTVMDKLIASGQLPKPTTDR

SEQ ID NO: 140994 - protein, 93 aa, Unknown
  Bacterial polypetide isolated from the Sargasso Sea
MSLLSIRSSLFKWFLLAGLIFLLDQWVKLIIIENISLYERVKINDFINITHQRNPGAAFSFLADAGGWQRWFLSTIAIAVCLYIVYWLNELKK

SEQ ID NO: 140995 - protein, 152 aa, Unknown
  Bacterial polypetide isolated from the Sargasso Sea
MLSFTVIIIDQITKYFAVEKLALHEVKSIYEGFNLILIYNEGAAFSFLSDAGGWQRWFLIGVSCVVCVFIVVWMYQSISKSKCLLAGLSLILGGALGNLWDRLSLGYVVDFIEVYYKDLYWPAFNIADSAITIGAILLILDIFLKEPSKTPS

SEQ ID NO: 140996 - protein, 180 aa, Unknown
  Bacterial polypetide isolated from the Sargasso Sea
MLKLFRETGLRFLWISAIAFILDQWSKYTVIDSMSLYQSIQVLPFFNFTYVHNYGAAFSFLENAGGWQRWFFTAIAVVVSVVILWWLKQSPRSQKMLPVAFAFILGGALGNVYDRLVHGYVIDFLDFYVNNYHWPAFNIADSAIFIGAALLIIDMFKNGDKKSEGNGADARASAADNSET

SEQ ID NO: 140997 - protein, 226 aa, Unknown
  Bacterial polypetide isolated from the Sargasso Sea
MACMVVGVLMLASADAVTKLLIVDFHAGEIIFYRGVFAFLPLVPLIVWNGGLRSLRLQQPRGVWWRGVIALVTSVFVALSFINLPLAEASALIFTSPIFLTALSPWLLGEKVGWQRWSAVLFGFAGVVVMIEPGSSTFTIWAFVPLIAALCSASRDIVTRRLGIVDSATTVMFYTSIVALIGGAISMSWSGPAPNAEQWALFVLSGIFVSLAHLLIVMALQLAEGP

SEQ ID NO: 140998 - protein, 144 aa, Unknown
  Bacterial polypetide isolated from the Sargasso Sea
MINLREIKKKIITKNNIYWLFVISIIFFLDRYTKIFILNNFTENTYYLNDYINLDLVWNIGIGFGFLSTESNIIYNLITLIIASVIIFLLYIFIKSERMDKFIYALIIGGALGNIYDRLIYKAVPDFVDIHYNNFHWFTFNVAD

SEQ ID NO: 140999 - protein, 97 aa, Unknown
  Bacterial polypetide isolated from the Sargasso Sea
MPLTWKDSGLRWYWVVVLVFLADQLSKQWVLANFDLFESVKLLPFFNFTYVRNYGAAFSFLSEAGGWQRWLFTLVAVGFSTLLTVWLRKQSASLWKL

SEQ ID NO: 141000 - protein, 170 aa, Unknown
  Bacterial polypetide isolated from the Sargasso Sea
MPLTWKDSGLRWYWVVVLVFLADQLSKQWVLANFDLFESVQLLPFFNFTYVRNYGAAFSFLSEAGGWQRWLFTLVAVGFSTLLTVWLRKQAASLWKLNLAYTLVIGGALGNLIDRLMHGFVVDFIDFYWGKSHYPAFNIADSAIFIGAVLIIWDSFFNSKSEQDKTEEVK

SEQ ID NO: 141001 - protein, 101 aa, Unknown
  Bacterial polypetide isolated from the Sargasso Sea
FLSDAGGWQRWFLIAFSFIVIIIISYMMIYDDNSPYIAFSFVIGGALGNLNDRIIYGYVIDFIEVYYNTFYWPIFNIADVAISIGVILLLHNIIFNKKKIR

SEQ ID NO: 141002 - protein, 170 aa, Unknown
  Bacterial polypetide isolated from the Sargasso Sea
MPLTWKDSGLRWYWVVVLVFLADQLSKQWVLANFDLFESVKLLPFFNFTYVRNYGAAFSFLSEAGGWQRWLFTLVAVGFSTLLTVWLRKQSASLWKLNLAYTLVIGGALGNLIDRLMHGFVVDFIDFYWGKSHYPAFNIADSAIFIGAVLIIWDSFFNSKSEQDKTEEVK

SEQ ID NO: 141003 - protein, 164 aa, Unknown
  Bacterial polypetide isolated from the Sargasso Sea
MIKGIKEYLFVAVSAGSVLLIDFLSKNKIISIFKDGIVEKIFVNEYLDFILVFNTGISYGLFSGGGDFQKWILISLSILIIIFLLSLIRNESTILSKLSISFIIGGALGNVLDRFTYGAVVDFISLHAKGFSWYIFNIADMFIVLGVILFILSQFILSKKNVGN

SEQ ID NO: 141004 - protein, 173 aa, Unknown
  Bacterial polypetide isolated from the Sargasso Sea
MHLFKGRLFTETGWRWWWLVLLVLVADQLSKVWVIQNFSLGESVSLLPVFNFTYARNYGAAFSFLGDAGGWQRWFFTLIAVVVSIVLAVWLSRLAKTQLKLSLALSLIISGAIGNLIDRSLYGYVVDFLHVFYQNWHYPIFNIADCAISIGAVLLIWDSFSSENQNATSGDKQ

SEQ ID NO: 141005 - protein, 103 aa, Unknown
  Bacterial polypetide isolated from the Sargasso Sea
MSKSVCSTGLRWLWVVVAVLIIDLGSKFLILQNFALGDTVSLFPSLNLHYARNYGAAFSFLADSGGWQRWFFAGIAIGICVILAVLMYRSKATQKLNNIAYAL

SEQ ID NO: 141006 - protein, 153 aa, Unknown
  Bacterial polypetide isolated from the Sargasso Sea
VVFLDQWTKNIVVDAMSLGDRISVFTYFSWVRWHNEGAAFSFLADAGGWQRWFFIVLAFFFVAFLANELRNLKERVSILHLVYTLIIGGALGNTIDRLVNGYVVDFILVHYDQYYFPAFNLADSALTLGAVMWAIILIREVIQEKRVDSRGNE

SEQ ID NO: 141007 - protein, 168 aa, Unknown
  Bacterial polypetide isolated from the Sargasso Sea
MARTVSKASSGNSSLAPWLGVALIVILFDQLTKIAIQKVFAYGVPHEVTPFFNLILVYNRGAAFSFLAMAGGWQRWAFTALGVVAALVICYLLKRHGGQKMFCTALSLILGGALGNVIDRLAYGHVIDFLDFHVRAWHWPAFNLADSAITIGAILLVLDELRRVRGSR

SEQ ID NO: 141008 - protein, 226 aa, Unknown
  Bacterial polypetide isolated from the Sargasso Sea
LYVGAIIVAISGFVLFLMAYTCIRFRASRNPNPSKRTHNVAVEILWTLIPCLILIVMAVPSFKILYSQDTIPKADVTIKAVGYQWYWGYEYPDENIIFDSYMVEEKDLKPGQPRLLAVDNEVVVPVNKVVKVLITANDVLHAWALPSFGVKRDAMPGRVNETWFKADRVGTYYGQCSELCGIKHAFMPITVRVVTDEEYNNWLEEAKIKFAKEEIETNKNKLLAKN

SEQ ID NO: 141009 - protein, 124 aa, Unknown
  Bacterial polypetide isolated from the Sargasso Sea
MSEINTSLLLENENLTTFEITKNFTCIRFLDQNKERFELEFNLEKGTSFNTFLIRSNRELFIIHPPEKEYSDSINKLIYTFFDQFKLNKINIITGHINPKIIETIKTISTKFSNLTIICSNPGI

SEQ ID NO: 141010 - protein, 310 aa, Unknown
  Bacterial polypetide isolated from the Sargasso Sea
EVANYFPVQATLDGMFDVYQQLTGVIFTEIAEPNAWHSDVRLYSVTDTETGEHIAHFYMDLHPRQGKYGHAAAFTLKPSRHRPDGSRQPAISAIVANFTKPTTESPSLLRHSEVETLFHEFGHILHQTLTQAPFSRFSGTAVERDFVEAPSQMLEHWTWDESILKQFTSHKDNGSPIPSDLIEKMKQAKNVGSGIHYLRQIYFARLDLAYHDAILPIDTDAPAKELHPITGFAFPEGTHFQGGFGHLFGYDAGYYGYLWSQVFGDDMFTRFTDGDALAVGREYRTNILEPGGSVDAQVQLERFLGREPDK

SEQ ID NO: 141011 - protein, 362 aa, Unknown
  Bacterial polypetide isolated from the Sargasso Sea
MSIEYFQKRQHILIDKLAKENLDGMIVTNLTHIRYLCGFTGSSATLLITADQVHFITDGRYVVQSEKEVKGAKVIIDSISHYEVIKKQNLLTSSQSIGFDGNNVSHQGYQQLSKVLSDINLKNITGIIEKMAMSKDEKELEAIRTAVEITDKAFAEVLPMVKIGVEEKVIANQLSFLYRKYGDSDSDAFAAIVGTGPNSAKPHHKPTDRKIGPGELIVIDSGAKFAGYHADMTRSFATKGYSDEQKSIYDIVLNAQVKSIEGIKSGMSCKSIDSIARDHIANAGYSKFFDHGLGHSLGLEIHEDPRFSKVSEDVLEENYVMTVEPGIYVPDIGGVRIEDDIIVTKNGAEILNKTSKEFQVIS

SEQ ID NO: 141012 - protein, 362 aa, Unknown
  Bacterial polypetide isolated from the Sargasso Sea
MSIKYFQRRQNILIDKLAKENLDGMIVTNLTHIRYLCGFTGSSATLLITADQVHFITDGRYVVQSEKEVKGAKVIIDSISHYEVIKKQNLLTSSQSIGFDGNNVSHQGYQQLSKVLSDINLKNITGIIEKMAMLKDEKELEAIRTAVEITDKAFAEVLPMVKIGVEEKVIANQLSFLYRKYGDSDSDAFAAIVGTGPNSAKPHHKPTDRKIGPGELLVIDSGAKFAGYHTDMTRSFATKGYSDEQKSIYDIVLNAQVKSIEGIKSGMSCKSIDSIARDHIANAGYSKFFDHGLGHSLGLEIHEDPRFSKVSEDVLEENYVMTVEPGIYVPDIGGVRIEDDIIVTKNGAEILNKTSKEFQVIS

SEQ ID NO: 141013 - protein, 270 aa, Unknown
  Bacterial polypetide isolated from the Sargasso Sea
MKKLLYTFVLLISSTSYANEPKDWQLGFQQPASQSMYEIVKFHDYMLVPIIVAISGFVLFLMAYTCIRFRASRNPNPSKRTHNVAVEILWTLIPCLILIVMAVPSFKILYSQDTIPKADVTIKAVGYQWYWGYEYPDENIIFDSYMVEEEDLKPGQPRLLAVDNEIVVPVNKVVKVLITANDVLHAWALPSFGVKRDAMPGRVNETWFKADRVGTYYGQCSELCGIKHAFMPITVRVVTDEEYNAWLEEAKIKFAKEEIETDKNKLLAKN

SEQ ID NO: 141014 - protein, 98 aa, Unknown
  Bacterial polypetide isolated from the Sargasso Sea
SGMSCKSIDSIARDHIANAGYSKFFDHGLGHSLGLEIHEDPRFSKVSEDVLEENYVMTVEPGIYVPDIGGVRIEDDIIVTKNGAEILNKTSKEFQVIS

SEQ ID NO: 141015 - protein, 97 aa, Unknown
  Bacterial polypetide isolated from the Sargasso Sea
DKEALFNECYGHGIGHSLGLDVHDPSPGKSDFILEKDMVITIEPGIYLRDSTLLKDKRFQGFGVRIEDNIRLREGGNDNLTAAAEVDPEAIESMAGG

SEQ ID NO: 141016 - protein, 362 aa, Unknown
  Bacterial polypetide isolated from the Sargasso Sea
MSTEYFQRRQNKLRSKLAKENLDGMLVTNLTHIRYLCGFTGSSATLLISGDKVHFITDGRYVVQSEKEVKGADIIIDSIPHIEVIKNQNLLTPRSKIAFDGNSVSHQAYQQLSKVLSNQQLENITGVIEKMAMSKDSKEIEAIRTAVEITDQAFAEVLPMVKIGVEEKVIANQLSFLYRKYGDSDSDAFAAIVGTGPNSAKPHHTPTDRKIGQGELLVIDSGAKFAGYHADMTRSFATKGFSEEQKSIYDIVLNAQINSINGIKAGASCKSIDSIARDHITQAGYGKFFDHGLGHSLGLEIHEEPRFSKVSKDILEENYVMTVEPGIYVKDIGGVRIEDDIIVTKDGSEILNKTSKEFQVIS

SEQ ID NO: 141017 - protein, 429 aa, Unknown
  Bacterial polypetide isolated from the Sargasso Sea
MICFCPLFLKNNKYYNVKHTKNIFLISSLILTILHAHVGSPSPIKVFQPNGNELNIYIKGDHLHNWHDYNGWTVVKDNDWWVYALGNNGKELIPSNIKVDYTDNPNEINPNIARGIKPDPYQLLDNSPAPNLQLTRSDTFRVPLILVEFPDAGALYESSQLDSMMNQQGYSHLNYDNTGSFRDFYQEISYGQFLPVADISRWFTASNNHDYYGYNNGYQRVRQLVRDMVDSLEASGFNWSIYDNDGDGYVDALTLIHQGPGAEEGDQTNIWSHKWNLGNLAVSYDGVIIDSYNMNPEIQNGNIVAIGVLAHEFGHSLGLPDLYDTDYSSTGAGKLSLMASGSWGTSGNTPWYPSSMVGWIKNELGWVDIVEINEDQTNVTVEQSYSSNIIYKVNHSQVEEEYWLIENRQKIGSDTLITTPGLTIWHINE

SEQ ID NO: 141018 - protein, 715 aa, Unknown
  Bacterial polypetide isolated from the Sargasso Sea
MRYLPIVAALALAGCGGDDGGAGSASALSSAGAPHSGSSPTVTAPPSASNVDKSVSPVELPDTVVPVNYRLWFRPNDALNAFDGRADVEIKVLKPVNNIVIAGHRIKFTNGRITLQPGNIQLIATPQDKGDFYQLRPVSGTISPGNYSLHMEWSGIINFKSYDDPVAKTGGSCGDDPYPGCSAAEGIFRVDLKGTDGKTSGAILTQGETNLSRQWFPGWDEPAFRPTYEVTAEVPQSWRVVSNAAEKPSTNVGGGYKLVQFEKTPPMPSYLLFFGGGLFDTYEDDFTSPLPGGKGGLHLRVFTPPGMSDWAKPAMDRTKQALDFYYRYTGIALPLTKFDTVAANDAFKEQKDLNFGGMENWGSILEFADDILPQPGQPMSHYGNEVLTHEVAHQWFGDLVTTDWWDNVWLNESFATFFETKTTIQFFPNEFSWLDQVKNKYRVINRDIGPNAFPVAPNFNGWASNDFVLSASAFTYDKGGHVLKTLENYLGEQTLRKGLQQYLVDYSFGNGTPKRLWDALSKESGQAIGAIGDSYVRQTGVPLISLDTQCDLTKNQTVITLKQQPFPNKNAYPGLQWTVPITLAYGQGLAKRTTLALKDTQTQTRIDGCTGVVADPSGLDYYVVNYSDAAWSGLLTQVNGSTDPVLLANLKSEAALLVANNLAPASRSTSIGSVASPAAMKLRQTPTFGGLEPVTKERPALQYQGIFKPRKVVTQ

SEQ ID NO: 141019 - protein, 1030 aa, Unknown
  Bacterial polypetide isolated from the Sargasso Sea
MKQTLLFAAISLAIATPSLAHNHLVSDQHAAIPSTLAPIASPSAPLNFDVNHRPLLPSNSLIASPNEPTHSEYLDAHSSQQQALLENSPRSKASSFAANANCSNFVGKSGQALLDELTQSSPQCVGKLFNLKGSDASSVFSEANVSTVANAIAAKAPEYTGVDNQGIESHIYFVRAALYVQFYNPSDVPAYSSAVKNNLKSALNALFTNNAIWTLSDANASVLKEALILIDSAELGADFNFVTLKVLNDYNSTWQASFAMNAAANTVFTTLFRAQWNTDMQALFARDHAILDALNQFQLNHRDLLGTNAEYVLVNAVRELSRLYYIDAMRPKVTQLVKNILNSTSKNDPSKVLWFAAAEMADYYDRSNCNAYQICGFKAQLAADSLPFNWKCSDSLKIRAQDLYQDQAKWACGVLSQQESHFHTILETGMQAVAQDNNDDLELVIFGSSSEYQSLANSIFGINTNNGGMYLEGSPAGLKNQARFIAYEAEWRRPDFHVWNLQHEYVHYLDGRYNLFGDFSRSVSANTIWWIEGLAEYISYRDANPAAIAMGETGEYMLSTIFKNTYDSGQDRIYRWGYLAVRFMFENHRDDVRQILTFLRNNQYPEYQAFMDSIGTRYDNEWRGWLTSGLSTTNNGIVDKGPSDEQANASGREGNWAGPAGTISKDYSPCQVSNEAYRYSESASLSLEVPMECIDAKQGRASFSFANTDRSAQDIWIKIGGGWGDADIYYDSRGWASAEKNQGYGIGNGNYQVIKVSLNPNELWHYITLEGDFGGVDMLVSTTELVADTDPDLGDGGDTGGEVPSNCGAATINYGKLTLGKDECLSGGRNSFYFWVDADNSQFSVSTTGGTGDANIYFNANTWASASNAQASSVNQGNKESFSFTANRGWRYITVDTTSEFSGVSFNLKAGGGSSVPNQIANACATKSPVSYTQLTPGDAVCSANGRNDYYLWIPEGTSQLEVRSAHGTGDVSLYSGRSWANAQQYEAASTNAGSTTEQIKVNNPSAGWYYITLQSEGQSTGVALQVDLR

SEQ ID NO: 141020 - protein, 300 aa, Unknown
  Bacterial polypetide isolated from the Sargasso Sea
SDKAYPHPQLIVDEPTLRVVYAPSQFFASEPKADVSLVLRNPQAMDSARSQVMFALNDYLAGIALDQLSNQAAVGGISFSTGANNGLMVNANGYTQRLPQLFTALLDGYFSYTPTEEQLEQAKSWYAQMMDSADKGKAYDQAIMPVQMLSQVPYFQREERRALLPSISLQEVLAYRDNLKAKGRPELLVIGNLTAEQSTAMARQIQQQLGSDGNEWCRNKDVLINSQQLAIFEKTGNSTDSALAAVFAPPNVDEYSSSAASSLLGQIIQPWFYNQLRTEEQLGYAVFAFPMNVGRQWGMG

SEQ ID NO: 141021 - protein, 260 aa, Unknown
  Bacterial polypetide isolated from the Sargasso Sea
EKYDGTVTINELSWLKKPPHPSKLFNVGDNIDVKITEIDEEKRKLICSIKQTKENPWSKLTDQFKVNDSFETEVVNIVDFGIFVKVHEEIDGMVHVSDLNWDEKECEKILAGYKKGDKVKVKILEINIDKERISLGIKQLSNDPIQNYIETHPIKSKVTGKINELNEKFLKVELDDQIYGFIKKINLSRDKNEQKTDRFALGEQVDSIILSVDQKNRSLNLSIKEIEIIDEKEAMSKYGSSDSGASLGDILGSVLKKKNK

SEQ ID NO: 141022 - protein, 328 aa, Unknown
  Bacterial polypetide isolated from the Sargasso Sea
RTASYSSGTGTTTLNFTYTVQDGDNSSDLDFTGTSALALNGGTIKASTGAANNANLTLASPGAANSLGNNKALVIDGSAPTVQSVSSSTADGTYKAGDVITINVVFSEAVTVNTTGGTPQLTLETGTTDQVVNYSSGSGTTTLAFSYTVQADDSSSDLNYKATSSLALNGGTIQDAAGNNATLTLPALAGSDSLAGNSALVIDGSAPTVQSVSSSTADGTYKAGDVITINVVFSEAVTVNTTGGTPQLTLETGTTDQVVNYSSGSGTTTLAFSYTVQADDSSSDLNYKATSSLALNGGTIQDAAGNNATLTLPALAGSDSLAGHSALV

SEQ ID NO: 141023 - protein, 166 aa, Unknown
  Bacterial polypetide isolated from the Sargasso Sea
MKKIYKIHDHLYVGLSGLATDQTTLAQRFKFRHNLYKLRENRDMRPETFANVVSNMLYEKRFGPYYAEPVVAGLDADGTPFITGMDLIGAMAPTDNFVVCGNNEESLFGVCESMYKPNLEPEELFEVISQCLLAGVNRDCLSGWGGVVHVISKDKLITRTLKGRMD

SEQ ID NO: 141024 - protein, 210 aa, Unknown
  Bacterial polypetide isolated from the Sargasso Sea
RGTLAIGIMTKDGIILAVEEKTRPLQVDGITQKIFQVDDHIGVAAAGYIPDARVEVDNARYFSQSNKLTYDEPVDIETVAKHLADQNHQFTQYSGVRPFGVALIIAGIDRKGVNVYVIDPSGTYNSYSAIAIGTGSDEVNEFLEKNYKEGLTVDEAASLAIAAINLKSEEKSGVEHIKMSKILVEGKMIEKISPEDLKKFDEAAKGKFVK

SEQ ID NO: 141025 - protein, 186 aa, Unknown
  Bacterial polypetide isolated from the Sargasso Sea
KKLPTCLIDESTVQKIVLLTESIGVVYSGMGPDFRVLIAKGRKAAQAYYRVYRETIPVTQLVRELASVMQEYTQQGGVRPFGISLLLAGVDHNGPQLYQIDPSGSYFAWKASAIGKHMVNAKTFLEKRYTNELELEDAVHTALLTLKEGFEGAMDHTNIEVGIVGADGAFKVLTPAEIKDYLGEVE

SEQ ID NO: 141026 - protein, 236 aa, Unknown
  Bacterial polypetide isolated from the Sargasso Sea
MQPSGRGYDHGVSTFSPDGRLYQVEYARESVKRGTTTVGLVYKDGVVLIVDKRVQSKLVITDSIEKMYQIDNHVGITTSGLVADARQLVDRARVQCQINRMTYGDNIPVSTLVKKMCDYKQSFTQYGGARPFGTALLIAGFDDEGAHLFETDPSGAYQSYNAGAIGRGKATAIDFFEDKWKKGMTQNAAIKMGLEALRDSLEEDLNPDTVEIGCVDKSGYEKLDRETTLKHLGKLS

SEQ ID NO: 141027 - protein, 148 aa, Unknown
  Bacterial polypetide isolated from the Sargasso Sea
SQSNKLTYDEPVDIETVAKHLADQNHQFTQYSGVRPFGVALIIAGIDRKGVNVYVIDPSGTYNSYSAIAIGTGSDEVNEFLEKNYKDGLTIDEAASLAIAAINLKSEEKSGIEHIKMSKILSEGKMIEKISTEDLKKFDEAAKGKFVK

SEQ ID NO: 141028 - protein, 158 aa, Unknown
  Bacterial polypetide isolated from the Sargasso Sea
MPNRGYDMTPTMYSPDGRIYQVEYALETVKRGTLAIGIMTKDGIVLAVEEKTRALQVEGITQKIFQVDDHIGVAAAGYIPDARVQVDNARYFSQSNKLTYDEPVDIETVAKHLADQNHQFTQYSGVRPFGVALIIAGIDRKGVNVYVIDPSGTYNSYS

SEQ ID NO: 141029 - protein, 295 aa, Unknown
  Bacterial polypetide isolated from the Sargasso Sea
MELVGGNDFLNTLIPYTSGFYYDSRPHIAFKPEDVLPINDELGFNKNATTLQEFYKKGKMGIVQGVGYPDSSRSHFRSRDIWHTCEPDKVATEGWLGKVIRDLDPNKENVLTAISISRGLPRAVVAQDVPVTSIGDLDTYGLLTGIKHEDKRAQAMSIFEKMYSPYTGAGMVRDYLKQTGRDVQAGAEILKTVPGMYSSSIEYADSPISQNLRDVARIHLADLGVKVFYTQHGGYDTHANEYSGHEKLMIDVNRAVKDFFMDLEEHDAADNVIMMIWSEFGRRVVDNGSGTDHGA

SEQ ID NO: 141030 - protein, 111 aa, Unknown
  Bacterial polypetide isolated from the Sargasso Sea
MPSQQGYDRAITVFSPDGRLYQVEYAIETVKRGALAIGIKSKDGVIIAVEEKPRRLQISTTPQKIFQVDYHVGAAAAGYIPDARAQVDNARFFSQSNKLVYDEPVEVETVA

SEQ ID NO: 141031 - protein, 137 aa, Unknown
  Bacterial polypetide isolated from the Sargasso Sea
FTYNEPMPVLSCTTSLCELAMSFAGDGEKRMSRPFGVALLVAGKDEDGYHLVHTDPSGTAVSYKAKAIGSGSEGAQTALQEEYRDDLTLKEAETLALKTLKAVMEEKINVKNVDMASVAPTYAKYQDAAIQEIIDRL

SEQ ID NO: 141032 - protein, 164 aa, Unknown
  Bacterial polypetide isolated from the Sargasso Sea
MSRYDRAITQFSPDGHLLQVEYAMQAVAKGAVVVGVRGDDCVVLGVERKAVAKLQDPRTVRKIVRIDEDTTAAFAGLTADARVLIRKARVEAQSYRLTVEDAPTIEYMARYVARQQQKHTVRGGVRPYGITCVMAGKGSDGTPELWQSDPSGNYSQWRGVTTGR

SEQ ID NO: 141033 - protein, 89 aa, Unknown
  Bacterial polypetide isolated from the Sargasso Sea
MFQTRSEYDRGVNTFSPEGRLFQVEYAIEAIKLGSTAIAIRTSEGVVLAVEKRATSPLMDASSLEKIAEVDAHVGCAVSGLTADAWTMV

SEQ ID NO: 141034 - protein, 214 aa, Unknown
  Bacterial polypetide isolated from the Sargasso Sea
SPLSLSDLSSPSPSHPKLAGMIASALELHRLATKRKSRVVTALTMLKSHLFKYQGHVGAALVLGGVDINGPHLFSVHPHGSSDSLPFATMGSGSLAAMAVFEADFKEDMTEEEAKEIVARSIRAGIFNDLGSGSNVDLCVITADKVDYLRNYECPNERTYVRSKGYEFPPGTTVLNRRNFMTATAATLPVNKVVDIIDGAPEDVAAAGDAMQTD

SEQ ID NO: 141035 - protein, 233 aa, Unknown
  Bacterial polypetide isolated from the Sargasso Sea
MNYVKPNHGTTTLGFIFEHGIVIAVDSRASQGPYVSSQTVKKVIEINPFLLGTMAGGAADCQFWQRNLGIQCRLHELENGKRITVRAASKLLANTLYSYKGRGLSMGTMVAGWDLNGPGLYYVDSEGTRLKGQRFSVGSGSLFAYGVLDQGYKWDLSVKEACELGRRAIYHATYRDAFSGGTVSVYHVGENGWTKVTGDDVGELHFHYYPSTPIDDIDSLGGLGKKEAEEREA

SEQ ID NO: 141036 - protein, 207 aa, Unknown
  Bacterial polypetide isolated from the Sargasso Sea
MADSRSNYSLTTFNSSGELVQIKHALAAVQSGATSLGIRAVNGVVLATEKKLPSTLVDETTVEKIAQLTPEIGMTYSGMGPDFRVLTKKTRKETQVYYRTYHELVPCSQIVRETASVMQEFTQRGGVRPFGVSLLMAGFDSNGPQLYQVDPSGTYFAWKASAIGKNMVNAKTFLEKRYSEDMELEDAIHTAILTLKEGFDGQISAEN

SEQ ID NO: 141037 - protein, 109 aa, Unknown
  Bacterial polypetide isolated from the Sargasso Sea
MPSQQGYDRAITVFSPDGRLYQVEYAIETVRRGAIAVGIKTKDGVIIAVEEKARKLQIITTPQKIFQIDYHIGAAAAGYIPDARSQIDNARTFSQSNKLVYDEAVEVET

SEQ ID NO: 141038 - protein, 178 aa, Unknown
  Bacterial polypetide isolated from the Sargasso Sea
PSSMDKIMEIDAHIGCAVSGLTADAQSMVEHGRVQAQNHYFTYNEPMPARALTQSLCALSANFGTDDEDSMSRPFGVALLVAGHDADEGYQLYHTDPSGTFVSYSAKAIGSGSEGAQTTLQEEYRPDMTMEEAETLALSTLKAVMEEKVSTINVDMASVAPKYKVYDKEAIKAIIERL

SEQ ID NO: 141039 - protein, 240 aa, Unknown
  Bacterial polypetide isolated from the Sargasso Sea
MPNRGYDMTPTMYSPDGRIYQVEYALETVKRGTLAIGIMTKEGIVLAVEEKTRALQVEGITQKIFQVDDHIGVAAAGYIPDARVQVDNARYFSQSNKLTYDEPVDIETVAKHLADQNHQFTQYSGVRPFGVALIIAGIDRKGVNVYVIDPSGTYNSYSAIAIGTGSDEVNEFLEKNYKDGLTIDEAASLAIAAINLKSEEKSGIEHIKMSKILSEGKMIEKISTEDLKKFDEAAKGKFVK

SEQ ID NO: 141040 - protein, 244 aa, Unknown
  Bacterial polypetide isolated from the Sargasso Sea
MPSQQGYDRAITVFSPDGRLYQVEYAIETVRRGALAVGVRTKNGVVIAVEEKSRKLQIINTPQKIFQIDYHIGAAAAGYIPDARSQIDTARTFSQSNKLVYDEPVEVETVAKHLADQCQQYTQYGGARPIGVSLIIGGIDPAGTNLYMTDPSGSYISYNAISIGANSDVVNEFLEKNYKEDMSLDDAASLAIAAIYISSETKEGIEHIKMSKISGEKGTFEFIENEEITKFAASAKSKYPADGK

SEQ ID NO: 141041 - protein, 115 aa, Unknown
  Bacterial polypetide isolated from the Sargasso Sea
MPSQQGYDRAITVFSPDGRLYQVEYAIETVRRGAIAVGIKTKDGVIIAVEEKARKLQIINTPQKIFQIDYHIGAAAAGYIPDARSQIDNARTFSQSNKLVYDEAVEVETVAKHLA

SEQ ID NO: 141042 - protein, 224 aa, Unknown
  Bacterial polypetide isolated from the Sargasso Sea
GRIYQVEYALETVKRGTLAIGIMTKDGIILAVEEKTRPLQVDGITQKIFQVDDHIGVAAAGYIPDARVEVDNARYFSQSNKLTYDEPVDIETVAKHLADQNHQFTQYSGVRPFGVALIIAGIDRKGVNVYVIDPSGTYNSYSAIAIGTGSDEVNEFLEKNYKEGLTVDEAASLAIAAINLKSEEKSGVEHIKMSKILAEGKMIEKISPEDLKKFDEAAKGKFVK

SEQ ID NO: 141043 - protein, 142 aa, Unknown
  Bacterial polypetide isolated from the Sargasso Sea
GKIDYQRTPARKHTTSTPFDVSKLTELPKVGIVYNYANASDLPAKALVDAGYAGIVSAGVGNGNLYKTIFDTLATAAHKGTVVVRSSRVPTGATTQDAEVDDAKYGFVASGSLNPQKARVLLQLALTQTKDPKQIQEMFNQY

SEQ ID NO: 141044 - protein, 117 aa, Unknown
  Bacterial polypetide isolated from the Sargasso Sea
TPHIYLAFEGAETFAREQGVETVNSSHFITPQNIERLKQAKAANTVQVDYTQPMPIVDEPPVPNGDSQIGTVGCVAVDSAGNLPAATSTGGLVNKMVGRIGDTPLVGARTYANKFCA

SEQ ID NO: 141045 - protein, 352 aa, Unknown
  Bacterial polypetide isolated from the Sargasso Sea
MTLPIRKTLLAAVLGLTLSPMAMALPNVHILATGGTIAGAGQSATQSNYEAGKVAIETLIAAVPEMKNVADVQGEQVVKIGSQDMNDEVWLKLAKRVNELLAKDDVDGIVITHGTDTMEETAYFLNLTVKSDKPVVLVGAMRPSTAMSADGPMNLYNAVVTASDPASKGRGVMVAMNDTVLDARDVTKTNTTGVQTFASPNFGPLGYIHNGKIDYQRSPARLHTSKTPFDVSKLDKLPQVGIVYSYANATDLPAKAMVDAKFDGIVSAGVGNGNLYHTLFDTLAKASKDGIRVVRSARVPTGSTTLDAEIDDAKYGFVAAETLNPQKARILLMLSLTQSKDPAQIQRWFQQF

SEQ ID NO: 141046 - protein, 101 aa, Unknown
  Bacterial polypetide isolated from the Sargasso Sea
MDGQCINIHHSFLPGFKGAKPYHQAHERGVKIIGATAHYVTDDLDEGPIIEQDILRVDHGASPESMQESGYDIESAVLLRAVRLYAERRILLNGLKTVVFN

SEQ ID NO: 141047 - protein, 228 aa, Unknown
  Bacterial polypetide isolated from the Sargasso Sea
QLEGIFNDKTLMLDLDRALPQGSSRQLVAAGRKKVVILVTKEAHCLGDILMKVYDGSLKLDIAAVVGNHPDLQSLAEKFDIPYHFVSHIDLSREQHEAALQQVIDPYQADYLVLAKFMRVLSPAFVAHYKERIINIHHSFLPAFIGANPYHQAHKRGVKIIGATAHFVTDDLDEGPIIKQLVTPVDHTYSAMDMVKAGRDVEKNVLSKALQLVLEDRVFVHGNKTVIL

SEQ ID NO: 141048 - protein, 253 aa, Unknown
  Bacterial polypetide isolated from the Sargasso Sea
MVCRKSFGNLIMEAKKIILQFICPDKAGVLSAATQFLFKRNAFMTEVSSFSDNDTKKFFSRIAFENEDGSSFNIHDLEKEFSIELKEFNIDGRFFDAEQPCKAIIAVSKVGHCLNDLLHRWKIGSLPIDIKGVISNHETSKDIVEWNNIPFHYLPISPDTKSEQEQLFKEIYQNSGSELLVLARYMQILSSDFLNELDGQCINIHHSFLPGFKGAKPYHQAHERGVKIIGATAHYVTDDLDEGPIIEPGYSEG

SEQ ID NO: 141049 - protein, 272 aa, Unknown
  Bacterial polypetide isolated from the Sargasso Sea
MANAVLLIECEDQQGIVSSITEFIYSNQGNIIDLDQYTDHDNTHFFMRLEWSLDSFTIQRGKIGEYFETLIGQRFSIRFNLYFTDEHPRMGLFVTKLSHCLFDILGRWQSGELEIEIPVVISNHENLRSTVERFDIPFEYIPITNENKAEQEQKQLKVLSDYDVDFVVLARYMQIISPNFIKRYSNKIINIHHSFLPAFVGAKPYHAAFERGVKIIGATAHYVTDNLDAGPIIEQDVAHVTHRNSVQDLVKMGQDVEKLVLAKAIKLHVRRK

SEQ ID NO: 141050 - protein, 229 aa, Unknown
  Bacterial polypetide isolated from the Sargasso Sea
MEAKKIILQFICPDKAGVLSAATQFLFKRNAFMTEVSSFSDNDTKKFFSRIAFENEDGSSFNINDLEKEFSTELKEFNIDGRFFDAEQPCKAIIAVSKVGHCLNDLLHRWKIGSLPIDIKGVISNHETSKDIVEWNNIPFHYLPISPDTKSEQEQLFKEIYQNSGSELLVLARYMQILSSDFLNELDGQCINIHHSFLPGFKGAKPYHQAHERGVKIIGATAHYVTDDL

SEQ ID NO: 141051 - protein, 121 aa, Unknown
  Bacterial polypetide isolated from the Sargasso Sea
QEQLFKEIYQNSGSELLVLARYMQILSSDFLNELDGQCINIHHSFLPGFKGAKPYHQAHERGVKIIGATAHYVTDDLDEGPIIEQDILRVDHGASPESMQESGYDIESAVLLRAVRLYAER

SEQ ID NO: 141052 - protein, 197 aa, Unknown
  Bacterial polypetide isolated from the Sargasso Sea
TKVVLLATKEAHCLGGVLLKQFEKALNIEVLAVIANYADLAPLAAGFGVPFHVVSHEGLNRAEHDQQVGDLIASYQPDIIGLAKYMRILSPEFVARFEGKIINIHHSFLPAFIGAKPYHQAFERGVKIIGATAHFVNNELDEGPIILQDVTHVSHADTAEMMAKMGKDVEKTVFCKALQLASEHKLFINGNRTVVFA

SEQ ID NO: 141053 - protein, 146 aa, Unknown
  Bacterial polypetide isolated from the Sargasso Sea
HYLPINKDSKKEQEDKIIKIYKETGSELIILARYMQILSDDICNLVEGNAINIHHSFLPGFKGAKPYHQAISRGVKIIGATAHYVTKDLDEGPIIEQETIRVNHSMSVNKLIEMGKDIESTVLSKAIKLHCEKRIFLNDNKTVIFE

SEQ ID NO: 141054 - protein, 240 aa, Unknown
  Bacterial polypetide isolated from the Sargasso Sea
MEAKKIILQFICPDKAGVLSAATQFLFKRNAFMTEVSSFSDNDTKKFFSRIAFENEDGSSFNINDLEKEFSTELKEFNIDGRFFDAEQPCKAIIAVSKVGHCLNDLLHRWKIGSLPIDIKGVISNHETSKDIVEWNNIPFHYLPISPDTKSEQEQLFKEIYQNSDSELLVLARYMQILSSDFLNELDGQCINIHHSFLPGFKGAKPYHQAHERGVKIIGATAHYVTDDLDEGPIIEPGYS

SEQ ID NO: 141055 - protein, 282 aa, Unknown
  Bacterial polypetide isolated from the Sargasso Sea
KIILQFICLDKAGVLSAATQFLFKRNAFMTEVSSFSDNDTKKFFSRIAFENEDGSSFNIHDLEKEFSTELKEFNIDGRFFDAEQPCKAIIAVSKVGHCLNDLLHRWKIGSLPIDIKGVISNHETSKDIVEWNNIPFHYLPISPDTKSEQEQLFKEIYQNSGSELLVLARYMQILSSDFLNELDGQCINIHHSFLPGFKGAKPYHQAHERGVKIIGATAHYVTDDLDEGPIIEQDILRVDHGASPESMQESGYDIESAVLLRAVRLYAERRILLNGLKTVVFN

SEQ ID NO: 141056 - protein, 180 aa, Unknown
  Bacterial polypetide isolated from the Sargasso Sea
ILMKVYDGSLKLDIAAVVANHPDLQSLAEKFDIPYHFVSHINLSREQHEAALQHVIDPYQPDYLVLAKFMRVLSPAFVAHYKERIINIHHSFLPAFIGANPYHQAHKRGVKIIGATAHFVTDDLDEGPIIKQLVTPVDHTYSAMDMVKAGRDVEKNVLSKALQLVLEDRVFVHGNKTVIL

SEQ ID NO: 141057 - protein, 286 aa, Unknown
  Bacterial polypetide isolated from the Sargasso Sea
MEAKKIILQFICPDKAGVLSAATQFLFKRNAFMTEVSSFSDNDTKKFFSRIAFENEDGSSFNINDLEKEFSTELKEFNIDGRFFDAEQPCKAIIAVSKVGHCLNDLLHRWKIGSLPIDIKGVISNHETSKDIVEWNNIPFHYLPISPDTKSEQEQLFKEIYQNSGSELLVLARYMQILSSDFLNELDGQCINIHHSFLPGFKGAKPYHQAHERGVKIIGATAHYVTDDLDEGPIIEQDILRVDHGASPESMQESGYDIESAVLLRAVRLYAERRILLNGLKTVVFN

SEQ ID NO: 141058 - protein, 103 aa, Unknown
  Bacterial polypetide isolated from the Sargasso Sea
NELDGQCINIHHSFLPGFKGAKPYHQAHERGVKIIGATAHYVTDDLDEGPIIEQDILRVDHGASPESMQESGYDIESAVLLRAVRLYAERRILLNGLKTVIFN

SEQ ID NO: 141059 - protein, 284 aa, Unknown
  Bacterial polypetide isolated from the Sargasso Sea
AKKIILQFICPDKAGVLSAATQFLFKRNAFMTEVSSFSDNDTKKFFSRIAFENEDGSGFNINDLEKEFSIELKEFNIEGRFFDAEQPCKTIIAVSKVGHCLNDLLHRWKIGSLPIDIKGVISNHETSKDIVEWNNIPFHYLPISPDTKSEQEQLFKEIYQNSGSELLVLARYMQILSSDFLNELDGQCINIHHSFLPGFKGAKPYHQAHERGVKIIGATAHYVTDDLDEGPIIEQDILRVDHGASPESMQESGYDIESAVLLRAVRLYAERRILLNGLKTVVFS

SEQ ID NO: 141060 - protein, 297 aa, Unknown
  Bacterial polypetide isolated from the Sargasso Sea
MVCRKSFGNLIMEAKKIILQFICPDKAGVLSAATQFLFKRNAFMTEVSSFSDNDTKKFFSRIAFENEDGSSFNINDLEKEFSTELKEFNIDGRFFDAEQPCKAIIAVSKVGHCLNDLLHRWKIGSLPIDIKGVISNHEISKDIVEWNNIPFHYLPISPDTKSEQEQLFKEIYQNSDSELLVLARYMQILSSDFLNELDGQCINIHHSFLPGFKGAKPYHQAHERGVKIIGATAHYVTDDLDEGPIIEQDILRVDHGASPESMQESGYDIESAVLLRAVRLYAERRILLNGLKTVIFN

SEQ ID NO: 141061 - protein, 205 aa, Unknown
  Bacterial polypetide isolated from the Sargasso Sea
MEKKILLTDCPDAKGLIAKITNICYKHQLNINKNDEFVDHENGRFFMRTELEGRFNDETLLADLDDALPAGAQRRLVKAGKKRIVILVTKETHCLGDILMKNYAGALDMDIVAVIGNYDTLAELTGKFDIPFHTVSHEDLSRTEHEEQVRAIIDGYQPDYVVLAKYMRVLTPSFVEAYPRKIINIHHSFLPAFIGARPYRQAFDR

SEQ ID NO: 141062 - protein, 271 aa, Unknown
  Bacterial polypetide isolated from the Sargasso Sea
MTDCADAQGLIAKITSVCFNHQLNIIKNSEFVDNAQGRFFMRTELEGHFNSEQLLQDLREVLPAQNHMTLVSAGKKRIVVLVTKEAHCLGDLLMKAYYGGLNVEIAAVVGNHDVLRELVEKFDIPFHLVSHEGLDRIQHEQALLAAVSQYAPDYLVLAKYMRVLTPDFVAEYPNRIINIHHSFLPAFIGAAPYRQAWERGVKIIGATAHFVNNCLDEGPIIKQDVIPVDHSYSALEMAKAGRDVEKSVLSKALQLVLNEQVVVYGNKTIVF

SEQ ID NO: 141063 - protein, 271 aa, Unknown
  Bacterial polypetide isolated from the Sargasso Sea
MTDCADAQGLIAKITSVCFNHQLNIIKNSEFVDNAQGRFFMRTELEGHFNSEQLLQDLRQVLPVPNHMTLVSAGKKRIVILVTKEAHCLGDLLMKAYYGGLNVEIAAVVGNHDVLRELVEKFDIPFHLVSHEGLDRIQHEQALLAAVSQYAPDYLVLAKYMRVLTPDFVAEYPNRIINIHHSFLPAFIGAAPYRQAWERGVKIIGATAHFVNNCLDEGPIIKQDVIPVDHSYSALEMAKAGRDVEKSVLSKALQLVLNEQVVVYGNKTIVF

SEQ ID NO: 141064 - protein, 256 aa, Unknown
  Bacterial polypetide isolated from the Sargasso Sea
YISKLNIYDLDQYFNTRLPRDHVKKDSDYFASQSLWNLINHKRILDVVEKLLGPEILSNPVQNTRIKQPENKLPKHSVHDGLSGRTPWHQDAAVLSSLGQRLTDMVTVWIPFTKTTKKNGCMITVKEINKLGLLNHVSGYRGQVEIKDSKLLDNYKPVFLEANVGDIIILHKHSIHCSLPNRSNDFRISADLRYNRAGTPSGRKPLPNFYVRSKNKKNITIHNYKQWIALWEKAKNKCIPRKYAFKYPLPTFRNSK

SEQ ID NO: 141065 - protein, 154 aa, Unknown
  Bacterial polypetide isolated from the Sargasso Sea
MPLPTLKDQFAALIAAPSVSCTQPALDQSNRQVIDLLAGWLGDLGFKCDIQQVSPGKFNLLASRGSGPGGLVLAGHSDTVPYDEQLWTSDPLKLTEVDGRWVGLGSCDMKGFFALVIEAVIPLLEHDFKQPLLILATCDEESSMSGARALAEAG

SEQ ID NO: 141066 - protein, 278 aa, Unknown
  Bacterial polypetide isolated from the Sargasso Sea
MREKVFKYNFKKKYTYISKLNINDLDQYFNTRLPRDHVKKDSDYFASQSLWNLINHKKILDVVEKLLGSEILSNPVQNTRIKQPESKLPKHSVHDGLSGRTPWHQDAAVLSSIGQRLTDMVTVWIPFTKTTKNNGCMITIKEINKLGLLNHVSGYRGQVEIKDSKLLDKFKPVFLEANVGDIIILHKHSIHCSLPNRSNDFRISADLRYNRAGTPSGRKPLPNFYVRSRNKKNITIHNYKQWISLWEKAKNKCIPRKYAFKYPLPTFKNSKRDLARLI

SEQ ID NO: 141067 - protein, 184 aa, Unknown
  Bacterial polypetide isolated from the Sargasso Sea
MTPTSREARMVHTDSKASVPGIREMLARLISQPSISSASPDWDHSNEAVVRTLAEWLEALGFAVEILDVPGMPGKYNLVASLGSGPGGLVLSGHTDTVPFDDKRWHSDPFTLTEKDDRWYGLGTCDMKGFFPLAIEAAKAFIDQPLKQPLIILATADEESSMNGARALAEAGKPRARYAVIGEP

SEQ ID NO: 141068 - protein, 258 aa, Unknown
  Bacterial polypetide isolated from the Sargasso Sea
MKKDTYKNKATFLEKLKTKSKREANLFFSLCEDDSEIVNTKKFKEVLLNSGLKANDKRLYNLFQNLDAHGDKIVFEDFIDIIRSSELIVEKSLRGELSIPDFSYFAKNLDSMFDEVKKIKTGELASYIPPLAEVDPDQFGVAIVTADGQIYQKGDSNVDFSIQSMCKPFNYCFAMERLGLEKVHQHVGQEPSGRQFDDLTLLAKTAIGDLQGEHAKDNRNGKSSRVPFNPMVNAGAIMTAGLIGPEESHSQRLRYIRQ

SEQ ID NO: 141069 - protein, 233 aa, Unknown
  Bacterial polypetide isolated from the Sargasso Sea
DGDLPAKSGVGSSSAFVVGLLNAIWKLKNIHSTKHNLAKKSIFLETKVLKEVVGSQDQIACAYGGFNNIIFKKDGSFKVNKIKINKKRKNQLENNLFLVFSRIQRTAEIVAKSFVQNLTKNKIYEMEKINSLVKDAKNILKNQDLDNFGNLLNESWEFKKRLSNMVSNNKIDQIYKYAIESGATGGKLLGAGGGGFFVFYVKQNAHKKFITKMKKSLIIPFKFETQGSQTKII

SEQ ID NO: 141070 - protein, 135 aa, Unknown
  Bacterial polypetide isolated from the Sargasso Sea
MFDEAKKVASGELASYIPPLANVDPDQFGVAIVTTDGQIYQKGDSEVDFSIQSMCKPFNYCFAMEKLGLEKVHQHVGQEPSGRQFDDLTLLAKTAVGQLNRIPFNPMVNAGAIMTAGLIGPEESHSQRLRYIRQQ

SEQ ID NO: 141071 - protein, 157 aa, Unknown
  Bacterial polypetide isolated from the Sargasso Sea
MRGELSIPDFSYFAKNLDNMFDEVKKIKSGELASYIPPLANVDPDQFGVAIVTTDGQIYQRGDSEADFSIQSMCKPFNYCFAMEKLGLDKVHQHVGQEPSGRQFDDLTLLARSAIGQLNRIPFNPMVNAGAIMTAGLISPEDSHSQRLRYIRQQLED

SEQ ID NO: 141072 - protein, 245 aa, Unknown
  Bacterial polypetide isolated from the Sargasso Sea
GFISTFTIDSDGNITAVRTQSEGNNLEHDTNAGSFNSLVQVDSDTYALAYAGTGDNGFISTFTIDSDGVITPIRIQDHTNHASASANLLHDNSRGKWNSLVQVDSDTYALAYEGQDRDGFISTFTISSDGTSIVRENTLEHDTNAASFNSLVQVDSDTYALAYTSWDEDGFISTFTIDSDGVITAVKTQSENNNLEYDEERGIYNSLVQVDSDTYALAYTRNDADGYITTFTISSDGSSITEVPG

SEQ ID NO: 141073 - protein, 210 aa, Unknown
  Bacterial polypetide isolated from the Sargasso Sea
MLAEKALRGELAIPDFRDFSRNLDKIYDEVLPNRSGDLARYIPPLAEVDPEQFGIAVVTTDGQIYQRGDTNVDFSIQSMCKPFNYSFAIENLGLEKVNRHVGVEPSGRQFDDLTLMVKGMGGSSLSPNNKVPFNPMVNAGAIMTTGLINPKDSTNDRLQYIREQFGRIIGWNEDETSGVNLPRFNKTMARQENFKGYNNIATGFLLMATR

SEQ ID NO: 141074 - protein, 92 aa, Unknown
  Bacterial polypetide isolated from the Sargasso Sea
MLSLLQDIYVEVEPMLGMGKVADYIPALATVNPRQFGISICDTQGHITSIGDASVPFSIQSISKVFNLVLSINHYGETMWDRVGCEPSGLPF

SEQ ID NO: 141075 - protein, 109 aa, Unknown
  Bacterial polypetide isolated from the Sargasso Sea
MNYASILEQIHRDLQPYLGTGKVADYIPELANVPAGSFGMAIVTASGDVFRTGAADTRFSIQSISKLFACTLAFRLLGDELWQRVGREPSGNAFNSLVQLEAEHGKPRN

SEQ ID NO: 141076 - protein, 264 aa, Unknown
  Bacterial polypetide isolated from the Sargasso Sea
GLPAKSGVGGGITAVLPSQFGLGVFSPPLDKLGNSVRGIKVCQLLSEYFHLHVLETEDDVNQNIPITYDLSEIRSSRMRGQSDNKTLEEFGARVSVFELSGVINFIGSNFITRSVAEADFQDFIVLSFIRVNRLTRASIEVFRLFFDQILSKSQRVIVVDKKVVKDLPKGLFGEIADLIKQNCQCFENLDQAIEWIESQLIAEYGECQNNSEDFSPLSDQPLLKGLSNLDLETLQKNVTLTEYESGSKIIQLKEKADGIYFLQS

SEQ ID NO: 141077 - protein, 253 aa, Unknown
  Bacterial polypetide isolated from the Sargasso Sea
NPMVNAGAIMTAGLIGTEESHSQRLRYIRQQFGRLIGWSPKDEFSAELPRFNKDMARQENFTGYNNIAMGYLLMATGNLPHTQTKLHNDIHPDEDEFDFYTEPAVTEALKLYFSICSLEMTSVEFATAAATLANSGVCPITQDRVLSQKTVRNCLPVLQTSGMYNASGTFFQQVGLPAKSGVGGGVLLIVPRLMGICIFSPRLDKQGNSVRGLEMAKRLTSKYLVHIFDGTMTDTSRLDPKLPIARWLANSCG

SEQ ID NO: 141078 - protein, 278 aa, Unknown
  Bacterial polypetide isolated from the Sargasso Sea
MSVMVSSGMYDYSGEWTYRVGLPAKSGVGGGITAVLPSQFGLGVFSPPLDKLGNSVRGIKVCQLLSEHFHLHILETEDDVTQNIPITYDLKEIRSSRTRCRSDNETLEDFGSRVSVLELSGVINFIGGNFITRSVAEEDNKDFVVLSFIRVSRLTRASIEVFRLFFEKLLSKSQRMVVVEKEDLKDDSKGLFGDITELIHQHCPCFKNLDKALEWVEDQLIAQYGTCSNHPGDLLPIAEQPLLKDLPNSDLELLQQNLVSTEHESGSKIIQLHDKADG

SEQ ID NO: 141079 - protein, 274 aa, Unknown
  Bacterial polypetide isolated from the Sargasso Sea
NAVYLSERATADRNFALGYFMRENNSFPTNTKLIETLEFYFQCCSIELTAESMATVSATLANSGICPITQDKLFNPDTVKNCLSLMSSCGMYDFSGEFAFTIGLPAKSGVGGGLLIVIPNLMGICVWSPPLDEMGNSVRGIDFCERLVENFNFHNFDSLIAGHSKKMDPRVNLNQMSSDDIQSLLWAASKGSIREIQAFLARGFDINQADYDGRTALHLASSEGKKDMVEYLLGHSADPQAKDRWGGTPLSDAEREGHKEVEALLKKFKLPKKS

SEQ ID NO: 141080 - protein, 284 aa, Unknown
  Bacterial polypetide isolated from the Sargasso Sea
MDTCGKEIYYDDFIEIISSAGLLVEKALRGELALPDFSDFSKNVDEMFKEVAKNKSGELASYIPPLAKVDPDQFGISIVTVDGQVYQRGDFNEDFSIQSICKPFNYCFALEELGLDEVHSHVGQEPSGRKFNDLTLLVRSTESFQNNSINIPFNPMINAGAIMTAGLINSDKTYEKRFNFIKNEFAKLIGWTAKGKFDSKFPRFNKDVAREENFTGFNNMAIGYLLMATGNLPNKEKKHKKKVNQKHDNFDFYNDPSVTEALKLYFSVCSLEMTATEVAIAAAT

SEQ ID NO: 141081 - protein, 317 aa, Unknown
  Bacterial polypetide isolated from the Sargasso Sea
MCKPFNYCFAMEKLGLEKVHQHVGQEPSGRQFDDLTLLARTAMGNMQGEYAKDDLEGKFSRVPFNPMVNAGAIMTAGLIGPEESHSQRLRYIRQQFGRLIGWSPKNEFSAELPRFNKNMARQENFTGYNNIAMGYLLMATGNLPHTKTELHNDIHPDEVEFDFYSEPAVTEALKLYFSICSLEMSSVNFATAAATLANSGVCPVTQERVLNQKTVKNCLPVLQTSGMYNASGTFFQQVGLPAKSGVGGGVILIIPRLMGICIFSPRLDKQGNSVRGIEMAKRITSKYLVHTFDGTMTDTDRLDPKIPISKWRANSCG

SEQ ID NO: 141082 - protein, 280 aa, Unknown
  Bacterial polypetide isolated from the Sargasso Sea
PAKSGVGGGVILIVPRLMGICIFSPRLDKQGNSVRGIEMAKRITSKYLVHTFDGTMTDTDRLDPKIPISKWRANSCGEAIWAASNGNIRTLERLVSEQRDLQIGDYDMRTPLHLASAEGKLEAVQFLLKQGVKPIPDRWGGYGYFDAKNNNHKDIVKEYEKLDINYTQASHLVEDPNGKTDKMAIYDDELAVIELLFAAFENNVEGIRSLIAKGVPVHAGDYDSRTALHLAAAEGCLEVVEYLVSHGHPVFVRDRWGATPLDEAKREKRKSVINYLKDFK

SEQ ID NO: 141083 - protein, 307 aa, Unknown
  Bacterial polypetide isolated from the Sargasso Sea
HDIIVSNITLIEKALKGDLIIPDFKSFTSKVEQVFESIRSNKSGNVADYIPQLARVNPDYYAISICTVDGQQFHLGDHTVPYSIQSTSKPINYAIALEDFGEEEVHRHIGREPSGRGFNELTLNNDGLPHNPMINAGAIMACSLIRPDLDVSDRFDYLLDIWKKLSGGSNIGFSNSIYLSEKQTADRNFALSYFMRENKAFPDKTNMLEVLDFYFQGCSIELNSSSHSIVAGTLANAGICPITRERVFSPTTSKNVLSLMYSCGMYDFSGEFAFTIGIPAKSGVSGSLIVVVPGVCGITIWSPALDR

SEQ ID NO: 141084 - protein, 215 aa, Unknown
  Bacterial polypetide isolated from the Sargasso Sea
EPTGTAFDAIGILETDEGRPRNPFINAGAIVTTDALLSGREPRQAIAETLGLIRAMAESDDIFINARVAKSEGETGARNKALAHYLLSHGNLENDPEKLLGTYFHQCAIEMTTEQLAMAGRSLADLPQAPKVISRAHARRINALMMSCGHYDASGEFAYQVGLPGKSGVGGGILMIAPRKASIALWSPGLDGYGNSKAGTRAAAMLSRKAGWSVF

SEQ ID NO: 141085 - protein, 130 aa, Unknown
  Bacterial polypetide isolated from the Sargasso Sea
AFKIGMPAKSGVGGGIIVVVPGIMGFCTYSPPLDSYGNSARGVQFCKLMSVRFKTHQFVLEHDPLVSPYVKDHLYDLLSFSSKGNLLKVKQTVETMMQDKVKGYENVCKGDYDARTALHLACSEGHYPIV

SEQ ID NO: 141086 - protein, 307 aa, Unknown
  Bacterial polypetide isolated from the Sargasso Sea
MSVMVSSGMYDYSGEWTYKVGLPAKSGVGGGITAVLPSQFGLGVFSPPLDKLGNSVRGIKVCQLLSEYFHLHVLETEDDVNQNIPITYDLSEIRSSRMRGQSDNETLEEFGSRVSVFELSGVINFIGSNFITRSVAEEDFQDFIVLSFIRVNRLTRASIEVFRLFFDQILSKSQRVIVVDKEVVKDHPKGLFGEMADLIKQNCQCFENLDKAIEWIESQLIAEYGEGQNNSEDFSPLADQPLLKGLPNSDLETLQKNVTSTEYESGSKIIQLNEKADGIYFLRSGKVSVMVGDGIYVSGLDAGTCFG

SEQ ID NO: 141087 - protein, 281 aa, Unknown
  Bacterial polypetide isolated from the Sargasso Sea
PAKSGVGGGIFLVVPQLMGICIFSPRLDLVGNSIRGLEVAKEITEKYLVHLFDGTMTDTKRIDPRLPIARWRANNCAEAIWAASNGSIRTLERLVSSQRNLEVGDYDRRTPLHLASAEGHIEVVNFLLNEGVKPIPDRWGGYPISDAKNNDHKEIVDIFNKLDIEYTEPLHYIEDPNGNSDEFAVYENESLVIELLFAAAENDVNGIRQLVAQGVPVHAGDYDSRTALHLAAAEGSLDAVKYLVSHGHPLYVRDRWGATPLDEAKREKRDSVNVFLTELMK

SEQ ID NO: 141088 - protein, 91 aa, Unknown
  Bacterial polypetide isolated from the Sargasso Sea
QTVDGTELISQVQTRQLNALLATSGLYDGAGEFAYRVGMPGKSGVGGGIIAVIPGELSICVWSPELDENGNSLAGTAMLEHLSQRLGRSIF

SEQ ID NO: 141089 - protein, 622 aa, Unknown
  Bacterial polypetide isolated from the Sargasso Sea
MNIKKKNGHFFKEKNDVPALKSFLSQAYQNIFDDKSGAPAGYIPELAIVNPEQFGIAITTSDGFTNEVGDSSTEFTIQSISKAFVYSLALESLGTEKVLKTIGIEPSGEAFNSIRLKDDNRPFNPMVNSGAIACTALICQNNGKEAFETILNMLSEFAGRILNVDDKVFSSESATGDRNRAIGWLLRNSDNFSCDVEEVLEVYFRQCSILVSARDLSIMGATLSNNGTNPVTKKRVVSKTTAVQTMSVMVSSGMYDYSGEWTYRVGLPAKSGVGGGITAVLPSQFGLGVFSPPLDKLGNSVRGIKVCQLLSEHFHLHVLEAEDDVTQNIPITYDLREIRSSRTRCTSDNETLEDFGSRVSVLELSGVINFIGSNFITRSVAEEDNKDFVVLSFTRVSRLTRASIEVFRLFFEKLLSKSQRMVVVDKADLKDDSKGLFGDITELIHQHCPCFKNLDKALEWVEDQLIAQYGTCSNHPADLLPIAEQPLLKDLPNSDLELLQQNLVSIEHESGSKIIQLHDKADGIYFLRAGKVSVMLGEDIYVAGLDAGTCFGELALIEPDAARTANIIAETKVVCSFLSIEAFNKISLINPKLNELLLRNLGLILFERLKQSNSKIVALSAN

SEQ ID NO: 141090 - protein, 363 aa, Unknown
  Bacterial polypetide isolated from the Sargasso Sea
QDEFDFYSEPAVTEALKLYFSICSLEMTSVNYATAAATLANSGVCPISQDRVLSQKTVRNCLPVLQTSGMYNASGTFFQQVGLPAKSGVGGGVILVVPRLMGICIFSPRLDKQGNSVRGIEMAKKITSKYLVHTFDGTMTDTDRLDPKIPISKWRANSCGEAIWAASNGNIRTLERLVSEQRDLQIGDYDMRTPLHLASAEGQLEAVKFLLKQGVKPIPDRWGGYGYFDAKNNNHKDIVKEYEKLDINYTQASHLVEDPNGKTDKMAIYDDELAVIELLFAAFENNVEGIRTLIAKGVPVHAGDYDSRTALHLAAAEGSLEVVEYLVSHGHPLFVRDRWGATPLDEAKREKRKSVINYLKDFK

SEQ ID NO: 141091 - protein, 341 aa, Unknown
  Bacterial polypetide isolated from the Sargasso Sea
MFIRDDFCKFATAAATLANSGVNPLTQDRVLSQKTVRNCLPVLQTSGMYNASGTFFQQVGLPAKSGVGGGVILIVPRLMGICIFSPRLDKQGNSVRGIEMARRITSKYLVHTFDGTMTDTDRLDPKIPISKWRANSCGEAIWAASNGNIRTLERLVSEQRDLQNGDYDMRTPLHLASAEGQLEAVQFLLKQGVKPIPDRWGGYGYFDAKNNNHKEIVKEFEKLDIDYTQASHLIEDPNGKTDKMAIYDDELAVIELLFAASENNVEGIRNLVAKGIPVHAGDYDSRTALHLAAAEGCLDVVEYLVTHGHPLFVRDRWGATPLDEAKREKRKSVINYLKDLN

SEQ ID NO: 141092 - protein, 276 aa, Unknown
  Bacterial polypetide isolated from the Sargasso Sea
AAAKVPVDKLLAGLPELANVAKVSGEQVFQIASESFTNEHLLRLGQRVSALAKQADVDGIVITHGTDTLEETAYFLNLTVRTNKPIVVVGSMRPGTALSADGALNLYDAVTVAASKDAAGKGVLVTMNDEIQSGRDVSKTINIKTEAFKSQWGPLGMVVEGKNYWFRAPVKRHTTNSEFNIDDIKALPAVDIVYGYGNMNTTGIDAYGKAGVKALIHAGTGNGSVAAQAVDSLKALRASGVQIIRSARVPDGFVLRNAEQPDDKYDWVVAHDLRPQ

SEQ ID NO: 141093 - protein, 226 aa, Unknown
  Bacterial polypetide isolated from the Sargasso Sea
ILMNDKGEIVQKYRKIMPWVPIEGWYPGNCTYVSDGPKGMKVSLIICDDGNYPEIWRDCAMRGAELIVRCQGYMYPAKEQQVIMAKAMAWANNSYVAVANAAGFDGVYSYFGHSALVGFDGRTLGECAEEENGIQYAELSVSAIRDARATGQSNNHLFKLLHRGYTGMINSGDGDKGTAEMPYEFYRKWVNDPEGTRKMVEEMTRPTIGTDECPIDGIPNKKTSHR

SEQ ID NO: 141094 - protein, 346 aa, Unknown
  Bacterial polypetide isolated from the Sargasso Sea
MYHGDIGSSNDTVGVAVVNYKMPRLHTKAEVLENAKNIANMLKGMKRGLPGMDLVIFPEYSTQGIMYDEAEMYETASAIPGDETEIFAAACREANVWGVFSLTGERHEQHPNKAPYNTLILMNNEGEIVQKYRKIMPWVPIEGWYPGNCTYVSDGPKGLKISLIICDDGNYPEIWRDCAMKGAELIVRCQGYMYPAKEQQIVMAKAMAWANNSYVAVANAAGFDGVYSYFGHSAIVGFDGRTLGECAEEENGIQYAQLSVSGIRDARRNAQSNNHLFKLVHRGYTGMINSGDGDKGLAECPYEFYKKWAEDPEGTREMVEAMTRPTVGVDECPIDGVPNQEDIKHS

SEQ ID NO: 141095 - protein, 41 aa, Unknown
  Bacterial polypetide isolated from the Sargasso Sea
MKLTPREKDKLLISLAAIVAKNRLSKGIKLNYPEVIALITE

SEQ ID NO: 141096 - protein, 56 aa, Unknown
  Bacterial polypetide isolated from the Sargasso Sea
MQRKPVDIPKRDFISLNIDLKQMGVGGDNSWGARTLSKYTINPGNYSYSFTIIPFN

SEQ ID NO: 141097 - protein, 122 aa, Unknown
  Bacterial polypetide isolated from the Sargasso Sea
MILIGGSIACAQMGDPNASIPTPQPVYTRPMFSSFGTSLEKSSVIFTSKLALEKNSLKDASIRKDLLPVENTRAISKKDMILNNKCPKIEVNPETYEVKADGEIITCEPAKELPLAQRYFMF

SEQ ID NO: 141098 - protein, 240 aa, Unknown
  Bacterial polypetide isolated from the Sargasso Sea
EDIAFAESRIRRETIAAEDILHDMGAFSIIASDSQAMGRVGEVITRTFQTAHKMKVQRGPLSKDSDRNDNYRVKRYISKVTINPAIAHGINKYVGSIEKGKMADLVLWKPSFFAVKPELVVKGGSIVWSQMGDANASIPTPGPVHGRPMFASFGQSLIKSSFTFLSKNSIDQNIPNKLGLQKKCIAVENTRNINKSHLKLNNKLPNISVDPQTYEVFSDGELLTCEPLDEVPMAQRYFLL

SEQ ID NO: 141099 - protein, 125 aa, Unknown
  Bacterial polypetide isolated from the Sargasso Sea
KPEMILIGGSISCAQMGDPNASIPTPQPVYTRPMFSSFGTSLEKSSVIFTSKLALEKNSLKDASIRKDLLPVENTRAISKKDMILNNKCPKIEVNPETYEVKADGEIITCEPAKELPLAQRYFMF

SEQ ID NO: 141100 - protein, 46 aa, Unknown
  Bacterial polypetide isolated from the Sargasso Sea
MKPGEIITKKEEIDLNKESKITKLKISNSGDRPVQVGSHYHFFETK

SEQ ID NO: 141101 - protein, 106 aa, Unknown
  Bacterial polypetide isolated from the Sargasso Sea
MSNLIPGEIIPEQGEIELNLSKQIKSLTVSNSGDRPVQVGSHYHFYEANKALIFDREITHGMRLDIPAGTAIRFEPGDTTDVKLVPFSGLRNAYGFNSIVNGSLDS

SEQ ID NO: 141102 - protein, 260 aa, Unknown
  Bacterial polypetide isolated from the Sargasso Sea
IIMDWSQNSKTKNLKPSISITDSLNEEINSETGLKLNYPMSIDTLISVEDGSEVKAGQVIARIPKESSKTKDITGGLPRVAELFEARKPKDPAIMSEIDGKISFGKDYKNKRRLVITSVDEKDTFEILIPRSKYLTVQEGDFVKRGDILVDGTPVPHDILRILGVEELARYLVREVQSVYKLQGVFINDKHIEVISRQMLQKVMIKEPGDSNLLQGEQIHKNELLKINKKLEDEGKKAIVYEPVLLGITKASLQTNSFIS

SEQ ID NO: 141103 - protein, 77 aa, Unknown
  Bacterial polypetide isolated from the Sargasso Sea
HIASIEKNKRADIVIWDTAFFGVKPEMVLQGGSIACAQMGDPNASIPTPQPVYSRPMFSSYGKSLEKSTATFVSKVS

SEQ ID NO: 141104 - protein, 112 aa, Unknown
  Bacterial polypetide isolated from the Sargasso Sea
AQWGDPNASIPTPQPVYTRPMFSSFGTSLEKSSVIFTSKLALENNSLKDASIRKDLLPVENTRAISKKDMIFNNKCPKIEVNPETYEVKADGEIITCEPAKELPLAQRYFMF

SEQ ID NO: 141105 - protein, 141 aa, Unknown
  Bacterial polypetide isolated from the Sargasso Sea
NKRADIVIWDTAFFGVKPEMVLQGGSISCSQMGDPNASIPTPQPVYSRPMFSSFGKSLEQSTATFVSKASLDKNSFKNSGISKSLLPVKNIRKISKKDMLLNDYCPKIEVNPETYEVLADGELITCEPAKTLPLAQRYFMY

SEQ ID NO: 141106 - protein, 78 aa, Unknown
  Bacterial polypetide isolated from the Sargasso Sea
VSNRGDRPIQVGSHIHFFEVNRALDFDRAKARGFRLNVPAGTAARFEPGDSREVELVALAGKREVYGLNNLINGALDE

SEQ ID NO: 141107 - protein, 65 aa, Unknown
  Bacterial polypetide isolated from the Sargasso Sea
GSHYHFFETNDYLVFDRKLAYGKRLNIPSGTAVRFEPGQSKDVELIEINGLKKIYGFNKKVMGKL

SEQ ID NO: 141108 - protein, 119 aa, Unknown
  Bacterial polypetide isolated from the Sargasso Sea
KGGFIAYALMGDPNASIPTTEPVYYRPMFGALGKAKTSTSFTFTSQIALDNGLEEKLKIEKKLLAVKNCRNIGKKDMIYNDATPKIEIDPETYEVKVDGEVATVDPAKEVSLARLYSLY

SEQ ID NO: 141109 - protein, 89 aa, Unknown
  Bacterial polypetide isolated from the Sargasso Sea
INLNKDSKITKIKISNSGDRPVQIGSHYHFFETNEYLVFDRELAYGKRLNIPSGTAVRFEPGQSKDVELIEINGSKKIYGFNKKVMGKL

SEQ ID NO: 141110 - protein, 100 aa, Unknown
  Bacterial polypetide isolated from the Sargasso Sea
MSNLIPGEIIPEQGEIELNHGKQFKTVTVSNSGDRPVQVGSHYHFFEANKALIFDREITHGMRLDIPAGTAIRFEPGDTTDVKLVPFSGLRNAYGFNSIV

SEQ ID NO: 141111 - protein, 87 aa, Unknown
  Bacterial polypetide isolated from the Sargasso Sea
MASTISRYDYSAMYGPTTGDKIRLADTELIIEVERDFTTYGEEVKFGGGKVIRDGMGQSQATRSQGAVDTVLTNALVVDYSGIYKAD

SEQ ID NO: 141112 - protein, 67 aa, Unknown
  Bacterial polypetide isolated from the Sargasso Sea
MPFRISRQAYAETYGPTTGDRLRLADTELILEVEKDFTVYGDEVKFGGGKVIRDGMGQAQTSRADGA

SEQ ID NO: 141113 - protein, 101 aa, Unknown
  Bacterial polypetide isolated from the Sargasso Sea
MIPGELLPASGEIMLNDGAKAITLMVVNTGDRPVQIGSHYHFAEANGALDFDRDAARGMRLDIAAGTAVRFEPGQRREVQLIPVGGARRIFGFNQTVMGAL

SEQ ID NO: 141114 - protein, 311 aa, Unknown
  Bacterial polypetide isolated from the Sargasso Sea
LNWKRCVIAAMMGAEEYGVATTALVAMGCIMVRQCHSNTCPVGVCTQDEKLREKFTGTPDKVVNLFTFIASEVREILAELGFKSLNDIIGRTDLLMQVNKASPNLDDLDLNPLFVQADPGNNKRYCESLEINEVPETLDQEIWPEIEKSLDNSEKIEKEFTIKNTNRAVGTRISHHLYKKFGYEKLDENFLTLNFKGSAGQSFGAFSSRGLKLNLKGDANDYVGKGLSGATISIKLSDESNLISNENTIIGNTVLYGATSGKLFAAGQAGDRFAVRNSGATTVVEGCDSNGCEYMTGGTVVILGNVGDNFA

SEQ ID NO: 141115 - protein, 55 aa, Unknown
  Bacterial polypetide isolated from the Sargasso Sea
MKKINRNAYADMYGPTTGDKIRLADTELFIEVEKDFTTYGEEVKFGGGKVIRDGM

SEQ ID NO: 141116 - protein, 82 aa, Unknown
  Bacterial polypetide isolated from the Sargasso Sea
MKKINRNAYADMYGPTTGDKIRLADTELFIEVEKDLTTYGEEVKFGGGKVIRDGMGQSQVSRKDGAVDTVITNALVVDVNGI

SEQ ID NO: 141117 - protein, 31 aa, Unknown
  Bacterial polypetide isolated from the Sargasso Sea
MKLTPREKDKLLISLAAIVAKNRLSKGIKLN

SEQ ID NO: 141118 - protein, 106 aa, Unknown
  Bacterial polypetide isolated from the Sargasso Sea
MSNLIPGEIIPEQGVIELNLGKEVRTVTVSNSGDRPVQVGSHYHFFEANKALIFDRDLTYGMRLDIPAGTAIRFEPGDTTDVKLVPYKGLRIVYGFNSLVNGSLEN

SEQ ID NO: 141119 - protein, 43 aa, Unknown
  Bacterial polypetide isolated from the Sargasso Sea
PRELPWLSKNQVMEGIPEMIDEVQIEAVFPDGTKLVTIHNPIN

SEQ ID NO: 141120 - protein, 246 aa, Unknown
  Bacterial polypetide isolated from the Sargasso Sea
MEADKFAGFVLAKLGATLSQASLPLDKLNHPEEDNLKSRYPSKLKRLDAVKQGFNNAIGIPTFYKKTLFNSAEEYFYSAYEKGVYKDYYGAISDYTKAIELNPNYAMAYYNRGGIKNELKDYERSIQDYDSAIRLNPNYSMAYYNRGLIKDNLGDQSGAFDDYTKAIEIYPEDPIAFYNRGIIYKNKEQYYKAIADYTDAIQLNPNYAEAYLNRGVIKNILKNYKGAIEDYSKSINLNPNIIAFNN

SEQ ID NO: 141121 - protein, 106 aa, Unknown
  Bacterial polypetide isolated from the Sargasso Sea
MSNLIPGEIISEQGEIELNLGKEVKTVTVSNSGDRPVQVGSHYHFFEANKALIFDREVTIGMRLDIPAGTAIRFEPGDMTDVKLVPFSGLRNVYGFNSLVNGSLDT

SEQ ID NO: 141122 - protein, 31 aa, Unknown
  Bacterial polypetide isolated from the Sargasso Sea
MHLSPQEKDKLLIFSAALLAERRLNRGLKLN

SEQ ID NO: 141123 - protein, 95 aa, Unknown
  Bacterial polypetide isolated from the Sargasso Sea
MSKLIPGEIIPEQGEIELNLGKQVKTVTVSNSGDRPVQVGSHYHFYEANKALIFDREITHGMRLDIPAGTAIRFEPGDTTDVKLVPFSCLRNAYG

SEQ ID NO: 141124 - protein, 76 aa, Unknown
  Bacterial polypetide isolated from the Sargasso Sea
MKPGEVITKNEKIDLNKDSKVTKIKISNSGDRPVQVGSHYHFFESNEHLVFDRKLAYGKRLNIPSGTAVRFEHRSI

SEQ ID NO: 141125 - protein, 168 aa, Unknown
  Bacterial polypetide isolated from the Sargasso Sea
MPISHLHHASPPRISTTHLHHASPSRISITHLHHASPPRISTTHLHHASHELTRSIPEDVAFAESRIRGETIAAEDILHDMGAISIMASDSQAMGRVGEVVTRTWQTANKMKEQRGELPEDAGSGADNMRIKRWEARRLLCTLRRHPHRAPFSTHVTFCTSCDLLQLM

SEQ ID NO: 141126 - protein, 125 aa, Unknown
  Bacterial polypetide isolated from the Sargasso Sea
MIPGEYFPTKDAIIANRDKKILKISVANTGDRPIQVGSHTHFAEANKALEFDREKSLGFHLNVSSGTSIRFEPGESKHVELVEFGGTKTIYGFSGVVSGKLDEKRDDAVRKLHENGFKNSLEDIT

SEQ ID NO: 141127 - protein, 139 aa, Unknown
  Bacterial polypetide isolated from the Sargasso Sea
RADLVLWDPAFFGAKPEMILIGGSIACAQMGDPNASIPTPQPVYSRPMFSSFGTSLEKSSVIFTSKLALEKNSLKDASIRKDLLPVENTRSISKKDMILNNKCPKIEVNPETYEVKADGEIITCEPAKELPLAQRYFMF

SEQ ID NO: 141128 - protein, 133 aa, Unknown
  Bacterial polypetide isolated from the Sargasso Sea
WMPQFFGIKPKMIVKGGFIAYALMGDPNASIPTTEPVYYRPMFGALGKTKQSTSVTFTSQLALDDGLQDKLNINKKLVAVKNCRNVGKKDMIHNDATPKIEIDPETYEVKVDGEIATVDPATNVSLGRLYSLF

SEQ ID NO: 141129 - protein, 150 aa, Unknown
  Bacterial polypetide isolated from the Sargasso Sea
SDHIGSIEKNKRADIVIWDTAFFGVKPEMVLQGGSISCSQMGDPNASIPTPQPVYSRPMFSSFGKSLEKSTATFVSKASLDKNSFKNSGISKSLLPVKNIRKISKKDMVLNDYCPNIEVNPETYEVLADGELITCEPAKILPLAQRYFMY

SEQ ID NO: 141130 - protein, 106 aa, Unknown
  Bacterial polypetide isolated from the Sargasso Sea
MSNLIPGEIIPEQGEIELNLSKQVKTVTVSNSGDRPVQVGSHYHFYEANKALIFDREITHGMRLDIPAGTAIRFEPGDTTDVKLVPFSGLRNAYGFNSLVNGSLDS

SEQ ID NO: 141131 - protein, 106 aa, Unknown
  Bacterial polypetide isolated from the Sargasso Sea
MSNLIPGEIIPEEGEIELNLSKQVKTVTVSNSGDRPVQVGSHYHFFEANRALIFDREITKGMRLDIPAGTAIRFEPGDTTDVKLVPFSGLRNVYGFNSLINGSLNS

SEQ ID NO: 141132 - protein, 32 aa, Unknown
  Bacterial polypetide isolated from the Sargasso Sea
MNLTPREKDKLLVAMAAEVARKRLARGVKLNY

SEQ ID NO: 141133 - protein, 36 aa, Unknown
  Bacterial polypetide isolated from the Sargasso Sea
SKLQVMEGIPEMIDEVQIEAVFPDGTKLVTIHNPIN

SEQ ID NO: 141134 - protein, 45 aa, Unknown
  Bacterial polypetide isolated from the Sargasso Sea
MKPGEIITKKGEIDLNKDSNITKLKVSNSGDRPVQVGSHYHFFET

SEQ ID NO: 141135 - protein, 77 aa, Unknown
  Bacterial polypetide isolated from the Sargasso Sea
MIPGELLIDDGEHELNAGRATVTVVVSNTGDRPVQIGSHYHFYEVNEALSFDRETARGFRLNIAAGTAVRFEPGQER

SEQ ID NO: 141136 - protein, 131 aa, Unknown
  Bacterial polypetide isolated from the Sargasso Sea
QHFFGAKPEMILIGGSIACAQMGDPNASIPTPQPVYTRPMFSSFGTSLEKSSVVFTSKLALEKNSLKDASIRKDLLPVENTRAISKKNMILNNRCPKIEVNPETYEVKADGEIITCEPAKELPLAQRYFMF

SEQ ID NO: 141137 - protein, 101 aa, Unknown
  Bacterial polypetide isolated from the Sargasso Sea
MIPGEYIIKEGQIELNSNLKSLRVLVSNTGDRPIQVGSHYHFFESNSFLEFDRKKTKGMRLNIPSGTAIRFEPGQEKEIFLIPYQGFKKVFGFNKKIMGKL

SEQ ID NO: 141138 - protein, 101 aa, Unknown
  Bacterial polypetide isolated from the Sargasso Sea
MKPGEVITKNEEIDLNKDSNVTKIKISNSGDRPVQVGSHYHFFETNEHLVFDRELSYGKRLNIPSGTAVRFEPGQSKDVELIEINGLKKIYGFNKKVMGSL

SEQ ID NO: 141139 - protein, 139 aa, Unknown
  Bacterial polypetide isolated from the Sargasso Sea
MKKISRDAYADMYGPTTGDKIRLADTELFIEVEKDLTTYGEEVKFGGGKVIRDGMGQSQVSRKDGAVDTVITNALVVDVNGIYKADIGLKDGLINEIGKAGNPDTQPNVNIIIGPGTEIIAGEGKIITAGGFDSHIHFI

SEQ ID NO: 141140 - protein, 97 aa, Unknown
  Bacterial polypetide isolated from the Sargasso Sea
EVITKDEHIELNKDTKFTKIKISNSGDRPVQVGSHYHFFETNEYLVFDRELSYGKRLNIPSGTAVRFEPGQSKDVELIEINGSKKIYGFNKKVMGNL

SEQ ID NO: 141141 - protein, 263 aa, Unknown
  Bacterial polypetide isolated from the Sargasso Sea
TRNTLEEHLDMLMVCHHLDSKIPEDIAFAESRIRRETIAAEDILHDVGAFSIIASDSQAMGRVGEVITRTFQTAHKMKVQRGPLTQDSDRNDNYRVKRYISKVTINPAIAHGIDKHVGSIEKGKIADLVLWKPSFFAVKPELVVKGGSIVWSQMGDANASIPTPGPVHGRPMFASFGQSLIKSSFTFLSKNSIEQNIPNKLGLQKKCIAVENTRNINKSNLKLNSKLPNISVDPQTYEVFSDGELLTCEPLDEVPMAQRYFLL

SEQ ID NO: 141142 - protein, 54 aa, Unknown
  Bacterial polypetide isolated from the Sargasso Sea
MKLTPREKDKLLISLAAIVAKNRLSKGIKLNYPEAIALITDFVVEGAREGKSVA

SEQ ID NO: 141143 - protein, 101 aa, Unknown
  Bacterial polypetide isolated from the Sargasso Sea
MIPGEVITADGNIVLNEGRSELEINVSNSGDRPIQVGSHYHFFETNEALLFNRNETKGMRLNIAAGTAIRFEPGQTRQVRLVPFSGERKIFGFQKKIMGEL

SEQ ID NO: 141144 - protein, 63 aa, Unknown
  Bacterial polypetide isolated from the Sargasso Sea
MANSISRRSYADMYGPTVGDKVRLADTELFIEVEKDLTSYGDEVKFGGGKVIRDGMGQSQISR

SEQ ID NO: 141145 - protein, 195 aa, Unknown
  Bacterial polypetide isolated from the Sargasso Sea
TWQLASKMKDQLGRLSTEKTKKGDNERIKRYIAKYTINAAKSFGIEKHVGSLEKGKMADVVLWKPGFFGIKPEIVVKGGFIAYGAMGDSAASLMTCEPVQMRPQWGGFGEAKKAISACFVHPSAIEDNLSDKLNISKSLLPASGTRQLKKSDMLHNDLCPDIRVDAQTFDVFVDGDLAWCEPAKKLPLTQLYMFR

SEQ ID NO: 141146 - protein, 101 aa, Unknown
  Bacterial polypetide isolated from the Sargasso Sea
MKPGEIITKNEEIDLNKNSKITKIKISNSGDRPVQVGSHYHFFETNEHLVFDRELSYGKRLNIPSGTAVRFEPGQAKDVELIEINGSKKIYGFNKKVMGKL

SEQ ID NO: 141147 - protein, 66 aa, Unknown
  Bacterial polypetide isolated from the Sargasso Sea
MKLTPREKDKLLISLAAIVAKNRLSKGIKLNYPEAIALITDFVVEGAREGKSVAELMEAGAHVIKK

SEQ ID NO: 141148 - protein, 70 aa, Unknown
  Bacterial polypetide isolated from the Sargasso Sea
MKLTPREKDKMFVSLAAIVARNRLKRGVKLNYPEAIAIITDFVIEGARDGKSVAYLMEEGAQVISKSDCM

SEQ ID NO: 141149 - protein, 93 aa, Unknown
  Bacterial polypetide isolated from the Sargasso Sea
RNEEIELIKDSKVTKIKISNAGDRPVQVGSHYHFFETNDHLVFDRKLAYGKRLNIPSGTAVRFEPGQSKDVELIEINGSKKIYGFNKKVMGKL

SEQ ID NO: 141150 - protein, 101 aa, Unknown
  Bacterial polypetide isolated from the Sargasso Sea
MKKINRDAYADMYGPTTGDKIRLADTELFIEVEKDFTTYGEEVKFGGGKVIRDGMGQSQVSRKDGAVDTVITNALIVDVNGIYKADIGLKDGLINEIGKKP

SEQ ID NO: 141151 - protein, 102 aa, Unknown
  Bacterial polypetide isolated from the Sargasso Sea
MKPGEIITKQNNDIILNADRNSITFKVSNTGDRPIQVGSHYHFAETNKYLEFDREKSKGMRLDIPSGTAIRFEPGQSKDVELIPITGNRKIFGFNKKVMGQV

SEQ ID NO: 141152 - protein, 101 aa, Unknown
  Bacterial polypetide isolated from the Sargasso Sea
MKPGEIISKKGEIDLNKDSSIIKLKVSNSGDRPVQVGSHYHFFETNDYLVFDRDLSYGKRLNIPSGTAVRFEPGQSKDVELIEIKGLKKIFGFNKKVMGNL

SEQ ID NO: 141153 - protein, 47 aa, Unknown
  Bacterial polypetide isolated from the Sargasso Sea
MKPGEIITLDEKITLNEASKIKKIKVSNTGDRPIQVGSHYHFFESNK

SEQ ID NO: 141154 - protein, 141 aa, Unknown
  Bacterial polypetide isolated from the Sargasso Sea
MSYKIDRKTYAQTYGPTTGDRVRLADTELFIEVEKDLTIYGDEVKFGGGKVIRDGMGQSQIRRTDGAVDTVITNALILDWWGIIKADVGIKDGMIFEIGKAGNPDIQDNVDIVIGASTEVIAGEGHILTAGSIDTHIHFIC

SEQ ID NO: 141155 - protein, 76 aa, Unknown
  Bacterial polypetide isolated from the Sargasso Sea
VANTGDRPVQVGSHYHFAETNPALDFDRAMARGMRLDIAAGTAVRFEPGQRREVMLVPLSGNRHVYGFNQQIMGEL

SEQ ID NO: 141156 - protein, 101 aa, Unknown
  Bacterial polypetide isolated from the Sargasso Sea
MKPGEVITKNDKIDLNKDSKVTKIKISNSGDRPVQVGSHYHFFETNEYLVFDRKLSYGKRLNIPSGTAVRFEPGQSKDVELIEINGLKKIYGFNKKVMGNL

SEQ ID NO: 141157 - protein, 73 aa, Unknown
  Bacterial polypetide isolated from the Sargasso Sea
MKLTPREKDKLLISLAAIVAKNRLSKGIKLNYPEAIALITDFVVEGAREGKSVAELMEAGAHVIKKKDCMEGI

SEQ ID NO: 141158 - protein, 101 aa, Unknown
  Bacterial polypetide isolated from the Sargasso Sea
MKPGEIITKKGEIDLNKDSNKIKLKVSNSGDRPVQVGSHYHFFETNDYLVFDRDLSYGKRLNIPSGTAVRFEPGQSKDVELIEINGLKKIFGFNKKIMGNL

SEQ ID NO: 141159 - protein, 102 aa, Unknown
  Bacterial polypetide isolated from the Sargasso Sea
MIPGEIKTDSGDRELNVGRPRIKIKVANAGDRPIQVGSHYHFYEVNNALKFDREATKGYRLDITSSTAIRFEPGQEREVTLIPYQGSRTVIGFQGKVQGVLS

SEQ ID NO: 141160 - protein, 85 aa, Unknown
  Bacterial polypetide isolated from the Sargasso Sea
MKLTPREKDKLLISLAAIVAKNRLSKGIKLNYPEAIALITDFVVEGAREGKSVAELMEAGAHVIKKKDCMEGIPDMIKEVQVEAT

SEQ ID NO: 141161 - protein, 67 aa, Unknown
  Bacterial polypetide isolated from the Sargasso Sea
MKKIPRQSYAAMYGPTTGDKVRLADTELFIEVEKDLTVYGEEVKFGGGKVIRDGMGQSQVSRSDGAV

SEQ ID NO: 141162 - protein, 101 aa, Unknown
  Bacterial polypetide isolated from the Sargasso Sea
MKPGEVITKKEEINLNKDSKVTKIKISNSGDRPVQVGSHYHFFETNEYLVFDRKLAYGKRLNIPSGTAVRFEPGQSKDVELIEINGLKKIYGFNKKVMGKL

SEQ ID NO: 141163 - protein, 114 aa, Unknown
  Bacterial polypetide isolated from the Sargasso Sea
MAKISRAAYADMYGPTTGDKVRLADTDLVVEVENDLTTYGEEVKFGGGKVIRDGMGQSQISREKGAADTVITNSLIVDVNGIYKADVGLKDGKIFGIGKAGNPDTQSKVNIIIW

SEQ ID NO: 141164 - protein, 101 aa, Unknown
  Bacterial polypetide isolated from the Sargasso Sea
MKPGEVITKKEEININKDSKITKIKISNSGDRPVQVGSHYHFFETNEYLVFDRKLAYGKRLNIPSGTAVRFEPGQSKDVELIEINGLKKIYGFNKKVMGNL

SEQ ID NO: 141165 - protein, 54 aa, Unknown
  Bacterial polypetide isolated from the Sargasso Sea
MKPGEIITKKNSSILLNEDRNSVTIKVSNTGDRPIQVGSHYHFAETNEFLKFDR

SEQ ID NO: 141166 - protein, 101 aa, Unknown
  Bacterial polypetide isolated from the Sargasso Sea
MKPGEVITKKEEIDLNKDSKITKIKISNSGDRPVQVGSHYHFFETNKHLLFDRDLAYGKRLNIPSGTAVRFEPGQSKDVELIEIKGLKKIYGFNKKVMGNL

SEQ ID NO: 141167 - protein, 101 aa, Unknown
  Bacterial polypetide isolated from the Sargasso Sea
MKPGEIISNKEEIDLNKDSKVTKLKISNSGDRPVQVGSHYHFFETNEYLIFDRELSYGKRLNIPSGTAVRFEPGQSKDVELIEINGLKKIYGFNKKVMGNL

SEQ ID NO: 141168 - protein, 101 aa, Unknown
  Bacterial polypetide isolated from the Sargasso Sea
MKPGEVITKNEDIDLNKDSKVTKIKISNSGDRPVQVGSHYHFFETNEHLVFDRELAYGKRLNIPSGTAVRFEPGQSKDVELIEINGSKKIYGFNNKVMGNL

SEQ ID NO: 141169 - protein, 134 aa, Unknown
  Bacterial polypetide isolated from the Sargasso Sea
LWNPAFFGVKPEMVLLGGTIAVAQMGDPNASIPTPQPVYTRSMFGAFGRALSESSVTFVSEAAHADGISSKLGLAKKAVPVKNTRNIGKLDLKLNVALPKIDVDPETYEVRADGELLTCQPADEVSMAQRYFMF

SEQ ID NO: 141170 - protein, 116 aa, Unknown
  Bacterial polypetide isolated from the Sargasso Sea
MIVAAPMGDPNASIPTPQPVHYRYMFGAFGAARTSTKITFLSHAAISRGVPEQLALRSIIGEVKRCRGVKKDDMKLNDYKPNIEVDPQTYQVRADGKLLTCEPASVLPLTQRYFLF

SEQ ID NO: 141171 - protein, 85 aa, Unknown
  Bacterial polypetide isolated from the Sargasso Sea
SDSQAMGRVGEVIIRTWQTAHKMKVQRGSLPEEKGDNDNFRVKRYLAKYTINPAIAHGISKYIGSVEKNKRADLVLWDPAILWCQ

SEQ ID NO: 141172 - protein, 98 aa, Unknown
  Bacterial polypetide isolated from the Sargasso Sea
MKPGEIITKKNKSIHLNEDRNSITIKVSNTGDRPIQVGSHYHFAETNEFLKFDREKSRGMRLDIPSGTAIRFEPGQSRDVELIPITGNRKIFGFNKKV

SEQ ID NO: 141173 - protein, 100 aa, Unknown
  Bacterial polypetide isolated from the Sargasso Sea
MHLSPQEKDKLLIFSAALLAERRLSRGIKLNYPETIAFLSFQVLEGARDGKSVSQLMSEGTTWLSKSQVMEGIPEMVDEVQIEAVFPDGTKLVTIHHPIN

SEQ ID NO: 141174 - protein, 101 aa, Unknown
  Bacterial polypetide isolated from the Sargasso Sea
MIPGEVIPLAGEIALNEDRKSTTLMVANTGDRPIQVGSHYHFGEANSALEFDREIALGMRLDIAAGTAIRFEPGQQREVELIEISGGRRIFGFNQKVMGEI

SEQ ID NO: 141175 - protein, 60 aa, Unknown
  Bacterial polypetide isolated from the Sargasso Sea
MKLTPREKDKLMVSMAANVARKRLERGVKLNYPEAIALITDFVIEGARDGKMVSELMETA

SEQ ID NO: 141176 - protein, 44 aa, Unknown
  Bacterial polypetide isolated from the Sargasso Sea
MHLSPQEKDKLLIFSAALLAERRLNRGLKLNYPETIAFLSFQVL

SEQ ID NO: 141177 - protein, 244 aa, Unknown
  Bacterial polypetide isolated from the Sargasso Sea
PKIPEDVAFAESRIRRETIAAEDILHDLGAFSIIASDSQAMGRVGEVITRTFQTAHKMKVQRGALPEDSARNDNHRLKRYIAKVTINPALAHGISNDVGSIETGKLADLVLWKPGFFGIRPELVVKGGSIVWAQMGDANASIPTPGPVHGRPMFGAFGKALAPSCLTFVSEAAMDADIQRQLGLERTCMAVKDTRSVGKSALKLNSALPKVSVDPQTYEVFADGELLTCEPAEVLPLAQRYLLL

SEQ ID NO: 141178 - protein, 101 aa, Unknown
  Bacterial polypetide isolated from the Sargasso Sea
MKPGEVITKNEEIDLNKDTKVTSIKISNSGDRPVQVGSHYHFFETNEYLLFDRKLAYGKRLNIPSGTAVRFEPGQSKDVELIEINGLKKIYGFNKKVMGNL

SEQ ID NO: 141179 - protein, 72 aa, Unknown
  Bacterial polypetide isolated from the Sargasso Sea
MVPGEILTKDEDILLNAGVEAISLTVANTGDRPIQVGSHYHFYETNEALKFDRASAKGMRLDIAAGTAVRFE

SEQ ID NO: 141180 - protein, 102 aa, Unknown
  Bacterial polypetide isolated from the Sargasso Sea
MKPGEIITKENSELKLNENRTSILIQVSNTGDRPIQIGSHYHFAEANEFLEFDRNTSRGMRLNIPSGTAVRFEPGQTKDVELIEIGGERKIFGFNKKIMGNL

SEQ ID NO: 141181 - protein, 78 aa, Unknown
  Bacterial polypetide isolated from the Sargasso Sea
MKLTPREKDKLLISLAAIVAKNRLSKGIKLNYPEAIALITDFVVEGAREGKSVAELMEAGAHVIKKKDCMDGIPDMVK

SEQ ID NO: 141182 - protein, 109 aa, Unknown
  Bacterial polypetide isolated from the Sargasso Sea
MAQKVSREKYAGIFGPTTGDQVRLADTELFAEVENDHTIYGEEVKFGGGKVIRDGMGQSQIPRSEGAVDLVITNALIIDYTGIYKADVGVKDAKIHSIGKAGNPDIQDG

SEQ ID NO: 141183 - protein, 101 aa, Unknown
  Bacterial polypetide isolated from the Sargasso Sea
MIPGEIKIAEEELIINSDKEAILVEVSNTGDRPIQVGSHYHFFETNENLKFDRKSTRGMRLDIISGTAIRFEPGQSKTVSLIPYSGKRKVYGFNKKIMGDL

SEQ ID NO: 141184 - protein, 71 aa, Unknown
  Bacterial polypetide isolated from the Sargasso Sea
DRPVQVGSHYHFFETNEHLVFDRKLAYGKRLNIPSGTAVRFEPGQSKDVELIEINGLKKIYGFNKKVMGDL

SEQ ID NO: 141185 - protein, 117 aa, Unknown
  Bacterial polypetide isolated from the Sargasso Sea
MSYKIDRNTYAQTYGPTTGDRVRLADTELFIEVEKDLTTYGDEVKFGGGKVIRDGMGQSQVTRGDGAVDTVITNALILDWWGIIKADVGIKDGKIFGIGKAGNPDIQDKIDIVIGAS

SEQ ID NO: 141186 - protein, 56 aa, Unknown
  Bacterial polypetide isolated from the Sargasso Sea
MKLTPREKDKLMLSMAANVARKRLERGVKLNYPEAIALITDFVIEGARDGKMVSEL

SEQ ID NO: 141187 - protein, 105 aa, Unknown
  Bacterial polypetide isolated from the Sargasso Sea
MTDSNKTISRQAYADMFGPTKGDKVRLADTELWIEVENDYTTYGDEVKFGGGKVIRDGMGQSQSTSEKVMDCVMTNALVIDYTGIYKADIGIKGGRIAAIGKAGN

SEQ ID NO: 141188 - protein, 78 aa, Unknown
  Bacterial polypetide isolated from the Sargasso Sea
MKLTPREKDKLMISMAATVARKRLKRGVKLNYPEAIALITDFVIEGARDGKMVSELMEAGAHVVKKEDCMDGIPDMIT

SEQ ID NO: 141189 - protein, 101 aa, Unknown
  Bacterial polypetide isolated from the Sargasso Sea
MIPGEIITKSEEIVLNIDSDALKIKVSNTGDRPVQVGSHYHFYETNDFLSFDRDKTKGMRLDIAAGTAVRFEPGQTREVNLINIKGDRNIFGFNQKIMGAL

SEQ ID NO: 141190 - protein, 79 aa, Unknown
  Bacterial polypetide isolated from the Sargasso Sea
MPYRISRQAYAETYGPTTGDRVRLADTDLILEVEKDYTVYGDEVKFGGGKVIRDGMGQSQTPRAEGAVDTVITNALILD

SEQ ID NO: 141191 - protein, 164 aa, Unknown
  Bacterial polypetide isolated from the Sargasso Sea
VAKYTINPAITHGLSKHIGSITEGKRADIVIWDPAFFGVKPEIVMLGGSIACAQMGDPNASIPTPQPVYTRPMFSSYGRSLETSSITFVSKDSIKSGSLDSLKLAKNTVAVGKTRDISKKDMVYNNYCPDISVDPETYEVTADGEILTCEPATELPMAQRYFLF

SEQ ID NO: 141192 - protein, 102 aa, Unknown
  Bacterial polypetide isolated from the Sargasso Sea
MLLTPTELERLTLYSAAELSRKRRAKGLRLNFPEASALIADEILEGAREGRSVAELIGFGSTILSTDDVLPGVADLLPVLQVEGTFPDGTKLVTVHQPIRPG

SEQ ID NO: 141193 - protein, 50 aa, Unknown
  Bacterial polypetide isolated from the Sargasso Sea
MKLTPREKDKLLVSLAAMVARGRLQRGVKLNHPEAIALITDFVVEGARDG

SEQ ID NO: 141194 - protein, 101 aa, Unknown
  Bacterial polypetide isolated from the Sargasso Sea
MRPGEVITKNEEIDLNKDSKVTKIKISNSGDRPVQVGSHYHFFETNEHLVFDRELSYGKRLNIPSGTAVRFEPGQSKDVELIEINGLKKIYGFNKKVMGSL

SEQ ID NO: 141195 - protein, 186 aa, Unknown
  Bacterial polypetide isolated from the Sargasso Sea
KIQRGRLKEEQGKNDNLRVKRYIAKYTINPAIAHGVSNHIGTLEKNKRADIVIWDPAFFGAKPEMILVGGSIACAQMGDPNASIPTPQPIHSRPMFSSYGRSLESSSVTFVSNNSIQEDAFNDLEIKKELLPVANTRKISKKDMVLNNICPEIEVNPETYEVKADGELLTCEPASELPLAQRYFLY

SEQ ID NO: 141196 - protein, 172 aa, Unknown
  Bacterial polypetide isolated from the Sargasso Sea
DNFRVKRYLAKYTINPAIAHGISKHIGSIEKNKRADLVLWDPAFFGAKPEMILIGGSIACAQMGDPNASIPTPQPVYTRPMFSSFGTSLEKSSVIFTSKLALEKNSLKDASIRKDLLPVENTRSISKKDMILNNKCPKIEVNPETYEVKADGEIITCEPAKELPLAQRYFMF

SEQ ID NO: 141197 - protein, 87 aa, Unknown
  Bacterial polypetide isolated from the Sargasso Sea
MSYKIERNTYAQTYGPTTGDRVRLADTELFIEVEKDLTTYGDEVKFGGGKVIRDGMGQSQVRREDGAVDTVITNALIVDWWGILRRM

SEQ ID NO: 141198 - protein, 101 aa, Unknown
  Bacterial polypetide isolated from the Sargasso Sea
MKPGEIITKKEEIDLNKESKITKLKISNSGDRPVQVGSHYHFFETNEYLVFDRELSYGKRLNIPSGTAVRFEPGQSKDVELIEINGLKKIYGFNKKVMGNL

SEQ ID NO: 141199 - protein, 54 aa, Unknown
  Bacterial polypetide isolated from the Sargasso Sea
MVKISRAAYADMYGPTTGDKVRLADTELFIEVENDLTNYGEEVKFGGGKVIRDG

SEQ ID NO: 141200 - protein, 101 aa, Unknown
  Bacterial polypetide isolated from the Sargasso Sea
MIPGEILTDDGEHELNAGRATLTLVVANTGDRPVQVGSHYHFFEVNDALSFDRAAARGFRLNIAAGTAVRFEPGQTRTIELVALAGDRAVYGFQGKVMGPL

SEQ ID NO: 141201 - protein, 102 aa, Unknown
  Bacterial polypetide isolated from the Sargasso Sea
MKPGEIITKQNNNIILNEDRNSIILKVSNTGDRPIQVGSHYHFSETNQYLKFDREKSIGMRLDIPSGTAIRFEPGQSKDVELIPVTGNRKIFGFNKKVMGQL

SEQ ID NO: 141202 - protein, 101 aa, Unknown
  Bacterial polypetide isolated from the Sargasso Sea
MKPGEVITKNEEIDLNKDFKVTKIKISNSGDRPVQVGSHYHFFETNEHLVFDRQLAYGKRLNIPSGTAVRFEPGQSKDVELIEINGSKKIYGFNKKVMGSL

SEQ ID NO: 141203 - protein, 229 aa, Unknown
  Bacterial polypetide isolated from the Sargasso Sea
MIPGEYFPTGNAIIANKDKKILKITVANTGDRPIQVGSHTHFSEANKALEFDREKSLGFHLNISAGTSIRFEPGESKHVQLVEFGGTKTIYGFSGMVSGNLDEKRNDAIKKLHENGFKNSLEDTTEEQGSLEIPRNRYVELFGPSKGDKVRLADTDLILEVEEDLIKHGDELVFGGGKSARDGLGQASGVLRDQSADLVITNAVIVDAKLGIIKADIGIKDGKILGVGN

SEQ ID NO: 141204 - protein, 101 aa, Unknown
  Bacterial polypetide isolated from the Sargasso Sea
MKPGEVITKNKDIDLNKDSKVTKIKISNSGDRPVQVGSHYHFFETNEYLVFDRELAYGKRLNIPSGTAVRFEPGQSKDVELIEINGLKKIFGFNKKVMGSL

SEQ ID NO: 141205 - protein, 103 aa, Unknown
  Bacterial polypetide isolated from the Sargasso Sea
MIPGEIITKNGTITFNEGKKTITIKVANTGDRAIQVGSHYHFYETNEFLSFDRNKTIGFRLNIPSGSSVRFEPGQIRDVILVSYSGEKVVKGFNAKIQGSLEG

SEQ ID NO: 141206 - protein, 101 aa, Unknown
  Bacterial polypetide isolated from the Sargasso Sea
MKPGEVITKNEKIDLNKDSKVTKIKISNSGDRPVQVGSHYHFFETNEYLVFDRKLSYGKRLNIPSGTAVRFEPGQSKDVELIEINGLKKIYGFNKKVMGNL

SEQ ID NO: 141207 - protein, 101 aa, Unknown
  Bacterial polypetide isolated from the Sargasso Sea
MKPGEVITKNEEIDLNKDSKVTSIKISNSGDRPVQVGSHYHFFESNEHLVFDRKLAYGKRLNIPSGTAVRFEPGQSKDVELIEIKGLKKIYGFNKKVMGNL

SEQ ID NO: 141208 - protein, 101 aa, Unknown
  Bacterial polypetide isolated from the Sargasso Sea
MKPGEVITKNEDIDLNKDSKVTKIKISNSGDRPVQVGSHYHFFETNEYLVFDRKLAYGKRLNIPSGTAVRFEPGQSKDVELIEINGLKKIYGFNKKVMGNL

SEQ ID NO: 141209 - protein, 101 aa, Unknown
  Bacterial polypetide isolated from the Sargasso Sea
MKPGEIITKKGEIDLNKESKKTKLKVSNSGDRPVQVGSHYHFFETNNYLVFDRDLSYGKRLNIPSGTAVRFEPGQSKDVELIEINGLKKIFGFNKKIMGNL

SEQ ID NO: 141210 - protein, 130 aa, Unknown
  Bacterial polypetide isolated from the Sargasso Sea
MSAIEIIKMGNPLLREVAEKFSVEEIKSPDTGLLLEDMWDSLEAAGGIGLAAPQIGILKQLAVIKLSEDSDRYPDMEDSEAFVIFNPEITVLDKTEQGFWEGCLSVPGLRGFVERPRKIRVDFLDEGAQP

SEQ ID NO: 141211 - protein, 61 aa, Unknown
  Bacterial polypetide isolated from the Sargasso Sea
SIKVTYTDENKKNKTLEANGLLATCIQHEIDHLNGILFIDHISKLKREMILKKAIKEYTKN

SEQ ID NO: 141212 - protein, 175 aa, Unknown
  Bacterial polypetide isolated from the Sargasso Sea
LAAGGVGLAANQIGELSRIITLHIPEEKKPWVLINPEIISKKGSRDVLEGCLSFPGYEGLVKRSVSVSARWLDLNKSLYKVTKEELFAQALEHEIDHLNGILYTDHLLEHEKLKQAGLKQDQPHLHDVDMKIIAHKEQDEPSEIVESKLNFSKLYSDSSISQMQYDLFNEGFLEN

SEQ ID NO: 141213 - protein, 66 aa, Unknown
  Bacterial polypetide isolated from the Sargasso Sea
TIKLKFRDEMGRPRKMKADGLLARCIQHEMDHLNGILFVDRVTSKDDLNKELIKEGFNEKDVISIN

SEQ ID NO: 141214 - protein, 120 aa, Unknown
  Bacterial polypetide isolated from the Sargasso Sea
MDFKAIVTINFEDKENNKKANYILFNPEIIKYSEETIVMEEGCLSLPDQYADVVRPKEIILEYIDENEKTIKKQIDGYEARILQHEIDHLSGKLFVDYLSSLKRNMLIKKVKKKQQLKNK

SEQ ID NO: 141215 - protein, 59 aa, Unknown
  Bacterial polypetide isolated from the Sargasso Sea
IQIGIPKRIIVMDISKDGNKNPMFFVNPIIKNKDKEKTTYEEGCLSVPNYFAEVDRPKY

SEQ ID NO: 141216 - protein, 101 aa, Unknown
  Bacterial polypetide isolated from the Sargasso Sea
FINPVIEKLSDETEDDWEGCLSIPGMSGLVRRFKRIKYSAKDLNGNNIVGEVEGLHARVIQHEFDHLNGVLYTSRLAHKSAFGYSEEIEKFWKKNNDENKK

SEQ ID NO: 141217 - protein, 209 aa, Unknown
  Bacterial polypetide isolated from the Sargasso Sea
MKKVIDCFKEDNPVIQKKLREVSVEEGLEIATELFQILNERKDGIGLAANQVGIDAQVAVVNVREPLVLINPKIVSKTNEIPYYEGCLSYPGKGCHTKRYETIEVTTEQIEGTWIFTGVEASTEGKGSWEQDKDKQDRELRTLEAVCVQHEIDHLNGMRILDRQVDTTYVREEKKIGRNQLVTIKRNDAVKVLKYKKAQKFLNQGWEIT

SEQ ID NO: 141218 - protein, 175 aa, Unknown
  Bacterial polypetide isolated from the Sargasso Sea
MAILEIRIVPDPILKIKAHKIKKIDDSIKTLALDMFETLQDAHGVGLAANQVGVLKRIAVIQTSLEDEPIYIINPEITEMSGEREVEEGCLSVPGYIGNIFRSENVKIKALNLDGKRIKIDATGLLAQALEHEIDHLNGILYLDHLKSHESLRKITDETETDTEDEEVSAKETTS

SEQ ID NO: 141219 - protein, 95 aa, Unknown
  Bacterial polypetide isolated from the Sargasso Sea
NPKIIQYSKETVVMEEGCLSLPEQYADVERPKEIVLEYIDENNNTIKKQIDGYEARILQHEIDHLSGKLFVDYLSSLKRNMLIKKVKKMKNVKNK

SEQ ID NO: 141220 - protein, 132 aa, Unknown
  Bacterial polypetide isolated from the Sargasso Sea
MTILPIRIFPDPILRQKTEEIKEINKELIDFGFNMLETMQAARGIGLAAPQVGKLVKLITIQIPENEPMIMFNPKVEKSFGKRNVEEGCLSVPGFTGIIERSVTIDASYLDQNKSKIKLTASELLSQAIEHE

SEQ ID NO: 141221 - protein, 79 aa, Unknown
  Bacterial polypetide isolated from the Sargasso Sea
MEEGCLSLPEQYADIERSKQIVLEYIDENEKIIKKEIDGYEARILQHEIDHLSGKLFVDYLSSLKRNIIIKKVKKLKYS

SEQ ID NO: 141222 - protein, 70 aa, Unknown
  Bacterial polypetide isolated from the Sargasso Sea
FAEIERPQNIVVEYLDENNKQITKEVSGVESRILQHEIDHLSGKLFVDYLSSLKRNIMIKKVQKFLKNKK

SEQ ID NO: 141223 - protein, 113 aa, Unknown
  Bacterial polypetide isolated from the Sargasso Sea
FPRIFVNGNIKDFDGESTFSEGCLSIPQVALEVVRPEKIIFKYQDMNEKWHEEEFDGLLARAIQHEMDHLNGVLTIDLVSEIQREKVQKDINKIKNDSISRIKQNSGNKRFVL

SEQ ID NO: 141224 - protein, 84 aa, Unknown
  Bacterial polypetide isolated from the Sargasso Sea
MSQRKIIIEPDPILRKKSELVEKVDQSLKKLLDDMLETMYAAPGIGLAAIQIGIPKRLIVLDVSKEDHKKDPLYLINPEITFTS

SEQ ID NO: 141225 - protein, 52 aa, Unknown
  Bacterial polypetide isolated from the Sargasso Sea
NLKAKGLLSTCIQHEIDHLNGTLFIDYLSKIKRDMILKKLVKYKKENNKFVL

SEQ ID NO: 141226 - protein, 128 aa, Unknown
  Bacterial polypetide isolated from the Sargasso Sea
WAAIQVGILKRVVVVDISKDDQEKHPLFFVNPEITYRSKETSVYEEGCLSLPGQFAEIERPAECHLKYIDFNGKEKELKADGLLSTCIQHEVDHLNGVLFIDYLSKLKKDMIIKKLLKHKKDIERVIV

SEQ ID NO: 141227 - protein, 77 aa, Unknown
  Bacterial polypetide isolated from the Sargasso Sea
MPLAIQKYPHVSLRNDNKIIGVFDAELEKLAQAMFKIMYETEGVGLAAPQVGVNYRMMVYNEAGEPGRGKEVVLVNP

SEQ ID NO: 141228 - protein, 133 aa, Unknown
  Bacterial polypetide isolated from the Sargasso Sea
MSILKIAKLGHPVLLEKASAVKNIHQPFIKQIIDDMAQTMLDANGIGLAAPQVHLSKQIIVFRTFEDEQNTEKSEDKTIKVTALINPKINNISDETNNEWEGCLSIPGMLGLVKRYNKIEYEGLDVKGNIVKE

SEQ ID NO: 141229 - protein, 61 aa, Unknown
  Bacterial polypetide isolated from the Sargasso Sea
YLDYNGENKILEADGLLATCIQHEMDHLEGILFIDYLSKLKKTMIVKKLSKRKNPPDRIIV

SEQ ID NO: 141230 - protein, 54 aa, Unknown
  Bacterial polypetide isolated from the Sargasso Sea
NKILEADGLLATCIQHEMDHLEGILFIDYLSKLKKTMIVKKLSKRKNPPDRIIV

SEQ ID NO: 141231 - protein, 152 aa, Unknown
  Bacterial polypetide isolated from the Sargasso Sea
MTAKSVVHYGNPILKKKCKPVTDFSNLDPLIDDMFDTMYEENGIGLAANQIDVDLQLFVVDISDIDEEGESIHVFANAEIVEAEGESWMNEGCLSVPDVRLDVKRPNKITLKYQDRYGNKFTNEFDALLARVIQHEVDHLNGNLIINRVSKA

SEQ ID NO: 141232 - protein, 103 aa, Unknown
  Bacterial polypetide isolated from the Sargasso Sea
PTVTFLNDEKCSFNEGCLSIPDIREDIERFDSIKIDFLDEEFNSHSLDFNGILSRVILHEYDHIQGILFTDKISKFKRTLIQKKLNKISRGQIDVNYPMKFSK

SEQ ID NO: 141233 - protein, 207 aa, Unknown
  Bacterial polypetide isolated from the Sargasso Sea
MSEHTQKIITDLKDTANAIPCAGIAANQIGYSERVFVGYKDNQLETYSIYINPKILKKTESSVRKPYPSAQDYYSDNDDLHRDCSMEACLSIPEVNMTFQRYDTISVEYQDEEGIVRNEERSGFLSKLFQHELDHLNGLTVANRIIYSIHKKKEGAFFPAVESVKDENKIKDFVNNREKVFKYLYDYMLANLLCSCYLNKLHCSDCI

SEQ ID NO: 141234 - protein, 141 aa, Unknown
  Bacterial polypetide isolated from the Sargasso Sea
MALLNIFTFPDPVLREKALPVTDFDKSLDNTAQSMLETMYVSSGIGLAAIQAGILKQIIVIDLKSGEEDISLREPHIFVNPKILKKYGSTVSEEGCLSVIDFRSDVERAEKISVEYQDVKGNIHKMEAEEMMSICLQHEID

SEQ ID NO: 141235 - protein, 192 aa, Unknown
  Bacterial polypetide isolated from the Sargasso Sea
MAVKEIVQVWDGKEIIRDNVEFLMEPTKKVNFPLSTNTKEIISDLIDTYNATPCAGVAANQIGYNKNIFIGKKNDLDHDKDFIIHINPKIDKTSDDSMQSGPEGCLSIPEKTFIMPRFDKITIRRYDENGRKQVDKLNGFISRLFQHEIEHLQGRLMIGGKIHDEMPVDKAVEKIYDELSNYYSQHDNDLKI

SEQ ID NO: 141236 - protein, 70 aa, Unknown
  Bacterial polypetide isolated from the Sargasso Sea
LSAHLCSVRWLDRNGNEQEQEFDGLWSTCVQHEIDHLNGKLFIDYIGTIKRQLITRKMQKFKREMERKET

SEQ ID NO: 141237 - protein, 122 aa, Unknown
  Bacterial polypetide isolated from the Sargasso Sea
MAVKPILTEPNKLLRQVSKPVNKVTKDEQKLMDDMLDTMYAANGIGLAAVQIGVPKRIIVMDISKDPKTKEPRYFVNPVIKNKDSLKATYEEGCLSVPNQFAEIDRPSQCDVEYLDYNGEKK

SEQ ID NO: 141238 - protein, 67 aa, Unknown
  Bacterial polypetide isolated from the Sargasso Sea
KDVNGNKFNSEASELLAVCIQHEIDHLDGKIFVDYLSDMKRSKIEKGLIKQKNNNTSPQRTENPYTK

SEQ ID NO: 141239 - protein, 57 aa, Unknown
  Bacterial polypetide isolated from the Sargasso Sea
EASELLAVCIQHEIDHLDGKIFVDYLSVMKKSKIEKGLIKQKNNKTCTQRKENPYIK

SEQ ID NO: 141240 - protein, 131 aa, Unknown
  Bacterial polypetide isolated from the Sargasso Sea
MILKEDKFLQFNEEIKQRGGCKKVSFEEGEQIAAELLEELTKSKSGVGLAAPQIGYDAQVMVVNVKKPMVFINPTILSLDDEIIYKEACLSFPNKYINTHRHKWINIKADNFEQHYNCGGSMVFGPTNEHM

SEQ ID NO: 141241 - protein, 86 aa, Unknown
  Bacterial polypetide isolated from the Sargasso Sea
VYLNPKIIDYSTEKQTYRESCLSIPNRTEVLDSKSKTIVIEYDTMKEEHKTDTISDFTAVIFQHEIDHLNGILYLDHLNQEVKDAE

SEQ ID NO: 141242 - protein, 174 aa, Unknown
  Bacterial polypetide isolated from the Sargasso Sea
MAVKTILTEPNKILRQVSLPVENVSNEERRLMDDMLESMYHAKGIGLAAIQIGVPKRIIVMDLSKEEGEKDPKYFVNPVIKNRNSNLSKYLEGCLSLPDQFAEVDRPSTCEVEYLDYNGNKKILKADGLLATCIQHEMDHLEGILFIDHLSKLKKSMIIKKLSKLKNKEDRIVL

SEQ ID NO: 141243 - protein, 132 aa, Unknown
  Bacterial polypetide isolated from the Sargasso Sea
MTILKVLHFPDERLRLKAVPVTEIGPEICVIAENMLETMYSEGGIGLAATQVNIQERIVVIDLSEDKNEPIILINPEILKLEGKEVTQEGCLSVPDYFDVVERAKNIEFRYSTIKNEIITKKVDGLLAICIQ

SEQ ID NO: 141244 - protein, 102 aa, Unknown
  Bacterial polypetide isolated from the Sargasso Sea
MSILKIAKLGHPILLKKGAEINEFSSDSLKRIIYDMSETMIDYNGIGLAAPQVHLSKRIIIFRNPDIEEKEKIQITPLINPIYKPLSEEKEMIGEGCLSIPG

SEQ ID NO: 141245 - protein, 82 aa, Unknown
  Bacterial polypetide isolated from the Sargasso Sea
EKGGYDEGCLSIPGFYEEVVRPLKVEIRFQDLDGKEKKIIPEGLLGVVVQHETDHLDGKLMVDYISSVKRQRIRSKLLKQKK

SEQ ID NO: 141246 - protein, 193 aa, Unknown
  Bacterial polypetide isolated from the Sargasso Sea
MAILKITRMGHPVLKTRAQEIPDPTAREIRTLIEDMHETLDDVQGAGLAAPQVHVSKRLVIFAAPREHDEDESIPETDFTPMTEIINPEWHPLSDDMALGWEGCLSVPGLTGAVPRHTHIRYRGYSPQGSLIERNATGFHARVFQHEFDHLDGILYPMRMNDLSLLVFTKEAKRFGLPSLLIGKDSGDERGEA

SEQ ID NO: 141247 - protein, 82 aa, Unknown
  Bacterial polypetide isolated from the Sargasso Sea
FLRGLSFIPDQTAEVKRPAEVSIKFLDETGATQTLTAGGLLAACIQHEIDHLNGVLFIDHISRLKRDMITRRVMKELRQTTA

SEQ ID NO: 141248 - protein, 80 aa, Unknown
  Bacterial polypetide isolated from the Sargasso Sea
MSIPGVYLNVVRPSTIKLKFRDEMGRPRKMKADGLLARCIQHEMDHLNGILFVDRVTSKDDLNKELIKEGFNEKDVISIN

SEQ ID NO: 141249 - protein, 69 aa, Unknown
  Bacterial polypetide isolated from the Sargasso Sea
DFNNKRIEFEANGLLATCIQHEIDHLNGKLFVDHISALKRNRIEKKITKLKKEGNLSSRKNTPNYKSAI

SEQ ID NO: 141250 - protein, 174 aa, Unknown
  Bacterial polypetide isolated from the Sargasso Sea
MSKRRILIEPDPILRKKSQKLETVDDGLRRLMDDMLETMYGAPGIGLAAVQIGILKRLVVIDISKEDQTKKPLFFVNPIITYKSENTSVHEEGCLSLPGHFAEIERPSECYVDYIDYYGKKKTLKASGLLATCIQHEVDHLNGILFIDYLSKLKKDMIIKKLLKQKKEIGKIVL

SEQ ID NO: 141251 - protein, 123 aa, Unknown
  Bacterial polypetide isolated from the Sargasso Sea
MSKKKIIIEPDPILRKKSQRLETVNDELRKLMDDMLETMYDAPGIGLAAVQIGILKRVVVIDISKADEKKKPIFLINPSITYKSKSTSVHEEGCLSLPGHFAEIERPAECQIDFIDYFGKQKS

SEQ ID NO: 141252 - protein, 115 aa, Unknown
  Bacterial polypetide isolated from the Sargasso Sea
MSQRKIVIEPDPILRKESEPIEKVDNDLRKLLDDMLETMYAAPGIGLAAVQVGILKRLIVIDISKDKEKKNPLFLINPEIVSKSKNTSIYEEGCLSLPGHFAEIERPAECQINFL

SEQ ID NO: 141253 - protein, 132 aa, Unknown
  Bacterial polypetide isolated from the Sargasso Sea
MAILKVLHFPDERLRLKGVTIEEIDSEIASLAENMLETMYLEGGIGLAATQVNIQKRIVVIDLSENKDDPLILINPKISKLEGKEITQEGCLSVPEYFDNVERAKNIEYNYETQNKKTIVAKAEGLLAICIQ

SEQ ID NO: 141254 - protein, 176 aa, Unknown
  Bacterial polypetide isolated from the Sargasso Sea
MSILKISKIGHPILLKECSEIKEFSSDSLKKIVYDMSETMLDYSGIGLAAPQVHISKKIIVFRNPDNEEKDKIEITPLINPIFTPMGKETEDDWEGCLSIPGMQGLVRRFKKIKYSGFDLDGKEIENEVEGLHARVIQHEVDHLNGVLYTSRLAHKNAFGFEKEITIYWKNEQNRK

SEQ ID NO: 141255 - protein, 164 aa, Unknown
  Bacterial polypetide isolated from the Sargasso Sea
MEEIVIFGHPSLRTKSSEITEFNNELEKLSERMIKIMYEAPGVGLAAPQIGINKNIFVFDAGDGPKTAINPTKIEVEGSAVFLEGCLSLPGYYWEIERPEFAKIYCQSLNGEPITYEGDELTGRVLQHEFDHLKGKLLLSSLTRKERKEAIKKITVNGFPGDDI

SEQ ID NO: 141256 - protein, 95 aa, Unknown
  Bacterial polypetide isolated from the Sargasso Sea
FNPNIVSYSQEKIVMEEGCLSLPEQFAEIERPQNIVIEYLDENNKKITKEVSGVESRILQHEIDHLSGKLFVDYLSSLKRNIMIKKVQKFLKNKK

SEQ ID NO: 141257 - protein, 214 aa, Unknown
  Bacterial polypetide isolated from the Sargasso Sea
MKKVINCFKEDNPVLKKKLRKVSVDEGLKIAEELFRILNERKDGIGLAANQVGIDASVAVVNVREPLILINPVIKEQWDEIDYYEGCLSYPKQGIHTKRYKNIIIQTEQEESGWYFSGADSGEESKGSWETEQKENDKEQRILEAICVQHEIDHLNGMTIHDRENKPKPIVKKKSYGRNEKVEITDGKILSTMKYKKAKPLLDSGLWEIYVGGP

SEQ ID NO: 141258 - protein, 190 aa, Unknown
  Bacterial polypetide isolated from the Sargasso Sea
MIKPIIAYGDPILKKKASEINIDKPGELKSLIKDLWDTMYNAKGVGIAAPQIGISKSIFVADFSFFKDEDNFFANELINMKQVFINPKIIKEKGHYFTYPEGCLSIPNISENVKRKSRLKIKFFDENLLDHEMDCSGIIARVIQHEYDHLQGVLFTDKLSYKERKKIREELNLISIGDIEEKYKMSFFKK

SEQ ID NO: 141259 - protein, 121 aa, Unknown
  Bacterial polypetide isolated from the Sargasso Sea
ILKRVIVIDISKNEEKKNPLFLINPEIISKSKKTSVYEEGCLSLPGHFAEIERPAECQIKFVDYNGKEKELLANGLLATCIQHEVDHLNGVLFIDYLSKLKKDMIIKKLIKHKKELNKVVL

SEQ ID NO: 141260 - protein, 128 aa, Unknown
  Bacterial polypetide isolated from the Sargasso Sea
PQVHINKSIFVFRNPENLKKDSNIEVSAIINPTIETIGDKKNDDWEGCLSIPNMLGLVRRFSEIQYTGYDIFGNKLQVKAKGLHARIIQHEFDHLKGVLYTKRLAHRDAFGFENEIERYWKKKENEKK

SEQ ID NO: 141261 - protein, 207 aa, Unknown
  Bacterial polypetide isolated from the Sargasso Sea
MSKHTQKIITDLKDTANAIPCAGIAANQIGYSERVFVGYKDNQLETYSIYINPKILKKTESSVRKPYPSAQDYYSDNDALHRDCSMEACLSIPEVNMTFQRYDTISVEYQDEEGVLRNEERSGFLSKLFQHELDHLNGLTVANRIIYSIHKKKEGAFFPAVESVKDESKIKDFVNNREKVFKYLYDYMLANLLCSCYLNKLHCSDCT

SEQ ID NO: 141262 - protein, 98 aa, Unknown
  Bacterial polypetide isolated from the Sargasso Sea
NLYNPHIISYSKETVIMEEGCLSLPEQFAEIERPKKISFEYLDDKNKLVKKEADGIEARILQHEIDHLSGKLFVDYLSALKRNIIIKKVKKKLKNKNK

SEQ ID NO: 141263 - protein, 130 aa, Unknown
  Bacterial polypetide isolated from the Sargasso Sea
IDVDLQLFIVDISDIEEEGESIHVFANAEIIDSDGESWLNEGCLSVPDIRLDIKRSNKITLKYQDRNGKAFSKEFDGLLARVIQHEIDHLNGNLIIDRVSKAEKIGINKDLKLIKENSLRKLESGRASTL

SEQ ID NO: 141264 - protein, 82 aa, Unknown
  Bacterial polypetide isolated from the Sargasso Sea
MNEIVTFGHPSLKSKSVNITEFDEALKKLSERMIKIMYEAPGVGLAAPQIGINKNIFVFDAGEGPNVAVNPKKIEVEGSAIF

SEQ ID NO: 141265 - protein, 102 aa, Unknown
  Bacterial polypetide isolated from the Sargasso Sea
VFINPSVEKISDETEDDWEGCLSIPGMSGLVRRYKRIKYSAVDLNGKDITGEVEGLHARVIQHEFDHLNGILYTSRLAHKNAFGFSEEIEKFWKKHHDENSK

SEQ ID NO: 141266 - protein, 68 aa, Unknown
  Bacterial polypetide isolated from the Sargasso Sea
MTIKRILTAPDPFLKQISKPVDSVNKEIQVLMDDMLETMYDAPGIGLAAVQIGVPLRVIVIDIAWRNE

SEQ ID NO: 141267 - protein, 119 aa, Unknown
  Bacterial polypetide isolated from the Sargasso Sea
KRLIVIDISVDKEKKNPLFLVNPEIISKSNDTSVYEEGCLSLPGYFAEIERPAECQIKYVDYNGKKKEMKANGLLATCIQHEVDHLNGILFIDYLSKLKRDMIIKKLVKNKKELNKIVL

SEQ ID NO: 141268 - protein, 75 aa, Unknown
  Bacterial polypetide isolated from the Sargasso Sea
QFAEVKRPKSCKINFLDYDGKKQELSAEGLLATCIQHEIDHLNGILFIDHLSKLKKDLILKKNKKQNKEIDRVVV

SEQ ID NO: 141269 - protein, 115 aa, Unknown
  Bacterial polypetide isolated from the Sargasso Sea
MATMPIVWAPDPVLKTKCNPVNTIDATILSLMDNMLETMYQAPGVGLAAPQVGIKQRIIVIDCSSKDEAPQPYRMVNPELVSVSTELSTHEEGCLSLPGFYAEITRPAEARVSYT

SEQ ID NO: 141270 - protein, 165 aa, Unknown
  Bacterial polypetide isolated from the Sargasso Sea
MRITQYGESILHRKGKAVTDFSPELAGLVDEMIAAMRRAEGIGLAAQQVGEALRLCVLEVPDHPDYPIACILDGKPLSPALLMPMPMANPKIEFLPGDEFYYEEGCLSFPEIRGDVARPERIRVEYQDLDGAPHVLECDGLLARCIQHEVDHLDGILFIDRRRRP

SEQ ID NO: 141271 - protein, 185 aa, Unknown
  Bacterial polypetide isolated from the Sargasso Sea
MAVLKIAKLGNPVLRQIAKPVDLNELVNPDSSLQEFIDDMIETMHHEGGVGLAAPQVNRSIQIVVLEYAENERYPNEVSIPLTVLVNPVLSKYSEETKDGWESCLSLVDFRGLVSRSTKITLDAYDRQGKKINKTVSDFEAVVLQHEIDHLKGFVFLDRMKDFKQLSYQEEFERFWLKKEDAPST

SEQ ID NO: 141272 - protein, 124 aa, Unknown
  Bacterial polypetide isolated from the Sargasso Sea
LSHRMFIFRNPEIEDDDKINISVFINPVIEKLSDETEDDWEGCLSIPGMLGLVRRFKRIKYSAIDLNGNNIAGEVEGLHARVIQHEFDHLNGVLYTSRLAHKSAFGYSEEIEKFWKKNNDENKK

SEQ ID NO: 141273 - protein, 109 aa, Unknown
  Bacterial polypetide isolated from the Sargasso Sea
MSQRNIVIEPDPILRKKSENLEKVDDELKKLMDDMLETMYAAPGIGLAAVQIGILKRLIVIDISKKDEKKDPLFLINPEIISKSNNTSTYEEGCLSLPGHFAEIERPAE

SEQ ID NO: 141274 - protein, 47 aa, Unknown
  Bacterial polypetide isolated from the Sargasso Sea
KKTGYEARVLQHEIDHLSGKLFIDYLSNLKKNIIIKRVIKLKKIGEI

SEQ ID NO: 141275 - protein, 168 aa, Unknown
  Bacterial polypetide isolated from the Sargasso Sea
KIAKMGHPILRKKSAEILDPRSDSVKYLVEDMIETLEDIQGLGLAAPQVHVSKRLVIFYSPNENPNHNNAPLNILINPKIEPLGTEMDYDWEGCLSVPGLRGLVPRYKKIRYSAFNEEGIFFDRIVDGLHSRVVQHECDHLDGILYVQRMDKLENLIFETEMKFYNNL

SEQ ID NO: 141276 - protein, 152 aa, Unknown
  Bacterial polypetide isolated from the Sargasso Sea
MNLKKIVFDMSETMLDVDGIGLAAPQVHLSHRMFIYRNPEIEDDDKINISVFINPVIEKLSDETEDDWEGCLSIPGMSGLVRRFKRIKYSAIDLNGNNIVGEAEGLLARVIQHEFDHLNGLLYTSRLAHKSAFGYSEEIEKFWKKNNDENKK

SEQ ID NO: 141277 - protein, 167 aa, Unknown
  Bacterial polypetide isolated from the Sargasso Sea
MALLNILNYPDKRLHKIAKPVEVVNDRIRRLVADMAETMYAAPGVGLAATQVDVHERVVVIDVSETHDELLAFINPEIIWSSNEKKLSEEGCLSVPGIYDNVERAEKVRVRALNEKGETFEIDCEGLLAVCIQHEMDHLMGRVFVEYLSSLKQTRIKSKMKKLAHAM

SEQ ID NO: 141278 - protein, 60 aa, Unknown
  Bacterial polypetide isolated from the Sargasso Sea
MNEIVTFGHPSLKSKSVNITEFDEALKKLSERMIKIMYEAPGVGLAAPQIGINKNIFVFD

SEQ ID NO: 141279 - protein, 73 aa, Unknown
  Bacterial polypetide isolated from the Sargasso Sea
MIYPIYMYGNTILKKKASKVKKGDIDIKKLSEDMFETMELADGIGLAAPQIGKSIRVFVVDGTSLKDPKMSDF

SEQ ID NO: 141280 - protein, 75 aa, Unknown
  Bacterial polypetide isolated from the Sargasso Sea
MTVLEIKLIPDPVLRKKAEPVKVVTNDIISVLNDMAETMYDAPGIGLAANQVGILKRLIVMDCSTDDEDPNLIKM

SEQ ID NO: 141281 - protein, 182 aa, Unknown
  Bacterial polypetide isolated from the Sargasso Sea
MAVLKVVHYGDPILRKECKQVTDYKVLPEIIENMFDTMYEEEGIGLAANQVGIDMNLMIIDVSHTDEAEDANIFVNGEIIESFGSSEMEEGCLSIPDVRLPVKRPEKIRFKYELPDGSEHIGDFDGLLGRAIQHEMDHLKGIFIIDRVNPILAIQYKKKLKEIENSSIILKKSENKKRDFVL

SEQ ID NO: 141282 - protein, 59 aa, Unknown
  Bacterial polypetide isolated from the Sargasso Sea
DFNGKKQEMKAEGLLSTCIQHEIDHLNGILFIDYLSKLKKDIIVKKVSKQKKDQERIVV

SEQ ID NO: 141283 - protein, 167 aa, Unknown
  Bacterial polypetide isolated from the Sargasso Sea
MATLKILIFPDPKLRTVAKPIKDVNDSIRKLSQDMLETMYSGEGIGLAGTQVDVHKRIIVIDVSNEKNDPLVLINPVIKEVINNENKAYSEGCLSVPGIYEELERPSAVEVSALDLEGKEFTFIAEDILSVVIQHEMDHLEGKMMVDFLSNLKREMIRKKMAKYKAT

SEQ ID NO: 141284 - protein, 190 aa, Unknown
  Bacterial polypetide isolated from the Sargasso Sea
MIKPIIAYGDPILNLKVEKIKYSESNSIDSLVNDLWDTMYNANGVGIAAPQIGVSKSIFVADFSFFEDEDSFNKDELINIKQVFINPKIIKESGDDFIYSEGCLSIPNISEEVIRKEKIKINFLNEQFQPKQMNCSGIIARVIQHEYDHLQGILFTDRISKDARISIDSELKNISTGKVESKYEMSFYKN

SEQ ID NO: 141285 - protein, 191 aa, Unknown
  Bacterial polypetide isolated from the Sargasso Sea
MKRILNIAQIGAPVLRESTKRLNREELLSPPIQEFIDDLIHTMRSANGAGLAANQVHQSLRICTIEVKDNPRYPYRPNIPLTILVNPDLFPASELMFENYEGCLSIPNLRGKVKRYCEIRVEAMDRFGNSISETVRGMTATTYQHEVDHLDGNLFLDRVEDSKSLVTWENFQRYHQNQVADQVRELVERYG

SEQ ID NO: 141286 - protein, 168 aa, Unknown
  Bacterial polypetide isolated from the Sargasso Sea
MIRPIVAYGDPILNLKVEKLKYSESNSIDSLVNDLWDTMYNANGVGIAAPQIGVSKSIFVADFSFFEDEDNFNKDELINIKQVFINPKIIKESGDDFTYSEGCLSIPNISEEVIRKEKIKINFLNEQFQPKQMNCSGIIARVIQHEYDHLQGILFTDRISKDARISID

SEQ ID NO: 141287 - protein, 48 aa, Unknown
  Bacterial polypetide isolated from the Sargasso Sea
MKLLKILEFPDPRLRTKAKPVQEVTNVHKELIDNMIHTMYESKGIGLA

SEQ ID NO: 141288 - protein, 164 aa, Unknown
  Bacterial polypetide isolated from the Sargasso Sea
MNEIVTFGHPSLKSKSVNITEFDEALKKLSERMIKIMYEAPGVGLAAPQIGINKNIFVFDAGEGPNVAVNPKKIEVEGSAVFLEGCLSLPGYYWEIERPEYSKIYCQDINGEDITYEGEELMGRVLQHEYDHLKGKLLLSSLSRKERKEAIKKIALNGFPGNDL

SEQ ID NO: 141289 - protein, 114 aa, Unknown
  Bacterial polypetide isolated from the Sargasso Sea
MALLKILIFPDPRLRTVAKAVELVDDSIKKLAQDMLETMYQGSGIGLAATQVNVHKRVIVLDISESKDEPMILINPEIKKIIDPNKKIFSEGCLSVPGFYEELKRPGSVEISYL

SEQ ID NO: 141290 - protein, 180 aa, Unknown
  Bacterial polypetide isolated from the Sargasso Sea
MFKNEIQHSCQPLPIAQVGEAILKQRAIEVRDFDETLSQLASQMVASMVEAKGVGIAAPQVHSPLALFIMASRPNERYPDAPLMEPVVVVNPHIELASLQLEKGEEGCLSVPGQRFTIWRHHSIVVRYQNLAGQWQHAELTGFIARIFQHEFDHLQGITLLERSQMPQQTLMAQEGNPQA

SEQ ID NO: 141291 - protein, 187 aa, Unknown
  Bacterial polypetide isolated from the Sargasso Sea
MLIYDYISRVAILKIAKLGHPVLIKKTNKINDLNNVDLKKIVFDMSETMLDANGIGLAAPQVHLSHRMFIYRNPDIEEEDKINISVFINPSVEMISDETEDDWEGCLSIPGMSGLVRRHKRIKYTATDLNGKNIKGEAEGLHARVIQHEFDHLNGILYISRLAHKNAFGYTEEIEKFWKKHNDENSK

SEQ ID NO: 141292 - protein, 131 aa, Unknown
  Bacterial polypetide isolated from the Sargasso Sea
MSILKISRLGHPILLKKTHPVQNIAANEIKKIIYDMSETMIDAKGIGLAAPQVYINKQIMIFRTFNEDNDENNEIKITALINPKISKISNETDEQWEGCLSIPGMLGLVKRYKKIKYEGLDMNGNIIKKEA

SEQ ID NO: 141293 - protein, 100 aa, Unknown
  Bacterial polypetide isolated from the Sargasso Sea
MYFVNPVIKNKDPLKATYEEGCLSVPNQFAEVDRPSKCEIEYLDYDGNKKLLKADGLLATCVQHEMDHLEGILFIDYLSKLKKTMIIKKLSKKKSTAAIL

SEQ ID NO: 141294 - protein, 137 aa, Unknown
  Bacterial polypetide isolated from the Sargasso Sea
MAILKIAKMGHPILLQKAKKVDDPTDPKIKTLVNDMLETLDDLGNGVGLAAPQVHVSLQVVIFETASNDGKEANLITLINPKIDVLTKETSIDWEGCLSVPGLRGQVIRPNKIKYSGLDLKGNKIETIAEGFNARVV

SEQ ID NO: 141295 - protein, 181 aa, Unknown
  Bacterial polypetide isolated from the Sargasso Sea
MFKDEMLQAPSQPLPIALVGEAILKEHAIEVRDFDTALSQLAEQMALSMVAANGVGIAAPQVHSPLALFIMASRPNERYPDAPLMDPVVVVNPQILSASAELVSGEEGCLSVPGQRFSIWRHQTIVVRYQDLAGHWQQTELTGFIARIFQHEFDHLQGITLLERSQMPEQTVMAQAGNHQA

SEQ ID NO: 141296 - protein, 210 aa, Unknown
  Bacterial polypetide isolated from the Sargasso Sea
MTILPIRIFPDPILRQKTEEIKEINKELIDFGFNMLETMQAARGIGLAAPQVGKLVKLITIQIPENEPMIMFNPKVEKSFGKRNVEEGCLSVPGFTGIIERSVTIDASYLDQNKSKIKLTASELLSQAIEHEIDHLNGIVYLDHLKSHEDLHKSGITPNDIHWHDVGYKIFINKAKASSQDKIIDEVIDKKIELSKIKSDSSIDEASVDI

SEQ ID NO: 141297 - protein, 190 aa, Unknown
  Bacterial polypetide isolated from the Sargasso Sea
MIRPIIAYGDPILNLKVEKIKYSELSIIDSLINDLWDTMYNANGVGIAAPQIGVLKSIFVADFSFFKDEDNFNQNELINFKQVFINPKIIKESGNDYTYSEGCLSIPNISEEVIRKEKIKINFLNEKFEPKQMNCSGIIARVIQHEYDHLQGILFTDRLSKDLRISLDSELKNISNGKVESKYEMSFYKN

SEQ ID NO: 141298 - protein, 164 aa, Unknown
  Bacterial polypetide isolated from the Sargasso Sea
MSEIVVFGHPSLTTKSVNVESIDDYIVSLTKKMIQIMYDAPGVGLAAPQIGINKNIFVFDAGDGPKVAINPKLEDLQGTVVFMEGCLSLPGYYWDIERYEYAKLSCLNQNGEEVTYEGEDLLGRVLQHEYDHLQGQLLLKQLKRKVRKEALKEISIKGFPGDKI

SEQ ID NO: 141299 - protein, 182 aa, Unknown
  Bacterial polypetide isolated from the Sargasso Sea
MAILKIAKMGHPILRRSAEEVLDPTADQIRRLVQDMVNTMEDADGAGLAAPQVHVPLRVVVFHVPAERDEENPEPVPLSVLVNPVVEPLTEEIEVDWEGCLSVPGMMGAVPRFTKVRYRALTLGGEPINRVAEGFHARVVQHECDHLDGVLYPQRMNDLSLLMFSDQLRYHDDVNLDEAAAS

SEQ ID NO: 141300 - protein, 151 aa, Unknown
  Bacterial polypetide isolated from the Sargasso Sea
MTLRKILIEPDPVLRQISKPVIQVGDKERKIMDDMLETMYKANGIGLAAIQIGIPKRIIVIDISKKEEKKNPIYFVNPVIKNKKKELLTYEEGCLSVPNQFAEIDRPIECEVEYLDYNNKKKNSKFSGLLATCIQHEMDHLEGYFVYRLFI

SEQ ID NO: 141301 - protein, 100 aa, Unknown
  Bacterial polypetide isolated from the Sargasso Sea
MAKKLDILIFPDPRLRKVAKKVTKFDKCLEKLAQDMLKTMYEANGIGLAATQVDKHIRLVVMDLSEERNDPRIFVNPEYKILEGYEMFEFEEGCLSIPGI

SEQ ID NO: 141302 - protein, 143 aa, Unknown
  Bacterial polypetide isolated from the Sargasso Sea
MDDMLETMYTAPGIGLAAIQVGILKRLVVIDISKEEEKKKPIFLINPQIIHQSKNTSVYEEGCLSLPGQFAEIERPAECTIKYIDYNGKEKELKSDGLLATCIQHEVDHLNGILFIDYLSKLKKDMIIKKLVKQKKEIERVIV

SEQ ID NO: 141303 - protein, 157 aa, Unknown
  Bacterial polypetide isolated from the Sargasso Sea
MAIKTIITEPNKLLRQISTSVDHVGKDEQKLMDDMLETMYEANGIGLAAIQIGVPKRIIVMDISKNESKKEPRYFVNPVIKNKNSLKTTYEEGCLSVPNQFAEIDRPKTCEVEYLDYNGKKKLLKANGLLATCIQHEMDHLEGILFIDYLSKLKRST

SEQ ID NO: 141304 - protein, 177 aa, Unknown
  Bacterial polypetide isolated from the Sargasso Sea
YVSILKISKIGHPILLKECSKIKEFSSDSIKKIVYDMSETMLDYNGIGLAAPQVHISKKIIVFRNPDNEEKEKIEITPLINPIFTPMGKETEDDWEGCLSIPGMQGLVRRFKKIKYSGFDLDGKEIENEVEGLHARVVQHEVDHLNGILYTSRLAHKNAFGFEKEITTYWKNEQNRK

SEQ ID NO: 141305 - protein, 172 aa, Unknown
  Bacterial polypetide isolated from the Sargasso Sea
MAIRSIITEPNKLLRQISKPVSQVGKEEQKLMKDMLETMYAANGIGLAAIQVGIPQRIIVMDICKEENKKEPRYFVNPIIKNKDPLKATYEEGCLSVPNQFADIDRPSKCEVEYLDYNGQKQLLKAEGLLATCIQHEMDHLEGILFIDYLSKLKKSMIIKKLSKLKSNTAEV

SEQ ID NO: 141306 - protein, 80 aa, Unknown
  Bacterial polypetide isolated from the Sargasso Sea
KSLYTFSEGCLSIPGYNEEITRPDKILLKWQDVNGKFHEEEPEGILTVCIQHEIDHLEGKLMVDYISSLKRERIRSKLRK

SEQ ID NO: 141307 - protein, 128 aa, Unknown
  Bacterial polypetide isolated from the Sargasso Sea
MPVRKIIKMGHPTLRQRAKSLQKKDLTKARFKNLLSDMVDTLRDYGGVGLAAPQIDESLRVVIIEIRDTNLRYGVQKLFPLTVFVNPEIELIDSQTAGFWEGCLSIPGMRGYVERPQNISVSFIDELG

SEQ ID NO: 141308 - protein, 150 aa, Unknown
  Bacterial polypetide isolated from the Sargasso Sea
MLKLIYAPDPILKKDSVSLPQVDQHHRELIKQMYEIMYSANGVGLAAPQIGLNIRIFILDASSRDEEKKPMTMINPKIISLDENKVPYEEGCLSFPEHFAEIDRPEKIKMEYLDEDNSKKISTFTGFESRIIQHELDHLNGILFVDHLSR

SEQ ID NO: 141309 - protein, 122 aa, Unknown
  Bacterial polypetide isolated from the Sargasso Sea
MTIHTILKMGDPRLLRVAQPVTAFDTDELHQLVRDMFETMASVNGAGLAAPQIGVDLQLVIFGSNDRNPRYPNRPLVPPTVLLNPVITPLGAEEEEDWEGCLSVPGLRGKVPRWSRIRYTGF

SEQ ID NO: 141310 - protein, 48 aa, Unknown
  Bacterial polypetide isolated from the Sargasso Sea
VNLQAEGLLAICLQHELDHLMGKLFIDYLSPLKRDRIKKKLKKKLASQ

SEQ ID NO: 141311 - protein, 165 aa, Unknown
  Bacterial polypetide isolated from the Sargasso Sea
MTIRTIITEPNKLLRQISKPVNVVGKEEQKLMDDMLETMYDANGIGLAAIQVGVPKRIIVMDISKDENKKEPRYFVNPVIKNKDPEKATYEEGCLSVPNQFAEIDRPSKCEVEYLDYDGEKKLLKADGLLATCIQHEMDHLEGILFIDYLSKLKKSMIIKKLSKR

SEQ ID NO: 141312 - protein, 151 aa, Unknown
  Bacterial polypetide isolated from the Sargasso Sea
MSILKISRLGHPILLEKTNPVQNIPDNEIKKIIYDMSETMLDAKGIGLAAPQVYINKQIMIFRTFNEDGDENNEIKITALINPKISKITNDTDEQWEGCLSIPGMLGLVKRYKKIKYEGLDMNGNIIKKEAEGLEARVVQHEYDHLMGILY

SEQ ID NO: 141313 - protein, 101 aa, Unknown
  Bacterial polypetide isolated from the Sargasso Sea
ALINPVIKNLSEETSVYEEGCLSIPETFIEIERPKICEVEYIDDKGEKKNLKCDGLLSTCIQHEINHLDGKLIIDHLSKLKKDFIIKKISKIKKNPDRIVV

SEQ ID NO: 141314 - protein, 143 aa, Unknown
  Bacterial polypetide isolated from the Sargasso Sea
MDDMLETMYSAPGIGLAAVQIGILKRVVVIDISKGEEKKNPIFLVNPEITFKSNQTSTYEEGCLSLPGHFAEVQRPAECHLNYIDYNGKKQKLQTDGLLATCVQHEIDHLNGVLFIDYLSKLKRDMIIKKLKKNKKEINKIVL

SEQ ID NO: 141315 - protein, 109 aa, Unknown
  Bacterial polypetide isolated from the Sargasso Sea
EDKINISVFINPSVEMISDETEDDWEGCLSIPGMSGLVRRHKHIKYSATDLNGKNIKGEAEGLHARVIQHELDHLNGILYVSRLAHKNAFGYSEEIEKFWKKHNDENSK

SEQ ID NO: 141316 - protein, 148 aa, Unknown
  Bacterial polypetide isolated from the Sargasso Sea
MTVKTILTEPNKILRQVSLPVEKVGDEERRLMDDMLETMYDAKGIGLAAIQIGVPKRIIVMDIANKDKEKEPMYFVNPLIKKKNSEHSTYEEGCLSVPNQFAEVNRPSTCEVEYLDYNGNKKILKASGLLATCIQHEMDHLEGILFID

SEQ ID NO: 141317 - protein, 84 aa, Unknown
  Bacterial polypetide isolated from the Sargasso Sea
FSVYKEGCLSIPEFYEEIERPSECRVKYLDKKNKVQFLDCDGLLATCVQHEIDHLDGKLFIDYLSRLKRTSIEKKFIKQYKQKA

SEQ ID NO: 141318 - protein, 174 aa, Unknown
  Bacterial polypetide isolated from the Sargasso Sea
MTIKDIITVPDETLKKISEPIEKIGVNEKKLIKDLIETMYESNGIGLAAVQVGILKRILVIDISTKDEKKNPMSFINPVIKKFSDETSVYEEGCLSIPETFIEIERPKTCEVEYIDINGDQKILKCNGLLSTCLQHEINHLDGKLIIDYLSKLKRDLIIKKISKSKKNLNRIIV

SEQ ID NO: 141319 - protein, 90 aa, Unknown
  Bacterial polypetide isolated from the Sargasso Sea
MSTYEEGCLSVPDQYAEIDRPEECEVSYLDYNGKKATLHAEGLLATCIQHEMDHLEGILFIDYLSNLKKNMIVKKLIKSKKQSSKERIVA

SEQ ID NO: 141320 - protein, 174 aa, Unknown
  Bacterial polypetide isolated from the Sargasso Sea
MSIKNIITIPDETLKKISEPVEKVGTNEKKLINDLFETMYKSKGIGLAAVQVGILKRILVIDVSSKDEKKKPLSLINPIIKKISNETSVYEEGCLSIPDTFIEIERPKMCEVEYVDINGKIKNLKCDGLLSTCLQHEINHLDGKLIIDHLSKLKKDIIIKKISKLKKNPDRIIV

SEQ ID NO: 141321 - protein, 178 aa, Unknown
  Bacterial polypetide isolated from the Sargasso Sea
MFENLEILKFPDERLRRLSVPVEAFNKELKALADKMLEIMYQSNGIGLAAPQVNQTIRLIVVDVSEDRNNPCIFINPKIKQPSGSVDSSEGCLSVPEIRTTIKRYENITLEYQDLNGVRLEESLDDLLSICVQHEIDHLDGKLFIDYVPDVKLQRLRKKIAKSKKNQPTIEGTTVRVV

SEQ ID NO: 141322 - protein, 166 aa, Unknown
  Bacterial polypetide isolated from the Sargasso Sea
VPDETLKKISEPIEKVGGNEKKLINDLFETMYNSNGIGLAAVQVGVLKRVLVVDVSSREEEKKPICFVNPIIKKISDEMSVYEEGCLSIPDTFIEIERPKTCQVEYVDINGKIKTQEFDGLLSTCVQHEINHLDGKLIIDHLSKLKKDMIIKKISKIKKNPDRIIV

SEQ ID NO: 141323 - protein, 179 aa, Unknown
  Bacterial polypetide isolated from the Sargasso Sea
IYYVSILKISKIGHPILLKECAEIKEFSSDSLKKIVYDMSETMLDYNGIGLAAPQVHISKQIIVFRNPDNEEKDKIEITPLINPSFTPMGKETEDDWEGCLSIPGMQGLVRRFKKIKYSGFDLDGKVIKNEVEGLHARVVQHEVDHLNGILYTSRLAHKNAFGFENEINTYWKNEQNRK

SEQ ID NO: 141324 - protein, 178 aa, Unknown
  Bacterial polypetide isolated from the Sargasso Sea
MSVKEILKMGNPLLRKEAEDFTIEEIKSPETKLLLEDMWDSLEVAGGIGLAAPQIGILKKLAVIKLSEESDRYPDMEDSEPYVIFNPKVSVVDETEQGFWEGCLSVPGLRGFVERPRSIRVDFLDENAEPKTIEAEDFLATVFQHELDHLVGKLYVDRMKDIKTLMFEEEMVFDEIKE

SEQ ID NO: 141325 - protein, 175 aa, Unknown
  Bacterial polypetide isolated from the Sargasso Sea
IMTVKTILTEPNKLLRQVSQPVEKVGNQERKLMDDMLETMYEAKGIGLAAIQIGVPKRIIVMDIGNREKEKEPMYFVNPVVKNKNSEHSTYEEGCLSVPNQFAEIDRPSTCEVEFLDYNGNKKILKASGLLATCIQHEMDHLEGILFIDYLSKLKKMMIVKKLSKQKNKVDRIVV

SEQ ID NO: 141326 - protein, 174 aa, Unknown
  Bacterial polypetide isolated from the Sargasso Sea
MAVKTILTEPNKILRKISLPVKKVGKEEQLLMDDMLDTMYDAKGIGLAAIQIGIPKRIIVMDLSKDNENNNPMYFVNPVIKNKNQNLSKYEEGCLSVPNQFVEVNRPSSCEVEYLDYNGKKRNLNCDGLLATCIQHEMDHLEGITILTYVSNLKRSMIIKKLSKVNNNEDKVVL

SEQ ID NO: 141327 - protein, 72 aa, Unknown
  Bacterial polypetide isolated from the Sargasso Sea
MAIKKILTVPDQILRKKSLPVEDVNKEIKVLLKDMLETMYDAPGIGLAAIQIGVPKRLVVMDLSKNPEKKEP

SEQ ID NO: 141328 - protein, 174 aa, Unknown
  Bacterial polypetide isolated from the Sargasso Sea
MSIREIITVPDETLKKVSDPIEKFGINEKKLINDLFETMYNSNGIGLAAVQVGILKRVLVVDVSSKKEKKNPICFVNPVIKKVSDEMSLYEEGCLSIPDTFIEIERPKICEVEYVDVNGKIKTQEFDGLLSTCVQHEINHLDGKLIIDHLSKLKKDMIIKKISKFKKNPDRVIV

SEQ ID NO: 141329 - protein, 123 aa, Unknown
  Bacterial polypetide isolated from the Sargasso Sea
GLAASQVDVHKRFMVIDVSEEHDAPQVFINPQIASASESGRVYQEGCLSVPGIYADVTRADSIVVRFLDREGREQELAADGLLATCIQHEMDHLDGKLFIDYLSPLKREMVRKKLAKQRKHVA

SEQ ID NO: 141330 - protein, 80 aa, Unknown
  Bacterial polypetide isolated from the Sargasso Sea
YDGEGCLSVPGLRGLVPRHRKIRYKGLNEKGKKIDKIVEGLHARVVQHECDHLEGIIYVQRMDNLEDLVFESEMKFYNKF

SEQ ID NO: 141331 - protein, 150 aa, Unknown
  Bacterial polypetide isolated from the Sargasso Sea
MNDIVVFGHPSLTSKSENIINIDDYVVNLSKKMIDIMYAAPGVGLAAPQIGINKNIFVFDAGDGPKVAINPKLVKTEGSIVFMEGCLSLPGYYWDIERHEYAKIQCLNENGDETIYEGDELMGRVLQHELDHLKGKLLLKSMTRKQRKEA

SEQ ID NO: 141332 - protein, 182 aa, Unknown
  Bacterial polypetide isolated from the Sargasso Sea
MSVLEVVNYGNPILRNKCIQVTDFSKLSDFIDDMFDTMYEQEGIGLAANQVGVDMNLFIIDISHTDDNEFPRIFINGEITSSQGESVFSEGCLSIPEVALEVTRPEVISFKYQDIDKKWHEEEFDGLLARAIQHEIDHLNGILIIDLVSEMQRLKVNKEVKRIKNDSIIKFKRQPITKGFVL

SEQ ID NO: 141333 - protein, 167 aa, Unknown
  Bacterial polypetide isolated from the Sargasso Sea
MEILLVPNEFLRQKANRLINITSEDIKIANQMMDTMIKAPGVGLAANQVGILKQIITINFEDKESDKRANYILFNPSIIEYSEEKVIMEEGCLSLPEQYADIERPKQIVLEYMDENQKSIKKEIDGYEARILQHEIDHLSGKLFVDYLSSLKRNIILKKVKKLKKHD

SEQ ID NO: 141334 - protein, 115 aa, Unknown
  Bacterial polypetide isolated from the Sargasso Sea
NETYVFINSEIISFSSEESYFQEGCLSIPGVALDVLRPEKIILKYQTLDQVWHEKEFEGLLARAIQHEIDHLNGILIIDRVGKLERMKYQKEIKEIKTHAKTLIAKKNQNKRFVL

SEQ ID NO: 141335 - protein, 178 aa, Unknown
  Bacterial polypetide isolated from the Sargasso Sea
MAKLQVLHFPDSRLRQKASKVTVFDEKLTEFANDMLETMYFSKGIGLAAVQVNVAKRVIVIDVSENRDEPLFLVNPEIIDRQEPIKFEEGCLSVPGFYEKVDRFNVIEFEAQDLQGEIYKQKAVGLLAVCIQHEIDHLDGKLFVDYISNMKRDRIAKKIKKLTEQGKLETRNDVPYSI

SEQ ID NO: 141336 - protein, 179 aa, Unknown
  Bacterial polypetide isolated from the Sargasso Sea
MGILKIARMGHPVLSSSSKRVEDPTAPDIKKLISDMVETMEDAPGIGLAAPQVHQPLRIVVFKVPELRVTEKKQAVSLTVLINPVIEVLSEDTEKGIEGCLSLPGMSGVVPRFSHIGYYGVDTSGKKIEREARDFHARVVQHECDHLDGVLYPMRMTDLSSFGFVEEMEKQNQNRLMRK

SEQ ID NO: 141337 - protein, 172 aa, Unknown
  Bacterial polypetide isolated from the Sargasso Sea
MAIRTIITEPNKLLRQISKPINSVGKEEQKLMDDMLETMYDAKGIGLAAIQVGVPKRIIVMDISKDENKKEPRYFVNPIIKNKDLEKATYEEGCLSVPNQFAEIDRPSKCEVEYLDYYGEKKLLKADGLLATCIQHEMDHLEGILFIDYLSKLKRSMIIKKLSKLKSTSAEA

SEQ ID NO: 141338 - protein, 165 aa, Unknown
  Bacterial polypetide isolated from the Sargasso Sea
MEILIVPNEFLRQKAKKLSNITNEDIKIANQMMDTMMKAPGVGLAANQVGILKQIITINFEDKENDKRANYILFNPSIIEYSKDTVIMEEGCLSLPEQYADIERPKQIFLEYIDENQKTIKKEIDGYEARILQHEIDHLSGKLFVDYLSSLKRNIIIKKVKKMKN

SEQ ID NO: 141339 - protein, 144 aa, Unknown
  Bacterial polypetide isolated from the Sargasso Sea
LADDLFETMYKNNGIGLAAVQVGVLRRMIVIDVSKKDEEKKPFCLINPVIKSFGKDRSTYEEGCLSIPETFIEIERPKTCIVEYVDITGNKKNLECDGLLSTCVQHEINHLDGKLIIDFLSKLKKDFLIKKLSKNKNTSSRVIV

SEQ ID NO: 141340 - protein, 155 aa, Unknown
  Bacterial polypetide isolated from the Sargasso Sea
MSKKTIIFEPNPILRKKSEKLNAVDDDLRKLMDDMLETMYAAPGIGLAAVQIGVLKRLIVIDISKEEQKKTPLFLVNPIINFKSKETSIYEEGCLSLPGYFAEIERPAECHISYIDYAGKKKDLKATGLLSTCIQHEIDHLNGILFIDYLSKLKK

SEQ ID NO: 141341 - protein, 104 aa, Unknown
  Bacterial polypetide isolated from the Sargasso Sea
MAILDVLSFPDERLRTVAKPVEEVNDDIKQLVSDMFETMKDENGIGLAATQVDRHVQVVVMNVAEDQDEPRVFINPEITKKDGSTISEEGCLSVPGNYAKVERA

SEQ ID NO: 141342 - protein, 138 aa, Unknown
  Bacterial polypetide isolated from the Sargasso Sea
MLETMYAANGIGLAAIQVGIPQRIIVMDICKEENKKEPRYFVNPMIKNKDPLKATYEEGCLSVPNQFAEIDRPSKCEVEYLDYNGKKQLLKAEGLLATCIQHEMDHLEGILFIDYLSKLKKSMIIKKLSKLKSSTAEV

SEQ ID NO: 141343 - protein, 174 aa, Unknown
  Bacterial polypetide isolated from the Sargasso Sea
MTIKAILTEPNKILRQVSKPVTKVGKEEQNLMDDMIETMYSANGIGLAAIQIGVPKRIIVMDISKNDEKKNPMYFVNPIIKNKNSDLSRYEEGCLSVPDQFAEIDRPSSCEVEYLDYNGKKNFLKTSGLLATCIQHEMDHLEGILFIDYLSKLKKSMIIKKLSKQKNKADRIVV

SEQ ID NO: 141344 - protein, 150 aa, Unknown
  Bacterial polypetide isolated from the Sargasso Sea
MSKKKIVIEPDPILRKKSKILEKVDDELRKLMDDMLETMYDAPGIGLAAVQIGVLRRVIVLDISKSDEKKNPLFLINPEITFKSNKTSTYEEGCLSLPGHFAEVERPEECHLNFIDYDGNKKDLKANGLLATCIQHEVDHLDGILFIDHI

SEQ ID NO: 141345 - protein, 178 aa, Unknown
  Bacterial polypetide isolated from the Sargasso Sea
MAKLQVLHFPDSRLRQKASKVTVFDEKLTKFANDMLETMYFSKGIGLAAVQVNVAKRVIVIDVSENRDEPLFLVNPEIIDRQEPIKFEEGCLSVPGFYEKIDRFNVIEFEAQDLQGEIYKQKAEGLLAVCIQHEIDHLDGKLFVDYISNMKRDRIAKKIKKLTEQGKLETRNDVPYSI

SEQ ID NO: 141346 - protein, 174 aa, Unknown
  Bacterial polypetide isolated from the Sargasso Sea
MSIKNIITVPDETLKKVSERVEKIGANEKKLINDLFETMYKSNGIGLAAVQVGVLKRIIVIDVSNKDEKNQPLSFINPTIKKISDTTSIYEEGCLSIPDTFIEIERPKICEVEYIDLNGQIKNLKCDGLLSTCLQHEINHLDGKLIIDHLSKLKRDIIIKKISKSKKNPDRIIV

SEQ ID NO: 141347 - protein, 174 aa, Unknown
  Bacterial polypetide isolated from the Sargasso Sea
MSVKKIIIEPDPILRKKSEPLEAVNNQLKKLMDDMLQTMYKAPGIGLAAVQIGILKRVIVIDITKEDQKKNPLFLVNPSLTFKSKDTSVYEEGCLSLPGHFAEIERPAECHLDYLDYNGKKKTLKATGLLATCIQHEIDHLNGILFIDYLSKLKKDMIIKKLIKKKKELDKIVL

SEQ ID NO: 141348 - protein, 121 aa, Unknown
  Bacterial polypetide isolated from the Sargasso Sea
MGIKDIITVPDETLKKISEPIEKVGVNEKKLINDLFDTMYNSKGIGLAAVQVGILKRILVIDVSTKDEKKKPLSFINPIIKRLSEETSIYEEGCLSIPETFIEIERPKICEVEYIDIDEKK

SEQ ID NO: 141349 - protein, 163 aa, Unknown
  Bacterial polypetide isolated from the Sargasso Sea
PNKLLRQVSKPVNQVGKEEQKLMKDMLETMYAANGIGLAAIQVGIPQRIIVMDICKEENKKEPRYFVNPIIKNKDPLKATYEEGCLSVPNQFADIDRPSKCEVEYLDYNGKKQLLKAEGLLATCIQHEMDHLEGILFIDYLSKLKKSMIIKKLSKLKSSMPEV

SEQ ID NO: 141350 - protein, 172 aa, Unknown
  Bacterial polypetide isolated from the Sargasso Sea
MAIRTIITEPNKLLRQISKPVSSVGKEEQKLMDDMLETMYAANGIGLAAIQIGIPKRIIVIDLNRDEINKKPMYFVNPVIINKDPLKATYEEGCLSVPNQFAEVDRPSKCEIEYLDYDGNKKLLKADGLLATCVQHEMDHLEGILFIDYLSKLKKTMIIKKLSKKKSTAAIL

SEQ ID NO: 141351 - protein, 178 aa, Unknown
  Bacterial polypetide isolated from the Sargasso Sea
MFENLEILQFPDERLRRLSMPVESFNQDLKTLADKMLEIMYQSNGIGLAAPQVNQTIRLIVVDVSEERDNPCIFVNPEIKEPAGSVDSSEGCLSVPEIRTTIKRYENITLKYQDLNGKKHEEVLNDLISICVQHEIDHLDGKLFIDYVPDVKLQRLRKKIAKNKKNQLPTKGTTVRVV

SEQ ID NO: 141352 - protein, 120 aa, Unknown
  Bacterial polypetide isolated from the Sargasso Sea
MSDLKILIFPDPKLRKVAKKIDKFDKSLEILSKNMLKTMYEAEGIGLAATQVNIHIRLVVMDLSEERNEPRVFVNPEYTILDKSPFTYEEGCLSIPGFYEEYLGRQRSYLNGRISRATFM

SEQ ID NO: 141353 - protein, 172 aa, Unknown
  Bacterial polypetide isolated from the Sargasso Sea
IKKILQEPNKILRQKSTPVTDVGKAEKILMDDMLETMYHANGIGLAAIQIGIPKRIIVLDISKNKNKKNPFFFVNPVIKNKNTENSTYEEGCLSVPNYFAEIDRPKKCDVEYLDYNGKKQLLKAEGLLATCIQHEMDHLEGILFIDYLSKLKKTMIIKKLSKQKDRPDRIIV

SEQ ID NO: 141354 - protein, 174 aa, Unknown
  Bacterial polypetide isolated from the Sargasso Sea
MAKRKIILVPDEILRKKSEKIEKITDKEKKLADDLFKTMYDNNGIGLAAVQVGILRRMIVIDVSKKDDEKKPLCLINPVIKSFGKDRSTYEEGCLSIPETFIEIERPKTCIVEYVGISGNKINMECDGLLSTCIQHEINHLDGKLIIDFLSKLKKDILIKKLSKNKNTSSRVIV

SEQ ID NO: 141355 - protein, 174 aa, Unknown
  Bacterial polypetide isolated from the Sargasso Sea
MAIRKILTEPNKILRQISKPVEKVTKVEQSLMDDMLETMYDANGIGLAAVQIGIPKRIIVMDLSKEDKIKNPMYFINPVIKNKNKELSTYEEGCLSVPNQFAEVDRPATCEIEYLDYYGEKKIIKADGLLATCIQHEMDHLEGILFIDYLSKLKKSMIIKKLSRQKKSSETLVI

SEQ ID NO: 141356 - protein, 104 aa, Unknown
  Bacterial polypetide isolated from the Sargasso Sea
MAIRTIITEPNKLLRQVSKPVTKVGIEEQKLMKDMLETMYAANGIGLAAIQVGIPQRIIVMDICKEENKKEPRYFVNPIIKNKNPLKATYEEGCLSVPNKFADI

SEQ ID NO: 141357 - protein, 129 aa, Unknown
  Bacterial polypetide isolated from the Sargasso Sea
MAIRQILTEPNKILRQISKSIENVTKDDQVLMDDMLETMYHANGIGLAAIQIGIPKRIIVMDISKKDEKKDPMYFVNPVIKNKNNQLSTYEEGCLSVPNQFAEVDRPATCEVEYLNYHGEKKILKASGL

SEQ ID NO: 141358 - protein, 63 aa, Unknown
  Bacterial polypetide isolated from the Sargasso Sea
MTIRKILTIPDSILRQKSLPVDKVNREIKTLMDDMLNTMYDAPGIGLAAIQIGIPKRIVVMDL

SEQ ID NO: 141359 - protein, 170 aa, Unknown
  Bacterial polypetide isolated from the Sargasso Sea
KIITVPDEILKKISEPVEKVGVNEKKLINDLFETMYHSKGIGLAAVQVGILKRILVIDISTKDEKNKPLSFINPKIKKISDETSIYEEGCLSIPDTFIEIERPKICEVEYIDLDGKVQIMKCDGLLSTCLQHEINHLDGKLIIDHLSKLKRDLIIKKISKTKKNPDRIVV

SEQ ID NO: 141360 - protein, 163 aa, Unknown
  Bacterial polypetide isolated from the Sargasso Sea
MLKLIYAPDPILKKESVSIPQVDNHHKELIKQMYEIMYSANGVGLAAPQIGLNIRIFVLDAGSRDEEKKPITMINPKIISLHENKVPYEEGCLSFPEHFAEIDRPEKIKIEYLDENNSKKISTFSGFESRIIQHELDHLNGILFVDHLSRLKRDVIIRKMRKY

SEQ ID NO: 141361 - protein, 119 aa, Unknown
  Bacterial polypetide isolated from the Sargasso Sea
MSILEILTIPDKRLKQKSSDVENFDKDLAKMVKDMFETLYASGNGIGLAAPQVGIKKRIVVIDLKEEGKSNPMTLINPKIIFYFEEKFVNEEGCLSIPGFYADVSRSNSVEVEWEGLDR

SEQ ID NO: 141362 - protein, 162 aa, Unknown
  Bacterial polypetide isolated from the Sargasso Sea
RAKSLQKRDLTKARFKSLLSDMVDTLRDYGGVGLAAPQIDESLRVVIIEIRDNNLRYGVRESFPLTVFVNPEIELIDSQTAGFWEGCLSIPGIRGYVERPQNISVSFVDELGEFRALDLHGFPATVLQHELDHLDGILYIDRMKDLRSLSFEDEWTRHLKEN

SEQ ID NO: 141363 - protein, 182 aa, Unknown
  Bacterial polypetide isolated from the Sargasso Sea
MSVKEILKMGNPLLRKEAEDFTIEEIKSPETQLLLEDMWDSLEVAGGIGLAAPQIGILKKLAVIKLSEESNRYPDMENSEPYVIFNPKVSVVDETEQGFWEGCLSVPGLRGFVERPRSIRVDFLDENAEPRTIEAEDFLATVFQHELDHLIGKLYVDRMKDIKTLMFEGEMVFDELKEEVLD

SEQ ID NO: 141364 - protein, 145 aa, Unknown
  Bacterial polypetide isolated from the Sargasso Sea
MARLKILTFPDPRLRKVASAVKEFDKSLIKITENMLETMYEENGIGLAATQVDIHKRIVVMDLSEEKNNPKVFINPEFKVLDDKSLFSCEEGCLSIPGVREEITRPDKIKAYWQDIEGKNYEDEPEGLLAVCFQHEIDHLEGKLL

SEQ ID NO: 141365 - protein, 178 aa, Unknown
  Bacterial polypetide isolated from the Sargasso Sea
MFENLEILQFPDERLRRLSVPVEAFNKELKALANKMLEIMYQSNGIGLAAPQVNQTIRLIVVDVSEDRNNPCIFINPKIKQPSGSVDSSEGCLSVPEIRTTIKRYENITLEYQDLNGVRHEELLDDLLSICVQHEIDHLDGKLFIDYVPDVKLQRLRKKIAKSKKNQPTIEGTKVRVV

SEQ ID NO: 141366 - protein, 109 aa, Unknown
  Bacterial polypetide isolated from the Sargasso Sea
IVMDLSENKDDPRIFINPTYKTLKNHSLHEFEEGCLSIPGFNEVIARPDKIELRWQDLDGNEHVDQPKGLLTVCIQHEIDHLEGKLMVDYVSALKRDRVRNKLLKEYKR

SEQ ID NO: 141367 - protein, 103 aa, Unknown
  Bacterial polypetide isolated from the Sargasso Sea
KNPMYFVNPVIKNKNSQKSIYEEGCLSVPNQFAEIDRPKSCDIEYIDYNGKKENLSADGLLATCIQHEMDHLEGILFIDYLSKLKKSMILKKLSKNKPDRIVV

SEQ ID NO: 141368 - protein, 177 aa, Unknown
  Bacterial polypetide isolated from the Sargasso Sea
MAVRDILRMGHPTLRKKSEPVGIHDVSSSKIQNLITDLSDTLEASGGIGLAAPQIGELVRVVIIKIPKGSSSYGELEALPLTVFINPIITPVGQEQKSHWEGCLSVPGLRGLVSRPQNIQLRYYDPEKKETSLKVEGFLSTVLQHECDHLDGTLYLDRLSDTKDLSFEEEFLEYNLN

SEQ ID NO: 141369 - protein, 137 aa, Unknown
  Bacterial polypetide isolated from the Sargasso Sea
MAIRTIITEPNKLLRQISKPVNGVGKEEQKLMDDMLETMYAANGIGLAAIQIGIPKRIIVIDLNRDEIQKKPMYFVNPVIKNKDSLKATYEEGCLSVPNQFAEVDRPSKCEVEYLDYDGNKKLLKADGLLATCVQHE

SEQ ID NO: 141370 - protein, 108 aa, Unknown
  Bacterial polypetide isolated from the Sargasso Sea
MKRKTPMYFVNPTIKNKDKEKTTYEEGCLSVPDYFAEVDRPKYCEVEYLNYNGESKFLKASGLLATCIQHEMDHLEGILFIDYLSKLKKTMIIKKLSKRKNPPDRIIV

SEQ ID NO: 141371 - protein, 99 aa, Unknown
  Bacterial polypetide isolated from the Sargasso Sea
LINPVFRPLSDEKEDDWEGCLSIPGMQGLVRRYKKINYYGFDIDGNKIENDAEGLHARVVQHEIDHLDGILYTNRLADKKAFGFEKEIVEFWKNEKNRH

SEQ ID NO: 141372 - protein, 174 aa, Unknown
  Bacterial polypetide isolated from the Sargasso Sea
MAIKKILHEPNKILRQISTEVVDVGKNEKKLMDDMLETMYHANGIGLAAIQIGVPKRIIVLDISKNEDKKNPMFFVNPVIKNKNSENSTYEEGCLSVPNYFAEIDRPKKCDVEYLDYNGEKQLLKAEGLLATCIQHEMDHLQGILFIDYLSKLKKTMIIKKLSRQKDRPDRIIV

SEQ ID NO: 141373 - protein, 169 aa, Unknown
  Bacterial polypetide isolated from the Sargasso Sea
MDKLLYVPNPLLRQKADKIQSVGTKEKEIAKKMMQIMIKAPGVGLAANQIGILKQIVTIFFVDQETKKETQYTLFNPNIVSYSQEKIVMEEGCLSLPEQFAEIERPQNIVVEYLDENNKLIKKIVSGVESRILQHEIDHLSGKLFVDYLSSLKRNIMIKKVQKFLKNKK

SEQ ID NO: 141374 - protein, 170 aa, Unknown
  Bacterial polypetide isolated from the Sargasso Sea
SIRKILTEPDKILRQVSKPVESVGNEEQDLMKDMLDTMYAAKGIGLAAIQVGIPKRIIVIDLNKDEKKDPMYFVNPIIKQKNSVNSIYEEGCLSVPNQFAEIERPNKCEVEYLDFNGKKQLLKAEGLLATCIQHEMDHLEGILFIDYLSKLKKSMILKKLSKNKPDRIVV

SEQ ID NO: 141375 - protein, 88 aa, Unknown
  Bacterial polypetide isolated from the Sargasso Sea
HSTYEEGCLSVPNQFAEVNRPSTCEVEYLDYKGNKKILKASGLLATCIQHEMDHLEGILFIDYLSKLKKMMIVKKLSKQKNKIDRIVV

SEQ ID NO: 141376 - protein, 166 aa, Unknown
  Bacterial polypetide isolated from the Sargasso Sea
MSIKDIITVPDETLKKISEPLEKVSNNEKKLINDLFDTMYASKGIGLAAVQIGVLKRILVIDVSTKDEKRKPLSFINPVIKNVSNETSIYEEGCLSIPDTFIEIERPKICEVEYIDINGKKKNLKCDGLLSTCLQHEINHLDGKLIIDYLSKLKRDIIIKKIQKQK

SEQ ID NO: 141377 - protein, 174 aa, Unknown
  Bacterial polypetide isolated from the Sargasso Sea
MAIREILTEPNKILRQISKPVEKVTKEEQTLMDDMLDTMYDANGIGLAAIQIGIPKRIIVLDLSKEDKEKNPMYFVNPVIKNKNKELSTYEEGCLSVPNQFAEIDRPTTCEIEYLNYYGEKKILKANGLLATCIQHEMDHLEGVLFIDYLSKLKKSMIIKKLSKQKKNSETLVI

SEQ ID NO: 141378 - protein, 172 aa, Unknown
  Bacterial polypetide isolated from the Sargasso Sea
MTIKTIITEPNKLLRQISKPVNVVGKEEQKLMDDMLETMYAANGIGLAAIQIGVPKRIIVMDISKEENKKEPRYFVNPVIKNKDTIKATYEEGCLSVPNQFAEIDRPSKCEVEYMDYDGNKKLLKAEGLLATCIQHEMDHLQGILFIDYLSKLKRSIIIKKLLKLKSSSAEA

SEQ ID NO: 141379 - protein, 169 aa, Unknown
  Bacterial polypetide isolated from the Sargasso Sea
MDKLLYVPNPLLRQKADKIQSVGIKEKEIAKKMMQIMIKAPGVGLAANQIGILKQIVTIFFVNQETKKETQYTLFNPNIISYSQEKIIMEEGCLSLPEQFAEIERPQNIVVEYLDENNKQITKEVSGVESRILQHEIDHLSGKLFVDYLSSLKRNIMIKKVQKFLKNKK

SEQ ID NO: 141380 - protein, 172 aa, Unknown
  Bacterial polypetide isolated from the Sargasso Sea
MAIRTIITEPNKLLRQISKPVNAVGIEEQKLMDDMLETMYSANGIGLAAIQVGVPKRIIVMDISKDENKKEPRYFVNPVIKNKDPLKATYEEGCLSVPNQFAEIDRPSKCEVEYLDYDGEKKLLKADGLLATCIQHEMDHLEGILFIDYLSKLKKSMIIKKLSKLKSTSAEA

SEQ ID NO: 141381 - protein, 126 aa, Unknown
  Bacterial polypetide isolated from the Sargasso Sea
GLAAPQIGLNIRIFVLDAGARDEEKKPITMINPKIISLHENKVPYEEGCLSFPEHFAEIDRPEKIKIEYLDEDNSKKISTFTGFESRIIQHELDHLNGILFVDHLSRLKRDVIIRKMRKYKKEKEI

SEQ ID NO: 141382 - protein, 173 aa, Unknown
  Bacterial polypetide isolated from the Sargasso Sea
MLRKILTEPDPILRKKCEPLEKVDIDTKKLMDDMLETMYAAPGIGLAAVQVGILKRLVVIDISKGEEKKQPIFLINPQIIHRSKKTSVYEEGCLSLPGQFAEIERPAECTIKYIDYNGKEKDLKADGLLATCIQHEVDHLNGILFIDYLSKLKKDMIIKKLVKQKKEIERVIV

SEQ ID NO: 141383 - protein, 128 aa, Unknown
  Bacterial polypetide isolated from the Sargasso Sea
MAKLYAEMCQAMWMSDGIGLAAPQIGVNKRVIIVDESTEEYGKYAHLMVNPKITWKSEEKVLLDEGCLSVPDQNGEVSRSKSIKLTFQNKDGKYKKWKLDGIAARVVQHEIDHLEGILFVDYLDAKDN

SEQ ID NO: 141384 - protein, 118 aa, Unknown
  Bacterial polypetide isolated from the Sargasso Sea
MLKKILIEPDPILRQKCEALEKVDSNTKKLMDDMLETMYAAPGIGLAAIQIGILKRLVVIDISKEEGKRQPIFLVNPEITYRSKETSVYEEGCLSLPGQFAEVERPAECSIKYIDYNG

SEQ ID NO: 141385 - protein, 117 aa, Unknown
  Bacterial polypetide isolated from the Sargasso Sea
MAIKKIITEPSKILRQKSKTVENVGNEERKLMNDMLDTMYHANGIGLAAIQIGIPKRIIVMDISKNTEKKTPMYFVNPIIKNKNSEHSTYEEGCLSVPNYFAEIDRPKKCEVEYLDY

SEQ ID NO: 141386 - protein, 174 aa, Unknown
  Bacterial polypetide isolated from the Sargasso Sea
MSIKDIITVPDEMLKKISEPLEKVSINEKKLINDLFDTMYASKGIGLAAVQIGILKRILVIDVSTKDEKSEPLSFINPVIKKVSNETSVYEEGCLSIPDTFIEIERPKICEVEYININGEKKNLKCDGLLSTCLQHEINHLDGKLIIDHLSKLKRDIIIKKISKTKKNPDRILV

SEQ ID NO: 141387 - protein, 83 aa, Unknown
  Bacterial polypetide isolated from the Sargasso Sea
QEGCLSVPEYYADVERAKEVEVEWFDDSGVKCKKKLSGLLSICIQHEIDHLDGILFIDHLSALKRKMAIQKIKKIKKNISNDG

SEQ ID NO: 141388 - protein, 168 aa, Unknown
  Bacterial polypetide isolated from the Sargasso Sea
MEILLVPHPALRQKANKLTSITEEDIEIANFMMETMIKAPGVGLAANQVGVLKQIVTIKFEDKENNRKANYILFNPRIIQYSEETAIIEEGCLSLPEQYADVKRPKEIILEYIDEKEKTIKKQIDGYESRILQHEIDHLSGKLFVDYLSSLKRNMLIKKVKKLQNFKK

SEQ ID NO: 141389 - protein, 143 aa, Unknown
  Bacterial polypetide isolated from the Sargasso Sea
KLMDDMLETMYDANGIGLAAIQVGVPKRIIVMDISKEENKKEPRYFVNPVIKNKDPEKATYEEGCLSVPNQFAEIDRPSKCEVEYLDYNGEKKLLKADGLLATCIQHEMDHLEGILFIDYLSKLKKSMIIKKLTKKKSPSAIL

SEQ ID NO: 141390 - protein, 169 aa, Unknown
  Bacterial polypetide isolated from the Sargasso Sea
MDKILYVPNPLLRQKAKKIKTVGKEEIKIAQNMKKIMIKAPGVGLAANQIGILKQIVTIAFLDREKNKTIEYNLFNPKIINFSKEKIVMEEGCLSLPDQFAEIERPKKIVLEFLDDSNNLIKKEVDGVESRILQHEIDHLSGKLFVDYLSSLKRNIIIKKVQKYLKSKN

SEQ ID NO: 141391 - protein, 116 aa, Unknown
  Bacterial polypetide isolated from the Sargasso Sea
MAKNLKILIFPDPRLRKVAEKVTKFDKSLENLANSMLKTMYDANGIGLAATQVDKHIRLIVMDLSENRDDPRIFINPTYKILKNHSLYEFEEGCLSIPGFNEVIARPDKIELRWQD

SEQ ID NO: 141392 - protein, 112 aa, Unknown
  Bacterial polypetide isolated from the Sargasso Sea
MTVKKILTEPNKLLRQVSKPVDFVGKEEQELMDDMIDTMYDANGIGLAAIQIGVPKRIIVLDISKDQKNKTPMFFVNPVVKNKHVDKTSYEEGCLSVPGQFAEIERPSSCDV

SEQ ID NO: 141393 - protein, 167 aa, Unknown
  Bacterial polypetide isolated from the Sargasso Sea
MNKISLKIYPDEVLRTVCSEISNIDSDIVKIVESMKEIMIKEKGIGLAGPQVGVTKRLFITQDFSKNDELDFLVMINPKIKEESGEVSSKEGCLSIPGYYDYIPRFDNISVEYVDLNGDLNSKVFESMQSIVFQHELDHLDGILFPDRLAKIRKEIFFKKINKEFRK

SEQ ID NO: 141394 - protein, 174 aa, Unknown
  Bacterial polypetide isolated from the Sargasso Sea
MTKRKIILVPDEILRKKSEKIEKITNKEKQLADDLFKTMYNNNGIGLAAVQVGVLRRMIVIDVSKKDEEKKPFCLINPVIKSFGKDRSTYEEGCLSIPETFIEIERPKTCIVEYIDVSGNKINMECDGLLSTCIQHEINHLDGKLIIDFLSKLKKDILIKKLSKNKNTSSRVIV

SEQ ID NO: 141395 - protein, 152 aa, Unknown
  Bacterial polypetide isolated from the Sargasso Sea
VTDFDQSLDNTTQSMLETMYISSGIGLAAIQTGILKQIIVIDLKSGEKDTSLREPHVFVNPKILKKYGSTVSEEGCLSVIDFRGDVERAEKISIEYQDVNGNIHQMEAEGMMSICLQHEIDHLKGILFIDHLPVLKQKMVKKKLTKLAMTNA

SEQ ID NO: 141396 - protein, 172 aa, Unknown
  Bacterial polypetide isolated from the Sargasso Sea
MKILLVPDPILRQKALKIDNIEEEDIAIANKMMNIMIKVPGVGLAANQVGILKQIVTINFKEDENSKEKKYILFNPKILTYSKETVIMEEGCLSLPDQYADIERPQKITLEYLDIKKKLIKKTVDGYEARILQHEIDHLSGKLFVDYLSSLKRNILINKVKKQSKRDKENGK

SEQ ID NO: 141397 - protein, 174 aa, Unknown
  Bacterial polypetide isolated from the Sargasso Sea
MATKKILTEPNKLLRQISKTVEKVKDEERKLMDDMLETMYAANGIGLAAIQIGVPKRIIVMDISKKENEKNPMFFVNPVIIKKNIEKATYEEGCLSVPNQFAEIDRPSSCEVEYLDYDGNKKNLKAEGLLATCIQHEMDHLEGILFIDYLSKLKKTMIIKKLSKLKIKPDRIIV

SEQ ID NO: 141398 - protein, 150 aa, Unknown
  Bacterial polypetide isolated from the Sargasso Sea
MTIKKIITLPDPFLRTNAIPVTKVTKEIRQLLDDMLETMYVANGVGLASTQIKDNRRLIVMDCGKENENKLVQNEKELVPYPIKMINPKLTFKSSDLIEREEGCLSIPGHQAKIKRPRLIKVRYLDENGIKRELETDGLLAACIQHEMII

SEQ ID NO: 141399 - protein, 174 aa, Unknown
  Bacterial polypetide isolated from the Sargasso Sea
MSVKEIITVPDETLKKISDPVEKIGINEKKLINDLFETMYVSNGIGLAAVQIGILKRILVVDVSTKDEKNQPIVLINPVIKNLSDDTSVYEEGCLSIPETFIEIERPKICEVEYIDEKGSKKNLECDGLLSTCIQHEINHLDGKLIIDHLSKLKKDFIIKKISKIKKNPDRIVV

SEQ ID NO: 141400 - protein, 109 aa, Unknown
  Bacterial polypetide isolated from the Sargasso Sea
SKVDNKKEPRYFVNPVIKNKDPLKATYEEGCLSVPNQFAEIDRPSKCEVEYLDYNGNKKILKADGLLATCIQHEMDHLEGILFIDYLSKLKKSMIIKKLSKKKSTSAIL

SEQ ID NO: 141401 - protein, 173 aa, Unknown
  Bacterial polypetide isolated from the Sargasso Sea
YLIKFMEILLVPHPILRQKANKLKSITKDDIKIANLMMQAMIKAPGVGLAANQIGVLKQIVTINFEDKENDKKANYILFNPEIIQYSKETVVMEEGCLSLPDQYADVERPKEIILEYMDKNEKTIKRQIDGYEARILQHEIDHLSGKLFVDYLSSLKRNMLIKKVKKNQKSKK

SEQ ID NO: 141402 - protein, 92 aa, Unknown
  Bacterial polypetide isolated from the Sargasso Sea
KIVWTSRELSVYKEGCLSIPEFYEEIERPSECRVKYLDKKNKVKFLDCDGLLATCVQHEIDHLDGKLFIDYLSRLKRTSIEKKFIKQYKQKA

SEQ ID NO: 141403 - protein, 99 aa, Unknown
  Bacterial polypetide isolated from the Sargasso Sea
MSDLKILIFPDPKLRKVAKRIDKFDKSLEMLSKNMLKTMYEAEGIGLAATQVNIHIRLVVMDLSQERNKPRVFVNPEYTILDKSPFTYEEGCLSIPGFN

SEQ ID NO: 141404 - protein, 45 aa, Unknown
  Bacterial polypetide isolated from the Sargasso Sea
LLAICIQHEIDHLDGKLFVDYLSNLKQNRLKKRISKIELKESTAS

SEQ ID NO: 141405 - protein, 182 aa, Unknown
  Bacterial polypetide isolated from the Sargasso Sea
MSVLEVVNYGNPILRKKCSQVTNFSKLSDFIDDMFDTMYEEEGIGLAANQVGVDLNLFIIDISHTDDNEFPRIFINGEVTSASGESVFSEGCLSIPEVALEVTRPEVILFKYQDIHEKWYEEEFDGLLSRAIQHEIDHLNGVLIIDLVSEMQRLKVNKEVKRIKNDSIIKLKRQPISKGIVL

SEQ ID NO: 141406 - protein, 155 aa, Unknown
  Bacterial polypetide isolated from the Sargasso Sea
MWDTMYNAEGVGLAAPQIGRQIKLFIIDASPFFEEKEVTDYELKNLKRVFINPTVTYLNDEKCSFNEGCLSIPDIREDIERFDSIKIDFFDEEFNSHSLDFNGILSRVILHEYDHIQGVLFTDKISKFKRTLIQKKLNKISRGQIDVNYPMKFSK

SEQ ID NO: 141407 - protein, 180 aa, Unknown
  Bacterial polypetide isolated from the Sargasso Sea
MAVLNILKYPHPNLRLRAHPVNAIDADIHKLCDDMLETMYAASGIGLAATQVDVRKRVVVIDLSDGNVKGKYSYTNITQVLVNLSKPLCLINPEVKVLDKNVVPYEEGCLSVPNVNAVVKRPNKILLRAQTLQDSNMEIEATGLLATCLQHEIDHLDGKLFIDHLSQLKMQQVRRKFKLK

SEQ ID NO: 141408 - protein, 93 aa, Unknown
  Bacterial polypetide isolated from the Sargasso Sea
MNIRKILILPDPVLRKKSLPVKKVDKDIQNLMDDMLATMYDAPGIGLAAIQIGILKRIVVMDVSKEPEKKEPMYLINPEITWKSNVNASYEEG

SEQ ID NO: 141409 - protein, 170 aa, Unknown
  Bacterial polypetide isolated from the Sargasso Sea
LEKFLTEPDKFLRQVSKTVLKVTDEERHLMDDMLETMYDANGIGLAAIQVGVPKRILVIDLGKKENKNMPLFFVNPKIIKKNDKLATYEEGCLSVPDQFAEIDRPNKCTVEYLDYNGKKKVLDADGLLATCLQHEMDHLEGILFIDYLSKLKRDYIIKKLTKSKPDRIVV

SEQ ID NO: 141410 - protein, 76 aa, Unknown
  Bacterial polypetide isolated from the Sargasso Sea
MIRPIILHPDARLKKKSVQVESINDALIELAEDMMETMYDAPGIGLAAPQIGVLERLIVMDCAKKEDEEPDPIIML

SEQ ID NO: 141411 - protein, 117 aa, Unknown
  Bacterial polypetide isolated from the Sargasso Sea
MAIKTIITEPNKLLRQISKPVNGVGKEEQKLMDDMLETMYDANGIGLAAIQVGIPKRIIVMDISKGENKKEPRYFVNPVIKKKDLEKATYEEGCLSVPNQFAEIDRPSKCEVEYLDY

SEQ ID NO: 141412 - protein, 165 aa, Unknown
  Bacterial polypetide isolated from the Sargasso Sea
PDETLKKISEPVEKVSTNEKKLINDLFDTMYASKGIGLAAVQIGILKRILVIDVSTKDEKREPLSFINPVIKKVSDETSIYEEGCLSIPDTFIEIERPKICEVEYIDINGEEKNLKCDGLLSTCLQHEINHLDGKLIIDHLSKLKRDIIIKKISKTKKNPDRILV

SEQ ID NO: 141413 - protein, 128 aa, Unknown
  Bacterial polypetide isolated from the Sargasso Sea
MRQFKLGVPKRIIVMDISKNDQENNPMYFVNPVIKNKNKEFSTYEEGCLSVPNQFAEVDRPATCEIEYLDYYGEKKLLKAQGLLATCIQHEMDHLEGILFIDYLSKLKKSMIIKKLSKSKKNSETLVI

SEQ ID NO: 141414 - protein, 129 aa, Unknown
  Bacterial polypetide isolated from the Sargasso Sea
VQVGVPLRVIVMDISWNKEDGIKEPKYFVNPVISNKAKDLSIYEEGCLSVPDQYAEIERPEKCVINYLDYDGEEKQEEVEGLFATCIQHEMDHLEGILFIDHLSKLKKNLIVKKLVKAKKQSSKERIVA

SEQ ID NO: 141415 - protein, 169 aa, Unknown
  Bacterial polypetide isolated from the Sargasso Sea
MAVLQILTIPDPRLKYKSINVENFDKNLEEIINDMLDTLSASGNGIGLAAPQVNIHQRIIVMDLREDEKSNPQIFINPRIIKFSSEKNINEEGCLSIPEFYAEVERPSKIEVEWFDSKGKKLKKEMTGLLSICMQHEIDHLNGVLFIDHISKLKKKMVLQKFKKLKTKQ

SEQ ID NO: 141416 - protein, 103 aa, Unknown
  Bacterial polypetide isolated from the Sargasso Sea
SHVFVNPELINKSPNNSTYEEGCLSVPGQFAEIDRPNSCHVKYLDYYGQPKELKATGMLATCIQHEMDHLEGILFIDYLSKLKKTMIIKKLSKQKKAIERIVV

SEQ ID NO: 141417 - protein, 100 aa, Unknown
  Bacterial polypetide isolated from the Sargasso Sea
MFYNPVIKKISQKTSIYEEGCLSIPNTFIEIERPKICTISYVDQEGAKREMDCDGLLATCIQHEINHLDGKLIIDYLSKIKKDLIIKKLSKQKTSNRVVV

SEQ ID NO: 141418 - protein, 127 aa, Unknown
  Bacterial polypetide isolated from the Sargasso Sea
GLAAIQVGIPQRIIVMDICKEENKKEPRYFVNPMIKNKDPLKATYEEGCLSVPNQFAEIDRPSKCEVEYLDYNGKKQLLKAEGLLATCIQHEMDHLEGILFIDYLSKLKKSMIIKKLSKLKSSTAEV

SEQ ID NO: 141419 - protein, 103 aa, Unknown
  Bacterial polypetide isolated from the Sargasso Sea
MATLKILIFPDPKLRTVAEPIKEVDNSIAKLVEDMFETMYEGDGIGLAATQVDIHKRVIVIDVSNEKNAPLVLINPMIKRIINNEKKPYSEGCLSVPGIYEEL

SEQ ID NO: 141420 - protein, 130 aa, Unknown
  Bacterial polypetide isolated from the Sargasso Sea
MTELSILLHPDPRLKKVCTQVTNIDESIKKLCLDMTDTMYKYSGVGLAAPQVGILKRVVVMDCSEEEEKSPITLINPEIVWSSKEDSKFEEGCLSIPDIREEIKRPSEVQVKFTDINGKSNESYFKGLWA

SEQ ID NO: 141421 - protein, 133 aa, Unknown
  Bacterial polypetide isolated from the Sargasso Sea
APGIGLAAVQIGILKRIIVIDVSKKEEEKKPLFLINPEIKFKSKKTSFYEEGCLSLPGYFAEIERPAKCDVEFIDYYGKKKELKADGLLSTCIQHEIDHLNGVLFIDYLSKLKKDMIIKKLTKQKKSLDKTVL

SEQ ID NO: 141422 - protein, 96 aa, Unknown
  Bacterial polypetide isolated from the Sargasso Sea
MSLKKIVTVPDPILRKISNPIEKIGNDEKQLVHDMFETMYTSNGIGLAAIQIGVPKRIIVLDVSNKDEEKNPMCFINPKIKKTSDERSSYEEGCLS

SEQ ID NO: 141423 - protein, 172 aa, Unknown
  Bacterial polypetide isolated from the Sargasso Sea
MAIRTIITEPNKLLRQVSKPVSNVGKDEQKLMRDMLETMYAANGIGLAAIQVGIPQRIIVMDICKEENKKEPRYFVNPVIKNKDTLKATYEEGCLSVPNQFAEIDRPSKCEVEYLDYNGQKKLLKAEGLLATCIQHEMDHLEGILFIDYLSKLKRSMIIKKLSKLKSSTAEV

SEQ ID NO: 141424 - protein, 170 aa, Unknown
  Bacterial polypetide isolated from the Sargasso Sea
MALRPIKNCFDPVLRKQCEIVKNIDGELVTLSEDMIETTLAAPGVGLAANQIGISQRIFVVNMGVEMDKDNLVTLINPEITAIEGSELGEEGCLSIPDVVAKVKRATQVEIKAVDLNGKDVRYEASGFLARALQHEMDHLNGILFWDSLGKIKRDILKRKFKKKLKEQDE

SEQ ID NO: 141425 - protein, 172 aa, Unknown
  Bacterial polypetide isolated from the Sargasso Sea
MTIKPIITEPNKILRQISQPVKKVGKEEQELMNDMLETMYSANGIGLAAIQIGVPKRIIVMDISKNENKKEPRYFVNPIIKNKDILKSTYEEGCLSVPNQFAEIDRPKKCVIDYLDYHGEKKTLDAEGLLATCIQHEMDHLEGILFIDYLSKLKKSMIVKKLSKMKSTRIIV

SEQ ID NO: 141426 - protein, 174 aa, Unknown
  Bacterial polypetide isolated from the Sargasso Sea
MTVKTILTEPNKLLRQISQPVDQVGENEKKLMDDMIETMYAANGIGLAAIQIGFPKRIIVMDISKDKKNKTPMYFVNPIILNKATEQSTYEEGCLSVPDQFAEIDRPKKCEVEYLDYNGEKKLLKAEGLLATCIQHEVDHLEGILFIDYLSKLKKSMIIKKLSKQKNKPDRIVV

SEQ ID NO: 141427 - protein, 174 aa, Unknown
  Bacterial polypetide isolated from the Sargasso Sea
MAIKKILTEPNKLLRQISKVVEKVGKEEQKLMNDMLETMYDANGIGLAAIQVGVPLRVIVMDISKNQEKKNPMFFVNPVVKNKNIKLSTYEEGCLSVPNQFAEIDRPNSCEVEYLDYNGKKSFLKAEGLLATCIQHEMDHLEGILFIDYLSKLKKTMIIKKLSKQKGKADRIVV

SEQ ID NO: 141428 - protein, 191 aa, Unknown
  Bacterial polypetide isolated from the Sargasso Sea
MSILPIRIFPDPFLRKKSKEITEINKDIIDFGHSMLETMQTARGVGLAAPQVGKLIRMITIQVPEKAPMIMINPNLINQEGLRRVEEGCLSVPGFTGIVERSIKIDAQYLDENKNKIQLSAEELLAQAIEHEIDHLNGIMYLDHLKSHQELHKTGITPNEVHWHDVGYKIHVNKQEALKNDLITEEVMKKK

SEQ ID NO: 141429 - protein, 174 aa, Unknown
  Bacterial polypetide isolated from the Sargasso Sea
MAIKKIITEPNKILRQKSLTVNKVGIDEQKLMDDMLETMYHANGIGLAAIQIGVPKRIIVMDISKNDEKKNPMYFVNPLIKNKISETSTYEEGCLSVPNFFAEVDRPKKCDVEYLDYNGKKNLIKADGLLATCIQHEMDHLEGILFIDYLSRLKKTMIIKKLSKQKDRPDRIIV

SEQ ID NO: 141430 - protein, 87 aa, Unknown
  Bacterial polypetide isolated from the Sargasso Sea
EIKSNKSLYTFSEGCLSVPGFNEEITRPDQIILKWQNLDGDRLEDEPEGLLTVCIQHEIDHLEGKLMVDYLSTLKRDRIRNKLNKRI

SEQ ID NO: 141431 - protein, 154 aa, Unknown
  Bacterial polypetide isolated from the Sargasso Sea
MLRKILTEPDPILRKKCEPLEKVDAETKKLMDDMLETMYAAPGIGLAAIQVGILKRLVVLDISKGEEEKKPMFLINPKIIHQSKKTSIYEEGCLSLPGQFAEIERPAECILKYIDYNGKEKELKADGLLATCVQHEVDHLNGILFIDYLSKLKK

SEQ ID NO: 141432 - protein, 169 aa, Unknown
  Bacterial polypetide isolated from the Sargasso Sea
MDKLLYVPNPLLRQKANKIQSVGIKEKEIAKKMMQIMLKAPGVGLAANQIGILKQIVTIFFVDQETKKETQYTLFNPDIVSYSQEKIVMEEGCLSLPEQFAEIERPQNIVVQYLDENNKQITKEVSGVESRILQHEIDHLSGKLFVDYLSSLKRNIMIKKVQKFLKNKK

SEQ ID NO: 141433 - protein, 105 aa, Unknown
  Bacterial polypetide isolated from the Sargasso Sea
MTIRKILTEPNKILRQVSLPVEKVGYEERELMDDMLETMYSARGIGLAAIQIGIPKRIIVMDLSKEDQKKEPRYFVNPVIKNKNKKLATYEEGCLSVPGQFAEID

SEQ ID NO: 141434 - protein, 171 aa, Unknown
  Bacterial polypetide isolated from the Sargasso Sea
MSIRKILTEPDKILRQVSKPVEGVRNEEQDLMRDMLDTMYAAKGIGLAAIQVGIPKRIIVIDLNKDEKKNPMYFVNPIIKKKNSVNSIYEEGCLSVPNQFAEIERPNKCEVEYLDFDGKKQLLKAEGLLATCIQHEMDHLEGILFIDYLSKLKKSMILKKLSKNKPDRIVV

SEQ ID NO: 141435 - protein, 147 aa, Unknown
  Bacterial polypetide isolated from the Sargasso Sea
MAIRTIITEPNKLLRQISKPVNGVGKEEQKLMDDMLETMYDANGIGLAAIQVGVPKRIIVMDISKDESKKEPRYFVNPVIKNRDPEKATYEEGCLSVPNQFAEIDRPSKCEVEYLDYDGEKKLLKADGLLATCIQHEMDHLEGILFI

SEQ ID NO: 141436 - protein, 130 aa, Unknown
  Bacterial polypetide isolated from the Sargasso Sea
MHICMTIRRILTEPDRTLREKSQPVEQVDENLRKLIDDMLETMYAAPGIGLAAIQVGVPKRVIVLDIAPKDQPKQPMCFVNPEIIKKSNNNSTYEEGCLSVPGQFAEIERPDKCHVKYLDYNGKPQEMKQ

SEQ ID NO: 141437 - protein, 174 aa, Unknown
  Bacterial polypetide isolated from the Sargasso Sea
MAIREILTEPNKILRQISQSVEKVTKEEQKLMDDMLETMYQANGIGLAAIQIGVPKRIIVMDIAKKDEKKNPMYFVNPIIKNKTKNLSTYEEGCLSVPNQFAEVDRPETCEVEYLDYNGEKKILKATGLLATCIQHEMDHLQGILFIDYLSKLKKSIIIKKLSKQKKSSEALVI

SEQ ID NO: 141438 - protein, 178 aa, Unknown
  Bacterial polypetide isolated from the Sargasso Sea
MFENLEILKFPDERLRRLSSPVEAFNKELKALADKMLEIMYQSNGIGLAAPQVNQTIRLIVVDVSEDRNNPCIFINPKIKQPSGSVDSSEGCLSVPEIRTTIKRYENITLEYQDLNGVRHEESLGDLLSICVQHEIDHLDGKLFIDYVPDVKLQRLRKKIAKSKKNQPTTEGTTVRVV

SEQ ID NO: 141439 - protein, 112 aa, Unknown
  Bacterial polypetide isolated from the Sargasso Sea
RLIVIDLSEDKSSPLHIVNPDYEILDDTLELSEEGCLSIPSFRQEVKRAKKIKLKYQDLNGSDKELTAEGLLGFCIQHEIDHLNGKLLVDYSSSLKRNRIKDKLLKLKDEKK

SEQ ID NO: 141440 - protein, 168 aa, Unknown
  Bacterial polypetide isolated from the Sargasso Sea
MAVMPIVWAPDPVLKTKCTQVSEINDNILSLMEDMLETMYQAPGIGLAAPQVGVKQRIIVVDCSPKNEAPKPYRMINPELVSVSKELTTQEEGCLSLPGFYAEITRPAEARVRYTDEKNKQQTIDVDGLLSVCIQHEIDHLNGILFVDHLSSLKRNMILKKMVKAKKE

SEQ ID NO: 141441 - protein, 172 aa, Unknown
  Bacterial polypetide isolated from the Sargasso Sea
MTVKQILTEPNKILRQVSKPVESVSKEEQILMDDMLETMYAANGIGLAAIQIGVPKRIIVMDLSRNEEKKEPRYFVNPIIKNKNSDKATYEEGCLSVPNQFAEIDRPSTCVVEYLDYDGKKQILNAEGLLATCIQHEMDHLEGILFIDYLSKLKKSMILKKLSKKKSNQIVI

SEQ ID NO: 141442 - protein, 172 aa, Unknown
  Bacterial polypetide isolated from the Sargasso Sea
MTVKTILKEPNQILRQISKPVEKVGKEEQQLMNDMLDTMYSANGIGLAAIQIGVPKRIIVMDLSKDENKKEPRYFVNPVIKDKDISKSTYEEGCLSVPNQFAEIDRPKKCVVEYLDYYGKKKILKAEGLLATCIQHEMDHLEGILFIDYLSKLKKSMIIKKLSKVKSTRIVV

SEQ ID NO: 141443 - protein, 160 aa, Unknown
  Bacterial polypetide isolated from the Sargasso Sea
MAIRSIITEPNKLLRQISKPVSQVGKEEQKLMKDMLETMYAANGIGLAAIQVGIPQRIIVMDICKEENKKEPRYFVNPIIKNKDPLKATYEEGCLSVPNQFADIDRPSKCEVEYLDYNGKKQLLKAEGLLATCIQHEMDHLEGILFIDYLSKLKKSMIIK

SEQ ID NO: 141444 - protein, 174 aa, Unknown
  Bacterial polypetide isolated from the Sargasso Sea
MAIKKIITEPNKILRQKSLPVKKVGKAEQILMDDMLETMYAANGIGLAAIQIGVPKRIIVMDISKKDEKKNPMYFVNPIIKNKNSETSTYEEGCLSVPNFFAEVDRPKKCDVEYFDYDGKNKILNAEGLLATCIQHEMDHLEGVLFIDYLSKLKKTMIVKKLSKKRDRPDRIIV

SEQ ID NO: 141445 - protein, 167 aa, Unknown
  Bacterial polypetide isolated from the Sargasso Sea
MPLLKILIFPDPRLRTVAKAVEKVDDSLKKLTEDMLETMYEGSGIGLAATQVDVHKRVIVVDISEKKDEPLVLINPVLKKVIDPELKTYSEGCLSVPGFYEELERPSEIEISFQDVNGQDHTLIANGLLSVVVQHEMDHLEGKMMVDSISNVKREMIRKKLSKAKGT

SEQ ID NO: 141446 - protein, 174 aa, Unknown
  Bacterial polypetide isolated from the Sargasso Sea
MSVKDIITVPDETLKKISEPLEKIGINEKKLINDLFETMYNSKGIGLAAVQVGILKRILVIDISSKDEKKEPLSFINPTIKKISEATSIYEEGCLSIPDTFIEIERPKICEVDYIDMNGKKKNMKCDGLLSTCLQHEINHLDGKLIIDHLSKLKRDLIIKKISKTKKNPDRIIV

SEQ ID NO: 141447 - protein, 159 aa, Unknown
  Bacterial polypetide isolated from the Sargasso Sea
LGRFLNLVKKVGKEEQKLMDDMLETMYSANGIGLAAIQIGVPKRIIVMDISKDKNKKEPRYFVNPVIKNKDLLKSTYEEGCLSVPNQFAEIDRPKNCDVEYLDYNGERKLLKAEGLLATCIQHEMDHLEGILFIDYLSKLKKSMIIKKLSKIKSTRIVV

SEQ ID NO: 141448 - protein, 172 aa, Unknown
  Bacterial polypetide isolated from the Sargasso Sea
MAVKTILKEPNKILRQISKPVEKVGNEERQLMKDMLETMYEANGIGLAAIQIGVPKRIIVMDISKDDEKKQPRFFVNPVIKNKDLSKSTYEEGCLSVPNQFAEIDRPSKCEVEYLDYDGEKKILKAEGLLATCIQHEMDHLEGILFIDYLSKLKKSMIIKKLSKNKSNRIIV

SEQ ID NO: 141449 - protein, 173 aa, Unknown
  Bacterial polypetide isolated from the Sargasso Sea
MLKEIVTVPDEILKKISDPIEKVGINEKKLIEDLFETMYHSKGIGLAAVQVGILKRVLVVDVSNKDEENQPIALINPVIKNLSEETSVYEEGCLSIPETFIEIERPKICEVEYIDEMGEKKNLKCDGLLSTCIQHEINHLDGKLIIDHLSKLKKDFIIKKISKIKKNPERIVV

SEQ ID NO: 141450 - protein, 174 aa, Unknown
  Bacterial polypetide isolated from the Sargasso Sea
MAIKTIITEPNKILRQKSLPVKQVGVEEQRLMDDMLETMYDANGIGLAAIQIGVPKRIIVMDISKSGEKNNPMYFVNPLIKDKVDATSTYEEGCLSVPNFFAEVNRPKECNVEYLDYEGKKKILKAEGLLATCIQHEMDHLEGILFIDYLSKLKKTMIVKKLSKQKSRPDRIIV

SEQ ID NO: 141451 - protein, 168 aa, Unknown
  Bacterial polypetide isolated from the Sargasso Sea
MAKNLKILIFPDPRLRKVAEKVIKFDKSLENLANSMLKTMYDANGIGLAATQIDQHIRLIVMDLSEERNEPRIFINPTYKVLEGHSLYEFEEGCLSIPGFNEVIARPDKIELRWQDLEGNEHIERPEGLLTVCIQHEIDHLDGKLMVDYVSALKRDRVRSRLLKEYKR

SEQ ID NO: 141452 - protein, 174 aa, Unknown
  Bacterial polypetide isolated from the Sargasso Sea
MTIRKILTEPNKTLRQVSLPVDKVGKSEQLLMDDMLETMYHAKGIGLAAIQIGVPKRIIVMDLSKEEEKKDPRYFVNPVIKNKNLNLSKYLEGCLSIPDQFAEVDRPSTCEVEYLDYNGNKKLLRTDGLLATCIQHEMDHLEGILFIDHLSKLKKSMIIKKLSKLKSKEDRVVL

SEQ ID NO: 141453 - protein, 122 aa, Unknown
  Bacterial polypetide isolated from the Sargasso Sea
IRLIVVDVSEDRDNPCIFVNPEIKEPAGSVDSSEGCLSVPEIRTTIKRYENITLEYQDLNGERHEDGLGDLMSICVQHEIDHLDGKLFIDYVPDVKLQRLRKKIAKNKKNQLPTEGTTVRVV

SEQ ID NO: 141454 - protein, 127 aa, Unknown
  Bacterial polypetide isolated from the Sargasso Sea
SSCTVGILRRILVIDVSNKDDKKEPLSFINPIIKKVSNDTSIYEEGCLSIPDTFIEIERPKICEVEYIDINGKMKNLKCDGLLSTCLQHEINHLDGKLIIDHLSKLKKDFIIKKISKLKKNPDRIIV

SEQ ID NO: 141455 - protein, 172 aa, Unknown
  Bacterial polypetide isolated from the Sargasso Sea
MAIRTIITEPNKSLRQISKPVNSVGKEEQKLMDDMLETMYDANGIGLAAIQIGVPKRIIVMDLSKDETKKEPRYFVNPVIKNKDPEKATYEEGCLSVPNQFAEINRPSRCEVEYLDYDGEKKLLKADGLLATCIQHEMDHLEGILFIDYLSKLKRSMIIKKLSKLKSTSVEA

SEQ ID NO: 141456 - protein, 91 aa, Unknown
  Bacterial polypetide isolated from the Sargasso Sea
IGKETEDDWEGCLSIPGMQGLVRRFKKIKYSGFDLDGKVIENEVEGLHARVVQHEVDHLNGILYTSRLAHKNAFGFEKEITTYWKNEQNRK

SEQ ID NO: 141457 - protein, 110 aa, Unknown
  Bacterial polypetide isolated from the Sargasso Sea
MSVKELITVPDDILRKKSEPLNKVDVNEKKLIKDLFETMYRHNGIGLAAVQVGILKRVVVLDVSKNENEKKPLCFINPQIKTLSEKMSTYEEGCLSIPNTFIEIERPRNL

SEQ ID NO: 141458 - protein, 174 aa, Unknown
  Bacterial polypetide isolated from the Sargasso Sea
MSIKDIITVPDETLKKISEPLEKVSDNEKKLIKDLFDTMYASKGIGLAAVQIGILKRILVIDVSSKDEKKEPLSFINPIIKRVSDETSIYEEGCLSIPDTFIEIERPKICEVEYIDINGEKKNLKCDGLLSTCLQHEINHLDGKLIIDHLSKLKRDIIIKKISKTKKNPDRILV

SEQ ID NO: 141459 - protein, 169 aa, Unknown
  Bacterial polypetide isolated from the Sargasso Sea
MEILLVPNEVLRLKAKKLTKITKADINVAHQMMDTMIKAPGVGLAANQVGILKQIVTINFEDKENDKKTNYILFNPSIIEYSAEKTIMEEGCLSLPEQYADVERPKQIIIEYTDENEKLIKKEIDGYEARILQHEIDHLSGKLFVDYLSSLKRNILIKKVKKLQNTKNR

SEQ ID NO: 141460 - protein, 178 aa, Unknown
  Bacterial polypetide isolated from the Sargasso Sea
MTLLNILHYPDNKLRQKGEKVNTFDENLKKIANDMLETMYAAKGIGLAAVQVNLPIRLIVIDISETRNEPIILVNPIINDRKEKIIFEEGCLSVPGFYEKVERYNDINVTYNDIDGNTINKNTEGLLAVCIQHEIDHLDGKLFVDYISNLKRDRIAKKIKKSLASGSVPTRKDVPYNI

SEQ ID NO: 141461 - protein, 168 aa, Unknown
  Bacterial polypetide isolated from the Sargasso Sea
MATLKILIFPDPRLRTVAEPIREVDNSIAKLVEDMFETMYEGEGIGLAATQVDIHKRIIVIDISNEKNDPLVLINPTIKRIIKNEKKSYSEGCLSVPGIYEELERPSAVEICALGLDGKEFTLVAEDLLSVVIQHEMDHLDGKMMVDFLSNLKREMIRKKMAKLETAQ

SEQ ID NO: 141462 - protein, 172 aa, Unknown
  Bacterial polypetide isolated from the Sargasso Sea
MAIRTIITEPNKLLRQISKPVDRVGKEEQKLMDDMLETMYEANGIGLAAIQIGVPKRIIVMDISKDESKKEPRYFVNPVIKNKDPEKATYEEGCLSVPNQFAEIDRPSKCEVEYLDYDGEKKLLKADGLLATCIQHEMDHLEGILFIDYLSKLKRSMIIKKLSKKKSTAAVL

SEQ ID NO: 141463 - protein, 172 aa, Unknown
  Bacterial polypetide isolated from the Sargasso Sea
MAIRTIITEPNKILRQISKPVNGVGKEEQKLMDDMLETMYDANGIGLAAIQVGVPKRIIVMDISKDENKKEPRYFVNPVIKNKDPEKATYEEGCLSVPNQFAEIDRPSKCEVEYLDYDGEKKLLKADGLLATCIQHEMDHLEGILFIDYLSKLKRSMIIKKLSKLKSTSAEA

SEQ ID NO: 141464 - protein, 182 aa, Unknown
  Bacterial polypetide isolated from the Sargasso Sea
MSVLEVVNYGNPILRKKCSQVTDFSKLPGLINDMFDTMYEEEGIGLAANQVGVDMNLFIIDISHTDDDEFPRTFINGEITSSRGESVFSEGCLSIPEVSLEVTRPEIILFKYQDIHEKWHEEEFDGLLARAIQHEIDHLNGMLIIDLVSEMQRLKVNKEIKRIKNDSIIKLKRQPNSKGFVL

SEQ ID NO: 141465 - protein, 175 aa, Unknown
  Bacterial polypetide isolated from the Sargasso Sea
MSILKIAKIGHPVLLKKSNEIKDFGSDTLKKIIYDMSETMIDYSGIGLAAPQVHMSKRIIIFRNPDVEEKEKIQITPLINPKYEPVSKEKDDDWEGCLSIPGMQGLVSRYKKITYTGYDLNGDRIKNTAEGLHARVVQHEIDHLDGILYTERLTNKKAFGFEKEIIEFWKNEKTK

SEQ ID NO: 141466 - protein, 178 aa, Unknown
  Bacterial polypetide isolated from the Sargasso Sea
MFENLEILQFPDERLRRLSEPVESFNIELKALADKMLEIMYQSNGIGLAAPQVNQTIRLIVVDISEDRNKPNVFVNPKVKQPSGSVDSSEGCLSVPEIRTTVKRYENITLEYQDLKGGLHEEQLESLMSICVQHEIDHLDGKLFIDYVPDVKLQRLRKKIAKNKKSQSTIEGTTVRVV

SEQ ID NO: 141467 - protein, 166 aa, Unknown
  Bacterial polypetide isolated from the Sargasso Sea
MEILLVPNELLRQKANRLINITSEDIKIANQMMDTMIKAPGVGLAANQVGILKQIITINFEDKENDKRANYILFNPSIIEYSEEKVIMEEGCLSLPEQYADIERPKKIFLEYIDENEKNIKKEIDGYEARILQHEIDHLSGILFVDYLSSLKRNIIIKKVKKLKNS

SEQ ID NO: 141468 - protein, 171 aa, Unknown
  Bacterial polypetide isolated from the Sargasso Sea
MTIKNIITEPDKILRKISSPVQEVGDAERKIMDDMVETMYSANGIGLAAIQIGIPKRIIVIDLKIENKKNPLFFVNPVIKNKDNLKSTYEEGCLSVPNQFAEIDRPKKCDVEYLDYNGEKKILKAEGLLATCIQHEMDHLEGILFIDYLSKLKKSMIIKKLSKSKSTRIVV

SEQ ID NO: 141469 - protein, 186 aa, Unknown
  Bacterial polypetide isolated from the Sargasso Sea
MAIREIIKVPNPILKKVSKPVDQVDDEIRGILDDMLDTMYDAPGIGLAAIQIGIPLRMLVIDISSIGEKENNEKNPQFFINPEIIAPSNNLSSFEEGCLSVPGIWEEIERPDECIVKFLNRNGEKEEKKCEGLMATVIQHEMDHLEGIVFVDHLSRLRRDLSIKKSVKFQKNPTKENRLSRYDEQQ

SEQ ID NO: 141470 - protein, 170 aa, Unknown
  Bacterial polypetide isolated from the Sargasso Sea
MNQIIYVPDPILRQTSKKIKKITSKEIDISKKMIDLMLKAPGVGLAANQIGILKKIVTINLPNENNEKNKIYTLFNPIITSYSKKKVIMEEGCLSIPKQFADIERPENITIEYLNEKNEKIKEKKQGYEARILQHEIDHLYGRLFIDYLSSLKRNIIIKKVLKLKKAGDI

SEQ ID NO: 141471 - protein, 102 aa, Unknown
  Bacterial polypetide isolated from the Sargasso Sea
MTIKTILTEPNKILRQVSLPVDKVGNEERKLMDDMLETMYDAKGIGLAAIQIGVPKRIIVMDLSKEAGKNEPKYFVNPIIKNKSEKISTYEEGCLSVVISFC

SEQ ID NO: 141472 - protein, 172 aa, Unknown
  Bacterial polypetide isolated from the Sargasso Sea
MDKLLYVPNPLLRQKANKIQSVGIKEKEIAKKMMQIMLKAPGVGLAANQIGILKQIVTIFFVDQETKKETQYTLFNPNIISYSQEKIVMEEGCLSLPEQFAEIERPQSIVVEYLDEDNKQIKKDVSGMESRILQHEIDHLSGKLFVDYLSSLKRNIMIKKVQKFLKTKNNER

SEQ ID NO: 141473 - protein, 105 aa, Unknown
  Bacterial polypetide isolated from the Sargasso Sea
KTPLCFINPIVRKMSSEKSVYEEGCLSIPDTFIKIERPKTCLIEYIDIKGKQNLMECDNLLSTCIQHEINHLDGKLIIDYLSKLKKDLIIKKLSKARKNPDRIVV

SEQ ID NO: 141474 - protein, 186 aa, Unknown
  Bacterial polypetide isolated from the Sargasso Sea
MRNTYKKLEVLHFPDPRLRKIAKEVDTFDESLQALIDDMFFTMYEEKGIGLAATQVDIHKRIIVIDITNDKSEKIYLINPKLISLSSTKDSMDEGCLSVPGFYETVSRPNQVKIETYNTKGEKTVLDAEGLLAVCIQHEIDHLNGKLFVDHISNLKKTRIEKKILKLKKEGKIIKRTGKPYSNSVI

SEQ ID NO: 141475 - protein, 103 aa, Unknown
  Bacterial polypetide isolated from the Sargasso Sea
MAIRTIITEPNKLLRQVSKPVNQVGKEEQKLMKDMLETMYAANGIGLAAIQVGIPQRIIVMDICKEENKKEPRYFVNPIIKNKNPLKATYEEGCLSVPNQLQI

SEQ ID NO: 141476 - protein, 191 aa, Unknown
  Bacterial polypetide isolated from the Sargasso Sea
MIRPILAYGNPLLKQKSFKVDIDNEDVSDLIFDMWETMYNANGVGLAAPQIGVLKQIFIADFEHFKEEDSFDISEIQKLQQVFINPIIIDEFGEDFKFSEGCLSIPEISEEVIRKKKLTIEFIDEKFNLKQITCSGIIARVIQHEYDHLNGILFTDRISSLRKKELKAKLDIIALGKFEPNYKMSFYKENI

SEQ ID NO: 141477 - protein, 125 aa, Unknown
  Bacterial polypetide isolated from the Sargasso Sea
MSKKLKILVFPDPKLRTVAKKITKFDKSLEKLSDNMLHTMYDANGIGLAATQVDEHIRLVVMDLSEDRNEPMVFVNPEYKVQKEHKLVEFEEGCLSIPGFNHNIARPDNIELKWQDLKGKEHEIK

SEQ ID NO: 141478 - protein, 145 aa, Unknown
  Bacterial polypetide isolated from the Sargasso Sea
MILPILSYGNSILKKKCVDIDSSYPNLNELISDMWDTMYNAEGVGLAAPQIGRQIKLFIIDASPFFEEKEVTDYELKNLKRVFINPTVTFLNDEKCSFNEGCLSIPDIREDIERFDSIKIDFFDEEFNSHSLDFNGILSRGNSSR

SEQ ID NO: 141479 - protein, 177 aa, Unknown
  Bacterial polypetide isolated from the Sargasso Sea
MAVRDILRMGHPTLRKKSEPVGIHDVSSSKIQNLITDLSDTLEASGGIGLAAPQIGELVRVVIIKIPKGSSSYGELEALPLTVFINPIIIPVGQEQKSHWEGCLSVPGLRGLVSRPQNIQLRYYDLEKKETSLKVEGFLSTVLQHECDHLDGTLYLDRLSDTKDLSFEEEFLQYNLN

SEQ ID NO: 141480 - protein, 118 aa, Unknown
  Bacterial polypetide isolated from the Sargasso Sea
MVLKILLFPDSRLRTVASEVEDVNAEIKTLCENMLETMYECGGIGLAATQVNVHKRVIVIDISPEKDSPLVLINPKIKVLPSETKLDYEEGCLSVPGFFETINRPDSIEVDALDENGK

SEQ ID NO: 141481 - protein, 195 aa, Unknown
  Bacterial polypetide isolated from the Sargasso Sea
MILPIVGYGHPVLKTKAKKINKSFESLSNIINNMWETMYNANGVGLAAPQIGLSIRLFIVDTKPFSDDESLNQEESLKLKSFKKVFINPEILDENGEAWDFNEGCLSIPEIRADVKRSETIKIKYYDTNFIEQFEEFDGLIARVIQHEYDHIEGILFTDKISPLKRKLLRRKLLDISKGKVPTDYLMKFSKIKMR

SEQ ID NO: 141482 - protein, 94 aa, Unknown
  Bacterial polypetide isolated from the Sargasso Sea
MALLDILVYPDPRLRNKALPVEVVDTALRKLVEDMAETMYAAPGIGLAATQVNVAKRIVVIDTSERQDRLQVFINPELTGMGELVETEEGCLSV

SEQ ID NO: 141483 - protein, 171 aa, Unknown
  Bacterial polypetide isolated from the Sargasso Sea
MSIRKILTEPDKILRQVSKPVEVVGNEEQDLMRDMLATMYAAEGIGLAAIQVGVPKRIIVIDLSKDEKKNPMYFVNPIIKQKNSVNSIYEEGCLSVPNQFAEIERPNKCEVEYLDFNGKKQLLKAEGLLATCIQHEMDHLEGILFIDYLSKLKKSMILKKLSKNKPDRIVV

SEQ ID NO: 141484 - protein, 174 aa, Unknown
  Bacterial polypetide isolated from the Sargasso Sea
MTVKVILTEPNKILRQVSKPVEKVTKDEQILMDDMLETMYHANGIGLAAIQIGVPKRIIVMDISKKDEKENPMYFVNPTIKNKDKDLSTYEEGCLSVPNQFAEVDRPSTCEIEYLDYYGEKKILKANGLLATCIQHEMDHLEGILFIDYLSKLKKSMIIKKLSKQKKSSEALII

SEQ ID NO: 141485 - protein, 173 aa, Unknown
  Bacterial polypetide isolated from the Sargasso Sea
MSVKELITVPDDILRKKSEPLNKVDVNEKKLIKDLFETMYHHNGIGLAAVQVGILKRVVVLDVSKNENEKKPLCFINPQIKTLSEKMSTYEEGCLSIPNTFIEIERPEICTVSYIDENGDKKEMECDGLLSTCLQHEINHLDGKLIIDYLSKIKKDLIIKKLSKQKTSNRVVV

SEQ ID NO: 141486 - protein, 188 aa, Unknown
  Bacterial polypetide isolated from the Sargasso Sea
MSLREIIKVPNPFLKVTAKPVTVIDENILTILNDMMETMYHANGIGLAATQIAIDKRLIVMDCGKIKFETKDISDEEYNKKIKDEQIEPFPIKMINPEIISIGKNIEEREEGCLSIPGYNAKVKRPSSLKVKYIDENKKDKTINAEGLLATCIQHEIDHLNGILFIDHLSKLKREIILKKAIKEYSKN

SEQ ID NO: 141487 - protein, 174 aa, Unknown
  Bacterial polypetide isolated from the Sargasso Sea
MSIQKIITIPDETLKKISEPIEKVGVNEKKLINDLFETMYNSKGIGLAAVQVGILKRVLVIDISTKDEKNKPLSFINPKIKKISDETSIYEEGCLSIPDTFIEIERPKICEVEYIDLDGKVQNMKCDGLLSTCLQHEINHLDGKLIIDHLSKLKRDLIIKKISKTKKNPDRIVV

SEQ ID NO: 141488 - protein, 183 aa, Unknown
  Bacterial polypetide isolated from the Sargasso Sea
MAIQTILKMGNPLLREVASEFSKDEILHADTNELLVDMWETLDFSGGIGLAAPQIGVSKQLAVIKLSEDSDRYPDMETTEPYIIFNPQITVLDKEVQGFWEGCLSVPGLRGYVERPRKVKIDYLDENADERTIEVEDFLATVFQHELDHLIGMLYVDRMEDVSTLMYEDEMILQEVNEEEVLD

SEQ ID NO: 141489 - protein, 178 aa, Unknown
  Bacterial polypetide isolated from the Sargasso Sea
MFENLEILQFPDERLRRLSMPVETFNRDLKTLADKMLEIMYESNGIGLAAPQVNQTIRLIVVDVSEGRDNPCIFVNPEIKEPAGSVDSSEGCLSVPEIRTTIKRYENITLEYQDLNGERHEETLGDLMSICVQHEIDHLDGKLFIDYVPDVKLQRLRKKIAKNKKNQPPTKGTTVRVV

SEQ ID NO: 141490 - protein, 122 aa, Unknown
  Bacterial polypetide isolated from the Sargasso Sea
MAIRTIITEPNKLLRQVSKPVNQVGKEEQKLMKDMLETMYAANGIGLAAIQVGIPQRIIVMDICKEENKKEPRYFVNPIIKNKDPLKATYEEGCLSVPNQFADIDRPSKCEKEYLDYNGQKQ

SEQ ID NO: 141491 - protein, 147 aa, Unknown
  Bacterial polypetide isolated from the Sargasso Sea
LRKLMDDMLETMYAAPGIGLAAVQVGILKRLIVIDVSKDQEKKNPLFLVNPEIVFKSKETSIYEEGCLSLPEHFAEIERPAECHVDYLDYNGKKKTLKAKGLLSTCLQHEIDHLNGILFIDYLSKLKKDMIIKKLTKHKKEISKIVI

SEQ ID NO: 141492 - protein, 174 aa, Unknown
  Bacterial polypetide isolated from the Sargasso Sea
MAIKTILTEPNKILRQISKQVEKVGEEEKKIMDDMLETMYQANGIGLAAIQIGIPKRIIVIDLAKGEEKKNPMYFVNPVIKNKNQNFATYEEGCLSVPDQFAEVDRPSTCEVEYLDYNGEKKILKAEGLIATCIQHEMDHLQGILFIDYLSKLKKSMIIKKLSKGKNKSDRITF

SEQ ID NO: 141493 - protein, 172 aa, Unknown
  Bacterial polypetide isolated from the Sargasso Sea
MALLTVHTFPDPVLKQKALPVDEFDEKLSEIAENMLETMYEERGIGLAAVQVAVLKQLVVVDLKSGEEDTSLREPRVFVNPRIVDRSGETISEEGCLSVTEFRAEVKRSESIKLEYQDLQGNPQTLEADGLLSICIQHELDHLQGILFIDHLPLLKQKMVKKRLAKLAREAA

SEQ ID NO: 141494 - protein, 172 aa, Unknown
  Bacterial polypetide isolated from the Sargasso Sea
MAIKTILTEPNKILRQVSKTVDNVGKDEQKLMDDMLETMYQANGIGLAAIQIGIPKRIIVMDISKEEGKKEPRYFVNPVIKNKDPLKFTYEEGCLSVPNQFAEIDRPSKCEVEYLDYNGKKKLLKADGLLATCIQHEMDHLEGILFIDYLSKLKRSMIIKKLSKLKSNTAIL

SEQ ID NO: 141495 - protein, 177 aa, Unknown
  Bacterial polypetide isolated from the Sargasso Sea
MIREILKMGDPRLLEVAKPVERFDTPELHEIVADMFETMHHANGAGLAAPQIGIGLQIIIFGFGNNNRYPDAPPVPETVLINPKIEYLPPDMEEGWEGCLSVPGMRGVVSRYAKVRYSGFDQYGEKIDRVADGFHARVVQHEYDHLIGKLYPMRITDFTRFGFTEVLFPGLDPASDD

SEQ ID NO: 141496 - protein, 174 aa, Unknown
  Bacterial polypetide isolated from the Sargasso Sea
MAIKTIITEPNKILRQKSLPVNQVGKEEQRLMDEMLETMYDANGIGLAAIQIGVPKRIIVMDISKNEEKKNPMYFVNPIIKNKNLETSTYEEGCLSVPNFFAEVDRPKKCDVEYLDYYGKKKILKAEGLLATCIQHEMDHLEGILFIDYLSKLKKTIIVKKLSKKKDRPDRIIV

SEQ ID NO: 141497 - protein, 174 aa, Unknown
  Bacterial polypetide isolated from the Sargasso Sea
MTKRKIILVPDEILKKKSEKIEKLTNKEKQLADDLFETMYKNNGIGLAAVQVGVLRRMIVVDVSKKDEEKKPLCLINPVIKSFGKDRSTYEEGCLSIPETFIEIERPKTCIVEYIDISGYKKNMECDGLLSTCVQHEINHLDGKLIIDFLSKLKKDILIKKLSKNKNTSSRVIV

SEQ ID NO: 141498 - protein, 108 aa, Unknown
  Bacterial polypetide isolated from the Sargasso Sea
MSVKEIITVPDEILRKHSTEVEKVGKNEKNLIKNLFDTMYASKGIGLAAIQIGVPKRIVVIDVSNKEQEKKPICLINPIIFKKSSETSVYEEGCLSIPNTFIEIERPK

SEQ ID NO: 141499 - protein, 178 aa, Unknown
  Bacterial polypetide isolated from the Sargasso Sea
MFENLEILQFPDERLRRLSVPVEAFNKELKALADKMLEIMYQSNGIGLAAPQVNQTIRLIVVDVSEDRNNPCIFINPKIKQPSGSVDSSEGCLSVPEIRTTIKRYENITLEYQDLNGVRLEESLDDLLSICVQHEIDHLDGKLFIDYVPDVKLQRLRKKIAKSKKNQPTIEGTTVRVV

SEQ ID NO: 141500 - protein, 118 aa, Unknown
  Bacterial polypetide isolated from the Sargasso Sea
VIIFRNPDIEEKEKIKITPLINPIYKTLGDEKENDWEGCLSIPGMQGLVTRYKKIRYTGFDIDGNKIDNEVEGLHARVIQHEIDHLEGILYTERLADKKAFGFEKEIIEYWKNEKTTK

SEQ ID NO: 141501 - protein, 156 aa, Unknown
  Bacterial polypetide isolated from the Sargasso Sea
MTVKTILTEPNKILRQVSLPVEKIGKEEQVLMDDMLETMYMAKGIGLAAIQVGVPKRIIVMDIGNRDKDKEPMYFVNPIIKNKNSKHSTYEEGCLSVPNQFAEVNRPSSCEVEYLDYNGNKKILKASGLLATCIQHEMDHLEGILFIDYLSKLKKI

SEQ ID NO: 141502 - protein, 178 aa, Unknown
  Bacterial polypetide isolated from the Sargasso Sea
MFDNLEILKFPDERLRRLSSPVEAFNKELKALADKMLEIMYQSNGIGLAAPQVNQTIRLIVVDVSEDRNNPCIFINPKIKQPSGSVDSSEGCLSVPEIRTTIKRYENITLEYQDLSGDGHEESLDDLMSICVQHEIDHLDGKLFIDYVPDVKLQRLRKKIAKSKKNHSTTEGTTVRVV

SEQ ID NO: 141503 - protein, 164 aa, Unknown
  Bacterial polypetide isolated from the Sargasso Sea
MFDIVTFGHPSLKMKSQDVENFDNELKDLTDKMLEIMYEAPGVGLAAPQIGINKNIFVFDIGEGPKIAVNPISIKVSGKVNFLEGCLSLPGYYWEIERPEYAKLDCFDLKGNKIFYEGDDLLGRVLQHELDHLKGKVLLTCLDRKTRKQALKDISINGFPGNDV

SEQ ID NO: 141504 - protein, 169 aa, Unknown
  Bacterial polypetide isolated from the Sargasso Sea
MDKLLYVPNPLLRQKADKIQSVGIKEKEIAKKMTQIMIKAPGVGLAANQIGILKQIVTIFFVDQETKKEKQYTLFNPNIVSYSQEKIIMEEGCLSLPEQFAEIERPQNIVVEYLDENNKQITKEVSGVESRILQHEIDHLSGKLFVDYLSSLKRNIMIKKVQKFLKNKK

SEQ ID NO: 141505 - protein, 178 aa, Unknown
  Bacterial polypetide isolated from the Sargasso Sea
MFENLEILQFPDERLRRLSMPVESFNRDLKTLADKMLEIMYDSNGIGLAAPQVNQTIRLIVVDVSEDRDNPCIFVNPKIKEPAGSVDSSEGCLSVPEIRTTIKRYENITLEYQDLNGERHEETLGDLMSICVQHEIDHLDGKLFIDYVPDVKLQRLRKKIAKNKKNQLPTEGTTVRVV

SEQ ID NO: 141506 - protein, 147 aa, Unknown
  Bacterial polypetide isolated from the Sargasso Sea
MADKMLEIMYESNGIGLAAPQVNQTIRLIVVDVSEDRDNPCIFVNPEIKEPAGSVDSSEGCLSVPEIRTTIKRYENITLEYQDLNGERHEEALGDLMSICVQHEIDHLDGKLFIDYVPDVKLQRLRKKIAKNKKNQLPTEGTTVRVV

SEQ ID NO: 141507 - protein, 170 aa, Unknown
  Bacterial polypetide isolated from the Sargasso Sea
MLKLIYAPDPILKKESVSIPQVDDHHRELIKQMYEIMYSANGVGLAAPQIGLNIRIFVLDAGSRDEEKKPITMINPKIISLHENKVPYEEGCLSFPEHFAEIDRPEKIKIEYLDEDNSKKISTFTGFESRIIQHELDHLNGILFVDHLSRLKRDVIIRKMRKYKKEKEII

SEQ ID NO: 141508 - protein, 148 aa, Unknown
  Bacterial polypetide isolated from the Sargasso Sea
LKDMWDSLEAAGGIGLAAPQIGISKQLAVIKLSEESERYPDMEDSEAFIIFNPKITVMDETEQGFWEGCLSVPGLRGFVERPRGIRVDFLDENAEPKSIEIKDFLATVFQHELDHLIGKLYIDRMKDIGTLMFEDQMIFEEIEEELLD

SEQ ID NO: 141509 - protein, 153 aa, Unknown
  Bacterial polypetide isolated from the Sargasso Sea
MVDEFDEKLSELAENMLETMYEEKGIGLAAVQVAFLKQMVVVDLKSGEEDISLREPRIFVNPRIVERSGETISEEGCLSVTEFRAEVKRSESIKLEYQDLQGNPQTLEADGLLSICIQHELDHLQGILFIDHLPLLKQKMVKKRLAKLAREAA

SEQ ID NO: 141510 - protein, 182 aa, Unknown
  Bacterial polypetide isolated from the Sargasso Sea
MSAKEILKMGNPLLREVAENFSVEEIKSLETKDLLKDMWDSLEAAGGIGLAAPQIGISKQLAVIKLSEESERYPDMEDSEAFIIFNPKITVMDDTEQGFWEGCLSVPGLRGFVERPRSIRVDFLDENAEPKSIEIEDFLATVFQHELDHLIGKLYIDRMKDISTLMFEDEMIFEEVEEELLD

SEQ ID NO: 141511 - protein, 120 aa, Unknown
  Bacterial polypetide isolated from the Sargasso Sea
GIPQRIIVMDICKEENKKEPRYFVNPIIKNKDPLKATYEEGCLSVPNQFADIDRPSKCEVEYLDYNGQKQLLKAEGLLATCIQHEMDHLEGILFIDYLSKLKKSMIIKKLSKLKSSTAEV

SEQ ID NO: 141512 - protein, 165 aa, Unknown
  Bacterial polypetide isolated from the Sargasso Sea
MYQSTKFPQLSDLIDDMFDTMYEEEGIGLAANQVGIDLNLFIIDISHTDDDEYPRIFINGEITSSRGESVFSEGCLSIPKVALEVTRPEVILFKYQDIHEEWYEEEFDGLLARAIQHEIDHLNGVLIIDLVSEMQRLKVNKEIKKIKNDSIIKLKRQPISKGFVL

SEQ ID NO: 141513 - protein, 174 aa, Unknown
  Bacterial polypetide isolated from the Sargasso Sea
MTTRKILIEPDPILRKKCSPLEKVDDQTRKLMKDMLETMYKAPGIGLAAIQIGILKRIVVIDISKDEEKKSPLFLVNPEIIFRSKNTSVYEEGCLSLPGQFAEIERPAECHLKYLDFDGKTKELKADGLLSTCIQHEVDHLNGILFIDYLSKLKKNMIIKKLLKQKKTSQRIVV

SEQ ID NO: 141514 - protein, 108 aa, Unknown
  Bacterial polypetide isolated from the Sargasso Sea
MDIKIYPDPVLLKNCESVEKVDDNFISTVSMMVDTMRAAEGIGLAAPQVGILQRFFVCLDFDDENKEKTIVLINPEITKMEGRIESKEGCLSIPGFYEYVYRYEKIEI

SEQ ID NO: 141515 - protein, 186 aa, Unknown
  Bacterial polypetide isolated from the Sargasso Sea
MAIREIIKVPNPILKKVSKPVDVVDDEIRKVLDDMLDTMYDAPGIGLAAIQIGIPLRMLVIDISSVGDQDNNEKDPQFFINPEIIDPSDDLSSFEEGCLSVPGIWEEIERPDQCIVKFVNRDGQKKEKKCKGLLATVIQHEMDHLEGIVFVDHLSRLKRDLSIKKSIKFQKNPTKENRLSRYNEQQ

SEQ ID NO: 141516 - protein, 174 aa, Unknown
  Bacterial polypetide isolated from the Sargasso Sea
MGARGDDARTRAYGASEPDGTWREKNLNAFGNLINVARGGREVLQAGAPPLRDVAKQVAPERVETGEIQELISEMVRVCKARGVGLAAPQLGTRLRVIVLEDTVEGMSDVSAKELERQKRKPFAVKVVINPELEPIGDASAAFFEGCLSVAGYRAVVRRHLKVRCRGLGGDGAP

SEQ ID NO: 141517 - protein, 172 aa, Unknown
  Bacterial polypetide isolated from the Sargasso Sea
MALLNIHSFPDPILRKKALPVTEFDQSLDQTAQSMLETMYVSSGIGLAAIQVGILKQIIVIDLKSGEQDISLREPHVFVNPKILKKFGSTVSEEGCLSVIDFRGDIERAEKILVEYEDVKGNIHQLEAHEMMSICLQHEIDHLNGILFIDHLPILKQKMVKKKLTKLAMENA

SEQ ID NO: 141518 - protein, 104 aa, Unknown
  Bacterial polypetide isolated from the Sargasso Sea
SENKDDPRIFINPTYKTLENHSLYEFEEGCLSIPGFNEVIARPDKIELRWQDLDGNEHVDQPEGLLTVCIQHEIDHLEGKLMVDYVSALKRDRVRNKLLKEYKR

SEQ ID NO: 141519 - protein, 174 aa, Unknown
  Bacterial polypetide isolated from the Sargasso Sea
MTLRKILIEPNPILRQVSEPVTKVGEEERKLMDDMLQTMYEANGIGLAAIQVGIPKRIIVIDLSKKDEKKNPLYFVNPIIKNKKKELSTYEEGCLSVPDQFAEIDRPSECEVEYLDYNSKKNILKVSGLLATCIQHEMDHLEGILFIDYLSKLKKTMIIKKLSKQKGKVDRIVV

SEQ ID NO: 141520 - protein, 91 aa, Unknown
  Bacterial polypetide isolated from the Sargasso Sea
DKELQGFWEGCLSVPGLRGYVERPRKVKIDYLDEKAVERTIEVEDFLATVFQHELDHLIGMLYVDRMEDVSTLMFEDEMVLQEVSEEEILD

SEQ ID NO: 141521 - protein, 206 aa, Unknown
  Bacterial polypetide isolated from the Sargasso Sea
MYDTIIRGGRVSTASDTFDSDIAIRDGKIVALGHDLGEAEEVIDASGLWVLPGGIDSHVHISQPSGEGIVMADDFETATRSAVIGGNTMLLPFCLQERGDSLRQAVTDYHAKAEGACYTDVSFHLIITDPTPSVLGQELPALVADGYTSFKVFMTYEGMALTDMEMLKVMAVARDTGALVMVHAENYDMIRFMTEQLEAAGKTAPR

SEQ ID NO: 141522 - protein, 258 aa, Unknown
  Bacterial polypetide isolated from the Sargasso Sea
TWAAAVGGTTMLVDFCLPGEDGSLVNAVNEWHRKSKPQICSDIGFHMAITGWNEQIFNEMPKVLEMGVNSFKHFMAYKGALMVEDDEMYASFQRCAAIGALPMVHAENGDIVAELQKKYLEQGITGPEGHSFSRPPEVEGEATNRAIMIADAAGVPLYVVHVSCEQSHEAIRRARQKGMRVYGEPLIQFLTLDDSEYLNKDWEYAARRVMSPPFRNKIHQDGLWAGLQAGSLQVVATDHAAFTTDQKKMGVDNFTLIP

SEQ ID NO: 141523 - protein, 297 aa, Unknown
  Bacterial polypetide isolated from the Sargasso Sea
HMAITGLNEQIFNEMPKVLEMGVNSFKHFMAYKGALMVEDDEMYASFQRCAAIGALPMVHAENGDIVAELQKKYLDLGITGPEGHSFSRPPEVEGEATNRAIMIADAAGVPLYVVHVSCEQSHEAIRRARQKGMRVYGEPLIQFLTLDDSEYLNKDWEYAARRVMSPPFRDKIHQDGLWAGLQAGSLQVVATDHAAFTTDQKKMGIDNFTLIPNGTGGLEERMSVLWTKGVETGRLTRNEFVAATSTNIAKILNVYPRKGSLVEGADADIVVWDPKISKTISVASHKSVLDYNVFEG

SEQ ID NO: 141524 - protein, 306 aa, Unknown
  Bacterial polypetide isolated from the Sargasso Sea
AYKGALMVEDDEMYASFQRCAAIGALPMVHAENGDIVAELQKKYLEEGITGPEGHAFSRPPEVEGEATNRAIMIADAAGVPLYVVHVSCEQSHEAIRRARQKGMRVYGEPLIQFLTLDDSEYLNKDWEYAARRVMSPPFRDKIHQDGLWAGLQAGSLQVVATDHAAFTTDQKKMGIDNFTLIPNGTGGLEERMSVLWTKGVETGRLTRNEFVAATSTNIAKILNVYPRKGSLVEGADADIVVWDPKISKTISVASHKSVLDYNVFEGFQVNAQPRYTMSRGEVIWAWGKNSMPNPGRGKFIPRPGF

SEQ ID NO: 141525 - protein, 485 aa, Unknown
  Bacterial polypetide isolated from the Sargasso Sea
MAILIRGGTVVDADRSYRADVLCAAPEDGGTILQIAGQIDAPAGATVVDAHDQYVMPGGIDPHTHMELPFMGTTASDDFYSGTAAGLAGGTTSIIDFVIPSPKQPLMDAFHAWRGWAEKAAADYGFHVAVTWWDESVHRDMGTLVREHGVSSFKHFMAYKNAIMADDEVLVNSFSRSLELGALPTVHAENGELVFQLQKALLARGMTGPEAHPLSRPPEVEGEAANRAIRIAQVLGVPVYIVHVSAKDAVDAITKARSEGLRVFGEVLPGHLVIDEAVYRDPDWTRAAAHVMSPPFRSAEHREALWRGLQAGQLHTTATDHCVFCASQKAMGREDFTKIPNGCGGVEDRMSVLWHHGVNHGRITPNEFVRITSTNAAQIFNLYPRKGAVQVGADADLVVWDPAATRTISVKTHHQQVDFNVFEGMTVQGVATHTLTRGALAWADGDLRAVRGAGRYLKRPPAASYYEAARIANRLREPHPVERAG

SEQ ID NO: 141526 - protein, 484 aa, Unknown
  Bacterial polypetide isolated from the Sargasso Sea
MSKVIKNGTVVTHDLTYKADILIEGSKISEIGQNLSGDTELDATDCYVMPGGIDPHTHLEMPFMGTYSSDDFESGTRAGLAGGTTMVVDFAFPNQGESLLDAIKRWDNKSTRANCDYSFHMAVTWWGEQVFNDMKTVIEERGISTFKHFLAYKGALMVNDDELYASFSRLAELGGIAMVHAENGDVVAELSAKLLAEGNNGPEAHAYSRPSQVEGEATNRAIMIADMAGVPLYVVHTSCEESHEAIRRARQAGKRVWGEPLIQHLTLDESEYFNKDWDHAARRVMSPPFRNKMHQDSLWAGLQAGSLSVVATDHCAFTTEQKRFGVGDFTKIPNGTGGLEDRLPMLWTHGVRTGRLTMNEFVAVTSTNIAKILNCYPKKGAILVGADADLIVWDPEKSKTIKASSQQSAIDYNVFEGHKVTGLPRYTLTRGYVAISDGEVNTKEGHGEFVARKGNTPINQALSNWKDLTSPTPVKRTGIPATGV

SEQ ID NO: 141527 - protein, 485 aa, Unknown
  Bacterial polypetide isolated from the Sargasso Sea
MSTVIKGGTIVTSDLTFQSDVLIEKGKIASIGKNLSGDKILDAKGCYIMPGGIDPHTHMEMPFMGTFSADDFESGTKAAVSGGTTMVVDFCLPSPDQSLLSALNGWHNKSTKAVCDYSYHMAITSWREEIFNDMEEVVKNKGINTFKHFMAYKGALMVDDDEMFASFQRCAELGAMPLVHAENGDVVAALQSKLLAEGNNGPEGHAYSRPPDVEGEACNRAIMLADMAGVPLYIVHVSCEQAHEAIRRARQNGKRVFGEPLIQHLVLDEGEYQNKDWDHAARRVMSPPFRNKLHQDSLWSGLAAGSLQVVATDHCAFTTEQKRMGLGDFTKIPNGTGGLEDRMPVLWTYGVETGRLTMNEFVSVTSTNIAKILNIYPQKGAIREGSDADIIIWDPKSEKTIMSSTQQSVIDYNVFEGIKVKGLPRFTLSRGRLAAEEGKVLASPGDGEFISREPFSDVNKALSKWKELTSPRKVERKAENMPAGV

SEQ ID NO: 141528 - protein, 284 aa, Unknown
  Bacterial polypetide isolated from the Sargasso Sea
MSKVIKGGTVCTADRTWKTDILIEGETIKQIGENLKGEEYIDAEGAYVIPGGIDPHTHLEMPFMGTTAAETFETGTWAAAAGGTTMIVDFCLPGADGSIKNAINEWHRKSAPQICSDVGYHMAITGWDENVFNEMNDAVKMGVNSFKHFMAYKGALMIEDDEMFASFKRCAAIGALPMVHAENGDLVAELQQKYFDLGITGPEGHAYSRPPELEGEAANRAITIADTAGVPLYIVHVSCEQTHEAIRRARQKGMRVYGEPLIQFLTLDESEYFNKDWNHAARRV

SEQ ID NO: 141529 - protein, 365 aa, Unknown
  Bacterial polypetide isolated from the Sargasso Sea
MTKVIKGGTIVTADREWKADILIENEKIKQIGENLKGDETIDAEGAYVIPGGIDPHTHLEMPFMGTTAAETFETGTWAAAVGGTTMLVDFCLPGEDGSLVNAVKEWHRKSEPQICSDIGYHMAVTGWSEQIFDDMPKVVEMGVNSFKHFMAYKGALMIEDDEMFASFKRCAAIGALPMVHAENGDIVAELQQKYLQEGVTGPEGHAYSRPPEVEGEAANRAIMIADAAGVPLYVVHVSCEQAHEAIRRARQKGMRVFGEPLIQFLTLDESEYFNKDWEHAARRVMSPPFRDKSHQDGLWAGLQSGSLQVVATDHAAFSTEQKRMGVNDFTKIPNGSNGLEERVSVLWTEGVETGRLTRQEFVAIL

SEQ ID NO: 141530 - protein, 297 aa, Unknown
  Bacterial polypetide isolated from the Sargasso Sea
AKVVDMGVNSFKHFMAYKGALMVDDDEMFASFKRCAAIGALPMVHAENGDIVAELQKKYLEQGITGPEGHAYSRPPEVEGEAANRAIMIADAAGVPLYIVHVSCEQAHEAIRRARQKGIRVYGEPLIQFLTLDESEYFNKDWAHAARRVMSPPFRAKEHQDGLWAGLQAGSLQVVATDHAAFTSDQKKMGVDDFTKIPNGTGGLEERLAVLWTEGVETGRLTRSEFVAATSTNIAKILNVYPKKGAIVEGADADLVVWDPSISKTLSASTQKSVLDYNVFEGFEVKAQSRFTLSRGE

SEQ ID NO: 141531 - protein, 468 aa, Unknown
  Bacterial polypetide isolated from the Sargasso Sea
MAELDTIIENGLVVSENETKKLNIGIKEQEIAYLGDENLEAKTKINAENLFVLPGGVDPHVHVDQPSGPDVEMADNFQSATKSAAAGGNTTIIPFAMQVKGESLRKCVEDYHKKANGNLYVDTSFHLIISDPTPQVLGQELPALSKDGYTSFKVFMTYDDLVLNDKELLEVFEVAKQQKTLVMVHAEGYDAIKYLTKKLEDEGKTAPYYHEISRPEIVEREATHRAISHAQIINIPIVIVHVSGSEALNQIRWAKEKGLKVFAETCPQYICLTRDNLKGLNMDFEGAKYVCSPPPRDKQSQEAIWSGIIDGTFELFSSDHSPFRFKDSKGKDRPGARTSFRWVPNGIPGVETRLPILFSEGVSKNRISIERFVELTSTNPAKMYGMYPKKGVIKIGSDADLTIWDPNLKKTIKQEFLNHGSDYTPYEGLDITGWPLQTWLRGKCIFNNGTFSTTKNNGEYINRDYCSL

SEQ ID NO: 141532 - protein, 306 aa, Unknown
  Bacterial polypetide isolated from the Sargasso Sea
MLDLIIKNGQCYINGELKDVDVAIKDGKIQLIGQISEEAKEIINAEGHTVLPGCIDTQTHFREPGSTDTEDLHSGSRAAIAGGITSVFEMPNTNPPTSNMKEFQRKLDLAKNRMYCNYAFYFGATADNADDLANLQGLEGCCGIKLFAGSSTGNLLVAEENDIDKVFQNASKVVAVHSEDEAILKINKKLIKEGDVHTHPVWRSAECAIASTRRIVRIAEKHNKKAHVLHITTKEEIDFLSQHKGNITFEITPQHLTLYAPECYDKLGTYAQMNPPLRDKSHYDRLWYGVRNNFNDTIGSDPCSSI

SEQ ID NO: 141533 - protein, 262 aa, Unknown
  Bacterial polypetide isolated from the Sargasso Sea
MPNTNPPTSTKVEFQKKLDLAKNRMYCNYAFYFGATADNANELADLENLEGCCGIKLFAGSSTGNLLVAEEKDIEKVFQSSSKVVAVHSEDEAILNINKKLIKKGDVHSHPVWRSVECAISSTRRIVRIAERYNKKAHVLHITTKEEIDFLSQHKGNITFEITPQHLTIYAPDCYDKLGTYAQMNPPLRDKSHYDRLWYAVKNNFNDTIGSDHAPHLKVNKEKEYPNSPSGMPGVQTLMPVMLNHVNDGKLSLNHLIKLVCE

SEQ ID NO: 141534 - protein, 287 aa, Unknown
  Bacterial polypetide isolated from the Sargasso Sea
EAEEILNAEGQTVLPGCIDTQTHFREPGSTDTEDLHSGSRAAIAGGITSVFEMPNTNPPTSTKVEFQKKLDLAKNRMYCNYAFYFGATADNANELADLNNLEGCCGIKLFAGSSTGNLLVADEKDIETVFKNSSKVVAVHSEDEEILNTNKKLIKNGDVHSHPIWRSEECAISSTRRIVRIAERYNKKAHVLHITTKQEIDFLSQHKGNITFEITPQHLTIYAPDCYDKLGTYAQMNPPLRDKSHYDRLWYAVKNNISNTIGSDHAPHLKANKDKEYPNSPSGMPGV

SEQ ID NO: 141535 - protein, 65 aa, Unknown
  Bacterial polypetide isolated from the Sargasso Sea
MSEKEFIIRKPDDWHLHLRDGEMLASVIKHSAANFERAIIMPNLVPPVVMTDDAIAYKERINQVI

SEQ ID NO: 141536 - protein, 266 aa, Unknown
  Bacterial polypetide isolated from the Sargasso Sea
LFEMPNTNPPTANLIEFEKKLQAAKNRMHSNYAFYFGATPQNTEQLAQLKNVEGCCGVKLFAGSSTGNLLVDKEADIEKVISSSDRIVSIHSEDEDIIKLRKKFIRQGDVHSHPEWRNVECAMSSTRRVVKIAERYDKKIHVLHVTTKEEVDFLAMHKKNVTFETTPQHLTLYAPDCYDKLGTYAQMNPPLRSKDHYDRLWVAIKNNVVDVLGSDHAPHLKINKDKEYPNTPSGMPGVQTIFPVMIDHVNNGKLELNQLINLMCEN

SEQ ID NO: 141537 - protein, 298 aa, Unknown
  Bacterial polypetide isolated from the Sargasso Sea
MLKGCCGVKLFAGSSTGNLLVHKEADIEKVISSSDRIVSIHSEDEDIIKLRKKFIKKGDVHSHAEWRNVEVAMSSTRRVVKIAERYNKKIHVLHVTTREEVDFLAMHKKNVTFETTPQHLTMYAPDCYDKLGTYAQMNPPLRTKEHYDRLWVAIKNNVVDVLGSDHAPHLKENKDKEYPNSPSGMPGVQTIFPVMLDHVNNGKLTLQQLINLMCENPCKIFGIKNKGYLKEGYDADLTVADMNKEFVIKNEMIASKCGWTPFNNHKVKGFPVATIVNGHLVMSNGKVVAESKGKPLKF

SEQ ID NO: 141538 - protein, 301 aa, Unknown
  Bacterial polypetide isolated from the Sargasso Sea
VISKDRPRVYQGKKIKKIGKIELNSSKVFDASNKVIVPGIIDTQVHFREPGSTDAEDLESGSRAAVLGGVTSLFEMPNTNPPTSNLVEFEKKLQLAKDRMHSNYAFYFGATPENTNQLSQLKNLKGCCGVKLFAGSSTGNLLVDKEADIEKVISNSDRIVSIHSEDEEILNLRKKFIKKGDVHSHPEWRNVETAMSSTRRVVKIAERFNKRIHVLHVTTKEEVDFLAMHKKNVTFETTPQHLTLFAPDCYDKLGTYAQMNPPLRTKDHYDKLWSAIRNNIVDVLGSDHAPHVKANKQKEYP

SEQ ID NO: 141539 - protein, 203 aa, Unknown
  Bacterial polypetide isolated from the Sargasso Sea
TKEEIDFLSQHKGNITFEITPQHLTLYAPDCYDKLGTYAQMNPPLRDKSHYDRLWYGVRNNFNDTIGSDHAPHLKENKDKVYPNTPSGMPGVQTLMPVMLNHINDGKLSLNQLMNFVCENPVKIFGIKNKGFIKEGYDADFTIVDMNKIIEIKNENIESKCKWSPFNGFKFKGTPTHTIIAGKIKMQDGKILGDPDGKPLQFS

SEQ ID NO: 141540 - protein, 124 aa, Unknown
  Bacterial polypetide isolated from the Sargasso Sea
MALRSAVCSGNEKFFLGTDSAPHLDGAKENACGCAGIYTSVNTLSCLAHVFEDENALDKLEGFVSVHGPSFYKLPVNSGLLKFRKLSEPLSYPEKIRIRNDQVTVFDPGFPLLWSYETVNKEDD

SEQ ID NO: 141541 - protein, 214 aa, Unknown
  Bacterial polypetide isolated from the Sargasso Sea
IIKKLMVLHITTKQEIDFLSQHKGNITFEITPQHLTIYAPDCYDKLGTYAQMNPPLRDKSHYDRLWYAVKNNLNDTIGSDHAPHLKINKDKEYPNSPSGMPGVQTLMPVMLNHINDGKLSLTQLINLVCENPVKIFGIKNKGFIKEGFDADFTIVDMNKKIVIKNENIESKCGWSPFNGFEFKGTPVLTIIAGKIKMQDGKIIGDPDGKPMKFK

SEQ ID NO: 141542 - protein, 57 aa, Unknown
  Bacterial polypetide isolated from the Sargasso Sea
MQTPDDWHLHFRDGDMLKETVAATARCFKRAIVMPNLVPPVTNAAEALAYKERILAA

SEQ ID NO: 141543 - protein, 274 aa, Unknown
  Bacterial polypetide isolated from the Sargasso Sea
KKYFEYASKVVSVHSEDEEILNLRKKLREKNNVNTHPIWRNEEVAMSSTRRIVKIANRLNKKAHILHVTTKEEVDFLSQHKGNITFEITPQHLTLHAPDCYDELGTYAQMNPPLRDKSHYDRLWYGVRNNFNDTIGSDHAPHLKANKEKEYPNSPSGMPGVQTLMPVMLNHVNDGKLSLNQLINLVCENPVKIFGIKNKGFIKEGYDADLTIVDMNKTIEIKNSNIESKCGWSPFNGYKFKGTPVATIIDGIVKMEKGKIIGDPEGQPIVFKNK

SEQ ID NO: 141544 - protein, 277 aa, Unknown
  Bacterial polypetide isolated from the Sargasso Sea
LEGCCGIKLFAGSSFGNLLVAEEDDIDKVFQNASKVVAVHSEDEAILNVNKKLIKEGDVHTHPVWRSVECAIASTRRIVRIAEKHNKKAHVLHITTKEEIDFLSQHKGNITFEITPQHLTLYAPDCYDKLGTYAQMNPPLRDKSHYDRLWYGVRNNFNDTIGSDHAPHLKENKDKVYPNTPSGMPGVQTLMPVMLNHINDGKLSLNQLMSFVCENPVKIFGIKNKGFIKEGYDADFTIVDMNKTIEIKNENIESKCKWSPFNGFKFKGTPTHTIIAG

SEQ ID NO: 141545 - protein, 258 aa, Unknown
  Bacterial polypetide isolated from the Sargasso Sea
HSEDEAILKVNKKLIKDGDVHSHPLWRSVECAIASTRRIVRIAEKHNKKAHVLHITTKEEIDFLSQHKGNITFEITPQHLTLYAPDCYDKLGTYAQMNPPLRDKSHYDRLWYGVRNNFNDTIGSDHAPHLKENKDKVYPNTPSGMPGVQTLMPVMLNHINDGKLSLNQLMNFVCENPVKIFGIKNKGFIKEGYDADFTIVDMNKTLEIKNENIESKCKWSPFHGFKFKGTPTHTIIAGKTKMQDGKILGEPDGTPLQF

SEQ ID NO: 141546 - protein, 221 aa, Unknown
  Bacterial polypetide isolated from the Sargasso Sea
IIRIAKRLNKKAHILHVTTKEEVDFLSQNKGNITFEITPQHLTIYAPDCYDKLGTFAQMNPPLRDKSHYDRLWYAIRNNYNDTIGSDHAPHLKENKLKEYPQSPSGMPGVQTLLPVMLNHVNDKKLTLDQLIKLLCENPVSVFGIKNKGFIKKDYDADFTIIDMKRTIEIKNDNIHSKCGWSPFDGYKFKGSPVYTIINGEIKMKDDEILGDPSGKPILFD

SEQ ID NO: 141547 - protein, 250 aa, Unknown
  Bacterial polypetide isolated from the Sargasso Sea
TNKKLIKNGDVHTHPVWRSVECALSSTRRIVRIAERYNKKAHILHITTKEEVDFLSQHKGNITFEITPQHLTLYAPDCYDKLGTYAQMNPPLRDKSHYDRLWYGVRNNFNDTIGSDHAPHLKTNKDKEYPNSPSGMPGVQTLLPVMLNHVNDGKLSLNQLINLLCENPVKIFGIQNKGFIRKDYDADFTIVDMNKIIEIQNEKIESKCGWSPFNGYKFKGTPVATIINGKIKMKDGNIIGDPEGVPLKFE

SEQ ID NO: 141548 - protein, 244 aa, Unknown
  Bacterial polypetide isolated from the Sargasso Sea
KGNVHSHPIWRDEECAISSTRKIVKIAKRLGKKAHILHITTKQEIDFLSQNKGNITFEITPQHLTIYAPDCYDKLGTYAQMNPPLRDKSHYDRLWYAVRNNYNDTIGSDHAPHLKVNKNKEYPDTPSGMPGVQTLMPVMLNHVNDGKLSLEQLINLVCENPAKIFGIIGKGYIKEDYDADFTIVDMNKVIEIKNDKIESKCGWSPFDGYKFKGTPVYTIINGEVKMKYGEIIGEASGKPIRFLD

SEQ ID NO: 141549 - protein, 283 aa, Unknown
  Bacterial polypetide isolated from the Sargasso Sea
LQEDFCTASEAALNGGVTHTCDMPNNPTPPIDDDSYLKKLSLTLKANFPLFLYAGIGPETKPLSFRVPYKAYMGPSVGELFFKNEQELDDSLDRYVGQYVSFHCEDPEILENCKDLPTHELRRPVEAETVATSTALRLIEKYKLKGKLCHYSSKDGLPLILEAKNKGLPVECEVTPQHLYFSQEEFYGSHYLSSAEQKNWMQMNPPIRSKKDKEGMLDAFLRGDIDYLATDHAPHCHNEKQEGTSGLPGLDTYGAFVTWLLVEKKMKPELVSLACTERPGRFC

SEQ ID NO: 141550 - protein, 244 aa, Unknown
  Bacterial polypetide isolated from the Sargasso Sea
IKKGDVHSHPEWRNVECAMSSTRRVVKIAERYNKKIHVLHVTTKDEVDFLAMHKKNVTFETTPQHLTLYAPDCYDKLGTYAQMNPPLRSKEHYDRLWVAIKNNIVDVLGSDHAPHLKVNKDKTYPETPSGMPGVQTIFPVMIDHVNNGKLTLNQLINLMCENPCRIFGIKNKGFIKEGFDADLTIVDMNKEVVIKNEMIASKCGWTPFHNYKVKGFPVGTIVNGILVMSNGKILVESKGKPLEF

SEQ ID NO: 141551 - protein, 227 aa, Unknown
  Bacterial polypetide isolated from the Sargasso Sea
IASTRRIVRIAEKHNKKAHVLHITTKEEIDFLSQHKGNITFEITPQHLTLYAPDCYDKLGTYAQMNPPLRDKSHYDRLWYGVRNNFNDTIGSDHAPHLKENKDKVYPNTPSGMPGVQTLMPVMLNHINDGKLSLNQLMNFVCENPVKIFGIKNKGFIKEGYDADFTIVDMNKTIEIKNENIESKCKWSPFNGFKFKGSPTHTIISGKIKMQDGKILGDPDGTPLQFS

SEQ ID NO: 141552 - protein, 134 aa, Unknown
  Bacterial polypetide isolated from the Sargasso Sea
MTTLTIQTPDDWHLHFRDGDMLRETVPATARQFARAIVMPNLVPPVTTAAMAVAYRERILAARPTGSTFQPLVTLYLTDKTSAQDIIDAKAAGVVAAKLYPAGATTNSSHGVGALDALYPVFEVMAEQGMLLLI

SEQ ID NO: 141553 - protein, 300 aa, Unknown
  Bacterial polypetide isolated from the Sargasso Sea
LQAAKNRMHTNYAFYFGATPQNTEQLAQLKNVEGCCGVKLFAGSSTGNLLVDKEADIEKVISNSDRIVSIHSEDEDIIKLRKKFIRQGDVHSHPEWRNVECAMSSTRRVVKIAERYNKKIHVLHVTTKEEVDFLAMHKKNVTFETTPQHLTLYAPDCYDKLGTYAQMNPPLRSKDHYDRLWVAIKNNVVDVLGSDHAPHLKKNKDKEYPNTPSGMPGVQTIFPVMIDHVNNGKLELSQLINLMCENPCKIFGIKNKGFIKEGFDADLTIVDMDKEVTIKNEMIASKCGWTPFHNYKVKGF

SEQ ID NO: 141554 - protein, 306 aa, Unknown
  Bacterial polypetide isolated from the Sargasso Sea
KKTDIGLSGSKIKKIGKIEHNNSNVYDAKNKVVLPGIIDTQVHFREPGSTDAEDLESGSRAAVLGGVTALFEMPNTNPPTSNLIEFDKKLKAAKNRMHSNYAFYFGATSENTNQLANLKNIEGCCGVKLFAGSSTGNLLVDKEADIEKIISSSDRIVSIHSEDEEIIKLRKKFIQKGNVHSHPEWRNVECAMSSTRRVVKIAERYDKKIHVLHVTTKEEVDFLAMHKKNVTFETTPQHLTLYAPDCYDSLGTYAQMNPPLRSKDHYDRLWVAIKNNVVDVLGSDHAPHLKINKDKEYPEYSLRDAR

SEQ ID NO: 141555 - protein, 262 aa, Unknown
  Bacterial polypetide isolated from the Sargasso Sea
IVGGITSVFEMPNTNPPTSTKIEFQKKIDLAKDRMYCNYAFYFGATADNTNELADLKNLEGCCGIKLFAGSSTGNLLVADEKDIEKVFQSSSKVVAVHSEDEAILNINKKLIKNGDVHSHPIWRSDECAISSTRRIVRIAELYNKKAHILHITTKQEIDFLSQHKGNITFEITPQHLTLYAPDCYDKLGTFAQMNPPLRDKSHYDRLWYGVKNNLNDTIGSDHAPHLKENKEKEYPNSPSGMPGVQTLMPVMLNHVNDGKLS

SEQ ID NO: 141556 - protein, 290 aa, Unknown
  Bacterial polypetide isolated from the Sargasso Sea
DLIIKNGQCYIDGELKNLDVAIKDGKIQHIGKISEKAKEEISAKDQIILPGCIDTQTHFREPGSTDTEDLHSGSRAAIVGGITSVFEMPNTNPPTSNMKEFQKKLDLAKNRMYCNYAFYFGATADNSEDLASLKDLEGCCGIKLFAGSSTGNLLVAEENDIDKVFQNSSKVVAVHSEDEAILNINKKLIKKGDVHTHPVWRSVECAISSTRRIVKIAERYNKKAHVLHITTKEEIDFLSQHKGNITFEITPQHLTMYSPDCYNRLGTYAQMNPPLRDKSHYDRLWYAVRN

SEQ ID NO: 141557 - protein, 158 aa, Unknown
  Bacterial polypetide isolated from the Sargasso Sea
MRELGMQTLTITTPDDWHLHFRDNEMLAETVPATARCFQRAIVMPNLVPPVVNATMAMDYKARIDAARPAGSSFEPLMTLFLTNETSPQDIVDAKNAGVTACKLYPAGATTNSDAAVKGIKALYPVFEAMQEQGLLLLNHGEVTENHIDIFDREKVFI

SEQ ID NO: 141558 - protein, 316 aa, Unknown
  Bacterial polypetide isolated from the Sargasso Sea
IIDTQVHFREPGSTDAEDLESGSRAAVLGGVTSLFEMPNTNPPTSNLIEFEKKLLLAKDRMHSNYAFYFGATPENINQLSQLKNLKGCCGIKLFAGSSTGNLLVDKEADIEKVISNADRIVSIHSEDEEILNLRKKFIRKGEVHSHPEWRNSETAMSSTRRVVKIAERYNKKIHVLHVTTKEEVDFLAMHKKNVTFETTPQHLTLYAPDCYDKLGTYAQMNPPLRTKDHFDRLWTAIKNNIVDVLGSDHAPHTKENKQKEYPNSPSGMPGVQTIFPVMLDHVNNNKLSLEQLIKLMCENPCRIFGIKNKGFIKPGF

SEQ ID NO: 141559 - protein, 279 aa, Unknown
  Bacterial polypetide isolated from the Sargasso Sea
GSCYIEGKFKNIDLAISGNKIKKIGKIDLNSSKVFDASGKIVLPGAIDTQVHFREPGANDAENLESGSRAAIAGGITAVFEMPNTNPPTSTFKEFNNKLIAAKNRMFCNYAFYFGATPNNMKELASVNTLEGCCGVKLFAGSSTGNLLVSQEKDIEKVISNSSKIISVHSEDENILLSRKKFIKEGDVTSHPVWRNEECALESTKRVVRLAQKHKKKIHILHVSTKEEIDFFSEKRDGVTFEITPQHLTLYAPDCYENLKTFSQMNPPLRSKDHYDRLW

SEQ ID NO: 141560 - protein, 309 aa, Unknown
  Bacterial polypetide isolated from the Sargasso Sea
PDNMKELASVNTLEGCCGVKLFAGSSTGNLLVSQEKDIEKVISNSSKIISVHSEDENILLSRKKFIKEGDVTSHPVWRNEECALESTKRVVRLAQKHKKKIHILHVSTKEEIDFFSEKRDGVTFEITPQHLTLYAPDCYENLKTFSQMNPPLRSKDHYDRLWDAVDETLVSTIGSDHAPHTKEEKNRKYPLSPSGMPGVQTLLPVMLDHVNKGKLKIEKLIKLVCENPCNLFGIKNKGYIKENYDADLTIVDMSKEVVIKDNWIESKCGWTPFNNYKVKGFPIATIVNGEIVMENSKIISPAKGKPLDF

SEQ ID NO: 141561 - protein, 305 aa, Unknown
  Bacterial polypetide isolated from the Sargasso Sea
GSRAAIAGGITSVFEMPNTNPPTSNMKEFQRKLDLAKNRMYCNYAFYFGATADNSEDLASLKDLVGCCGIKLFAGSSTGNLLVAKEDDIDKVFQNSSKVVAVHSEDEAILNTNKKLIKKGDVHTHPVWRSVECAISSTRRIVKIAERYNKKAHILHITTKEEIDFLSQHKGNITFEITPQHLTLFAPDCYNKLGTYAQMNPPLRDKSHYDRLWYAVRNNFSDTIGSDHAPHLKANKDKEYPNSPSGMPGVQTLIPVMLNHVNEGKLTLNQLINLVCENPVKIFGIKNKGYIKKNFDADFYIVDMK

SEQ ID NO: 141562 - protein, 294 aa, Unknown
  Bacterial polypetide isolated from the Sargasso Sea
MPFYFGATPDNMKELAAVNTLEGCCGVKLFAGSSTGNLLVSQEKDIEKVISNSSKIISVHSEDENILLSRKKFIKEGDVSSHPVWRNEECALESTKRVVRIAQKYKKKIHILHISTKEEIDFFADKKENVTFEITPQHLTLFAPNCYEKLKTFSQMNPPLRSKDHYDRLWDAVKESLVSTIGSDHAPHTKEDKNKKYPLSPSGMPGVQTLLPIMLDHVNKGKLKLEQLIKLVCENPSDLFGIKNKGYIKENYDADLTIVDMNKDVVIKDNWIESKCGWTPFNNYKVKGFPVATL

SEQ ID NO: 141563 - protein, 112 aa, Unknown
  Bacterial polypetide isolated from the Sargasso Sea
PAATPKFFLGTDSAPHVKHAKEAACGCAGCYTAYAAIELYAEAFEQRGALDKLEAFASFHGPDFYGMPRNSDSITLVREEWTVPATLPLGDNSVVPLRAGETLRWKLLEAQA

SEQ ID NO: 141564 - protein, 288 aa, Unknown
  Bacterial polypetide isolated from the Sargasso Sea
PGVIDTQVHFREPGANDVENLESGSRAAVAGGVTSVFEMPNTNPPTSTFDEFNKKLKAAKNRMFCNYGFYFGATPNNMKELNAVDTLEGCCGVKLFAGSSTGNLLVSQEKDIEKVISNSSKIISVHSEDENILLSRKKHIKDGNVHSHPVWRNEECALESTKRVVRIAQKYKKKIHILHVTTKEEIDFFSEKRDNVTFEITPQHLTLYAPDCYDKLKTLSQMNPPLRTKDHYDRLWDAVKDTLVTTIGSDHAPHTIEEKNRKYPLSPSGMPGVQTLLPIMLNHVNDGK

SEQ ID NO: 141565 - protein, 204 aa, Unknown
  Bacterial polypetide isolated from the Sargasso Sea
TDDYRRCRGVIRVNPPVREPHHKASLWEALLDGTIDMIATDHAPHIPEEKERESIWTCDCGFPGVETQMPLMLSEVAAGRITICDYVRWTAFNPAHRWGLYPRKGTLQVGTEADIVVVDLDREAIISDASLHSRAKITPWDGRPVKGVPVHTLVRGEFVMRDRVLNDAARGKGRSVHSIQEMPPPVPKNTDASIEFQTGPGPLF

SEQ ID NO: 141566 - protein, 288 aa, Unknown
  Bacterial polypetide isolated from the Sargasso Sea
AKNRMYCNYAFYFGATADNSEDLASLKDLEGCCGIKLFAGSSTGNLLVAKEDDIDKVFQNSSKVVAVHSEDEAILNINKKLIKKGEVHSHPVWRSVECAISSTRRIVKIAERYNKKAHILHITTKEEIDFLSQHKGNITFEITPQHLTLFAPDCYNKLGTYAQMNPPLRDKSHYDRLWYAVRNNFNDTIGSDHAPHLKVNKDKEYPNSPSGMPGVQTLIPVMLNHVNDGKLTLNQLINLVCENPVKIFGIKNKGYIKEGFDADFTIIDMKKTIEIKNENIESKCKWSP

SEQ ID NO: 141567 - protein, 210 aa, Unknown
  Bacterial polypetide isolated from the Sargasso Sea
AHILHVTTKEEVDFLSQNKGNITFEITPQHLTIYAPDCYDKLGTFAQMNPPLRDKSHYDRLWYAIRNNYNDTIGSDHAPHLKENKLKEYPQSPSGMPGVQTLLPVMLNHVNDKKLTLDQLIKLLCENPVSVFGIKNKGFIKKDYDADFTIIDMNRTIEIKNENIHSKCGWSPFDGYKFKGSPVYTIINGDIKMKEDEILGDPSGKPILFD

SEQ ID NO: 141568 - protein, 309 aa, Unknown
  Bacterial polypetide isolated from the Sargasso Sea
DLIIKNGKCYINNDLKDVDIGIQSGKIVKIGNFEEEAKQTVDAKGLTVLPGCIDTQTHFREPGSTDTEDLASGSRAAIVGGITSVFEMPNTNPATTNREEFNRKIDLAKNRMYCNHAFYFGATPDNQNELANLKDLEGCCGVKLFAGSSTGTLLVHKEEDIEKVFENTSKIVAVHSEDEDILNLRKKLRENGNVHSHPIWRNEECAISSTRRIVKIANRLGKKAHVLHITTKEEVDFLSQNKGNITFEITPQHLTLYAPDCYDKLGTYAQMNPPLRDKSHYDRLWYAVRNNYNDTIGSDHAPHLKKIKT

SEQ ID NO: 141569 - protein, 289 aa, Unknown
  Bacterial polypetide isolated from the Sargasso Sea
CWFFTGNLLVDKEADIVKVISNSDRIVSIHSEDEEILNLRKKFIKKGDVHSHPEWRNTESAMSSTRRVVKIAERYNKKIHVLHVTTKEEVDFLAMHKKNVTFETTPQHLTLYAPDCYDKLGTYAQMNPPLRTKDHYDRLWTAIKNNIVDVLGSDHAPHTKENKQKEYPNSPSGMPGVQTIFPVMLDHVNNNKLSLEQLVKLMCENPCRIFGIKDKGFIKEDFDADLTIVDMQKEQTIKNEMMASKCGWTPFNNYKVKGFPIATIVNGSIVMENGKVVSNQVGKPLDFKL

SEQ ID NO: 141570 - protein, 196 aa, Unknown
  Bacterial polypetide isolated from the Sargasso Sea
MSQHKGNITFEITPQHLTIFAPECYDKLGTYAQMNPPLRDKSHYDRLWYAVKNNFNDTIGSDHAPHLKVNKDKEYPNSPSGMPGVQTLMPVMLNHVNDGKLSLNQLINLVCENPVKIFGIKNKGFIKKGYEADFTIVDMDKKIVIKDEDIESKCGWSPFNGFQFKGTPVFTIINGKVKMENGKIIGEPEGSPLEFI

SEQ ID NO: 141571 - protein, 230 aa, Unknown
  Bacterial polypetide isolated from the Sargasso Sea
ECALESTKRVVRIAQKYKKRIHILHVSTKQEIDFFSEKRENVTFEITPQHLTLFAPDCYEKLKTFSQMNPPLRSKDHHDRLWQAVKESLVSTIGSDHAPHTKEEKNRKYPLSPSGMPGVQTLLPVMLNHVNKGNLKMEQLIKLVCENPCDLFGIQNKGYIKENYDADLTIVDMNKEFVIKDSWIESKCGWTPFNNYKVKGFPVATIINGEVVMENGKLKKPMGKPLVFNL

SEQ ID NO: 141572 - protein, 286 aa, Unknown
  Bacterial polypetide isolated from the Sargasso Sea
MSDNNSLIIKNGSCYIEGKLENTDITVSGGKIESIGKADLNNHKVYDAKNKIVLPGIIDTQVHFREPGSTDAEDLESGSRAAVLGGVTSLFEMPNTNPPTDNLIEFEKKLKAAENRMHSNYAFYFGATPKNTEQLAQLKNIEGCCGVKLFAGSSTGNLLVDKEADIEKVISSSDRIVSIHSEDEEIIRLRKKFIREGDVHSHPEWRNEECAMSSTRRVVKIAERFNKKIHVLHVTTKEEVDFLAMHKKNVTFETTPQHLTLYAPDCYNKLGTYAQMNPPLRGKEHY

SEQ ID NO: 141573 - protein, 272 aa, Unknown
  Bacterial polypetide isolated from the Sargasso Sea
TQTASLSHTSPPAPSLYYSLIIKNYPEFRCYRDVIYYMKLFCQPDIRRFPGKAPWTQRNAQLEFFVQPPRCGTPYSTIGTKAYNDTGLLCRPKVKRGEMPPVHRFASASNPSEYTRPHIVENEDDVLHMWELPDFAARGNAEAGRHGTGALGQHDSELLLSYLTVPYLRIPLISSFFASDDRIHSLQSRKLQRLLDAALFEPGSHLPLASAGLEPVDVPTSAPTLLGTPHHLLLNELSRSPETLVNGVLKLAKQACDLDTGTLFSSTAGVIL

SEQ ID NO: 141574 - protein, 300 aa, Unknown
  Bacterial polypetide isolated from the Sargasso Sea
KELADLKNLEGCCGIKLFAGSSTGNLLVADDKDIETVFQNSSKVVAVHSEDEAILNINKKLIKSGDVNSHPIWRSEECAISSTRRIVRIAERYNKKAHILHITTKQEIDFLSQHKGNITFEITPQHLTIYAPDCYDKLGTYAQMNPPLRDKSHYDRLWYAVKNNLNDTIGSDHAPHLKVNKDKKYPDTPSGMPGVQTLLPVMLNHVNKGKLTIEQLINLVCENPVKIFGIKNKGYIKKDFDADFTIIDMNKEIEIKNKNIESKCKWSPFNGEKFLGTPVVTIINGEIKMKDGKILGQPSG

SEQ ID NO: 141575 - protein, 310 aa, Unknown
  Bacterial polypetide isolated from the Sargasso Sea
ISKKLDIVIRNNKIEKLSSNINHKEYSFDEIIDAKNLVVAPGFVDIHVHLRDPGYTHKETIATGSKAAVAGGFTSIACMPNTKPINDNASITDYILNEAKRISMLNIFPIGAITKSSKSRELASIKSNIKKGCVGVSDDGFPVTNSVLLFNAMQIAKQISVPVISHCEDLSLSLGGVANEGKFSKKYSLKGIPNISEELGIFRDIVIAEATGAHLHVCHVTAKGSVDIIREAKKRGVNVTCEATPHHFTLSEDNIKGCDPNFKMNPPLRSKEDVRSIVKGIKEDVIDIIATDHAPHTAKEKSAGFEKAPL

SEQ ID NO: 141576 - protein, 324 aa, Unknown
  Bacterial polypetide isolated from the Sargasso Sea
MVIRGGRVVDPDQGIDRVDDLLIRDGLIMSIGHDGSQPLGKVDETIDAHGFIVTPGLVDMHVHLREPGREEDETIETGTKAALAGGFTSVACIPNTEPAIDTQANVEFIRQKAARADTCNVFVVACVSHEREGKELAEIGQLVEAGAVAFSDDGSPVYDAELMRRAFEYCRMFDKPILAHEEVLELSHGGVMNEGLVSMSLGLKGMPAAAEEVMIGRDIALADVTGGRLHVMHVSTAQGVSLIREAKARGVRVTAEACPHHFTLTDESLRGFDSNFKMSPPLRTAKDVEGILAGLADGAIDCIATDHAPHAPEKKLLELDRAPL

SEQ ID NO: 141577 - protein, 263 aa, Unknown
  Bacterial polypetide isolated from the Sargasso Sea
MVIYFAAKLYPAGATTNSESGVRNIKKILPVLEKMAEINMPLLIHGEVTDHKIDIFDREKIFIETILDSISRTLPELRITLEHITTEDATKYVSGGNENISASITPHHLAMNRNEIFSGGIRPHLYCLPILKGEKHRKALIKVATSGNSKFFLGTDTAPHLTNDKESECGCAGIFNATYCMSVLAQIFDDENALLNLEKFTSLNGAKHYKLKANKEKIILKKRSEPKDFASKLIFGSKNITIFSPNFNVYWDVVTNEKLHNER

SEQ ID NO: 141578 - protein, 259 aa, Unknown
  Bacterial polypetide isolated from the Sargasso Sea
AKLKNLDGCCGVKLFAGSSTGNLLVDKEEDIEKVFQNTSKIVAVHSEDEEIINLRKKLIEKGNVHTHPVWRNEECAMSSTRRIVRIAKRLNKKAHILHVTTKEEVDFLSQNKGNITFEITPQHLTIYAPDCYEKLGTFAQMNPPLRDKSHYDRLWYAIRNNYNDTIGSDHAPHLKENKLKEYPQSPSGMPGVQTLLPVMLNHVNDKKLTLDQLIKLLCENPVTVFGIKNKGFIKKDYDADFTIIDMNKTIEIKNKNIHS

SEQ ID NO: 141579 - protein, 323 aa, Unknown
  Bacterial polypetide isolated from the Sargasso Sea
SLFEMPNTNPPTANLVEFDKKLKAAKNRMHSNYAFYFGATPSNTDQLAQLKNVEGCCGVKLFAGSSTGNLLVDKEADIEKVISSSDRVVSIHSEDEDIIKLRKKFIRKGDVHSHYEWRNVECAMSSTRRVVKIAERYNKKIHVLHVTTKDEVDFLAMHKKNVTFETTPQHLTLYAPDCYDKLGTYAQMNPPLRGKEHYDRLWAAIKNNIVDVLGSDHAPHLKANKDKEYPDSPSGMPGVQTIFPVMIDHVNNGKLTLNQLINLMCENPCRIFGIQNKGFIKEGFDADLTIVDMKKEVTIKDEMIASKCGWTPFNNYKVKGFPV

SEQ ID NO: 141580 - protein, 175 aa, Unknown
  Bacterial polypetide isolated from the Sargasso Sea
MKQLSICRPDDWHLHLRDGKMLAAVIDDTARHFGRAIIMPNLIPPVVTGADAVAYRDRILSCLNPEHHFTPLMTLYLTETTQPHDVADAAKRGLVHAVKLYPAGATTNSESGVRDLEKVMPVLEMMASIGLPLCVHGEVTDPKVDIFDRELVFIETVLDPLRRRIPELRVVMEHV

SEQ ID NO: 141581 - protein, 246 aa, Unknown
  Bacterial polypetide isolated from the Sargasso Sea
MIKEGDVHTHPVWRSVECAIASTRRIVRIAEKHNKKAHVLHITTKEEIDFLSQHKGNITFEITPQHLTLYAPDCYDKLGTYAQMNPPLRDKSHYDRLWYGVRNNFNDTIGSDHAPHLKQNKDKVYPNTPSGMPGVQTLMPVMLNHINDGKLSLNQLMNFVCENPVKIFGIKNKGFIKEGYDADFTIVDMNKTIEIKNVNIESKCKWSPFNGFKFKGTPTHTIIAGKIKMQDGKILGEPDGTPLLFS

SEQ ID NO: 141582 - protein, 262 aa, Unknown
  Bacterial polypetide isolated from the Sargasso Sea
KGCCGVKLFAGSSTGNLLVDKEKDIEKVISNSDRVVSIHSEDEEILKLRKKFIKKGDVHSHPEWRNTESAMSSTRRVVKIAERYNKKIHVLHVTTKEEVDFLAMHKKNVTFETTPQHLTLYAPDCYDKLGTYAQMNPPLRTKDHYDRLWTAIKNNIVDVLGSDHAPHTKENKQKEYPNSPSGMPGVQTIFPVMLDHVNNNKLSLEQLIKLMCENPCRIFGIKDKGFIKEEFDADFTIVDMQKEQTIKDEMIASKCGWTPFNN

SEQ ID NO: 141583 - protein, 291 aa, Unknown
  Bacterial polypetide isolated from the Sargasso Sea
VKSEQQADLLIADGKIADIGDPGAFNGKGLEVDASDALVMPGFVDIQVHFRTPGGEESEDISSGAAGAALGGVTACLMMPNTVPTIDNPDLVSEVLRLGRDTPCDVYTSAAITVDRAGESLVDFVALYEAGVRVFTDDGTVVDSEDLMRGALEASSQFPDVVISQHAEHSAMVEGGVINQGVVSDRLGLKGRPSEAEVIIVERDIALAKQTGGRYHVLHISTAAASDRVRDAKVAGLRVSAEVTPQHLILTEEDVERLGTSGKMNPPLRTSADVEGLRAALLTELSTQSPQ

SEQ ID NO: 141584 - protein, 286 aa, Unknown
  Bacterial polypetide isolated from the Sargasso Sea
RMLWSKIFAGSSTGNLLVSHEKDIEKVISSSSKIVSIHSEDENILLSRKKFIKDGDVTSHPIWRNEECALESTKRVVRLAQKHKKKIHILHVSTKEEIDFFSKKRDGVTFEITPQHLTLYAPDCYKNLKTLSQMNPPLRSKDHYDRLWDAVEETLVSTIGSDHAPHTKEEKNRKYPSSPSGMPGVQTLLPVMLDHVNKGKLKLEKLIKLVSENPCDLFGIKNKGYLKENYDADFTIVDTNKEVLIKDEWIESKCGWTPFNNYKVKGFPVATIVNGEIVMENSKIIS

SEQ ID NO: 141585 - protein, 313 aa, Unknown
  Bacterial polypetide isolated from the Sargasso Sea
IQKKLDLAKNRMYCNYAFYFGATADNADELADLNNLEGCCGIKLFAGSSTGNLLVAEEKDIETVFKNSSKVVAVHSEDEEILNINKKLIKKGDVHSHPIWRSDECAISSTRRIVRIAERYNKKAHVLHITTKQEIDFLSQHKGNITFEITPQHLTIYAPDCYDKLGTYAQMNPPLRDKSHYDRLWYAVKNNLNDTIGSDHAPHLKINKDKEYPNSPSGMPGVQTLMPVMLNHINDGKLSLTQLINLVCENPVKIFGIKNKGFIKEGFDADFTIVDMNKKIVIKNENIESKCGWSPFNGYEFKGTPVSTIMKEK

SEQ ID NO: 141586 - protein, 186 aa, Unknown
  Bacterial polypetide isolated from the Sargasso Sea
FETTPQHLTLYAPDCYDKLGTYAQMNPPLRGKEHYDRLWTAIKNNIVDVLGSDHAPHLKENKDKEYPNSPSGMPGVQTIFPVMIDHVNNGKLTLNQLINLMCENPCRIFGIKNKGFIKEGFDADLTIVDMNKEVTIKDEMIASKCGWTPFNNYKVKGFPVGTIVNGILVMSDGKILVESKGKPLSF

SEQ ID NO: 141587 - protein, 181 aa, Unknown
  Bacterial polypetide isolated from the Sargasso Sea
TLKVILEHITTEDAVEYVSSANENIAATITTHHLAINRNDLLVGGIKPHFYCLPVVKRESHRLALVKAATSGSPKFFLGTDSAPHLDDDKESACGCAGCFTATNSLEILAHIFEEQKSLNKLELFTSINGANFYGKKANMGKIKLIKNDTPTLFPKKLATPRGKLTIFKPNFETYWEVKNE

SEQ ID NO: 141588 - protein, 200 aa, Unknown
  Bacterial polypetide isolated from the Sargasso Sea
LLVAKEDDIDKVFQNASKVVAVHSEDEAILNVNKKLIKEGDVHTHPVWRSAECAIASTRRIVRIAEKHNKKAHVLHITTKEEIDFLSQHKGNITFEITPQHLTLYAPDCYDKLGTYAQMNPPLRDKSHYDRLWYGVRNNFNDTIGSDHAPHLKENKDKIYPNTPSGMPGVQTLMPVMLNHINDGKLSLNQLMNFVCENPS

SEQ ID NO: 141589 - protein, 194 aa, Unknown
  Bacterial polypetide isolated from the Sargasso Sea
KGNITFEITPQHLTIYAPDCYDKLGTYAQMNPPLRDKSHYDRLWYAVKNNLNDTIGSDHAPHLKVNKEKEYPNSPSGMPGVQTLMPVMLNHINDGKLSLNQLMNLVCENPVKIFGIKNKGFIKEGYDADFTIVDMNKIIEIKNVNIESKCGWSPFNGNKFKGTPVVTIINGKIKMQDGKIIGDPTGKPLEFSNS

SEQ ID NO: 141590 - protein, 67 aa, Unknown
  Bacterial polypetide isolated from the Sargasso Sea
MREITMTRPDDWHLHLRDEAYLKDTVRDAARYFHRAIVMPNLDPPVTTVADATRYRQEILEVVPSGT

SEQ ID NO: 141591 - protein, 286 aa, Unknown
  Bacterial polypetide isolated from the Sargasso Sea
SSTGNLLVAEEDDIDRVFQNASKVVAVHSEDEAILNVNKKLIKEGDVHTHPIWRSAECAIASTRRIVRIAEKYNKKAHVLHITTKEEIDFLSQHKGNITFEITPQHLTLYAPDCYDKLGTYAQMNPPLRDKSHYDRLWYGVRNNFNDTIGSDHAPHLKENKDKVYPNTPSGMPGVQTLMPVMLNHINDGKLSLNQLMNFVCENPVKIFGIKNKGFIKEDYDADFTIVDMNKVIEIKNENIESKCKWSPFNGFKFKGTPTHTIIAGKIKMKDGKILGDPEGTPLQFS

SEQ ID NO: 141592 - protein, 307 aa, Unknown
  Bacterial polypetide isolated from the Sargasso Sea
VFDATGKIVLPGAIDTQVHFREPGANDAENLESGSRAAVAGGITSVFEMPNTNPPTSTFKEFNNKLSAARNRMFCNYAFYFGATPDNMKELASVNTLEGCCGVKLFAGSSTGNLLVSQEKDIEKVISNSSKIISVHSEDENILLSRKKFIKEGDVTSHPVWRNEECALESTKRVVRLAQKHKKKIHILHVSTKEEIDFFSEKRDGVTFEITPQHLTLYAPDCYENLKTFSQMNPPLRSKDHYDRLWDAVNETLVSTIGSDHAPHTKEEKNRKYPLSPSGMPGVQTLLPVMLDHVNQGKLKIEKLIKL

SEQ ID NO: 141593 - protein, 208 aa, Unknown
  Bacterial polypetide isolated from the Sargasso Sea
HVLHVTTKDEVDFLAMHKKNVTFETTPQHLTLYAPDCYDKLGTYAQMNPPLRSKEHYDRLWVAIKNNIVDVLGSDHAPHLKANKDKVYPETPSGMPGVQTIFPVMIDHVNNGKLTLTQLINLMCENPCRIFGIKNKGFIKEGFDADLTIVDMKKEVIIKNEMIASKCGWTPFHNHKVKGFPVGTIVNGILVMSNGKILIESKGKPLEF

SEQ ID NO: 141594 - protein, 303 aa, Unknown
  Bacterial polypetide isolated from the Sargasso Sea
DTPITNISLADNYYSEICKQIPKGVKFIPNMTLYLTNYLSKDEIKKVSTHKYIKAIKMYPKGATTNSDSGISDFKNFYHLFEAMEESGVILSIHGEVTDEKVDVFERESVFIEKVLAKIIKQFPSLKIVLEHITSSDAVNFINEQSMVAATITIHHLMVNRNIMLSKGIRPDFYCAPILKTEYDRRALVQAAISGNRKFFLGTDSAPHVEGKKIASCGCAGIFSSPLAIPLLIQLFEEHSALEKIEPFVSKNGRAFYGFRQHKDRVRYVKRRKSIEVIKDIKTSDGKITVFNPYNEIYWEKEN

SEQ ID NO: 141595 - protein, 224 aa, Unknown
  Bacterial polypetide isolated from the Sargasso Sea
TRRIVRIAKRLNKKAHILHVTTKEEVDFLSQNKGNITFEITPQHLTMYAPDCYDKLGTFAQMNPPLRDKSHYDRLWYAIRNNYNDTIGSDHAPHLKENKLKEYPQSPSGMPGVQTLLPVMLNHVNDNKLTLDQLIKLLCENPVSVFGIKNKGFIKKDYDADFTIIDMNRIIEIKNKNIHSKCGWSPFDGYKFKGSPVYTIINGDIKMKDDEILGDPTGKPILFD

SEQ ID NO: 141596 - protein, 273 aa, Unknown
  Bacterial polypetide isolated from the Sargasso Sea
GAQQTMADDLASLKNLEGCCGIKLFAGSSTGNLLVAEEDDIDKVFQNASKVVAVHSEDEAILKVNKKLIKEGDVHTHPVWRSAECAIASTRRIVRIAEKHNKKAHVLHITTKEEIDFLSQHKGNITFEITPQHLTLYAPDCYDKLGTYAQMNPPLRDKSHYDRLWYGVRNNFNDTIGSDHAPHLKENKDKVYPNTPSGMPGVQTLMPVMLNHINDGKLSLKQLMNFVCENPVKIFGIKNKGFIKEGYDADFTIVDMNKTIEIKNENIESKCKW

SEQ ID NO: 141597 - protein, 254 aa, Unknown
  Bacterial polypetide isolated from the Sargasso Sea
CCCRKYYPAGATTNSDTGVTNIKNVYRIIEKMAELGVPLLLHGEVTENHIDIFDREKVFIETILAPLIESYPDLKVILEHITTKDSVEFIESQSSRVAGTITIHHLLYNRNDMLVGGIKPHLYCLPVLKRNIHQTSLIRAALGGNPKFFLGTDSAPHARPEKETSCGCAGVFSAPAAIELYAQFFAEHNSLSKLEGFASFFGADFYGQPRNKEKITLEFKPWRMPQQYQLGDVPTVPIMAGETINWRLKDSPEK

SEQ ID NO: 141598 - protein, 197 aa, Unknown
  Bacterial polypetide isolated from the Sargasso Sea
MPDQITLAASDDWHVHLRDGEMLERVVGHTARAFRRAIVMPNLRPPVTTVAAAAAYRDRILAACSDSTGFRPLMTAYLTDDCDPAELEQGFRSGVFTAAKLYPANATTNSAAGVTDLDRIAAVLSCMQRIGMPLLIHGEVTDPDVDVFDREAVFIERHLKGLRQRYPELRIVLEHITTEQAVDFVGSADRHLAATIT

SEQ ID NO: 141599 - protein, 192 aa, Unknown
  Bacterial polypetide isolated from the Sargasso Sea
KGNITFEITPQHLTLYAPDCYDKLGTYAQMNPPLRDKSHYDRLWYGVRNNFNDTIGSDHAPHLKENKDKVYPNTPSGMPGVQTLMPVMLNHINNGKLSLNQLMNFVCENPVKIFGIKNKGFIKKGYDADLTIVDMNKIIEIKNENIESKCKWSPFNGFKFKGTPTHTIIAGKIKMQYGKILGDPDGTPLQFS

SEQ ID NO: 141600 - protein, 215 aa, Unknown
  Bacterial polypetide isolated from the Sargasso Sea
KHNKKAHVLHITTKEEIDFLSQHKGNITFEITPQHLTLYAPDCYDKLGTYAQMNPPLRDKSHYDRLWYGVRNNFNDTIGSDHAPHLKENKDKVYPNTPSGMPGVQTLMPVMLNHINDGKLSLNQLMNFVCENPVKIFGIKNKGFIKEGYDADFTIVDMNKTIEIKNENIESKCKWSPFNGFKFKGTPTHTIIAGKIKMQDGKILGDPDGTPLQFS

SEQ ID NO: 141601 - protein, 289 aa, Unknown
  Bacterial polypetide isolated from the Sargasso Sea
KIGKIDLNSSKVIDASGKIVLPGVIDTQVHFREPGANDAENLESGSRAAVAGGVTSVFEMPNTNPPTSTFNEFNNKLSAAKNRMFCNYAFYFGATPNNMKELASVNTLKGCCGVKLFAGSSTGNLLVSQEKDIEKVISNSSKIISVHSEDENILLSRKKFIKEGDVSSHPVWRNEECALESTKRVVRLAQKHKKKIHILHVTTKQEIDFFSEKRDGVTFEITPQHLTLFAPDCYEKLKTFSQMNPPLRSKDHHDRLWDAVKESLVSTIGSDHAPHTKEEKNRKYPLSPS

SEQ ID NO: 141602 - protein, 217 aa, Unknown
  Bacterial polypetide isolated from the Sargasso Sea
SACRSAPHGEVTDPDIDIFDREAVFIDRVLDPIRQATPGLRMVMEHITTKDAADYVRSQDKNLGATITTHHLIINRNHILVGGIKPHYYCLPVAKREEHRIALRAAATSGDHRFFLGTDSAPHTDANKLQACGCAGCFTATNTMALLAHVFEEDGALDQLEGFASKNGPAFYQLPENPGQITLVKQDAPVAFPEQIDTPDGPVTVFAPGFPVHWTVA

SEQ ID NO: 141603 - protein, 251 aa, Unknown
  Bacterial polypetide isolated from the Sargasso Sea
KVNKKLIKNGDVHTHPIRRSVECAISSTRRIVRIAEKHKKKAHILHVTTKEEVDFLSRYKGNITFEITPQHLTLYAPDCYDKLGTYAQMNPPLRDKSHYDRLWYAVKNNFNDTIGSDHAPHLRVNKDKVYPNTPSGMPGVQTLMPVMLNHVNNDRLTLKQLINFVCENPVKIFGIKDKGFIKEGYDADFTIVDMNKIIEIKNENIESKCGWSPFNGFKFQGTPVSTVVGGKIKMKDGKIMGEPEGKPLKFL

SEQ ID NO: 141604 - protein, 311 aa, Unknown
  Bacterial polypetide isolated from the Sargasso Sea
IDASNLLVLPGCMDTQVHFREPGSTNAEDLHTGSKAAIAGGISSVFEMPNTNPPTANMKEFNNKLNLAKNRMYSNYAFYFGATPDNSTDLAKLKGLDGCCGVKLFAGSSTGNLLVDKEEDIEKVFQNTSKIVAVHSEDEEIINLRKKLIEKGNVHTHPVWRNEECAMSSTRRIVRIAKRLNKKAHILHVTTKEEVDFLSQNKGNITFEITPQHLTIYAPDCYDKLGTFAQMNPPLRDKSHYDRLWYAIRNNYNDTIGSDHAPHLKENKLKEYPQSPSGMPGVQTLLPVMLNHVNDKKLTLDQLIKLLCENP

SEQ ID NO: 141605 - protein, 268 aa, Unknown
  Bacterial polypetide isolated from the Sargasso Sea
SNSSKIISVHSEDENILLSRKKYIKEGDVHSHPIWRNEECALESTKRVVRIAQKYKKKIHILHVTTKEEIDFFSEKRENVTFEITPQHLTLFAPDCYDKLKTFSQMNPPLRSKDHYDRLWDAVKDSLVSTIGSDHAPHTKEEKNRKYPLSPSGMPGVQTLLPVMLDHVNKGKLKIEKLIKLVSENPCDLFGIKNKGYIKENFDADLTIIDMNKEVVIKDNWIESKCGWTPFNNYKVKGFPVATIVNGEIVMENNKILSPAKGKPLNFN

SEQ ID NO: 141606 - protein, 200 aa, Unknown
  Bacterial polypetide isolated from the Sargasso Sea
EEIDFLSQHKGNITFEITPQHLTIYAPDCYDKLGTYAQMNPPLRDKSHYDRLWYAVKNNFNDTIGSDHAPHLKINKEKEYPNSPSGMPGVQTLMPVMLNHVNDGKLSLNQLMKLVCENPIKIFGIKNKGFIKEGFDADFTIVDMNKKIEIKNENIESKCGWSPFDGFKFKGIPTATIIGGKIKMQDGKILGDPEGKPLVF

SEQ ID NO: 141607 - protein, 197 aa, Unknown
  Bacterial polypetide isolated from the Sargasso Sea
RVLDPLRKRIPELRIVMEHITTKDAVDYVIQGGPNIAATVTTHHLIINRNAYLAGGIRPHYYCLPVAKREIHRMALRSAVCSGNEKFFLGTDSAPHLDGVKENACGCAGIYTSVNTLSCIAHVFEDENALDKLEGFVSVHGPSFYKLPVNSGLLKFRKLSEPLSYPEKIRIRNDQVTVFDPGFPLFWSYETVDKEEV

SEQ ID NO: 141608 - protein, 295 aa, Unknown
  Bacterial polypetide isolated from the Sargasso Sea
AIQYYLGCIDTQTHFREPGSTDTEDLHSGSRAAIAGGITSVFEMPNTNPPTSNMKEFQRKLDLAKNRMYSNYAFYFGATADNADDLASLEGLEGCCGIKLFAGSSTGNLLVAEEDDIDKVFQNASKVVAVHSEDEAILKVNKKLIKEGDVHTHPIWRSAECAIASTRRIVRIAEKHNKKAHVLHITTKEEIDFLSQHKGNITFEITPQHLTLYAPDCYNKLGTYAQMNPPLRDKSHYDRLWYGVRNNFNDTIGSDHAPHLKENKDKVYPNTPSGMPGVQTLLPVMLNHINDGKLS

SEQ ID NO: 141609 - protein, 280 aa, Unknown
  Bacterial polypetide isolated from the Sargasso Sea
TEQLAQLKNVEGCCGVKLFAGSSTGNLLVDKEADIEKVISSSDRIVSIHSEDEDIIKLRKKFIRQGDVHSHPEWRNVECAMSSTRRVVKIAERYNKKIHVLHVTTKEEVDFLAMHKKNVTFETTPQHLTLYAPDCYDKLGTYAQMNPPLRSKDHYDRLWVAIKNNVVDVLGSDHAPHLKTNKDKEYPNTPSGMPGVQTIFPVMIDHVNNGKLELNQLINLMCENPCKIFGIKNKGFIKEGFDADLTIVDMDKEVTIKNEMIASKCGWTPFHNYRVKGFPV

SEQ ID NO: 141610 - protein, 331 aa, Unknown
  Bacterial polypetide isolated from the Sargasso Sea
AKEIIDASNLLVLPGCMDTQVHFREPGSTNAEDLHTGSKAAIAGGITSVFEMPNTNPPTADMKEFNNKLNLAKNRMYSNYAFYFGATPDNSSDLAKLKALDGCCGVKLFAGSSTGNLLVDKEEDIEKVFKNTSKIVAVHSEDEEIINLRKKLVEKGNVHTHPVWRNEECAMSSTRRIVRIAKRLNKKAHILHVTTKEEVDFLSQNKGNITFEITPQHLTIYAPDCYDKLGTFAQMNPPLRDKSHYDRLWYAIRNNYNDTIGSDHAPHLKENKLKEYPQSPSGMPGVQTLLPVMLNHVNDKKLTLDQLIKLLCETQPQFLVLKIKVSLKKIM

SEQ ID NO: 141611 - protein, 198 aa, Unknown
  Bacterial polypetide isolated from the Sargasso Sea
FYLSIKGTLLFEITPQHLTFYAPDCYDKLGTYAQMNPPLREKSHYDRLWYAVRNNFNDTIGSDHAPHLKVNKDKVYPNSPSGMPGVQTLMPVMLNHVNEGKLSLYQLINLVCENPVKIFGIQNKGFIKVGYDADFTIIDMNKTIEIKNENIESKCAWSPFDGYKFKGTPTHTIIAGKIKMRKGKILGDPEGKPLSFNK

SEQ ID NO: 141612 - protein, 197 aa, Unknown
  Bacterial polypetide isolated from the Sargasso Sea
FLSQHKGNITFEITPQHLTLYAPDCYDKLGTYAQMNPPLRDKSHYDRLWHGVRNNFNDTIGSDHAPHLKENKDKVYPNTPSGMPGVQTLMPVMLNHINDGKLSLNQLMNFVCENPVKIFGIKNKGFIKEGYDADFTIVDMNKTIEIKNDNIESKCKWSPFNGFKFKGTPTHTIIAGKIKMQNGKILGDPDGTPLQFS

SEQ ID NO: 141613 - protein, 269 aa, Unknown
  Bacterial polypetide isolated from the Sargasso Sea
VISNSSKIISVHSEDENILLSRKKFIKEGDVTSHPIWRNEECALESTKRVVRIAQKYKKKIHILHVTTKQEIDFFSEKRENVTFEITPQHLTLFAPDCYEKLKTFSQMNPPLRSKDHHDRLWEAVKNSLVSTIGSDHAPHTKEEKNRKYPLSPSGMPGVQTLLPVMLDHVNKGKLKIEQLIKLVCENPCHLFGIKNKGYIKENYDADLTIVDMNKDFVIKDSWIESKCGWTPFNNYKVKGFPVATIVNGEIVMENGKIISTPKGKPLTF

SEQ ID NO: 141614 - protein, 208 aa, Unknown
  Bacterial polypetide isolated from the Sargasso Sea
MTTEGECNFLRNLSKENFVSAEVCPQHLTLTVPECYQKLGTLAQMNPPLRTKRHADALWRGLKDGVIDCIATDHAPHTLNEKLRPYGESPSGMPGVETSLAIMLDKVNRNECTLNEVVYWMSASPAKLYKMVRKGSIEVGNDADLVLIDMKMKKKVKNGQLQTKVNWSPYHGMELQGWPVRTIVNGQTVFLNGEVDKNVRGKEITFAS

SEQ ID NO: 141615 - protein, 309 aa, Unknown
  Bacterial polypetide isolated from the Sargasso Sea
AVLGGVTSLFEMPNTNPPTSNLVEFEKKLQLAKNRMHSNYAFYFGATPENTEQLSQLKNLKGCCGIKLFAGSSTGNLLVDKEADIEKVISKADRIVSIHSEDEEILKLRKKFIKKGDVHSHPEWRNSETAMSSTRRVVKIAERYNKKIHVLHVTTKEEVDFLAMHKKNVTFETTPQHLTLFAPDCYNKLGTYAQMNPPLRTKEHYDRLWIAIKNNIVDVLGSDHAPHTKENKQKEYPNSPSGMPGVQTIFPVMLDHVNNGKLTLEQLIKLMCENPCKIFGIKDKGFIKEDFDADLTIVDMNQEQLLKMK

SEQ ID NO: 141616 - protein, 285 aa, Unknown
  Bacterial polypetide isolated from the Sargasso Sea
REPGSTDSEDLESGSRAAVLGGVTSLFEMPNTNPPTANLEEFQKKLKAAKNRMHSNYAFYFGATPQNTKQLAQLKNVEGCCGVKLFAGSSTGNLLVDKEADIEKVISSSDRIVSIHSEDEDIIKLRKKFIRQGDVHSHPEWRNVECAMSSTRRVVKIAERYDKKIHVLHVTTKEEVDFLAMHKKNVTFETTPQHLTFYAPDCYDKLGTYAQMNPPLRSKDHYDRLWVAIKNNVVDVLGSDHAPHLKINKDKEYPNTPSGMPGVQTIFPVMIDHVNNGKLELNQLI

SEQ ID NO: 141617 - protein, 225 aa, Unknown
  Bacterial polypetide isolated from the Sargasso Sea
LKGLDGCCGVKLFAGSSTGNLLVDKEEDIETVFQNTSKIVAVHSEDEEIINLRKKLIEKGNVHTHPVWRNEECAMSSTRRIVRIAKRLNKKAHILHVTTKEEVDFLSQNKGNITFEITPQHLTIYAPDCYDKLGTFAQMNPPLRDKSHYDRLWYAIRNNYNDTIGSDHAPHLKENKLKEYPQSPSGMPGVQTLLPVMLNHVNDKKLTLDQLIKLLCENPSFCIWY

SEQ ID NO: 141618 - protein, 285 aa, Unknown
  Bacterial polypetide isolated from the Sargasso Sea
LFEMPNTNPPTSNLVEFEKKLQLAKDRMHSNYAFYFGATPENIEQLSKLKNLKGCCGIKLFAGSSTGNLLVDKEVDIEKVISKADRIVSIHSEDEEILNLRKKFIKKGNVHSHPEWRNSETAMSSTRRVVKIAERYNKKIHVLHVTTKEEVDFLAMHKKNVTFETTPQHLTLYAPDCYDKLGTYAQMNPPLRTKDHYDRLWTAIKNDIVDVLGSDHAPHTKENKQKEYPNSPSGMPGVQTIFPVMLNHVNNNKLSLEQLIKLMCENPCRIFGIKDKGFIKENFDA

SEQ ID NO: 141619 - protein, 297 aa, Unknown
  Bacterial polypetide isolated from the Sargasso Sea
EGCCGIKLFAGSSTGNLLVAEEDDIDKVFQNASKVVAVHSEDEAILKVNKKLIKEGDVHTHPLWRSAECAIASTRRIVRIAEKHNKKAHVLHITTKEEIDFLSQHKGNITFEITPQHLTLYAPDCYNKLGTYAQMNPPLRDKSHYDRLWYGVRNNFNDTIGSDHAPHLKENKNKVYPNTPSGMPGVQTLMPVMLNHINDGKLSLNQLMNFVCENPVKIFGIKNKGFIKEGYDADFTIVDMNKTIEIKNENIESKCKWSPFNGFKFKGTPTHTIIAGKIKMQDGNILGDPDGTPLQFN

SEQ ID NO: 141620 - protein, 231 aa, Unknown
  Bacterial polypetide isolated from the Sargasso Sea
MKKIQIIKPDDWHVHFRDNNILKAVIPETSRHFSRAIVMPNLTPPILTGIDASEYKERIINAIPKKDNFFPLMTLYLTENTDKKELKQSYENGSVFAAKLYPAGATTNSESGVQNIQNIIPLLETMSEIGMPLLIHGEVTDKNIDIFDREKIFIDKTLDMICRKFPELRITLEHITTDDAVKYVKEGNINLSATITPHHLALNRNSVFEGGIRPHFYCLPILKKEKHRKSL

SEQ ID NO: 141621 - protein, 230 aa, Unknown
  Bacterial polypetide isolated from the Sargasso Sea
SSTRRIVRIAEKYNKKAHVLHITTKEEIDFLSQHKGNITFEITPQHLTLYAPDCYDKLGTYAQMNPPLRDKSNYDRLWYAVKNNLNDTIGSDHAPHLKVNKEKEYPNSPSGMPGVQTLIPVMLNHINDGKLSLNQLMNLVCENPVKIFGIKNKGFIKEGYDADFTIVDMNKTIEIRNENIESKCGWSPFHGNKFRGSPIVTIINGKVKMKDGKILDKPEGEPLVFKDEFI

SEQ ID NO: 141622 - protein, 282 aa, Unknown
  Bacterial polypetide isolated from the Sargasso Sea
FYFGATPYNTEQLAELKNVEGCCGVKLFAGSSTGNLLVDKEADIEKVISSSDRIVSIHSEDEDIIKLRKKFIKKGNVHSHPEWRNVECAMSSTRRVVKIANRYNKRIHVLHVTTKEEVDFLAMHKKNVTFETTPQHLSLYAPHCYDKLGTYAQMNPPLRSKEHYDRLWIAIKNNIVDVLGSDHAPHLKVNKDKEYPNTPSGMPGVQTIFPVMIDHVNNGKLTLSQLINLMCENPCKIFGIKNKGFIKEGFEADFTIVDMNKEVTIKNEMIASKCGWTPFHNY

SEQ ID NO: 141623 - protein, 263 aa, Unknown
  Bacterial polypetide isolated from the Sargasso Sea
MSIKNIRIIQPDDWHVHLREGSMLEVVSKQSSRVNKRCIAMPNLNTPITLMEIATKYISTIKSFVNEKDFTPLIPCFLTADLDLNNFEEGLRKEVFIGAKLYPNKATTNSNLGISNIESIFPSLEILEKNNKPLLVHGEKVSETVDIFDREKYFIDDELQVIIKKFPNLKVVLEHVSSKYGADFVNQNNNIAATITPQHLTLTKKDVFLKDSINPHHFCMPVVKEEEDLIALRAYATSGNSKFFVGTDSAPHHVDKKHPNLSS

SEQ ID NO: 141624 - protein, 308 aa, Unknown
  Bacterial polypetide isolated from the Sargasso Sea
LATSYTNAEPILEVFRSGIADRLIGACPLAPERIYEDLFSLTARRLAHEKGWGREALVRISAAVDVACWDIIGKMAGLPLYQLFGGYRDQVPYYVTCAYYRDGKDLIELRDEITELKEQGHRGFKAKVGGLTLAEDIERLSVVRDVIGDHCDLMVDVNRAWSLETATKAVEALIPLKPRWLEEPLRWWDDRRELKLLSQRTQIPLSAGESELTSYGCRAVIEEQAIQILQFDVTMFGGFTEGRKMAALCELNHVEVTPHHDCFIHAQLVASTPAGGFVEAFTNPERDPLQAELFQNPPTLRGGGGLPL

SEQ ID NO: 141625 - protein, 222 aa, Unknown
  Bacterial polypetide isolated from the Sargasso Sea
KNVKIAERYNKKAHILHITTKEEVDFLSQHKGNITFEITPQHLTLFAPDCYNKLGTYAQMNPPLRDKSHYDRLWYAVRNNLNDTIGSDHAPHLKINKDKEYPNSPSGMPGVQTLMPVMLNHVNNGKLTLNQLINFVCENPVKIFGIKNKGFIKEGYDADFTIIDMNKIIEIKNENIESKCKWSPFNKDMFKGAPVATIINGELKMKDGKIIEGPSGKPLKFN

SEQ ID NO: 141626 - protein, 289 aa, Unknown
  Bacterial polypetide isolated from the Sargasso Sea
MLDLPTGNLLVAEEDDIDKVFQNASKVVAVHSEDEAILKINKKLIKEGDVHTHPVWRSAECAIASTRRIVRIAEKHKKKAHVLHITTKEEIDFLSQHKGNITFEITPQHLTLYAPDCYDKLGTYAQMNPPLRDKSHYDRLWYGVRNNFNDTIGSDHAPHLKENKDKVYPNTPSGMPGVQTLMPVMLNHVNDGKLSLNQLINFVCENPVKIFGIKNKGFIKEGYDADFTIVNINKTIEIKNENIESKCKWSPFNGFKFKGTPTHTIIAGKIKMQDEKILGDPEGTPLQFS

SEQ ID NO: 141627 - protein, 282 aa, Unknown
  Bacterial polypetide isolated from the Sargasso Sea
SEEAKETINAEGHTVLPGCIDTQTHFREPGSTDTEDLHSGSRAAIAGGITSVFEMPNTNPPTSNMKEFQRKLDLAKNRMYCNYAFYFGATADNADDLASLEGLEGCCGIKLFAGSSTGNLLVAEEDDIDKVFQNASKVVAVHSEDEAILKVNKKLIKEGDVHTHPVWRSAECAIASTRRIVRIAEKHNKKAHVLHITTKEEIDFLSQHKGNITFEITPQHLTLYAPDCYDKLGTYAQMNPPLRDKSHYDRLWFGVRNNFNDTIGSDHAPHLKENKDKVYPNT

SEQ ID NO: 141628 - protein, 295 aa, Unknown
  Bacterial polypetide isolated from the Sargasso Sea
MTFFPIGSVSKGQKGEDLTEMLLMQKNGAIAFSDDGIPIQNAQFMKLALTYAKMLNVPIMNHAEDIHLRNNGVMNASSTSNNLGLKGNSSLAEAVMVYRDLLLAESLSSKLHLLHISTKETVELLKKFKKKNKPISAEVSPHHLYFIDEDIDEFNTNLKVAPPVRSKEDRKALIEGIKSGLIDCIATDHAPHTIEDKETTFNDAEFGMIGLESCFGAVNKVLVKENGMSLKSLIEKLTVNPRKIMNLEADLFSVGCKAQITIFDPNEKWVFENKHILSKSSNSPFIGKDLIGRVK

SEQ ID NO: 141629 - protein, 201 aa, Unknown
  Bacterial polypetide isolated from the Sargasso Sea
RRGRFPFSNKGNITFEITPQHLTIYAPDCYDKLGTFAQMNPPLRDKSHYDRLWYAIRNNYNDTIGSDHAPHLKENKLKEYPQSPSGMPGVQTLLPVMLNHVNDKKLTLDQLIKLLCENPVSVFGIKNKGFIKKDYDADFTIIDMNRTIEIKNKNIHSKCGWSPFDGYKFKGSPVYTIINGDIKMKEDEILGDPSGKPILFD

SEQ ID NO: 141630 - protein, 121 aa, Unknown
  Bacterial polypetide isolated from the Sargasso Sea
LLNAAFNDNQKFFLGTDSAPHNIDDKESACGCAGVFNTINSVQILAQLFDNHKKLEKLENFISVNGANHYEVKKNIQKIKLFKMDKPIKFRDFLETKNFKIKIFKPHFDVFWEIDYKKGNK

SEQ ID NO: 141631 - protein, 303 aa, Unknown
  Bacterial polypetide isolated from the Sargasso Sea
AAIAGGITSVFEMPNTNPPTSNMKEFQRKLDLAKNRMYCNYAFYFGATADNADDLARLKGLEGCCGIKLFAGSSTGNLLVAEEDDIDRVFQNASKVVAVHSEDEEILKVNKKLIKDGDVHTHPLWRSVECAIASTRRIVRIAEKHNKKAHVLHITTKEEIDFLSQHKGNITFEITPQHLTLYAPDCYDKLGTYAQMNPPLRDKSHYDRLWYGVRNNFNDTIGSDHAPHLKENKDKEYPNTPSGMPGVQTLMPVMLNHINDGKLSLKQLMNFVSENPVKIFGIKNKGFIREGYDADFTIVDMNK

SEQ ID NO: 141632 - protein, 170 aa, Unknown
  Bacterial polypetide isolated from the Sargasso Sea
EHITTEQAVDYVGSSDRNLAATITPHHLQINRNAMFLGGLRSDFYCLPVAKRERHRLALRRAATSGDQRFFLGTDSAPHPRAGKETSCGCAGIFNAPHALESYAQVFAEEEAMHHLEGFASLHGPAFYGLPVNNDTVTLEKVAVDVPELVNGLVPFHAGETLPWRLQPCM

SEQ ID NO: 141633 - protein, 281 aa, Unknown
  Bacterial polypetide isolated from the Sargasso Sea
LLVAEEEDIDKVFQNASKVVAVHSEDEAILKVNKKLIKEGDVHTHPVWRSAECAIASTRRIVRIAEKHNKKAHVLHITTKEEIDFLSQHKGNITFEITPQHLTLYAPDCYDKLGTYAQMNPPLRDKSHYERLWYGVRNNFNDTIGSDHAPHLKENKDKVYPNTPSGMPGVQTLMPVMLNHINDGKLSLNQLMNFVCENPVKIFGIKNKGFIKEGYDADFTIVDMNKTTEIKNENIESKCKWSPFNGFKFKGTPTHTIIAGKIKMQDGKILGDPDGTPLQFS

SEQ ID NO: 141634 - protein, 384 aa, Unknown
  Bacterial polypetide isolated from the Sargasso Sea
LPGCIDTQTHFREPGSTDTEDLHSGSKAAIVGGITSVFEMPNTNPPTSNKVEFQKKLDLAKNRMYCNYAFYFGATADNANDLSDLKNLEGCCGIKLFAGSSTGNLLVADEKDIEKVFQNSSKVVAVHSEDEAILNANKKLIIKGDVHTHPIWRSVECAMSSTRRIVRIAEKYEKKAHILHVTTKEEVDFLSQHKGNITFEITPQHLTLYAPDCYDKLGTYAQMNPPLRDKSHYDRLWYGVRNNFNDTIGSDHAPHLKANKEKEYPNSPSGMPGVQTLMPVMLNHVNDGKLSLNQLINLVCENPVKIFGIKNKGYIKKDFDADLTIVDMNKKHIIKNQEIESKCKWSPFNEYELKGKPVITIVNGKTKMKNGKILGDPEGLPLIF

SEQ ID NO: 141635 - protein, 372 aa, Unknown
  Bacterial polypetide isolated from the Sargasso Sea
IGQISEEAKDTINAEGHTVLPGCIDTQTHFREPGSTDTEDLHSGSRAAIAGGITSVFEMPNTNPPTSNMKEFQRKLDLAKNRMYCNYAFYFGATADNADDLSSLEGLEGCCGIKLFAGSSTGNLLVAEEDDIDKVFQNASKVVAVHSEDEAILNVNKKLIKEGDVHTHPVWRSVECAIASTRRIVRIAEKHNKKAHVLHITTKEEIDFLSQHKGNITFEITPQHLTLYAPDCYDKLGTYAQMNPPLRDKSHYDKLWYGVRNNFNDTIGSDHAPHLKENKDKIYPNTPSGMPGVQTLMPVMLNHINDGKLSLNQLMNFVCENPVKIFGIKNKGFIKEGYDADFTIVDMNKTIEIKNENIESKCKWSPFNGFKF

SEQ ID NO: 141636 - protein, 435 aa, Unknown
  Bacterial polypetide isolated from the Sargasso Sea
MLDLIIRNGQCYIDGELKDVDVALKDGKIEQIGQISEKAKETINAEGLTVLPGCIDTQTHFREPGSTDTEDLHSGSRAAIVGGITSVFEMPNTNPPTSNMKEFQRKLDLAKNRMYSNYAFYFGATADNADDLASLEGLEGCCGIKLFAGSSTGNLLVAEEDDIDKVFQNASKVVAVHSEDEAILKVNKKLIKEGDVHTHPVWRSAECAIASTRRIVRIAEKHNKKAHVLHITTKEEIDFLSQHKGNITFEITPQHLTLYAPDCYDKLGTYAQMNPPLRDKSHYDRLWYGVRNNFNDTIGSDHAPHLKENKDKVYPNTPSGMPGVQTLMPVMLNHINDGKLSLNQLMNFVCENPVRIFGIKNKGFIKEGYDADFTIVDMNKTIEIKNENIESKCKWSPFNGFKFKGTPTHTIIAGKIKMQDGKILGDPDGTPLQFN

SEQ ID NO: 141637 - protein, 381 aa, Unknown
  Bacterial polypetide isolated from the Sargasso Sea
MLDLIIKNGKCYIDKDLKDVDIGIQNSKISKIGKIEEEASQIIDASGLTVLPGCIDTQTHFREPGSTDTEDLHTGSRAAIVGGITSVFEMPNTNPATTNQKEFQRKIDLAKNRMYCNHAFYFGATPTNQSELASLKGLEGCCGVKLFAGSSTGTLLVHKEEDIEKVFESTSKIVAVHSEDEDILNLRKKLREKGNVHSHPIWRDEECAISSTRKIVKIAKRLGKKAHILHITTKQEIDFLSQNKGNITFEITPQHLTMYAPDCYDKLGTYAQMNPPLRDKSHYDRLWYAVRNNYNDTIGSDHAPHLKVNKDKEYPDTPSGMPGVQTLMPVMLNHVNDGKLSLEQLMNLVCENPAKIFGIIGKGFIKEKYDADFTIVDMNKV

SEQ ID NO: 141638 - protein, 347 aa, Unknown
  Bacterial polypetide isolated from the Sargasso Sea
MLDLIIKNGQCYINGKLEDLDVAIKNGKIEEIGQISDKAKETIEAKGLIVLPGCIDTQTHFREPGSTDTEDLHSGSKAAIVGGITSVFEMPNTNPPTSTKKEFQKKLDLAKNRMYCNYAFYFGATADNANELADLKNLEGCCGIKLFAGSSTGNLLVADEKDIETVFQNSSKVVAVHSEDEKILNINKKLIKKGDVHSHPIWRSEECAISSTRRIVRIAERYNKKAHVLHITTKQEIDFLSQHKGNITFEITPQHLTIYAPECYDKLGTYAQMNPPLRDKSHYDRLWYAVKNNLNDTIGSDHAPHLKVNKDKEYPNSPSGMPGVQTLMPAMLNHVNDGKLSLNQLIN

SEQ ID NO: 141639 - protein, 259 aa, Unknown
  Bacterial polypetide isolated from the Sargasso Sea
HSEDEEIINLRKKLIEKGNVHTHPVWRNEECAMSSTRRIVRIAKRLNKKAHILHVTTKEEVDFLSQNKGNITFEITPQHLTIYAPDCYDKLGTFAQMNPPLRDKSHYDRLWYAIRNNYNDTIGSDHAPHLKENKLKDYPQSPSGMPGVQTLLPVMLNHVNDKKLTLDQLIKLLCENPVSVFGIKNKGFIKKDYDADFTIIDMNRTIEIKNENIHSKCGWSPFDGYKFKGSPVFTIINGDIKMKEDEILGDPTGKPILFD

SEQ ID NO: 141640 - protein, 291 aa, Unknown
  Bacterial polypetide isolated from the Sargasso Sea
MLDLIIKNGQCYINGELKDVDVAIKDGKIQQIGQISDEAKEIVDAEGQTVLPGCIDTQTHFREPGSTDTEDLHSGSKAAIVGGITSVFEMPNTNPPTSNKVEFQKKLDLAKNRMYCNYAFYFGATADNANELSNLKDLEGCCGIKLFAGSSTGNLLVADEADIEKVFQSSSKVVAVHSEDEAILNVNKKLIKKGDVHTHPVWRSVECAMSSTRRIVRIAEKYKKKAHVLHVTTKEEVDFLSQHKGNITFEITPQHLTLYAPECYDKLGTYAQMNPPLRDKSHYDRLWYGVK

SEQ ID NO: 141641 - protein, 435 aa, Unknown
  Bacterial polypetide isolated from the Sargasso Sea
MLDLIIKNGQCYIDGELKDVDVAIKDGKIKQIGQISEEAKETINAESHTILPGCIDTQTHFREPGSTNTEDLHSGSRAAIAGGITSVFEMPNTNPPTSNMKEFQRKLDLAKNRMYCNYAFYFGATADNAEDLASLEGLKGCCGIKLFAGSSTGNLLVAEEDDIDKVFQNASKVVAVHSEDEAILKVNKKLIKEGDVHTHPVWRSAECAIASTRRIVRIAEKYNKKAHVLHITTKEEIDFLSQHKGNITFEITPQHLTLYAPDCYDKLGTYAQMNPPLRDKSHYDRLWYGVKNNFNDTIGSDHAPHLKENKDKVYPNTPSGMPGVQTLMPVMLNHINDGKLSLNQLINFVCENPVKIFGIKNKGFIKEGYDADFTIVDMNKTIEIKNENIESKCKWSPFNGFKFKGTPTHTIIAGKIKMQDGNILGDPDGTPLQFS

SEQ ID NO: 141642 - protein, 435 aa, Unknown
  Bacterial polypetide isolated from the Sargasso Sea
MLDLIIKNGQCYIDGELKDVDVAIKDGKIQKIGQISEEAKDTINAEGHTVLPGCIDTQTHFREPGSTDTEDLHSGSRAAIAGGITSVFEMPNTNPPTSNMKEFQRKLDLAKNRMYSNYAFYFGATADNADDLASLEGLEGCCGIKLFAGSSTGNLLVAEEDDIDKVFKNASKVVAVHSEDEAILKVNKKLIKEGDVHTHPVWRSAECAIASTRRIVRIAEKHNKKAHVLHITTKEEIDFLSQHKGNITFEITPQHLTLYAPDCYDKLGTYAQMNPPLRDKSHYDRLWYGVRNNFNDTIGSDHAPHLKENKDKVYPNTPSGMPGVQTLMPVMLNHINDGKLSLNQLMNFVCENPVKIFGIKNKGFIKESYDADFTIVDMNKTIEIKNENIESKCKWSPFNGFKFKGTPTHTIIAGKIKMQNGKILGEPDGTPLQFS

SEQ ID NO: 141643 - protein, 410 aa, Unknown
  Bacterial polypetide isolated from the Sargasso Sea
MLDLIIKNGKCYIDSELKDVDVAIKDKKIHKIGQISEEAKEIIDASNHTVLPGCIDTQTHFREPGSTDTEDLHSGSRAAIAGGITSVFEMPNTNPPTSNKKEFQRKLDLAKNRMYCNYAFYFGATADNADDLASLKDLEGCCGIKLFAGSSTGNLLVAEEDDIDKVFQNSSKVVAVHSEDEAILKVNKKLIKQGDVHTHPVWRSAECAISSTRRIVRIAEKYNKKAHVLHITTKEEIDFLSQHKGNITFEITPQHLTLYAPDCYNKLGTYAQMNPPLRDKSHFDRLWYAVRNNYNDTIGSDHAPHLKINKDKEYPNTPSGMPGVQTLMPVMLNHVNEGKLSLTQLINLVCENPVKIFGIQSKGFIKEGYDADFTIVDMNKTIEIKNENIESKCAWSPFNGYKFRGTPTHT

SEQ ID NO: 141644 - protein, 438 aa, Unknown
  Bacterial polypetide isolated from the Sargasso Sea
MSDNYSLIIKNGSCYIDGKFQNIDLALTGNKIKKIGKIDPNNSKIFDASNKIVLPGVIDTQVHFREPGANNAENLESGSRAAVAGGVTSVFEMPNTNPPTSTFDEFNKKLDAAKNRMFCNYAFYFGATPNNMKELAAVDTLKGCCGVKLFAGSSTGNLLVSQEKDIEKVISNSSKIISVHSEDENILLSRKKYIKDGDVHSHPIWRNEECALESTKRVVRIAQKYKKKIHILHVTTKQEIDFFKEKRDNVTFEITPQHLTIYAPDCYDSLKTFSQMNPPLRSKDHYDRLWNAVDESLVSTIGSDHAPHTKEEKNRKYPLSPSGMPGVQTLLPVMLDHVNKGKLKIEKLIKLVCENPCDLFGIKNKGYIKENFDADLTVIDMNKEVVIKDNWIESKCGWTPFNNFKVKGFPVATIINGEIVMENNKIASPAKGKPLNFN

SEQ ID NO: 141645 - protein, 436 aa, Unknown
  Bacterial polypetide isolated from the Sargasso Sea
MLDLIIKNGSCYIDGNLTKTNIGISNSKISHIGNLENEKSKNIYDANNLIVLPGCLDTQVHFREPGSTDTEDLHSGSRAAIVGGITGVFEMPNTNPPTSNKKEFQRKLDLAKNRMYCNYAFYFGATADNANDLASLKTLEGCCGIKLFAGSSTGNLLVAKEDDIDKVFQNSSKVVAVHSEDEAILNTNKKLIKNGDVHTHPVWRSVECALSSTRRIVRIAERYNKKAHILHITTKEEVDFLSQHKGNITFEITPQHLTLYAPDCYDKLGTYAQMNPPLRDKSHYDRLWYGVRNNFNDTIGSDHAPHLKTNKNKEYPNSPSGMPGVQTLLPVMLNHVNDGKLSLNQLMNFLCENPVKIFGIQNKGFIRKDYDADFTIVDMNKIIEIKNEKIESKCGWSPFNGYKFKGTPVATIINGKIKMKDGNIIGDPEGVPLKFE

SEQ ID NO: 141646 - protein, 436 aa, Unknown
  Bacterial polypetide isolated from the Sargasso Sea
MLDLIIKNGKCYIDKDLKDVDIGIQNSKITKIGKIAEKASQTIDANGLTVLPGCIDTQTHFREPGSTDTEDLHTGSRAAIVGGITSVFEMPNTNPATTNQKEFQRKIDLAKNRMYCNHAFYFGATPTNQSELASLKGLEGCCGVKLFAGSSTGTLLVHKEEDIEKVFESTSKIVAVHSEDEDILNLRKKLREKGNVHSHPIWRDEECAISSTRKIVKIAKRLGKKAHILHITTKQEIDFLSQNKGNITFEITPQHLTIYAPDCYDKLGTYAQMNPPLRDKSHYDRLWYAVRNNYNDTIGSDHAPHLKENKDKEYPDTPSGMPGVQTLMPVMLNHVNDGKLSLEQLMNLVCENPAKIFGIIGKGFIKEEYDADFTIVDMNKIIEIKNDKIESKCGWSPFNGYKFKGTPVYTIINGEIKMKDGEIIGEPSGKPIRFED

SEQ ID NO: 141647 - protein, 364 aa, Unknown
  Bacterial polypetide isolated from the Sargasso Sea
SKAAIVGGITSVFEMPNTNPPTSNKIEFQKKLDLAKNRMYCNYAFYFGATADNANDLSNLKDLEGCCGIKLFAGSSTGNLLVADEADIEKVFQSSSKVVAVHSEDEAILNVNKKLIKKGDVHTHPVWRSVECAMSSTRRIVRIAEKYNKKAHVLHVTTKEEVDFLSQHKGNITFEITPQHLTLYAPECYDKLGTYAQMNPPLRDKSHYDRLWYGVKNNYNDTIGSDHAPHLKVNKEKEYPNSPSGMPGVQTLMPVMLNHVNDGKLSLNQLINLVCENPVKIFGIKNKGFIKEGYDADFTIVDMNKIIEIKNENIESKCGWSPFHRYKFKGSPVATIINGIVKMKNGKILGSPKGKPLLFKNEFK

SEQ ID NO: 141648 - protein, 301 aa, Unknown
  Bacterial polypetide isolated from the Sargasso Sea
LKDLEGCCGIKLFAGSSTGNLLVADEVDIEKVFQSSSKVVAVHSEDEAILNVNKKLIKKGDVHTHPVWRSVECAMSSTRRIVRIAEKYKKKAHVLHVTTKDEVDFLSQHKGNITFEITPQHLTLYAPDCYEKLGTFAQMNPPLRDKPHYDRLWYAIKNNFNDTIGSDHAPHLKVNKEKEYPNSPSGMPGVQTLMPVMLNHVNDGKLSLNQLINLVCENPIKIFGIKNKGFIKEGYDADFTIVDMNKTIEIKNENIESKCGWSPFDGYKFKGTPVATIINGKVKMKDGKIIGEPDGIPMKFK

SEQ ID NO: 141649 - protein, 431 aa, Unknown
  Bacterial polypetide isolated from the Sargasso Sea
MISGKSTKKVLLKSGRIIDPFSKKTFNGDILIENGKISKIGESISSKGKDYKIVDCKGLVVTHGFCDMHVHFREPGREDKETLESGSFAALGGGFTQVCTMANTNPIIDSPEHIHYIVSKSSKLPIDIFPIGSVSKGQKGEDLTEMLLMQKNGAIAFSDDGIPIQNAQFMKLALTYAKMLDVPIMNHAEDIYLRNNGVMNASSTSNNLGLKGNSSLGEAVMVYRDLLLADSLSSKLHLLHISAKETVELLKKFKKKNKPISAEVSPHHLYFIDEDINEFNTNLKVAPPVRSREDRKALIEGIKSGLIDCIATDHAPHTIEDKETTFNDAEFGMIGLESCFGVVNKVLVKENGMSLKSLIEKLTVNPRKIMNLEADLFSVGCKAQITIFDPNEKWVFENKHILSKSSNSPFIGEDLVGRVKYVISKNQFFTL

SEQ ID NO: 141650 - protein, 378 aa, Unknown
  Bacterial polypetide isolated from the Sargasso Sea
MLDLIIKNGQCYINGELKNVDVAIKDGKIHKIGQISDETKEIVDAEGQTVLPGCIDTQTHFREPGSTDTEDLHSGSKAAIVGGITSVFEMPNTNPPTSNKIEFQKKLDLAKNRMYCNYAFYFGATADNANDLSNLKDLEGCCGIKLFAGSSTGNLLVADEADIEKVFQSSSKVVAVHSEDEAILNVNKKLIKKGDVHTHPVWRSVECAMSSTRRIVRIAEKYKKKAHVLHVTTKEEVDFLSQHKGNITFEITPQHLTLYAPECYEKLGTYAQMNPPLRDKSHYDRLWYGIKNSLNDTIGSDHAPHLKENKEKEYPNSPSGMPGVQTLMPVMLNHVNDGKLSLNQLINLVCENPIKIFGIKNKGFIKEGYDADFTIVDM

SEQ ID NO: 141651 - protein, 391 aa, Unknown
  Bacterial polypetide isolated from the Sargasso Sea
MQKIKLFYPGIIDTQVHFREPGSTDAEDLESGSRAAVLGGVTSLFEMPNTNPPTANLVEFEKKLKAAKNRMHSNYAFYFGATPSNTDQLAHLKNVEGCCGVKLFAGSSTGNLLVDKEADIEKVISSSDRVVSIHSEDEDIIKLRKKFIRKGDVHSHHEWRNVECAMSSTRRVVKIAERYNKKIHVLHVTTKEEVDFLAMHKKNVTFETTPQHLTLYAPDCYDKLGTYAQMNPPLRGKEHYDRLWTAIKNNIVDVLGSDHAPHLKVNKNKEYPDSPSGMPGVQTIFPVMIDHVNNGKLTLNQLINLMCENPCRIFGIKNKGFIKEGFDADLTIVDMKKEVIIKDEMIASKCGWTPFNNYKVKGFPVGTIVNGILVMSDGKILVESKGKPLSF

SEQ ID NO: 141652 - protein, 195 aa, Unknown
  Bacterial polypetide isolated from the Sargasso Sea
DNVLSKIRTDNPALKIIMEHITTKDAVDYVFSENENLAATVTAHHLSINRNDLLAGGIRPHFYCLPVVKRETHRLALVEAVVSGSPKFFLGTDSAPHLDRDKESSCGCAGCFTATNSLEILAHIFEEQNALNKLELFTSINGAKFYGKNINSDKIRIVKKDKPISFPEKISTPSGEITVFKPNFKTKWQVQIQFK

SEQ ID NO: 141653 - protein, 335 aa, Unknown
  Bacterial polypetide isolated from the Sargasso Sea
MLDLIIKNGQCYINGELKNVDVAIKNGKIQQIGQISDETKEIVNAEKKIVLPGCIDTQTHFREPGSTDTEDLNSGSKAAIVGGITSVFEMPNTNPPTSNKVEFQKKLDLANNRMYCNYAFYFGATADNANELSDLNNLEGCCGIKLFAGSSTGNLLVADEADIEKVFQSSSKVVAVHSEDEAILNLNKKLIKKGDVHTHPVWRSVECAMSSTRRIVRIAEKYKKKAHILHVTTKEEVDFLSQHKGNITFEITPQHLTLYAPDCYYKLGTYAQMNPPLRDKSHFDRLWYGVKNNFNDTIGSDHAPHLKINKEKEYPNSPSGMPGVQTLLPVMLNHV

SEQ ID NO: 141654 - protein, 103 aa, Unknown
  Bacterial polypetide isolated from the Sargasso Sea
MQTLTITTPDDWHLHFRDNEMLAETVPATARCFQRAIVMPNLVPPVVNAEMAMAYKGRIEAARPKGSSFEPLMTLFLTNQTTPQDIIDAKQAGVTACKLYPAG

SEQ ID NO: 141655 - protein, 437 aa, Unknown
  Bacterial polypetide isolated from the Sargasso Sea
MSDNFSLIIKNGSCYIDGKLTKTDIGLSGNKIKKIGKIELNSSKVYDATDKVVLPGIIDTQVHFREPGSTDAEDLESGSRAAVLGGVTALFEMPNTNPPTSNLVEFDKKLQAAKNRMHSNYAFYFGATPDNTNQLAELKDVEGCCGVKLFAGSSTGNLLVDKEADIEKVISSSDRVVSIHSEDEDIIKLRKKFIKKGDVHSHAEWRNVEVAMSSTRRVVKIAERYNKKIHVLHVTTREEVDFLAMHKKNVTFETTPQHLTMYAPDCYDKLGTYAQMNPPLRTKEHYDRLWVAIKNNIVDVLGSDHAPHLKKNKDKEYPNSPSGMPGVQTIFPVMLDHVNNGKLTLQQLINLMCENPCKIFGIKNKGYLKEGYDADLTIADMNKEVVIKNEMIASKCGWTPFNNHKVKGFPVATIVNGHLVMSDGKVVAESKGTPLKF

SEQ ID NO: 141656 - protein, 224 aa, Unknown
  Bacterial polypetide isolated from the Sargasso Sea
STRRIVRIAEKYGKKAHVLHITTKEEIDFLSQHKGNITFEITPQHLTLYAPDCYDKLGTYAQMNPPLRDKSHYDRLWYAVKNNLNDTIGSDHAPHLKVNKDKVYPNTPSGMPGVQTLMPVMLNHVNDGKLSLKQLISLVCENPIKIFGIKNKGFIKEGFDADFTIVDMNKTIEIKNENIESKCGWSPFNGFKFKGTPTHTIIAGKIKMQDGKIIGEPEGKPLVF

SEQ ID NO: 141657 - protein, 98 aa, Unknown
  Bacterial polypetide isolated from the Sargasso Sea
AKHKKENACGCAGCYSAWSAIELYAEVFEQLGAIDRLEGFASHYGADFYDLPRNTTTMTLVKESWTVPEQVTLADGTDMVPFYAGQTLQWKLEKAFQA

SEQ ID NO: 141658 - protein, 437 aa, Unknown
  Bacterial polypetide isolated from the Sargasso Sea
MSDNYSLIIKNGSCYIDGKIIKSDIGLHENKIKKIGNIEENNSKVYDATGKVVLPGIIDTQVHFREPGSTDAEDLESGSRAAVLGGVTSLFEMPNTNPPTANLVEFEKKLKAAKNRMHSNYAFYFGATPQNTEQLAQLKNVEGCCGVKLFAGSSTGNLLVDKEADIEKVISSSDRIVSIHSEDEDIIKLRKKFIRQGDVHSHPEWRNVECAMSSTRRVVKIAERYNKKIHVLHVTTKEEVDFLAMHKKNVTFETTPQHLTLYAPDCYDKLGTYAQMNPPLRSKDHYDRLWVAIKNNVVDVLGSDHAPHLKINKDKEYPNTPSGMPGVQTIFPVMIDHVNNGKLSLNQLINLMCENPCKIFGIKNKGFIKEGFDADLTIVNMDKEVTIKNEMIASKCGWTPFHNYKVKGFPVGTIVNGILVMSDGKILVESKGQPLKF

SEQ ID NO: 141659 - protein, 256 aa, Unknown
  Bacterial polypetide isolated from the Sargasso Sea
DENILLSRKKFIKEGDVTSHPVWRNEECALESTKRVVRLAQKHKKKIHILHVSTKEEIDFFSEKRDGVTFEITPQHLTLYAPDCYENLKTFSQMNPPLRSKDHYDRLWDAVDETLVSTIGSDHAPHTKEEKNRKYPLSPSGMPGVQTLLPVMLDHVNKGKLKIEKLIKLVSENPCDLFGIKNKGYIKENFDADLTVIDMNKEVIIKDDWIESKCGWTPFNNYKVKGFPVATIVNGEIVMENNKIISPAKGKPLNFN

SEQ ID NO: 141660 - protein, 434 aa, Unknown
  Bacterial polypetide isolated from the Sargasso Sea
MLDLIIKNGRCYINGELKDVDVAVKDGKIHKIGQISEEAKETLNAESQTVLPGCIDTQTHFREPGSTDTEDLHSGSRAAIVGGITSVFEMPNTNPPTSTKIEFQKKLHLAKNRMYCNYAFYFGATADNANELADLENLEGCCGIKLFAGSSTGNLLVAEEKDIEKVFQSSSKVVAVHSEDEAILNVNKKLIKKGDVNSHPVWRSVECAISSTRRIVRIAERYKKKAHILHITTKEEIDFLSQHKGNITFEITPQHLTIYAPDCYDKLGTYAQMNPPLRDKSHYDRLWYAVKNNFNDTIGSDHAPHLKINKEKEYPNSPSGMPGVQTLMPVMLNHVNDGKLSLNQLMKLVCENPIKIFGIKNKGFIKEGFDADFTIVDMNKKIEIKNENIESKCGWSPFDGFKFKGIPTATIIGGKIKMQDGKILGDPEGKPLVF

SEQ ID NO: 141661 - protein, 353 aa, Unknown
  Bacterial polypetide isolated from the Sargasso Sea
GGVTSLFEMPNTTPPTANLVEFEKKLKAAKNRMHSNYAFYFGATPSNTDQLAQLKNVEGCCGVKLFAGSSTGNLLVDKEADIEKVISSSDRVVSIHSEDEDIIKLRKKFIRKGDVHSHHEWRNVECAMSSTRRVVKIAERYNKKIHVLHVTTKEEVDFLAMHKKNVTFETTPQHLTLFAPDCYDKLGTYAQMNPPLRGKEHYDRLWTAIKNNIVDVLGSDHAPHLKENKDKEYPNSPSGMPGVQTIFPVMIDHVNNGKLTLNQLINLMCENPCRIFGIKNKGFIKEGFDADLTIVDMNKEVTIKDEMIASKCGWTPFNNYKVKGFPVGTIVNGILVMSNGKILVESKGKPLSF

SEQ ID NO: 141662 - protein, 435 aa, Unknown
  Bacterial polypetide isolated from the Sargasso Sea
MLDLIIKNGQCYIDGELKNVDVAIKDGKIQHIGQISEETNETINVEGQTVLPGCIDTQTHFREPGSTDTEDLHSGSRAAIAGGITSVFEMPNTNPPTSNMKEFQRKLDLAKNRMYCNYAFYFGATADNADDLASLKGLEGCCGIKLFAGSSTGNLLVAEEDDIDKVFQNSSKVVAVHSEDEAILKLNKKLVKEGDVHTHPVWRSVECAMSSTRRIVRIAEKYNKRAHVLHITTKEEIDFLSQHKGNITFEITPQHLTLYAPDCYDELGTYAQMNPPLRDKSHYDRLWYAVKNNLNDTIGSDHAPHLKVNKDKIYPNSPSGMPGVQTLMPVMLNHVNDGKLSLKQLMNLVCENPIKIFGIKNKGFIKEGYDADFTIVDMNKTIEIKNENIESKCAWSPFNGFKFKGTPTHTIIAGKIKMNNGSLIGDPEGKPLEFI

SEQ ID NO: 141663 - protein, 435 aa, Unknown
  Bacterial polypetide isolated from the Sargasso Sea
MLDLLIKNGSCYIDKDLKSYDIAINDGKIIEIGKINNEAKEIYDASNLTVLPGCIDTQTHFREPGSTDTEDLHSGSRAAIVGGITSVFEMPNTNPPTSNKTEFQRKLDLAKNRMYCNYAFYFGATADNAKDLASLKNLVGCCGIKLFAGSSTGNLLVAAEEDIDKVFQNSSKVVAVHSEDEEILNTNKKLIKKGDVHSHPVWRSVECAMSSTRRIVRIAERYNKKAHILHVTTKEEIDFLSQHKGNITFEITPQHLTLYAPDCYNKLGSYAQMNPPLRDKSHYDRLWYGVKNNFNDTIGSDHAPHLKINKDKEYPNSPSGMPGVQTLMPVMLNHINNEKLSLEQLINSVCENPVKIFGIKNKGFIKEGYDADFTIVDMNKVIEIKNEKIESKCGWSPFHGYKFKGTPVSTIIAGEIKMREGKILGKPSGLPMEFI

SEQ ID NO: 141664 - protein, 338 aa, Unknown
  Bacterial polypetide isolated from the Sargasso Sea
MSDNFSLIIKNGACYIDGKLTKTDIGLSGNKIKKIGKIELNSSKVYDATGKVVLPGIIDTQVHFREPGSTDAEDLESGSRAAVLGGVTALFEMPNTNPPTSNLVEFDKKLQAGRNRMHSNYAFYFGATPNNIDQLAHLKDVEGCCGVKLFAGSSTGNLLVDKEADIEKVISSSDRIVSIHSEDEEIIKLRKKFIKKGDVHSHPEWRNVESAMSSTRRVVKIAERYNKKIHVLHVTTREEVDFLAMHKKNVTFETTPQHLTMYAPDCYDKLGTYAQMNPPLRTKEHYDRLWVAIKNNIVDVLGSDHAPHLKENKDKEYPNTPSGMPGVQTIFPVMLDHV

SEQ ID NO: 141665 - protein, 349 aa, Unknown
  Bacterial polypetide isolated from the Sargasso Sea
MLDLIIKNGTCFIDGNLKKADIGITNSKITTINDSIQDASKEIYNAENLIVLPGCIDTQTHFREPGSTDTEDLHSGSRAAIVGGITSVFEMPNTNPPTSNMKEFQRKLDLAKNRMYCNYAFYFGATAENSQDLASLKDLEGCCGIKLFAGSSTGNLLVAKEDDIDNVFQNSSKVVAVHSEDESILNINKKLIKKGDVHTHPIWRSVECAISSTRRIVKIAERYNKKAHILHITTKEEIDFLSQHKGNITFEITPQHLTLFAPDCYNKLGTYAQMNPPLRDKSHYDRLWYAVRNNFNDTIGSDHAPHLKVNKDKEYPNSPSGMPGVQTLIPVMLNHVNDGKLTLNQLINL

SEQ ID NO: 141666 - protein, 299 aa, Unknown
  Bacterial polypetide isolated from the Sargasso Sea
TDDAIAYKERINQVIPHEISFQPLMTLYLTEATKTSDIKRGVDLGVVTALKLYPAGATTNSENGVKEFGNVYSILEFMAEVDIPLLVHGEVTDPEIDIFDREAVFIERVLDPLRKRIPELRIVMEHITTKDAVDYVIQGGPNIAATVTTHHLIINRNAYLAGGIRPHYYCLPVAKHETHRMALRSAVCSGNEKFFLGTDSAPHLDGAKENACGCAGIYTSVNTLSCIAHVFEDENALDKLEGFVSVHGPSFYKLPVNSGLLKFRKLSEPLSYPEKIPIRNDQVTVFDPGFPLFWSYETV

SEQ ID NO: 141667 - protein, 287 aa, Unknown
  Bacterial polypetide isolated from the Sargasso Sea
MALMFKEGAVAFSDDGLPIQDGAVMRIALEYSTLIDVPVINHAEDECLRSEGVMHEGIISTHLGLPGNPDLAESAMVHRDLELAEFTGARLHVPHVSSAKAVKHIQQMKRKNNNITAEVTPHHLFFNDQALRSYDTNLKVAPPIRTESDRTALIKAVKDGTIDCIATDHAPHTSEDKETTFDCASFGMIGLESAFGVVNKVLVKESEMELIDLISLLTVNPRKIMGFDSNLFSKGAMAEITVIDPDHEWIFGKDHIYSKSGNSPFIGESLEGKVELTISTNSLYKGQ

SEQ ID NO: 141668 - protein, 132 aa, Unknown
  Bacterial polypetide isolated from the Sargasso Sea
MRRPDDWHLHLRDGDMLKRVLPATARQFARAIVMPNLRPPVTTVDAAIAYRQRIGSALPEGMAFTPLMTAYLTDTISPDELERGHKEGVFTAAKLYPANATTNSAAGVSELSCITAVLERMQAIDMPLLIHG

SEQ ID NO: 141669 - protein, 257 aa, Unknown
  Bacterial polypetide isolated from the Sargasso Sea
MKILIKNGLIVDPSQKIKKIMNLEINNGVISNLHIRKNVNYEKFDEVIDAKGFIVAPGLVDIHVHLRDPGLKHKETISSGSRAAAAGGFTSIACMPNTSPANDKPQITKYIMDKSNKAGMVNIFPIGAITQGLNNLKLAKIVENIEAGCVGISDDGFPVTNSKLLFNAMNLAKKNSFPVISHCEDCSFSEGGVANEGKFSRKYRLIGIPNISEELGIIKDIAVAEYTNAHLHVCHVSTLNSVKIIKEAKARGVVVTC

SEQ ID NO: 141670 - protein, 141 aa, Unknown
  Bacterial polypetide isolated from the Sargasso Sea
MTPAPDQLVLRRPDDWHVHLRDDVMLEQVLPATARQFARAIVMPNLRPPVTTVDAAIAYRQRIEAALPEGMSFTPLMTAYLTNDISPDELELGHREGVFTAAKLYPANATTNSAAGVSDLSCISAVLERMQAIDMPLLIHG

SEQ ID NO: 141671 - protein, 172 aa, Unknown
  Bacterial polypetide isolated from the Sargasso Sea
MTTLTITRPDDWHIHLRDGAQLKDTVRDISRYMGRAIVMPNLVPPAIDTETALAYYDRIKAQVPAGSQFEPLMVLYLTDKTSPEEIRKAKASGKIVAAKLYPAGATTNSDSGVTDLKNIYPALEAMQEVGMLFLVHGEVTDSSIDIFDRERVFIENILSKIVADFPKLKIVL

SEQ ID NO: 141672 - protein, 107 aa, Unknown
  Bacterial polypetide isolated from the Sargasso Sea
MTRQITITRPDDWHLHVRDGDILNDVVPATAACFGRAIIMPNLVPPVTDASAAMAYRDRILAAARGTDFQPLMTLYLTESTTAETIREAKAAGVVAAKLYPAGATTN

SEQ ID NO: 141673 - protein, 192 aa, Unknown
  Bacterial polypetide isolated from the Sargasso Sea
MLRDIELVAKYGTRYHAQHISSKKCVDLIKEAKENNLPITSEVTPHHILENNENLDTTNGLFKMYPPIRTEEDRLSLIDGLLSNVIDAIATDHAPHPENTKTVDFKSAARGVVGLESAFPMLYSSGILSLEEIKKFMIENPRKILSEAGYKVEKSQVNVWQLCDKEFTTKSKFNNSIFEKRNTKIEKVSQNV

SEQ ID NO: 141674 - protein, 254 aa, Unknown
  Bacterial polypetide isolated from the Sargasso Sea
MLNVPVINHAEDDCLRCNGVMNEGMVSNRLGLPGNPSIAESTMVFRDLKLADMTGAKLHVPHVSTAASVEYIKEMKRSNDKVTAEVTPHHLFFNDEALLNYDTNLKVAPPIRNDISREALIRGIKEGVIDCIATDHAPHSLHEKQTTFDCASFGMIGLESCFGVVKRLLVDEEGLNLISFIKLLTTAPRKIMGFNSDLFQIGTEAELVLFDPIEKWIFKESNVFSKSTNSPFYGQELFGKVRYTISKGKIAEII

SEQ ID NO: 141675 - protein, 234 aa, Unknown
  Bacterial polypetide isolated from the Sargasso Sea
MTDQISIIAPDDWHVHLRDAEMLQQVVAHTARRFRRAIVMPNLRPPVTTVAAARAYRERIKAACPADLEFTPLMTAYLTDSIEPSELETGFDEGVFAAAKLYPANATTNSSAGVTDLLQIDPVLETMARIGMPLLIHGEVTDAEIDIFDREAVFIERHLAPLRDRHPALKVVFEHITTEQAVQYVSSADHHLAATITPHHLHINRNAMFAGGLRSDFYCLPVAKRECHRQALRR

SEQ ID NO: 141676 - protein, 310 aa, Unknown
  Bacterial polypetide isolated from the Sargasso Sea
HVHFRDNEMLKLVVPETDKIYKNCIVMPNTVPPITNSKMAKDYKLRINKYIENDLNPLMTLYLTENTDIDDMIQAFKNKTIFAVKLYPQGATTNSDKGVKNLQNIFPLLNQMEINEIPLLIHGEDTDKNIDIFDREKSFIDRYLTTIVSTFPKLKITLEHITTYDAVQFVKENHNLGASITPHHLASNRNDMLVGGIRPHLYCLPILKRKKHQEELIKIATSGNRKFFLGTDSAPHEIKLKENICGCAGVFNTINSLEIITQIFDSANSLSNLESFVSKNSALFYKIPFNEKKLELIKLDDPILFPDELN

SEQ ID NO: 141677 - protein, 204 aa, Unknown
  Bacterial polypetide isolated from the Sargasso Sea
ADMTGAKLHVPHVSTAASVEHIKEIKSTNDKITAEVTPHHLFFNDEDLLNYNTNLKVAPPIRNDLSRKALIKGVKQGVIDCIATDHAPHSLHEKETTFDCASFGMIGLESCFGIVKRLLVDEEGLSLVNLIKLLTITPRKIMGLNSDLLKVGVEAELVLFNPVEKWKFKKSNIYSKSINSPFYGQELIGKVRYTISKGKIAEIL

SEQ ID NO: 141678 - protein, 261 aa, Unknown
  Bacterial polypetide isolated from the Sargasso Sea
NGKDITEMALMFKEGAVAFSDDGLPIQDGAVMRIALEYSTLVGVPVINHAEDECLRSEGLMHEGIISTHLGLPGNPDLAESAMVHRDLELADFTGAKLHVPHVSSAKAVQHIQKMKRKNNKITSEVTPHHLYFNDQALRSYDTNLKVAPPIRTESDREALIKAVKDGTIDCIATDHAPHTSEDKETTFDCASFGMIGLESAFGVVNKVLVQESGMELIDLISLLTVNPRKIMGFDSDLFTEGAMAEITVLDPDCDWTFDKD

SEQ ID NO: 141679 - protein, 277 aa, Unknown
  Bacterial polypetide isolated from the Sargasso Sea
YQKRIKKYVKKSLKTYLTIYLTENTDEDNLLTAFKEKNVFAVKLYPLGATTNSNFGIKNLESIMSVLSTMETNDIPLLIHGEDTDPKIDIFDREKYFIDRTLSKIVDRFPSLRITLEHITTFDAIDYIKLNKNIVGSITPHHLASNRNDMLVGGIKPHLYCLPILKRKTHQEELIKVAVSGNEKFFLGTDSAPHEIALKENHCGCAGVFNTPYTIQILAQIFENNNALNNFEKFVSIHGSKHYKLPINKNKINLIKKDIPIKFVNKLKINDTEIKIY

SEQ ID NO: 141680 - protein, 243 aa, Unknown
  Bacterial polypetide isolated from the Sargasso Sea
MSEKEFIIRKPDDWHLHLRDGEMLASVIKHSAANFERAIIMPNLVPPVVTTDDAIAYKERINQVIPPGMSFQPLMTLYLTEATKTSDIKRGVDLGVVTALKLYPAGATTNSENGVKEFGNVYSILEFMAEVDIPLLIHGEVTDSEIDIFDREAVFIERVLDPLRKRIPELRIVMEHITTKDAVDYVIQGGPNIAATVTTHHLIINRNAYLAGGIRPHYYCLPVAKRETHRMALRSAVCSGNEK

SEQ ID NO: 141681 - protein, 270 aa, Unknown
  Bacterial polypetide isolated from the Sargasso Sea
MNIKKINKDIVLKNGLIIDPFRQKTFQGSIWVKNGRIAGVGDFEIPDSDDVHLIDCTKKIITHGFCDLHVHFREPGEDDKEDLESGSRSALAGGFTRVCLMPNTKPPIDSPELVNFINQMGEKLPVHIHPIGAVTKNQNGKILTEMSLMHREGAVAFSDDGLPIQNGGVMRSALEYSKLLNVPVINHAEDECIRGDGLVNEGKISTHLGLPGNPDIAESVMVLRDLELAFYTGATLHVPHVSSRKAVEHIRRMKSRDNKITAEVTPHHLF

SEQ ID NO: 141682 - protein, 259 aa, Unknown
  Bacterial polypetide isolated from the Sargasso Sea
LEYSKMLNVPVINHAEDDCLRCDGVMNEGIVSNRLGLPGNPSISESTMVFRDLKLAEMTDAKLHVPHVSTAASVKYIKEMKRSNDKVTAEVTPHHLFFNDEALLDYDTNLKVAPPIRNNVSRQALINGLKEGTIDCIATDHAPHSLHEKQTTFDCASFGMIGLESCFGVVKRLLVDEEGLSLINLIKLLTTAPRNIMGINSNLLKVGTEAELVLFDPAEKWMFKESNVFSKSINSPFYDQKLIGKVRYTISKGKIAELL

SEQ ID NO: 141683 - protein, 187 aa, Unknown
  Bacterial polypetide isolated from the Sargasso Sea
MTKELVIVRPDDWHLHLRDEDFLPITVNESAKSFARAIIMPNLVPPITKLVDAENYKRRILNALKPNLSFDPLMTLYLTEETDPKEVKEGFLSGQISAVKLYPAGATTNSQSGVHNFEKIKPVLEIMAEIGCPLCIHGEVTEKNIDIFDREKAFIDNVLNKIRTDNPTLKVIMEHITTKDAVDYVFS

SEQ ID NO: 141684 - protein, 270 aa, Unknown
  Bacterial polypetide isolated from the Sargasso Sea
FIGRKGKQLSEMSELADLGVIGFSDDGDPVEDPNIMRQALSYSAGLKLPIINHCEVPSLADGASMNEGWVSNRLGLKGMPSSAEEVMVARDISLAELTGGHIHIAHASTRGTIDLIRSAKANGTKVTCEVTPHHLTLTENTVMGHGKDDFQPLGTNAYDTNAKVNPPLRSKSDVASMIESLNTGTIDFIATDHAPHSEVDKMTTFQDSSFGISVLETALGSLMTLVDQGQMNVNTLIKKLTNDPATFLGKDIGNLKTGTSGDITIIDPNE

SEQ ID NO: 141685 - protein, 184 aa, Unknown
  Bacterial polypetide isolated from the Sargasso Sea
MLRVVMEHITTLDSINFVKNAGKNLFGTITAHHLALNRNDLFRNGINPHNYCLPILKREEHRLALLSAAVSGDEKFFLGTDSAPHLTETKESACGCAGIFSSINALGVLATLFEKEQSLANLEKFISLNGCRFYGLEPNKKRISFTKRNKPVKFPRYVKVGASTVSVFNPGFDVYWYVEALSQN

SEQ ID NO: 141686 - protein, 283 aa, Unknown
  Bacterial polypetide isolated from the Sargasso Sea
DASFNPLMTLFLTDNLDPVEVVRLSEEESVVALKYYPSGATTNSDTGVTEIKNVYPVIEKMAELGIPLLLHGEVTDDHIDIFDREKVFIDTILAPLIQRYPELKVILEHITTKDSVEFVKSQSNKVAATITIHHLLYNRNDMLVGGIRPHLYCLPVLKRDTHQASLIDAALSGNPKFFLGTDSAPHSKPEKETSCGCAGVFSAPAAIELYTQFFAEQNCLSKLEGFASFYGADFYGQSRNQEKITLEKKPWQMPEHYLLGDVQTIPIFAGQTINWRLQVDSEK

SEQ ID NO: 141687 - protein, 185 aa, Unknown
  Bacterial polypetide isolated from the Sargasso Sea
MTKELVIVRPDDWHLHLRDKDFLPTTVNESAKSFARAIIMPNLVPPITKLIDAENYKRRILSALKPNLSFDPLMTLYLTEETDPKEVKQGFVSGQISAVKLYPAGATTNSQSGVQNYEKIKPILEIMAEIGCPLCIHGEVTDNNIDIFDREKAFIDSVLNKIRTDNPTLKVIMEHITTKDAVDYV

SEQ ID NO: 141688 - protein, 161 aa, Unknown
  Bacterial polypetide isolated from the Sargasso Sea
MRKNIAATVTPHHLVINRNDLLAGGIRPHLYCLPIAKRDKHRKALRSAVTSGNRSFFLGTDSAPHTISSKESDCGCAGIFNAQNAIEIYASVFEEMSALEEFEKFASLNGPNFYGLEPNREYLVLEKKNHRIDEEIELPDDQDTIRPFLFGEELNWCVVDS

SEQ ID NO: 141689 - protein, 200 aa, Unknown
  Bacterial polypetide isolated from the Sargasso Sea
MQTLTITTPDDWHLHFRDNEMLAETVPATARCFQRAIVMPNLVPPVVNAEMAMAYKSRIEAARPNGSSFEPLMTLFLTNQTTPQDIIDAKQAGVTACKLYPAGATTNSDAAVKGIQALYPVFQAMQEQGLLLLIHGEVTEHHIDIFDREKVFIDTHLAPIVEAFPKLKVVFEHITTADAAGFVAGASEYVGATITPQHLL

SEQ ID NO: 141690 - protein, 223 aa, Unknown
  Bacterial polypetide isolated from the Sargasso Sea
MQTLTISKPDDFHLHLRDGEAMSSVVNYSAAQFSRAIVMPNLKPPITTVDMAVSYYNRILDNVNEEYNFEPLMTLYLTDNMSPSEIDKAAETKSITALKYYPAGATTNSDSGVTDIKKIYSVLEAMMKNGLPLLLHGEVNDIEVNVFDREKIFIDRVLTPLVDDFSELKIVLEHISTKEAVDFILNASDNLAATITPQHVLLNRSDFFDVSFQPHNYCLPVLK

SEQ ID NO: 141691 - protein, 188 aa, Unknown
  Bacterial polypetide isolated from the Sargasso Sea
MQTLTITTPDDWHLHFRDNEMLAETVPATARCFQRAIVMPNLVPPVVNADMAMAYKERIEAARPKGSSFEPLMTLFLTNQTTPQDIVDAKQAGVTACKLYPAGATTNSDAAVKGIQALYPVFQAMQEQGLLLLIHGEVTEHHIDIFDREKVFIDTHLGPIVDAFPKLKVVFEHITTADAASFVAGASE

SEQ ID NO: 141692 - protein, 267 aa, Unknown
  Bacterial polypetide isolated from the Sargasso Sea
TENTDVEDLVAAFKEKNVFAVKLYPLGATTNSNFGIKNLKNIMSVLATMEKNNIPLLIHGEETDPKIDIFDREKYFIDRTLSKIVRNFPMLRITLEHITTIDAIDYINSNENIVGSITPHHLASNRNDMLVGGIRPHLYCLPILKRKTHQEELIRVAISGNEKFFLGTDSAPHEIALKENHCGCAGVFNTTYTIQILTQIFDNHNALKELEKFVSINGSKHYKLPINRRKISLFKQEKPIKFQQKLRNGDIEVKIYKPNFDIFWDIK

SEQ ID NO: 141693 - protein, 130 aa, Unknown
  Bacterial polypetide isolated from the Sargasso Sea
MPDRLTLIAPDDWHVHLRDGVMLDKVVAHTARLFRRAIVMPNLKPPVTTTAAADAYRERIRSACPDDLDFEPLMTAYLTDSTDPADLEQGFLSGVFTAAKLYPANATTNSAAGVTDLQTINEFSPACSAS

SEQ ID NO: 141694 - protein, 244 aa, Unknown
  Bacterial polypetide isolated from the Sargasso Sea
MTKELVIVRPDDWHLHLRDEDFLPITVNESAKSFARAIIMPNLVPPITKLTDAENYKRRILSALKPNLSFDPLMTLYLTEETDPKEVKEGFLSGQISAVKLYPAGATTNSQSGVRNFEKIKPVLEIMAEIGCPLCIHGEVTDNNIDIFDREKAFIDSVLTKIRTDNPTLKVIMEHITTKDAVDYVLSGNENLAATVTTHHLSLNRNDLLVSGIKPHFYCLPVVKRETHRLALVEAVVAGSPNFF

SEQ ID NO: 141695 - protein, 430 aa, Unknown
  Bacterial polypetide isolated from the Sargasso Sea
MPLKKLSKHTVLKAGTIIDPLNKQTYKADLWIKDGFIEGIGEFEAPRSAEIIDCKDRIITHGFCDLHVHFREPGREDKETLDTGSLSAMAGGFTRVCVMPNTNPPLDSPELINFIKEKAEKCPIHIHPIGAVTKAQNGKDITEMALMFKEGAVAFSDDGLPIQDGAVMRLALEYSTLIDVPVINHAEDECLRSEGVMHEGIISTHLGLPGNPDLAESAMVHRDLELAEFTGAKLHVPHVSSAKAVQHIQKMKRKNNNITAEVTPHHLFFNDQALRSYDTNLKVAPPIRTEFDRKALIKAVKDGTIDCIATDHAPHTIEDKETTFDCASFGMIGLESAFGVVNRVLVKESGMELIDLISLLTTNPRKIMGFDANLFSKGAMAEIAVIDPDHEWIFDKDHIHSKSGNSPFIGKSLKGKVELTISTNNIYKRQ

SEQ ID NO: 141696 - protein, 343 aa, Unknown
  Bacterial polypetide isolated from the Sargasso Sea
MADQLTITAPDDWHVHLRDEEMLEKVVMHTARCFRRAIVMPNLRPPVTSVDAARRYRERILSACPEGMAFTPLMTAYLTDNTDPDDLERGFQEGIYTAAKLYPANATTNSAAGVTDLAQITRVLSRMESIGMPLLIHGEVTDADIDVFDREAVFIERHLRSLRTRHPELKVVFEHITTEEAVDYVGSADRNLAATITPHHLQINRNAMFLGGLRSDFYCLPVVKREQHRLALRRAATSGDPRFFLGTDSAPHPRAGKETSCGCAGIFNAPHALESYAQIFAEEEAMHHLEAFASLNGPAFYGLPVNKDTVTLEKIAVHVPQLVNGLVPFHAGETLPWRLQPCT

SEQ ID NO: 141697 - protein, 343 aa, Unknown
  Bacterial polypetide isolated from the Sargasso Sea
MAEQLTITAPDDWHVHLRDEEMLERVVAYTARCFRRAIVMPNLRPPVTTVDAARLYRDRILSACPEGVAFTPLMTAYLTDNSDPGDLERGFQEGVYTAAKLYPANATTNSAAGVTDLDQIGNVLSRMEAIGMPLLIHGEVTDADVDVFDRESVFIERHLKVLRTRHPELKVVFEHITTEQAVDYVGSSDRNLAATITPHHLQINRNAMFLGGLRSDFYCLPVAKRERHRLALRRAATSGDQRFFLGTDSAPHPRAGKETSCGCAGIFNAPFALESYAQVFAEEKAMHHLDGFASLHGPAFYGLPVNNDTVTLEKVAVDVPELVNGLVPFHAGETLPWRLQPCM

SEQ ID NO: 141698 - protein, 287 aa, Unknown
  Bacterial polypetide isolated from the Sargasso Sea
IKNLPKRLILQHVEILDPLKEKVFKGNVLLVNGKIAEVGKFDQPADVKSIDCKGLTLTHGFCDLHVHFREPGDEDKETLESGSMAALSGGFTRVCTMPNTSPPIDSPESVNFIIEKSKEYPIHIHPIGAVTKGQKGKEISEMGLMNQAGAVAFSDDGLPIQNGLIMRKALEYSKMLNVPVINHAEDDCLRCDGVMNEGVISNRLGLPGNPSVSESTMVFRDLKLADMTGAKLHVPHVSTAASVEHIKEMKGSYDKISAEVTPHHLFFNDEALLNYNTNLKVAPPIRK

SEQ ID NO: 141699 - protein, 421 aa, Unknown
  Bacterial polypetide isolated from the Sargasso Sea
MPKKLLLQGGAVYDPFLDKSKKANILIENNKISAMGSKIKDNDATKINCKGLVITHGFCDLHVHFREPGQEHKETLKTGSLAALAGGFTRVCVMPNTTPPLDSPESIKFITDKSANCPIFIHPIGAVSKSQKGEELTEVQGMVKEGAVAISDDGLPIADSQVMRLALEYASMFNIPVINHAEDECLRNDGVMNEGEASTRLGLSGNPSLSESIMIQRDLELANLIKTKIHVPHVSSSSGVSHIKRMKKINPKISAEVTPHHLYFNDNALSGYNTNFKVGPPIRSEKDRKALIKGLKDGTIDCIATDHAPHTIEEKEASFDMAPFGMIGLESCFGVVNKVLDLPLKEIIKLLTINPRNIMNFNTNLFKRGASAEITIIDPDHEWIFSEENIYSKSKNSPFIGEKLKGKIHYTLSKGFLANFH

SEQ ID NO: 141700 - protein, 276 aa, Unknown
  Bacterial polypetide isolated from the Sargasso Sea
MIEIPGFIDLHTHTRYPDNDKFPFIDIDDSAINGGFSTILAMPNSEIPIDSIKNLRIAQEIDKKLKTKVHRVGSLTKNLEGKELVNYKEFVENGITIFSDDGKSLINDHLADEAFKQISKLGGAVFQHCEKSCHSKPGDIAPPNSNSDLILINNDEELEVLERDLSLSEKYGTRYHAQHLSTFESVELIKKAKQEGLPVTAEVTPHHILLNNENLDTNNGLFKMYPPLRTEKDREGLVEGLQSEIIDVIATDHAPHKAETKNVPFKDANRGVVGLN

SEQ ID NO: 141701 - protein, 352 aa, Unknown
  Bacterial polypetide isolated from the Sargasso Sea
MIEIESFIDLHTHTRYPDNNNFPAVDIEFAAINGGYSDILAMPNSEIVIDNIKNLNKARAMDNKLNINVHRVGALTKNLEGKELVNYKEFIENGVFIFSDDGKSLIDNNLADEAFKLISSLNAAIFQHCESSCHSEPGDIAAPNDDETLITIDEAEESEVLLRDIELVAKYGTRYHAQHLSSKKCVDLIKEAKENNLPITSEVTPHHILENNENLDTTNGLFKMYPPIRTEEDRLSLIDGLLSNVIDAIATDHAPHPENTKTVDFKSAARGVVGLESAFPMLYSSGILSLEEIKRFMIENPRKILSEAGYEVKKSQINIWQPCDKEFTTKSKFNNSIFEKRNTKIEKVSQNV

SEQ ID NO: 141702 - protein, 265 aa, Unknown
  Bacterial polypetide isolated from the Sargasso Sea
MRALALSAVLLVASIIGMPAEAKEWQETQSWNTHFTEHKTQGVVVLWNENKQQGYTNDLKRANQAFLPASTFKIPNSLIALDLGVVKDEHQVFKWDGQTRDIAAWNRDHDLITAMKYSVVPVYQEFARKIGQARMNKMLHAFDYGNEDISGNLDSFWLDGGIRISAIQQIEFLRKLYHNKLHVSERSQRIVKQAMLTEANADYIIRAKTGYSVRIEPKIGWWVGWVELDDNVWFFATNMDMPTSDGLGLRQTITKEVLKQEKIIP

SEQ ID NO: 141703 - protein, 265 aa, Unknown
  Bacterial polypetide isolated from the Sargasso Sea
MRALALSAVLVVASIIGMPAEAKEWQETQSWNTHFTENKTQGVVVLWNENKQQGYTNDLKRANQAFLPASTFKIPNSLIALDLGVVKDEHQVFKWDGQTRDIAAWNRDHDLITAMKYSVVPVYQEFARKIGQARMNKMLHAFDYGNEDISGNLDSFWLDGGIRISAIQQIEFLRKLYHNKLHVSERSQRIVKQAMLTEANADYIIRAKTGYSVRIEPKIGWWVGWVELDDNVWFFATNMDMPTSDGLGLRQTITKEVLKQEKIIP

SEQ ID NO: 141704 - protein, 265 aa, Unknown
  Bacterial polypetide isolated from the Sargasso Sea
MRVLALSAVFLVASIIGMPAVAKEWQENKSWNAHFTEHKSQGVVALWNENKQQGFTNNLKRANQAFLPASTFKIPNSLIALDLGVVKDEHQVFKWDGQTRDIATWNRDHNLITAMKYSVVPVYQEFARQIGEARMSKMLHAFDYGNEDISGNVDSFWLDGGIRISATEQISFLRKLYHNKLHVSERSQRIVKQAMLTEANGDYIIRAKTGYSTRIEPKIGWWVGWVELDDNVWFFAMNMDMPTSDGLGLRQAITKEVLKQEKIIP

SEQ ID NO: 141705 - protein, 318 aa, Unknown
  Bacterial polypetide isolated from the Sargasso Sea
VGDKKNWPIQRGFDRFYGTIHGAGSFFDPNTLVRDNTFISPYADPSYKPDSYYYTDAIADHAVRFIHEHDTKKPFFMYVAFTAAHWPMHAKEKDLEKYNGHYKEGYSTVRATRYQKMLQHGLVTKDSTTLWPLEEQWGEHGEYWPWDERNMEVYAAMVDSMDQGIGKIVQALEATNQFNNTLVCYMQDNGGCAEGMGRRNIGKPRASTPPLPPMKADTLQVDMIPKQTRDGYPVRQGKGVLAGPADTYIGYGQAWATVSNTPFRKYKHWVHEGGIATPLIVHWPSGIVDPGRMEETPSHLIDIMATAIDVADADYPKN

SEQ ID NO: 141706 - protein, 169 aa, Unknown
  Bacterial polypetide isolated from the Sargasso Sea
MTPSQNWDLLWHSVKLACMNKGGAAYGLIEDGAIAVQDGTIAWTGSASELPGPMETLAREVRDGEGMCITPGLVDSHTHLVYAGNRAREFEMRLEGASYEELAKAGGGILSTVQATRNATEEALFEASKPRLMSLLEEGVTTVEIKSGYGLETETECRMLRVARKLESE

SEQ ID NO: 141707 - protein, 98 aa, Unknown
  Bacterial polypetide isolated from the Sargasso Sea
MHSTSKQLWRDVQVFDGLAQLDEAMNLLVEDGCIAGLWPSRTFDEALAQGAVEAGRGGVMTPGLVDCHTHLVYAGDRAGEFEQRLEGVSYETIARNGG

SEQ ID NO: 141708 - protein, 243 aa, Unknown
  Bacterial polypetide isolated from the Sargasso Sea
MGTLKLFNIGNMVTYSVNENSMISSKGMEILISDGKIIEVGSKVSNADQLIDCENKLVTPGFVDCHTHPVFLDGRENEFEMRLKGLSYEEIAKNGGGINNSVSSVRNSSEAELYNQVISRMDKFLKLGTTTIEAKSGYGLNTESELKSLKVLHEVKLNHQIDIVPTFMGAHAVPKEYNGDVDSYVDLICDSMIPQVAEQGIAIFNDVFCEKGYFNLDQSKRILKKGLEYGLLPRIHSDEFNNL

SEQ ID NO: 141709 - protein, 163 aa, Unknown
  Bacterial polypetide isolated from the Sargasso Sea
MGNSKTNQTIFTNGKIVPMSGNSDDFEIIEDAVIVSDGDIIAWVGPEKNIPQKFKNFEEFNVKGKLITPGFIDCHTHLVFGGNRSTEFNMRLNGKSYEEIAKAGGGIASTMKSTRSATFDELLKSSLTRLDDMIRNGVTTVEIKSGYGLDIETRMFDASCARR

SEQ ID NO: 141710 - protein, 276 aa, Unknown
  Bacterial polypetide isolated from the Sargasso Sea
MQQFFPDDVIWRNVRLATMDPERGTPYGLVDGHALIVRQGKIRDIVPESSLYLTHDNTFDMQGRLITPGLIDCHTHLVFGGNRAGEWEQRLNGVSYQQISAQGGGINATVSATRSATDEQLLHVAHQRMEQLIKEGVTLLEIKSGYGLDLPTEEKILRVVAALAAENIVEISPTLLAAHATPTEFRDDPDGYITLVCETILPQLWEQGLFETVDLFCESVGFSLAQSERVFQAAQALGIPIKGHVEQLSLLGGAQLVSRYHGLSADHIEYLDEAGV

SEQ ID NO: 141711 - protein, 212 aa, Unknown
  Bacterial polypetide isolated from the Sargasso Sea
MVLEEGLEIIVRHGKIIEIGKNLNYADQIYDCENSLVTPGFVDCHTHPVFFNDRSNEFEMRAAGIIYEQIAANGGGINNSVKSLRDSDYNELKQRVIHRMNNFLKLGTTTLEAKSGYGLDLYSELKSLAILDEVNSEHRVDIIPTFMGAHAVPKEYDNKPDDYVDHLCKVIIPAVAKQGIAKYNDVFCEKRILRFTSIRKDFIDWFRLWADS

SEQ ID NO: 141712 - protein, 130 aa, Unknown
  Bacterial polypetide isolated from the Sargasso Sea
FYTILADGDDNNDPVVDTARAILDGHIVLSRLNAQMGIYPAVDIPHSISRVMDDLISADHLEASKLFRKHISSYIENKDLLLMGGYTQGQDKDLDDAISMWPKLIEFISQANIKKASYDSAKTELLKLYQ

SEQ ID NO: 141713 - protein, 176 aa, Unknown
  Bacterial polypetide isolated from the Sargasso Sea
MQCDLLISDINIASMISNSSYGIIENGAIAVTDSTIVWIGKGDLVPELNAKKTLSLPGKWASPALIDCHTHIVFAGNRAWEFEDRLKGKSYQEISKSGGGIISTVNQTRKSSSKDLLKLAKNRLNELQSEGVGTVEIKSGYGLDLATEKKMLEVAKKLENEQISIKKTFLGAHALP

SEQ ID NO: 141714 - protein, 263 aa, Unknown
  Bacterial polypetide isolated from the Sargasso Sea
SGYGLDIETECLMLRVARRLETIRPIRVKTSFLGSHGISPEYKSNPNKYIEDICLPALNKAHEEGLVDAVDGFCETVALNTEQLKLVFELAKKLNLPVKLHAEQLSHSGGVKLATSYNAISVDHLEYANEDDVKLMSGAGSIAVILPGAYYTLNETQKPPIELFRKYNVPMAIATDCNPGSSPLTSILLTMNMSSTLFKVTPLEALSGVTKNAAKALSLNDRGQIKEGMISDFVIWDLEHPAEFSYRIGFNPIYKRIFGGSFD

SEQ ID NO: 141715 - protein, 150 aa, Unknown
  Bacterial polypetide isolated from the Sargasso Sea
AKSVDHIEYLDEAGVKALSESGTCAVLLPGAFYFLRETQKPPIDLLRQYGVPMVLASDFNPGSSPICSTLLMLNMGCTLFRLTPEEALAGLTLNAAKALGIEESVGSLVVGKQADFCLWDIATPAQLAYSYGVNPCKDVVKNGKLVHQHT

SEQ ID NO: 141716 - protein, 262 aa, Unknown
  Bacterial polypetide isolated from the Sargasso Sea
INSTNGVRRSTETELISRVRDRMDKFLALGTTTIECKSGYGLDQESEVKSLKVIHEVNKSHSIDMVATFMGAHAFPEEFKNEHDSYVDLICEEIIPAVAKQGIAEFNDVFCEDGYFNEEQTRKIILRGKEYGLIPRMHADEFTDSGSAVIAGDVRAISADHLMAVSNEGIEALSENNVIATLLPGTTFFLGKKEYAPYKKLKNAGIDVALATDYNPGSSNIQSMSFIVSLACIYLKMNILDAIKASTYIAAKSLMRDKDIGS

SEQ ID NO: 141717 - protein, 118 aa, Unknown
  Bacterial polypetide isolated from the Sargasso Sea
MRPKDVPCLHTCTVPCCAATPPTYPQDVPCCAQGGAWVTPGLIDCHTHLIYAGQRASEWTMKLEGATWEQLIERGGGIVSTVQTTRAASREALLRECGPRLEQLMAEGVTTMRSSEGH

SEQ ID NO: 141718 - protein, 315 aa, Unknown
  Bacterial polypetide isolated from the Sargasso Sea
MLGLYIKDGKITSYGSMPVAQDIIKKNILLHDVGNRLVMPGFVDCHTHLIYAGQRDKEFIRRLSGYSYEDIAKMGGGIQSTVKQTKLACDNDLLSLATARLDELLSQGITSLEVKTGYGVYVKEEIRHLNLLNIISQQSPQEIVKTCLALHAQPKDIKVSDYISQVTSELVPEVAKLNLASYVDMFLEKNYFSYESCNKVAQKADELGLSIRVHADEFSHSGGAQLAAKWKAASADHLQYTSECDFKLLAKNQTTAVLLPGTSLFTNIPYTNASPIRKARCAIAVASDHNPGSSPFTNISQLASLASLYCGLTYP

SEQ ID NO: 141719 - protein, 187 aa, Unknown
  Bacterial polypetide isolated from the Sargasso Sea
MDPSISAPYGAITNAAIAVKDGKIAWLGPRSELPAFDVLSIPVYRGKGGWITPGLIDAHTHLVFAGNRANEFELRLKGATYEEIARAGGGIISTVNACREADEAELFDLGRQRLNALAKEGVTTVEIKSGYGLDTETELKILRVARELGQHHHVDVKTTFLGAHAVPPEFKDNSDGYVDLIINKMLP

SEQ ID NO: 141720 - protein, 284 aa, Unknown
  Bacterial polypetide isolated from the Sargasso Sea
MIDACNGFLLNQFGRSFGLSALYKVLMLVLMLVSLSWRSGKTFVLFPALFILLLPGAFYSWLHLGGSLAPDLGLILKLISPLIAFYYLLSLSQLDKHFALKFLHQVFVVNYLIVLVNFIFGALGYGYTSYLPQQHLSQVDLGSKGFFNAANELSVVLLVLSAWLLQYYWQQHKLIFLAVAATSIWCASLMLTKTGMLGTLILVLFIPLMPWFIRLNWNRLALATLLLVVVAALVIWQAPLLLGQLGLAEKLQHVYQQQGLLGVLLSSRDKYAAEIWQLVSFTTA

SEQ ID NO: 141721 - protein, 417 aa, Unknown
  Bacterial polypetide isolated from the Sargasso Sea
MVLPSGAFTLKNVTVPAAIFGQRGDLISTDIGIVDGQISAPGGKVIEMAEAMVLPAFVDCHTHLDKGHILPRAQNPDGTFVGALTSVREDHLNWTSKDVRTRADFSIRCAYAHGTRAIRTHVDSMNGQYKRSWPVFAGLREKWANKVELQMTSLITCESYGMPEYAEIAATVAHFDGVLGMVSFPMPDLKKVLLSHFETAGNLGLALDFHTDETMDPSSETLRVIAECVMETGFCGRVLVGHCCSLSQQEENLAMDTLDLVAKAKIDVVSLPMCNLYLQDRHAGRTPRGRGVTLVHEMKARGINVSFASDNTRDPFYAYGDMDMLEVMRMATRIAHLDHSDFDWVKSFSQTPAEVCDFPDLSLAHGTTADLVIFNARNWNELYSRPQSDRIVLRNGIAIDRKLPSYSELDALLEAYK

SEQ ID NO: 141722 - protein, 314 aa, Unknown
  Bacterial polypetide isolated from the Sargasso Sea
MGTLKLFNIGNMVTYSMNESSMISSKGMEILISDGKIIEIGPKVGDADQLFDCENKLVTPGFVDCHTHPVFLDGRENEFEMRLKGFSYEEIANEGGGIKNSVKSVRNSSEVELYNRVISRMDKFLKLGTTTIEAKSGYGLDINSELKSLKVIHEVNLAHQIDILPTFMGAHAVPNEYADDIDSYVDLICDSMIPQVAEQGIAIFNDVFCEKGYFNLKQSERILKKGLDYGLLPRIHSDEFNNLGASKLAGKLNLISADHLMKIEKDDIEIMADSNTKAVLLPGTTFFLGHSNYAPYHKLKEAGIEVAIASDYNP

SEQ ID NO: 141723 - protein, 179 aa, Unknown
  Bacterial polypetide isolated from the Sargasso Sea
MGRLFERARQLDIPVKLHAEQLSNIGGTKLAASYNALSVDHVEYADKTDIAAMAKAGSVAVLLPGAFYTLHETQKPLVEAFRSESVPMAVATDWNPGSSPMGSLLLAMNMSCTLFGLTPVEALAGTTRNAARALGLKDCGIVAPGKRADLAIWDVLEPAELSYRFGVNPLNRRIFGGRL

SEQ ID NO: 141724 - protein, 178 aa, Unknown
  Bacterial polypetide isolated from the Sargasso Sea
MLTDANIATMDSNIDAPYGAIENAALAIKNGKIVWLGKQADLPNFDVLATPILSVKGQWLTPGLIDCHTHLVFAGSRAQEFEQRLQGVSYQQIAAQGGGIASTVKATREADHEQLFVAAKERLNALLAEGVTTVEIKSGYGLDIDNEKKILEVARLLNQHHPIEVVNTFLGAHALPWS

SEQ ID NO: 141725 - protein, 139 aa, Unknown
  Bacterial polypetide isolated from the Sargasso Sea
EENGVTAMAESGTVANLLPGAFYFLLETKLPPLDLFRKHDIPVALATDCNPGSSPAESLLLMMNMGCTLFRMTPEEALDGVTRNAAKALGLDDRGVLETGKKADLVIWDVEHPAELSYRFGVNPCNTVVQSGKIVRQIS

SEQ ID NO: 141726 - protein, 269 aa, Unknown
  Bacterial polypetide isolated from the Sargasso Sea
SATFDELLKSSLTRLDDMIRNGVTTVEIKSGYGLDIETECLMLRVARRLETIRPIRVKTSFLGSHGISSEYKSKPDKYIEDICLPALTKAHEEGLVDAVDGFCETVALNTEQLKLVFELAKKLDLPVKLHAEQLSHSGGVKLATSYNAISVDHLEYANEDDVKLMSGAGSIAVILPGAYYTLNETQKPPIELFRKYNVPMAIATDCNPGSSPLTSILLTMNMSSTLFKVTPLEALSGVTKNAAKALSLNDRGQIKEGMISDFVIWDLEH

SEQ ID NO: 141727 - protein, 266 aa, Unknown
  Bacterial polypetide isolated from the Sargasso Sea
GVTTLEVKSGYGLCVEDEEKMLLAARSLCERLPVSVHTTFLGAHAIPEDFHERSDDYIQLVCEEMLPSVARQGLADSVDAFCENIAFSCQQVRRVFEKARELGLPVRLHADQLTNGGGAALAAEFGALSADHLEYTDEAGVKALAESGTVAVLLPGAFYFLKEKQCPPVELFRKHQVPMALATDYNPGSSPVDSLLLVLNMACVMFGLTPREAVAGVTIHAAKALGLSDRGVLKPGYQADFAVFDVETLAHLCYPIGVAPARLVVQ

SEQ ID NO: 141728 - protein, 419 aa, Unknown
  Bacterial polypetide isolated from the Sargasso Sea
MGYQYDTLIYNVRIASMQDNKLPYGELPPHAIAIKDGKIAALLPCDDSLDDVFEQAKSVIDATTLIPQNEGSTPKPPWLLPGFIDCHTHLVYGGNRAEEFEMRLQGASYVDIAQRGGGIKGTVEKTRCSDENTLLHTAIKRAKRLCEEGVTTIEVKSGYGLDLDTEVRMLRVAKSLEQHLPVSIKTTYLGAHALPNEFADDSEGYIDFICNEALPHIASQNLADAVDVFCETIGFSTSQTERVFSCAQQHGLPIKAHVEQLSDSKGAVLAAKYGALSVDHIEYLADSDIPLLAQSGTVAVLLPGAFYYLSEVQKPPVDALRAHNVPMALATDFNPGSSPLASILTAINMGCVLFQLTPEEALRGATAHAASALGLHDRGVIEAGKLADLTLWDIETPAELAYCINGHRPIAVFKEGKHV

SEQ ID NO: 141729 - protein, 301 aa, Unknown
  Bacterial polypetide isolated from the Sargasso Sea
MPTVSATRSATDEQLLHVAHQRMEQLIKEGVTLLEIKSGYGLDLPTEEKILRVVAALAAENIVEISPTLLAAHATPTEFRDDPDGYITLVCETILPQLWEQGLFETVDLFCESVGFNLAQSERVFQAAQALGIPIKGHVEQLSLLGGAQLVSRYHGLSADHIEYLDEAGVAAMSQSGTVGVLLPGAFYFLKEQQRPPVALLRQYQVPMAVATDFNPGTSPFISLHWAMNMACVQFGLTPEEAWAGVTRHAARALGRHATHGQLKAGFVADFVVWDATLPVEILYEPGRNPLYQRVFKGQIA

SEQ ID NO: 141730 - protein, 293 aa, Unknown
  Bacterial polypetide isolated from the Sargasso Sea
FARLPELRDVKSCDVAIVGVPFDSGTSYRPGARFGPQSIRQASRHLRTNYHPSYDVEPFKVQQVADAGDISCNPFNIDEAIKQIEVGATDLLNKVGGIISLGGDHTIAVPLLRAINKKNKGPVSLVHFDAHLDTWDTYFGAPYTHGTPFRRAREENLFLDDASMHVGIRGPLYSREDIKNDESFGFKIIHCDEFQTEGIDKIVERIRNRVGDNALYLSIDIDVLDPAFAPGTGTPEIAGMTTREIVNVIRGLSGLNLVSADVVEVAPAYDHAEVTSLAAATIVYELTNLFAKA

SEQ ID NO: 141731 - protein, 130 aa, Unknown
  Bacterial polypetide isolated from the Sargasso Sea
MHVGIRGPLYSRDDIKNDESFGFKIIHCDEFQTEGTDKIAERIKKRVGDNALYLSIDIDVLDPAFAPGTGTPEIAGMTTREMVNVLRGLSGLNLISADVVEVAPAYDHAEVTSLAAATIVYELTNLFAKT

SEQ ID NO: 141732 - protein, 221 aa, Unknown
  Bacterial polypetide isolated from the Sargasso Sea
NPFNIDEAIKQIEVGATDLLNKVGGIISLGGDHTIAVPLLRAANKKNNGPVSLVHFDAHLDTWDTYFGAPYTHGTPFRRAREENLFLDDASMHVGIRGPLYSRDDIKNDESFGFKIIHCDEFQTEGIDKIVERIKNRVGDNALYLSIDIDVLDPAFAPGTGTPEIAGMTTREMVNVLRGLSGLNLISADVVEVAPAYDHAEVTSLAAATIVYELTNLFAKS

SEQ ID NO: 141733 - protein, 135 aa, Unknown
  Bacterial polypetide isolated from the Sargasso Sea
LDDASMHVGIRGPLYSREDIKNDESFGFKIIHCDEFQTEGIDKIVDRIRNRVGDNALYLSIDIDVLDPAFAPGTGTPEIAGMTTREIVNVIRGLSGLNLVSADVVEVAPAYDHAEVTSLAAATIVYELTNLFAKA

SEQ ID NO: 141734 - protein, 302 aa, Unknown
  Bacterial polypetide isolated from the Sargasso Sea
VPRYAGPSTFARLPELRDVESCDVAIVGVPFDSGTSYRPGARFGPQSIRQASRHLRTNYHPSYDVEPFKVQQVADAGDIACNPFNIDEAIKQIEVGATDILNKVGGIISLGGDHTIAVPLLRAINKKNKGPVSLVHFDAHLDTWDTYFGAPYTHGTPFRRAREENLFLDDASMHVGIRGPLYSREDIKNDESFGFKIIHCDEFQTEGIDKIVERIRNRVGDNALYLSIDIDVLDPAFAPGTGTPEIAGMTTREIVNVIRGLSGLNLVSADVVEVAPAYDHAEVTSLAAATIVYKLTNLFAKA

SEQ ID NO: 141735 - protein, 122 aa, Unknown
  Bacterial polypetide isolated from the Sargasso Sea
LYSREDIKNDESFWFKIIHCDEFQTEGINKIVERIRNRVGDNALYLSIDIDVLDPAFAPGTGTPEIAGMTTREIVNVIRGLSGLNLVSADVVEVAPAYDHAEVTSLAAATIVYELTNLFAKA

SEQ ID NO: 141736 - protein, 211 aa, Unknown
  Bacterial polypetide isolated from the Sargasso Sea
QIEVGATDLLNKVGGIISLGGDHTIAVPLLRAINKKNKGPVSLVHFDAHLDTWDTYFGAPYTHGTPFRRAREENLFLDDASMHVGIRGPLYSREDIKNDESFGFKIIHCDEFQTEGIDKIVERIRNRVGDNALYLSIDIDVLDPAFAPGTGTPEIAGMTTREIVNVIRGLSGLNLVSADVVEVAPAYDHAEVTSLAAATIVYELTNLFAKA

SEQ ID NO: 141737 - protein, 210 aa, Unknown
  Bacterial polypetide isolated from the Sargasso Sea
MQGLYWWGIPTLFRCPYNTDTKGCDIALVGVPHSTGNGTTERDQHLGPRAVRNISALGRRAHLKFGLSPWDICDIRDLGDVPLPEANNNERCIEHITDFYTRIAETNTRPLSVGGDHSITGGIIQAIASPNSKLTGGEKAVLLHFDAHTDTFHQLDHFLGAIKSAAHWASYLVRDGFVDASSSVQIGIRGNPRTLDWLDSSYELGYEVIT

SEQ ID NO: 141738 - protein, 111 aa, Unknown
  Bacterial polypetide isolated from the Sargasso Sea
SFGFKIIHCDEFQTEGTNKIAERIKKRVGDNPLYLSIDIDVLDPAFAPGTGTPEIAGMTSREIVNVLRGLSGLNLVSADVVEVAPAYDHAEVTSLAAATIVYELTNLFAKI

SEQ ID NO: 141739 - protein, 132 aa, Unknown
  Bacterial polypetide isolated from the Sargasso Sea
MHVGIRGPLYSKDDIKNDESFGFKIIHCDEFQSEGTDKIADRIKKRVGNNALYLSIDIDVLDPAFAPGTGTPEIAGMTTREIVNVLRGLSGLNLISADVVEVAPAYDHAEVTSLAAATIVFELTNLFAKKKL

SEQ ID NO: 141740 - protein, 178 aa, Unknown
  Bacterial polypetide isolated from the Sargasso Sea
NKKNKGPVSLVHFDAHLDTWDTYFGAPYTHGTPFRRAREENLFLDDASMHVGIRGPLYSREDIKNDESFGFKIIHCDEFQTEGIDKIVERIRNRVGDNALYLSIDIDVLDPAFAPGTGTPEIAGMTTREIVNVIRGLSGLNLISADVVEVAPAYDHAEVTSLAAATIVYELTNLFAKA

SEQ ID NO: 141741 - protein, 262 aa, Unknown
  Bacterial polypetide isolated from the Sargasso Sea
ARFGPQSIRQASRHLRTNYHPNYDVEPFKVQQVADAGDITCNPFNIDEAIKQIEVGATDLLNKVGGIISLGGDHTIAVPLLRAANKKNNGPVSLVHFDAHLDTWDTYFGAPYTHGTPFRRAREENLFLDDASMHVGIRGPLYSRDDIKNDESFGFKIIHCDEFQTEGIDKIVERIKNRVGDNALYLSIDIDVLDPAFAPGTGTPEIAGMTTREMVNVLRGLSGLNLISADVVEVAPAYDHAEVTSLAAATIVYELTNLFAKS

SEQ ID NO: 141742 - protein, 266 aa, Unknown
  Bacterial polypetide isolated from the Sargasso Sea
FRPGARFGPQSIRQASRHLRTNYHPNYDIEPFKVQQVADAGDIVCNPFNINEAIQQIEKGALDLLNKVGGIISMGGDHTIAFPLLKAVNKINKGPVALVHFDAHLDTWDTYFGAPYTHGTPFRRAREENLFLDNASMHVGIRGPLYSREDLKNDAEFGFKIIHCDEFQTEGIDKIVKRIRDRVGNNPLYLSIDVDVLDPAFAPGTGTPEVAGMTTREIVNVIRGLSGLNLISADVVEVAPAYDHAEVTSLAAATIVYELTNLFAKS

SEQ ID NO: 141743 - protein, 300 aa, Unknown
  Bacterial polypetide isolated from the Sargasso Sea
EKNKNPKQPVSGTKVPRYAGPSTFARLPELRDVESCDVAIVGVPFDSGTSYRPGARFGPQSIRQASRHLRTNYHPSYDVEPFKVQQVADAGDIACNPFNIDEAIKQIEVGATDLLNKVGGIISLGGDHTIAVPLLRAANKKNNGPVSLVHFDAHLDTWDTYFGAPYTHGTPFRRAREENLFLDDASMHVGIRGPLYSRDDIKNDESFGFKIIHCDEFQTEGTDKIAERIKKRVGDNALYLSIDIDVLDPAFAPGTGTPEIAGMTTREMVNVLRGLSGLNLISADVVEVAPAYDHAEVTSL

SEQ ID NO: 141744 - protein, 212 aa, Unknown
  Bacterial polypetide isolated from the Sargasso Sea
KQIEVGATDLLNKVGGIISLGGDHTIAVPLLRAINKKNKGPVSLVHFDAHLDTWDTYFGAPYTHGTPFRRAREENLFLDDASMHVGIRGPLYSREDIKNDESFGFKIIHCDEFQTEGIDKIVERIRSRVGDNALYLSIDIDVLDPAFAPGTGTPEIAGMTTREIVNVIRGLSGLNLVSADVVEVAPAYDHAEVTSLAAATIVYELTNLFAKA

SEQ ID NO: 141745 - protein, 102 aa, Unknown
  Bacterial polypetide isolated from the Sargasso Sea
DEFQTEGTDKIAERIRKRVGDNALYLSIDIDVLDPAFAPGTGTPEIAGMTTREMVNVIRGLSGLNLISADVVEVAPAYDHAEVTSLAAATIVFELTNLFAKK

SEQ ID NO: 141746 - protein, 120 aa, Unknown
  Bacterial polypetide isolated from the Sargasso Sea
SRDDIKNDESFGFKIIHCDEFQTEGTDKIAERIKKRVGNNALYLSIDIDVLDPAFAPGTGTPEIAGMTTREMVNVLRGLSGLNLISADVVEVAPAYDHAEVTSLAAATIVYELTNLFAKS

SEQ ID NO: 141747 - protein, 71 aa, Unknown
  Bacterial polypetide isolated from the Sargasso Sea
VLDPAFAPGTGTPEIAGMTTREMVNVLRGLSGLNLISADVVEVAPAYDHAEVTSLAAATIVYELTNLFAKS

SEQ ID NO: 141748 - protein, 99 aa, Unknown
  Bacterial polypetide isolated from the Sargasso Sea
STEGIDKIVDRIKKRVGNNALYLSIDIDVLDPAFAPGTGTPEIAGMTTREIVNVIRGLSGMNLISADVVEVAPAYDHAEVTSLAAATIIYELTNLFAKK

SEQ ID NO: 141749 - protein, 83 aa, Unknown
  Bacterial polypetide isolated from the Sargasso Sea
RDNPLYLSIDIDVLDPAFAPGTGTPEIAGMSTREMVNVIRGLSGLNLISADVVEVAPAYDHAEVTSLAAATIVYELTNLFAKS

SEQ ID NO: 141750 - protein, 265 aa, Unknown
  Bacterial polypetide isolated from the Sargasso Sea
MPDHPDGIAAPRFTGIPTFMRVPFATAIKNLDIAMVGVPYDGGVTNRPGARHGPREIRNQSSFIRGIHHVSKINPFEICRISDVGDVPFRSSHNPEIAMGEIEDFFREIHQAGVIPLTAGGDHSITYPIFCAIATPDAPIGMVHIDAHTDTWDAWQGNKFNHGAPFRRAVESGVLDPKRTVQIGIRGPQNVFDGWDFSIKSGMRVIFMEEFTELGVDAVIAEAQSVVGNGPTYISFDVDGLDPVYAPGTGTPEIGGITTVEAQRL

SEQ ID NO: 141751 - protein, 74 aa, Unknown
  Bacterial polypetide isolated from the Sargasso Sea
DIDVLDPAFAPGTGTPEIAGMTTREIVNVIRGLSGLNLISADVVEVAPAYDHAEVTSLAAATIVYELTNLFAKA

SEQ ID NO: 141752 - protein, 217 aa, Unknown
  Bacterial polypetide isolated from the Sargasso Sea
LMKPSNKIEVGATDLLNKVGGIISLGGDHTIAVPLLRAANKKNNGPVSLVHFDAHLDTWDTYFGAPYTHGTPFRRAREENLFLDDASMHVGIRGPLYSRDDIKNDESFGFKIIHCDEFQTKGIDKIVERIKNRVGDNALYLSIDIDVLDPAFAPGTGTPEIAGMTTREMVNVLRGLSGLNLISADVVEVAPAYDHAEVTSLAAATIVYELTNLFAKS

SEQ ID NO: 141753 - protein, 196 aa, Unknown
  Bacterial polypetide isolated from the Sargasso Sea
IISLGGDHTIAVPLLRAANKKNNGPVALVHFDAHLDTWDTYFGAPYTHGTPFRRAREENLFLDEASMHVGIRGPLYSRDDLKNDESFGFKIIHCDEFQTEGTEQIAERIRKRVGDNALYLSIDIDVLDPAFAPGTGTPEIAGMTTREMVNVIRGLSGLNLISADVVEVAPAYDHAEVTSLAAATIVFELTNLFAKK

SEQ ID NO: 141754 - protein, 317 aa, Unknown
  Bacterial polypetide isolated from the Sargasso Sea
MKDKNKKPIQPVSGTKVPRYAGPSTFARLPELRDVESCDVAIVGVPFDSGTSYRPGARFGPQSIRQASRHLRTNYHPSYDVEPFKVQQVADAGDIACNPFNIDEAIKQIEVGATDLLNKVGGIISLGGDHTIAVPLLRAINKKNKGPVSLVHFDAHLDTWDTYFGAPYTHGTPFRRAREENLFLDDASMHVGIRGPLYSREDIKNDESFGFKIIHCDEFQTEGIDKIVERIRNRVGDNALYLSIDIDVLDPAFAPGTGTPEIAGMTTREIVNVIRGLSGLNLISADVVEVAPAYDHAEVTSLAAATIVYELTKFVAK

SEQ ID NO: 141755 - protein, 317 aa, Unknown
  Bacterial polypetide isolated from the Sargasso Sea
MTKSKKPIQPVSGTEVPRYAGPSTFARLPELRDVESCDVAIVGVPFDSGTSYRPGARFGPQSIRQASRHLRTNYHPNYDVEPFKVQQVADAGDITCNPFNIDEAIKQIEVGATDLLNKVGGIISLGGDHTIAVPLLRAANKKNNGPVSLVHFDAHLDTWDTYFGAPYTHGTPFRRAREENLFLDDASMHVGIRGPLYSRDDIKNDESFGFKIIHCDEFQTEGIDKIVERIKNRVGDNALYLSIDIDVLDPAFAPGTGTPEIAGMTTREMVNVLRGLSGLNLISADVVEVAPAYDHAEVTSLAAATIVYELTNLFAKS

SEQ ID NO: 141756 - protein, 324 aa, Unknown
  Bacterial polypetide isolated from the Sargasso Sea
MQKQPVVRGDGAIRRESPYGSSKENTYAGVVSFMRRLYTKELAGVDLAVTGVPLDIATTNRPGARLGPRAIRAASSQLGVLLPYPWGINPFDDYAVIDYGDCWLDVHNPSTVKETIVTHARTILDAGARMLTLGGDHYISYPLLVAHAEKYGRPLSLIHFDAHCDTWPDDQPDSLNHGSMFYKAIKDGLIDPAHSVQVGIRTWNDDFMGVSVLDAAWVHEHGVNATIARIVEIVGARPAYFTFDVDGLDPAFAPGTGTPVPGGLSSAQALSIIRGLTSVDLVGADVVEVAPAYDHADITALVAAHVASELICLFRHRARAARHR

SEQ ID NO: 141757 - protein, 319 aa, Unknown
  Bacterial polypetide isolated from the Sargasso Sea
MKKEKNKNPIQPVSGTKVPRFAGPSTFARLPELRDVESCDVAIVGIPFDAGTSYRPGARFGPQSIRQASRHLRTNYHPNYDVEPFKIQQVADAGDITCNPFNIDEAIKQIENGAYDLLQKTGGIISMGGDHTIAFPLLRAINKINKGPVALVHFDAHLDTWDTYFGAPYTHGTPFRRAREERLFLDDASMHVGIRGPLYSRDDIKNDESFGFKIIHCDDFQTEGIDKIVDRIKKRVGNNALYLSIDIDVLDPAFAPGTGTPEIAGMTTREIVNVIRGLSGMNLISADVVEVAPAYDHAEVTSLAAATIVYELTNLFAKK

SEQ ID NO: 141758 - protein, 319 aa, Unknown
  Bacterial polypetide isolated from the Sargasso Sea
MKKERNKDPIQPVSGTKVPRYAGPNTFARLPELRDVESCDVAIVGVPFDSGTSYRPGARFGPQSIRQASRHLRTNYHPNYDVEPFKVQQVADAGDIACNPFNIDEAIKQIEVGATDLLNKVGGIISLGGDHTIAVPLLRAANKKNNGPVSLVHFDAHLDTWDTYFGAPYTHGTPFRRAREENLFLDDASMHVGIRGPLYSRDDLKNDESFGFKIIHCDEFQTEGTDKIVERIRKRVGDNALYLSIDIDVLDPAFAPGTGTPEIAGMTTREMVNVIRGLSGLNLISADVVEVAPAYDHAEVTSLAAATIVFELTNLFAKK

SEQ ID NO: 141759 - protein, 319 aa, Unknown
  Bacterial polypetide isolated from the Sargasso Sea
MEKEKNKNPKQPVSGTKVPRYAGPSTFARLPELRDVDSCDVAIVGVPFDSGTSYRPGARFGPQSIRQASRHLRTNYHPSYDVEPFKVQQVADAGDIACNPFNIDEAIKQIEVGATNLLDKVGGIISLGGDHTIAVPLLRAVNKKNNGPVSLVHFDAHLDTWDTYFGAPYTHGTPFRRAREENLFLDDASMHVGIRGPLYSRDDIKNDESFGFKIIHCDEFQTEGTDKIAERIKKRVGDNALYLSIDIDVLDPAFAPGTGTPEIAGMTTREMVNVLRGLSGLNLISADVVEVAPAYDHAEVTSLAAATIVYELTNLFAKS

SEQ ID NO: 141760 - protein, 318 aa, Unknown
  Bacterial polypetide isolated from the Sargasso Sea
MKDKNKKPIQPVSGTKVPRYAGPSTFARLPELRDVESCDVAIVGVPFDSGTSYRPGARFGPQSIRQASRHLRTNYHPSYDVEPFKVQQVADAGDIACNPFNIDEAIKQIEVGATNILNKVGGIISLGGDHTIAVPLLRAINKKNKGPVSLVHFDAHLDTWDTYFGAPYTHGTPFRRAREENLFLDDASMHVGIRGPLYSREDIKNDESFGFKIIHCDEFQTEGIDKIVERIRNRVGDNALYLSIDIDVLDPAFAPGTGTPEIAGMTTREIVNVIRGLSGLNLVSADVVEVAPAYDHAEVTSLAAATIVYELTNLFAKA

SEQ ID NO: 141761 - protein, 318 aa, Unknown
  Bacterial polypetide isolated from the Sargasso Sea
MKDKNKKPIQPVSGTKVPRYAGPSTFARLPELRDVESCDVAIVGVPFDSGTSYRPGARFGPQSIRQASRHLRTNYHPSYDVEPFKVQQVADAGDIACNPFNIDEAIKQIEVGATDILNKVGGIISLGGDHTIAVPLLRAINKKNKGPVSLVHFDAHLDTWDTYFGAPYTHGTPFRRAREENLFLDDASMHVGIRGPLYSREDIKNDESFGFKIIHCDEFQTEGIDKIVERIRNRVGDNSLYMSIDIDVLDPAFAPGTGTPEIAGMTTREIVNVIRGLSGLNLVSADVVEVAPAYDHAEVTSLAAATIVYELTNLFAKA

SEQ ID NO: 141762 - protein, 205 aa, Unknown
  Bacterial polypetide isolated from the Sargasso Sea
TELLGKVGGIISLGGDHTIAVPLLRAINKKVKGPVSLVHFDAHLDTWDTYFGAPYTHGTPFRRAREENLFLDDASMHVGIRGPLYSRDDIKNDESFGFKIIHCDEFQTEGTDKIAERIKKRVGKNPLYLSIDIDVLDPAFAPGTGTPEIAGMTTRELVNVIRGLVGLNLVSADVVEVAPAYDHAEVTSLAAATIVYELTNLFAKT

SEQ ID NO: 141763 - protein, 317 aa, Unknown; identical to SEQ ID NO: 141755
  Bacterial polypetide isolated from the Sargasso Sea

SEQ ID NO: 141764 - protein, 299 aa, Unknown
  Bacterial polypetide isolated from the Sargasso Sea
FAGPSTFARLPELRDVKSCDVAIVGIPFDAGTSYRPGARFGPQSIRQASRHLRTNYHPSYDVEPFKVQQVADAGDIACNPFSIDEAIKQIEAGATDLLNKVGGIISLGGDHTIAVPLLRAINKKNKGPVSLVHFDAHLDTWDTYFGAPYTHGTPFRRAREEGLFLDDASMHVGIRGPLYSRDDIKNDESFGFKIIHCDEFQTEGTDKIAERIRKRVGDNPLYLSIDIDVLDPAFAPGTGTPEIAGMSTREMVNVIRGLSGLNLISADVVEVAPAYDHAEVTSLAAATIVYELTNLFAKS

SEQ ID NO: 141765 - protein, 322 aa, Unknown
  Bacterial polypetide isolated from the Sargasso Sea
MTKKTTFKSPVTKKDYVGNLEPRYAGIPTFMRTPMAESLEGVDIGLIGVPYDGGVTNRAGARHGPREIRNQSSLMRTIHHVNRESPFDIANIADLGDVSFSEPFNHQAVNHDIAEFFKLVKESGVIPLSAGGDHSVTYPIFKGIANDGPIGMIHVDAHTDTWGEIWGSKFHHGSPFRLAVEDGLLDPKRTVQIGIRGAQNFMDGIDFSLDSGMRVVFMEEFFEIGVKEVIKEALKVVGDGPTYISFDVDGLDPVFAPGTGTPEVGGITTVEAQTLLRGLKGLNLIGADVVEVAPPFDQTGNTALVGATMMYEILCLLADRFR

SEQ ID NO: 141766 - protein, 86 aa, Unknown
  Bacterial polypetide isolated from the Sargasso Sea
KRVGDNALYLSIDIDVLDPAFAPGTGTPEIAGMTTREMVNVIRGLSGLNLISADVVEVAPAYDHAEVTSLAAATIVFELTNLFAKK

SEQ ID NO: 141767 - protein, 288 aa, Unknown
  Bacterial polypetide isolated from the Sargasso Sea
ELRDVESCDVAIVGIPFDSGTSYRPGARFGPQSIRQASRHLRTNYHPSYDVEPFKVQQVADAGDIACNPFNIDEAIKQIEVGATDLLSKVGGIISLGGDHTIAVPLLRAANKKNNGPVSLVHFDAHLDTWDTYFGAPYTHGTPFRRAREENLFLDDASMHVGIRGPLYSRDDIKNDESFGFKIIHCDEFQTEGTDKIAERIKKRVGDNALYLSIDIDVLDPAFAPGTGTPEIAGMTTREMVNVLRGLSGLNLISADVVEVAPAYDHAEVTSLAAATIVYELTNLFAKS

SEQ ID NO: 141768 - protein, 98 aa, Unknown
  Bacterial polypetide isolated from the Sargasso Sea
EINNFAYNTLNQIEDFVEDNPIHLSFDVDVVDPFYIPSTGTPVGEGLNLESTGILLNNIMKYNLVSMDLTELNLAIGNNEDKVKSLNNVRHLMKGIVY

SEQ ID NO: 141769 - protein, 181 aa, Unknown
  Bacterial polypetide isolated from the Sargasso Sea
MKDAEKQVDRAFTRDSYTGQSFENAFGGATSFLRLKYTKELNNVDLAITGIPFDQAVTNRPGSRFGPRAIREASTLQPFDPIYGWEDFDPMSEIFMVDYGDIAYDYAKVSEFPQILEDHVSTILGKCSGCISLGGDHFISYPILKAYSKKFGKPLALLQFDAHSDTWPDDDMHRIDHGTMF

SEQ ID NO: 141770 - protein, 154 aa, Unknown
  Bacterial polypetide isolated from the Sargasso Sea
ADDDFSRVDHGTMFYKAVKSGIIDPATSVQVGIRTTNEDNLGVPTIDAPTVHEIGPVETVRRIREVLGDRPVYLTFDIDCLDPAYAPGTGTPVWGGLTTAQAEAILKGLRGINIVGGDIVEVSPPFDTTGATAIAGAHVAMSIICLLGWRMTGR

SEQ ID NO: 141771 - protein, 207 aa, Unknown
  Bacterial polypetide isolated from the Sargasso Sea
MSSPPDQAMLRESLKGVTEEATYGGILSFMRRCYTRDLADADVAVLGIPFDLATTARPGSRFGPRSVREASASLAWERKAVGWGFSPLETLAIVDYGDCDFDAGNPAKVPDEIYECARQILATDTVLLSIGGDHFVSYPLLRAHAEKYGELSLIHFDAHSDTWAEDSQRIDHGTMFYHAAQQGLISPAHSAQIGLRTHNDSDHGFNI

SEQ ID NO: 141772 - protein, 237 aa, Unknown
  Bacterial polypetide isolated from the Sargasso Sea
MKTVGDGAFRSENLNSPSNDMTYSGALSFLRRKYSRDLTGVDVAVTGIPYDCATSNRPGARFGPRGIRSASTELASLDAFHFNFDPFKCLAVVDYGDVWLDYGYPQNVVEKVEKHADTILQQSTSLLSFGGDHFITYPLLRAHHKVHGTISLIHFDAHSDTWEDDGNRVDHGSMFLRAAREEIVIPEKSVQIGIRTQNYCTHGFNILHAPWVHTHGVQAVIDTIHNVISPDDPVYIT

SEQ ID NO: 141773 - protein, 317 aa, Unknown
  Bacterial polypetide isolated from the Sargasso Sea
MPPARADTATAGHPAGPTYAGVLSFMRRPYTRDLAGVDVAVSGIPLDLATTFRPGTRFGPAGMRAASVQLADLGAFPWGIDPFDHLNVVDYGDCCFDAHNPLGIRDAIVAHAREILAAGTRMLTFGGDHYITYPLLIAHAEKFGKPLSLIHFDAHCDTWPDDNPDSLNHGTMFYKAIREGLIDPARSVQVGIRTWNDDFMGVRILDAPWVHRNGTQATIDEVLSIVGDAPTYLTFDIDCLDPAFAPGTGTPVAGGLSSAQALEIVRALGAVNLVGADVVEVSPPYDHSDVTALAAAHLAADMLCLMRNRKLQSQQRE

SEQ ID NO: 141774 - protein, 204 aa, Unknown
  Bacterial polypetide isolated from the Sargasso Sea
GAIFTHAKSIIDTNTKMLTFGGDHFISLPLLRAHAEKYGPLSLLQFDSHCDTWEPQGPIDHGTMFLTAVNEGLINVDTSIQVGLRTHNDLDVGIEVIDVRYIHENGIKKSVERILKRINKTNCYMTFDIDFLDPAFAPGTGTPVCGGVATWQALEFIRSLEEINFVGMDLVEVSPPYDHAEITSMAAATVAHDWICIMADKQRK

SEQ ID NO: 141775 - protein, 245 aa, Unknown
  Bacterial polypetide isolated from the Sargasso Sea
MAVVDYGDVWLDYGYPQNVVEKVEKHADTILKQSTSLLSFGGDHFITYPLLRAHHKVHGSISLIHFDAHSDTWEDDGNRVDHGSMFLRAAREGIVIPEKSVQIGIRTQNYCTHGFNILHAPWVHAHGVQAVIDTIHNVISSDDPVYITFDIDCLDPAFAPGTGTPVVGGLSTTQILPILQSLGDLNLIGMDIVEVAPIYDHAEITALAAATLGYNYLCLLAQMKGTKAEHIGTCLDETPSGSAAG

SEQ ID NO: 141776 - protein, 314 aa, Unknown
  Bacterial polypetide isolated from the Sargasso Sea
MSSPPDQAMLRESLKGVTEEATYGGILSFMRRCYTRDLADADVAVLGIPFDLATTARPGSRFGPRGVREASASLAWERKAVGWGFSPLETLAIVDYGDCDFDAGNPAKAPDEIYECARQILATDTVLLSIGGDHFVSYPLLRAHAEKHGELSLIHFDAHSDTWAEDSQRIDHGTMFYHAAQQGLIAPAHSAQIGLRTHNDSDHGFNIFDAPTVHDMKPADLAAQVKGIVGDRPCYLTFDIDCLDPSFAPGTGTPVVGGLSTHQAMQILQHLKGINLVGMDVVEVAPQYDVGAITSLAAATIALQQLCLFASAPQ

SEQ ID NO: 141777 - protein, 322 aa, Unknown
  Bacterial polypetide isolated from the Sargasso Sea
MTELLHGDGAIRRTTPYGSSIENTYAGVLSFMRRNYSRALDGVDVAISGVPLDLATTYRSGARLGPAAIRAASVQLAELHPYPWGFNPFDDLAAVDYGDCWFDAHNPLSIKPAIVEHARTILGSGAKMLTLGGDHYITYPLLVAHAERYGRPLSLIHFDAHCDTWADDDPDSLNHGTMFYKAVKEGLIDPATSVQVGIRTWNDDFLGIERLDAAWVHDHGARAAVERIVDIVGARPAYLTFDIDCLDPAFAPGTGTPVAGGLSSAQALAIVRALGAVNLVGADVVEVAPAYDHADITAIAAAHVACDLLCLWRQKKVAGALK

SEQ ID NO: 141778 - protein, 328 aa, Unknown
  Bacterial polypetide isolated from the Sargasso Sea
MTELIYGDGAIRRASLYGSSIENTYAGVLSFMRRKYTRELDGVDVVVSGVPLDLATTFRSGARLGPAAVRAASVQLSELHPYPWGFNPFDDLAVTDYGDCWFDAHNPMTIKESIVEHARTILRSNAKMLTLGGDHYITYPLLIAHAEKYGKPLSLIHFDAHCDTWADDSPDSLNHGSMFYKAVKDGLIDPKTSVQVGIRTWNDDFMGINILDAAWVHEHGTRAAVERITSIVGERPAYLTFDIDCLDPAFAPGTGTPVAGGLSSAQGLAIVRGLGALNLVGADVVEVAPAYDQSEITAIAAAHIACDLLCLWRQRKVAEQVVERATER

SEQ ID NO: 141779 - protein, 145 aa, Unknown
  Bacterial polypetide isolated from the Sargasso Sea
VQIGIRTQNYCTHGFNILHAPWIHAHGVQAVIDTIHKVVSSDDPVYITFDIDCLDPAFAPGTGTPVVGGLTTTQVLPILQSLGDLNLIGMDIVEVAPAYDHAEITSLAAATLGYNYLCLLAQIKGAKAEHIGTSLDENPSGSAAG

SEQ ID NO: 141780 - protein, 324 aa, Unknown
  Bacterial polypetide isolated from the Sargasso Sea
MVLSNAKTEIDLAFTRKDLKGLSYENAFGGSTSFLRRRYTKDLKDVDIAITGVPFDQAVTNRPGARFGPRAIREASTLQTFDPPYGWDFDPMQELNIIDYGDLAFDYAKVQEFPSLLEQHISKILSNNVSTIVLGGDHFITYPILKAYFNKLGSPLSLLQFDAHSDTWPDDDEDRIDHGTMFYKAVKSGIIDPKTSVQVGIRTTNEDTLGVNIIDAREVHENGPVEVAKKIKSILGNQPTYLTFDIDCLDPAFAPGTGTPVWGGLSSGQAAILLRDIAGINMIGGDVVEVSPSYDTSGATAIAGAHAVTELLCIWGSNSKNKRA

SEQ ID NO: 141781 - protein, 150 aa, Unknown
  Bacterial polypetide isolated from the Sargasso Sea
MTAPRQLSVEPLTAAAFAPFGTVIETEGATRMMINEGTTERFHALAAADVAAGGGTAILSIFRGTRRPDPIAIRMMERHPLGSQAFMPLAAHDWLVVVAPTDAGDRAPDFGRLRCFLARGDQGVSYARNVWHHPLLILQPRQDFLIVDRA

SEQ ID NO: 141782 - protein, 266 aa, Unknown
  Bacterial polypetide isolated from the Sargasso Sea
MINLADPRLGSKVIFKTDDFFASASRIINPNPPIFKDGVFDKHGKWMDGWETRRRRKKGFDYLIIKLGKPGRIFNVDIDTTHFSGNQPMYASLEACQNNKKLNSNSKWTKILNYKKLGPNKNHKFSIKNKSIFTHIKLNIYPDGGVARLRIYGEIETKNINYGKKTINLTSMLNGASIVGCNNEHFGRAENVLTPGKGKNMGDGWETRRSRGKNFDWLIIKMGRAGKINKIEIDTHHFKGNYPDSCSIQGTYIPNKISNNLIVKKS

SEQ ID NO: 141783 - protein, 280 aa, Unknown
  Bacterial polypetide isolated from the Sargasso Sea
KRIINPWPPIFNEGVFDKHGKWMDGWETRRKRTKGHDFLILKLGKPGFINKVDIDTSYFSGNHPKYISLEACSISGKLPNKRTNWKTIIKKSPTKANSHHLFNIKNKNFFTHVKLNIFPDGGVARLRVYGSMKVKKKLSKGTQNLTSIINGSVPIACNNEHFGRAENILAPGVGKNMGDGWETRRSRGKNFDWIIIKCSTEGKIDRIQIDTHHFKGNYPDKCSIQATYIDNKLSSKNIVKKSKRWKLLLNKTKLYAHRKHNFKNKIMRNKKINYIRINIF

SEQ ID NO: 141784 - protein, 221 aa, Unknown
  Bacterial polypetide isolated from the Sargasso Sea
MVDLAQSRLGSKIIYKTDEFFAPAKRIINPWPPVFKEGVFDKHGKWMDGWETRRKRTKGHDYLVLKLGKPGKIHKVDIDTSYFNGNQPSKVSLDACFSRTKSPNKNSKWINILKKKSTKPNSHHFFTIKNRSVFTHVRLNIFPDGGVARLRIYGEMIVNKKFGKKTINLTSVLNGSTPIACNNEHFGRAENILAPGSGKNMGDGWETRRSRGKNYDWLILK

SEQ ID NO: 141785 - protein, 303 aa, Unknown
  Bacterial polypetide isolated from the Sargasso Sea
MDGWETRRKRTKGFDFLILKFGKRGLIKKVDVDTSYFSGNHPDQVSLQACISKKKIPDKKTKWTTIIKKSRTKANSHHFFYVKNKNYFTHVKLNIFPDGGVARLRIYGSMKIKNKKQKKNQNLTSVVNGAVPIACNNEHFGRAENILAPGIGKNMGDGWETRRSRGKNFDWIIIKCSSPGIINKIQLDTHHFKGNYPDKCSVQAAYIPNKVSEKNIVNKSKKWAYLLNKIKLHAHKKHNFNNKLMKNKKVNYMRINIFPRWWNFKSKSFWKSRMTEKIIRPKLINKENFKKFGDMITTKDIKP

SEQ ID NO: 141786 - protein, 286 aa, Unknown
  Bacterial polypetide isolated from the Sargasso Sea
IINPWPPVFKEGVFDKHGKWMDGWETRRKRTKGYDFLILRFGKPGLIKKIDVDTSYFSGNHPDQVSLQACISKKKIPDKKIKWVTIVKKSRTKANSHHFFNVKNKNYFTHIKLNIFPDGGVARLRVYGSMKIENKIKNKIQNLTSVISGAVPIACNNEHFGRAENILAPGIGKNMGDGWETRRSRGKNFDWIIVKCSSPGKFNKIQLDTHHFKGNFPDKCSIQAAYIPKNISNKNIVKKSNKWAFLLNKVKLYAHKKHNFKNNLMKNKKVNYIKINIFPDGGIQEL

SEQ ID NO: 141787 - protein, 273 aa, Unknown
  Bacterial polypetide isolated from the Sargasso Sea
MDGWETRRKRTKGHDFLILKFGKPGLIKKIDVDTSYFSGNQPDKVSLQACVSKKKIPDKKTKWITIIKKSQTKANSHHFFSIKSKNYFTHIKLNIFPDGGVARLRVYGSMKINNKIHNKTQNLTSLISGAVPIACNNEHFGRAENILAPGIGKNMGDGWETRRSRGKNFDWIIIKCSSPGKLNKIQLDTHHFKGNYPDKCSLQAAYIPQKISEKNIVKKSKKWGHILNKVKLYAHKKHNFENKIMKNKKINYIKINIFPDGGNFRIRAFGKPE

SEQ ID NO: 141788 - protein, 222 aa, Unknown
  Bacterial polypetide isolated from the Sargasso Sea
APAKRIINPWPPVFKEGVFDKHGKWMDGWETRRKRTKGHDFLILKFGKPGLIKRVDVDTSYFSGNHPDKISLQACISKKNKPDKKTKWVTIIKKSRTKANSHHFFNIKNKNYFTHIKLNIFPDGGVARLRVYGSMKIKNKIQNKTQNLTSLISGAVPIACNNEHFGRAENILAPGVGKNMGDGWETRRSRGKNFDWIIIKCSSPGKLNKIQLDTHHFKGNYP

SEQ ID NO: 141789 - protein, 287 aa, Unknown
  Bacterial polypetide isolated from the Sargasso Sea
MINLAEPRLGSKVVFKTDDFFASANRIINPNPPVFKEGVFDKHGKWMDGWETRRRRRKGFDYLIVKLGRPGKIFNVDIDTAHFSGNQPMQTSLEACHSSKNPKNKSKWITILNKKKLKPNKNHNFKIKNKSIFTHIKLNIYPDGGVARLRVYGEVEIKKINFGKKTINLSSMLNGASIVGCNNEHFGRAENILAPGKGKNMGDGWETRRSRGKNFDWLIIKLGHAGTINKIEIDTHHFKGNYPDRCSVQATYIPKKISNYLVVKKSNKWKSLLNKVKLNANKKHSFN

SEQ ID NO: 141790 - protein, 300 aa, Unknown
  Bacterial polypetide isolated from the Sargasso Sea
DLAQSRLGSKVVYKTDEFFAPAKRIINPWPPIFKEGVFDKHGKWMDGWETRRKRNKGHDYLILKLGRPGKIHKVDIDTSYFNGNQPSKVSLDACYSKNKLPNKNSRWINILKKSTTKPNSHHFFNIKNKSIFTHVKLNIYPDGGVARIRIYGEMKINKKFGKKITNLTSLLSGATPIACNNEHFGRAENVLAPGSGKNMGDGWETRRSRGKNFDWLILKCATAGKINKIQIDTHHFKGNYPDKCSVQAAYLNNRISSKSIVNKSKNWKLLLGKVKLHAHKKHNFNNKLMKNKKINYIRIN

SEQ ID NO: 141791 - protein, 228 aa, Unknown
  Bacterial polypetide isolated from the Sargasso Sea
MKKNNIIYLNGLIDLAQSRLGSKIVYKTDEFFAPAKRIINPWPPVFKEGVFDKHGKWMDGWETRRKRTKGYDYLILKFGKPGLIKKVDVDTSYFSGNHPDQISIQACISKKTIPDKKTKWITIIKKSRTKANSHHFFKVKNKNYFTHIKLNIFPDGGVARLRIYGYMKTKNKISNKIQNLTSVVNGAVPIACNNEHFGRAENILAPGVGKNMGDGWETRRSRGKNLTG

SEQ ID NO: 141792 - protein, 266 aa, Unknown
  Bacterial polypetide isolated from the Sargasso Sea
MINLADPRIGSKVIFKTDDFFAAAHRILNIETPVFKDGLFDKHGKWMDGWETRRRRSKGFDYLILKLGKPGKIFDIDIDTTHFNGNQPTHASLEGCLSKTKPNKKTKWISLLSKKKLGPSRNHSFKSNNKSVFNYIRLNIFPDGGVARLRLYGKIEMEKKFLNNKTVNLTSVLNGASIIGCNNEHFGRAENIIAPGKGKNMGDGWETRRSRGKNFDWLIIKFGKPGLIKKLEIDTHHFKGNYPDSCSIQTASISKDLSNKSMSIIK

SEQ ID NO: 141793 - protein, 272 aa, Unknown
  Bacterial polypetide isolated from the Sargasso Sea
DGWETRRKRKKGHDYLILKLGRPGKIHKVDIDTSYFNGNQPSKVSLDACYSKKKLPNKNSKWVNILKKSTTKPNSHHFFKIKNKSIFTHVKLNIYPDGGVARIRIYGEMIINKQFKKKITNLTSVLNGASPIACNNEHFGRAENILAPGIGKNMGDGWETRRSRGKNFDWLILKCATPGKINKIQIDTHHFKGNYPDKCSLQATYLNDKTSTKNIVNSSKNWKLLLDKVKLHAHKKHNFKNKLMKNKKVNYIRINIYPDGGISRIRVFGKSE

SEQ ID NO: 141794 - protein, 284 aa, Unknown
  Bacterial polypetide isolated from the Sargasso Sea
KEGVFDKHGKWMDGWETRRKRIKGYDYLILKFGKPGLIKKVDVDTSYFSGNHPNQISLQACISKKKIPNKKTKWITIIKKSRTKANSHHFFKVKNKNYFTHIKLNIFPDGGVARLRIFGSMKTNNKTNNKIQNLTSVVNGAVPIACNNEHFGRAENILAPGIGKNMGDGWETRRSRGKNFDWIIIKCSSPGKINKIQLDTHHFKGNYPDKCSVQAAYIPNKISEKNIVNKSKRWGYLLNKIKLYANKKHNFNNKIMKNKKINYIRINIFPDGGISRIRAFGKIE

SEQ ID NO: 141795 - protein, 244 aa, Unknown
  Bacterial polypetide isolated from the Sargasso Sea
MINLADPRIGSKVIFKTDDFFAAAHRILNIETPVFKDGLFDKNGKWMDGWETRRRRSKGFDYLILKLGKPGKIFDIDIDTTHFNGNQPTHASLEGCLSKTKPNKKTKWISLLSKKKLGPSRNHSFKSNNKSVFNYIRLNIFPDGGVARLRLYGKIEMEKNFLNNKTINLTSVLNGASIIGCNNEHFGRAENIIAPGKGKNMGDGWETRRSRGKNFDWLIIKFGKPGLIKKLEIDTHHFKGNYPD

SEQ ID NO: 141796 - protein, 320 aa, Unknown
  Bacterial polypetide isolated from the Sargasso Sea
MIDLAQSRLGSKIVFKTDEFFAPAKRIINPWPAVFKEGVFDKNGKWMDGWETRRKRIKGHDYLILKLGQPGKIHKIDVDTSYFSGNHPSKVSLEACYSIKNTPDKNTKWFTILKKSKTKANSHHFFNIKNKTIFSHVKLNIFPDGGVARLRIYGSMNLKKKFGKNSINLTSVINGATPIVCNDEHFGRAENILAPGKGKNMGDGWETRRSRGKNFDWLIIKCAAPGIIKKIQIDTHHFKGNFPDKFSLQAGYINKNISSKNIINKSIKWKFLLKKTKLYANRKHNFQNKLMKNDKINYIKINIFPDGGISRIRAFGKVEE

SEQ ID NO: 141797 - protein, 310 aa, Unknown
  Bacterial polypetide isolated from the Sargasso Sea
MKKDKNIFLNGLIDLAQSRLGSSVVYKTDEFFAPAKRIINPWPPIFKEGVFDKHGKWMDGWETRRKRNKGHDYLILKLGKPGKIHKVDIDTSYFNGNQPSKVSLDACYSKTKLPNKNSKWIRILKKKSTKPNSHHFFNIKNKSIFTHVKLNIYPDGGVARIRIFGEMKINKKFGKKITNLTSVLNGATPIACNNEHFGRAENILAPGIGKNMGDGWETRRSRGKNFDWLILKCATAGKINKIQIDTHHFKGNYPDKCSVQAAYLNNRVSSKSIVKNSKNWKLLLNKVKLHAHRKHNFNNKLMKNKKINYI

SEQ ID NO: 141798 - protein, 312 aa, Unknown
  Bacterial polypetide isolated from the Sargasso Sea
MKKNNIIYLNGLIDLAQSRLGSKIVYKTDEFFAPAKRIINPWPPIFKEGVFDKHGKWMDGWETRRKRTKGYDYLILKFGKPGVIKKVDVDTSYFSGNHPDEISLQACISKKKIPNKKTKWITIINKSKTKANSHHFFRVKNKNYFTHIKLNIFPDGGVARLRVYGSMKTKNKVNNKIQNLTSIVNGAVPIACNNEHFGRAENILAPGVGKNMGDGWETRRSRGKNFDWIIIKCSSPGKINKIQLDTHHFKGNYPDKCSLQAAYITKKISEKNLVKKSNKWPHILNKAKLHAHKKHNFKNKIMKNKKINYIRI

SEQ ID NO: 141799 - protein, 337 aa, Unknown
  Bacterial polypetide isolated from the Sargasso Sea
MAVPLLDPNAPDFTRRYVNLADPRLGAQALEASDDFFAPKDRMLNPEPAVFIPGKYDDHGKWMDGWETRRKRTTGYDWCIVKLARPGVIKGFDIDTSHFTGNFPPAASIEAAFVADGAPTHATEWVEIVPSTTLQGNSHHYVEASDARAFTHLRVNIYPDGGIARLRVYGQPQLDWAGASATEQFDLAAMENGGYVVAANNQHFGVASNLLLPGRGVNMGDGWETRRRREPGNDWAIIALAQPGVIRKIEVDTAFFKGNYPDRCSIQAAYVSGGTDSSLITQSMFWPVLLGEQKLQMDKQHYFEQDIASLGPVTHVRLNIIPDGGVSRLRLWGTLDK

SEQ ID NO: 141800 - protein, 319 aa, Unknown
  Bacterial polypetide isolated from the Sargasso Sea
MIDLAQSRLGSKIVYKTDEFFAPAKRIINPWPPIFKEGVFDKHGKWMDGWETRRKRTKGYDYLILKFGKPGVIKKVDVDTSYFSGNHPDQISLQACISKKKLPDKKTKWITIIKKSRTRANSHHFFKVKNKNYFTHIKLNIFPDGGVARLRVYGSMKTKNKINNKIQNLTSVVNGAVPIACNNEHFGRAENILAPGIGRNMGDGWETRRSRGKNFDWIIVKCSSPGKINKIQLDTHHFKGNYPDKCSVQAAYIPNKISEKNIVNKSKRWAYLLNKIKLYAHKKHNFNNKIMKNKKINYIRINIFPDGGISRIRAFGKAE

SEQ ID NO: 141801 - protein, 335 aa, Unknown
  Bacterial polypetide isolated from the Sargasso Sea
MAAPILDPNAPAFTRRYMNLADPRLGAQALFASDEFFAPKERMLNPEPAVFIPGKYDDHGKWMDGWETRRKRTTGHDFCVVRLARPGVIHGVDLDTSHFTGNFPPAASIDACVAEGDLPPDDTQWRPIVPATTLQGNSHHYVSVDDAQPYTHLRVNLYPDGGLARLRVYGQPQRDWRQVPAGELVDLAAIENGGYLVAANNQHFGPASQMLMPGRGVNMGDGWETRRRREPGNDWAIVALARPGIIRRVEVDTAFFKGNFPDRCSLQAARVEGGTDDSLVTQAMFWAELLGEQKLQMDHVHTFDQLAALGPVTHVRFNIFPDGGVSRLRLWGEPA

SEQ ID NO: 141802 - protein, 295 aa, Unknown
  Bacterial polypetide isolated from the Sargasso Sea
MINLAEPKLGSKVIFKTDDFFASANRIINPNPPVFKEGIFDKHGKWMDGWETRRRRRKGYDYLIIKLGRPGKIFNVDIDTSHFNGNQPTYASLEACHSNKKLNIKTKWIKILNKKKLKPNKNHNFKIKNKSIFTHIKLNIFPDGGVARLRVYGEVEIKKINFGNKLINLTSVLNGASIVGCNNEHFGKAENVLAPGKGKNMGDGWETRRSRGKNFDWLVIKLGRTGIINKIEIDTHHFKGNYPDQCSVQATYIPKKTSNYTVVKKSNKWRSLLNKAQLNANKKHSFKNKTMKKNI

SEQ ID NO: 141803 - protein, 300 aa, Unknown
  Bacterial polypetide isolated from the Sargasso Sea
MINLADPRIGSKIIFKTDDFFAAAHRILNMDPPVFKDGLFDKHGKWMDGWETRRRRSKGFDYLILKLGKPGKIFDIDIDTTHFNGNQPTHASLEGCFSKTKPNKKTKWISLLSKKKLGPSRNHSFKSKKKSVFNYIRLNIFPDGGVARLRLYGKIEMEKNSLSNKTINLTSVLNGASIIGCNNEHFGRAENIIAPGKGKNMGDGWETRRSRGKNFDWLIIKFGKPGLIKKLEIDTHHFKGNYPDSCSIQTAIITKDLSNKLIVDNSKNWKFILNKSKLSAHKKHIFKKFLIKRSKENILE

SEQ ID NO: 141804 - protein, 227 aa, Unknown
  Bacterial polypetide isolated from the Sargasso Sea
MINLAEPRLGSKVIYKTDDFFASAKRIIKPDPPVFKEGLFDSHGKWMDGWETRRRRRKGFDYLIIKLGKPGKIFNVDIDTSHFNGNQPTHASLEACYTNKKPNKKTRWIKILNNKKLGPNKNHNFKIKNKLVFNYVKLNIFPDGGVARLRVYGEVEINKFNFGNKLINLTSVLNGASIVGCNNEHFGRAENVLAPGKGKNMGDGWETRRSRGKNFDWLIIKLGRTGT

SEQ ID NO: 141805 - protein, 330 aa, Unknown
  Bacterial polypetide isolated from the Sargasso Sea
MKKKNIIYQNGLVDLAQARLGSKIVYKTDEFFAPAKRIINPWPPVFKEGVFDKHGKWMDGWETRRKRSKGHDFLILKLGKPGIIKKVDVDTSYFSGNHPDKVSLQACFSNKIIPHKKTKWITIIKKSPTKANSHHFFNVKNKNFFTHIKLNIFPDGGVARIRVYGLMKIKKKFGKKIHNLTSVTNGAIPIACNNEHFGRAENILAPGIGKNMGDGWETRRSRGKNFDWIIIKCAAPGKIKKIQIDTHHFKGNFPDKCSIQAANINKKISGKNIVKNSKNWNLILNKSKLYAHKKHNFINKLMKNRKVNYIRINIFPDGGISRVRAFGKVE

SEQ ID NO: 141806 - protein, 320 aa, Unknown
  Bacterial polypetide isolated from the Sargasso Sea
MINLADPRIGSKVIFKTDDFFAAAHRILNIETPVFKDGLFDKHGKWMDGWETRRRRSKGFDYLILKLGKPGKIFDIDIDTTHFNGNQPTHASLEGCLSKTKPNKKTKWISLLRKKKLGPSRNHSFKSNNKSVFNYVRLNIFPDGGVARLRLYGKIEIEKNFLNNKTINLTSVLNGASIIGCNNEHFGRAENIIAPGKGKNMGDGWETRRSRGKNFDWLIIKFGKPGLIKKLEIDTHHFKGNYPDSCSIQTASISKDLSNKSIVNNSKNWKFILNKSKLSAHKKHIFKKFLIKRSKENYLKINIYPDGGISRIRAFGNFVR

SEQ ID NO: 141807 - protein, 294 aa, Unknown
  Bacterial polypetide isolated from the Sargasso Sea
RIINPWPAVFKEGVFDKHGKWMDGWETRRKRTKGYDYLILKFGKPGIIKKVDIDTSYFSGNHPDQISLQACISKKKIPDKKTKWITIIKKSRTKANSHHFFKVKNKNYFTHIKLNIFPDGGVARLRVYGSMKIKNKINNKVQNLTSVVNGAVPIACNNEHFGRAENILAPGVGKNMGDGWETRRSRGKNFDWIIIKCSSPGKINKIQLDTHHFKGNYPDKCSVQAAYIPYKISEKNIVNKSKKWAYLLNKIKLHAHKKHNFNNKIMKNKKINYIRINIFPDGGISRIRAFGKAE

SEQ ID NO: 141808 - protein, 337 aa, Unknown
  Bacterial polypetide isolated from the Sargasso Sea
MALPILDPNAPEFTRRYVNLADPRLGAQALEASDDFFAPKERMLNPEPAVFIPGKYDDNGKWMDGWETRRKRANGYDWCVVKLARPGVIKGLDLDTSHFTGNFPPAASVEAARVVDGVPNQSTQWTEIVPSTTLQGNSHHYHEVSDTNAYTHLRVNIYPDGGIARLRVYGQPQVDWAGASRTEQFDLAAMENGAYLVAANNQHFGAASTILMPGRGVNMGDGWETRRRREPGNDWAIVALAQPGVIKKIEVDTAHFKGNFPDRCSIQAAYVTGGTDSSLITQAMFWPVLLGEQKLKMDNQHYFESEIAALGPVTHVRFNIIPDGGVSRLRLWGTLAS

SEQ ID NO: 141809 - protein, 298 aa, Unknown
  Bacterial polypetide isolated from the Sargasso Sea
AAAKRIINPWPPVFKEGVFDKHGKWMDGWETRRKRTKGYDYLILKFGKPGVIKKVDVDTSYFSGNHPAEISLQACISKKKIPDKKTKWITIIKKSKTKANSHHFFRVKNKNYFTHIKLNIFPDGGVARLRVYGSMKTKNKINNKIQNLTSIVNGAVPIACNNEHFGRAENILAPGVGKNMGDGWETRRSRGKNFDWIIIKCSSPGKLNKIQLDTHHFKGNYPDKCSLQAAYIPKKISEKNIVKKSNKWPHILNKVKLHAHKKHNFKNKIMKNKKINYIRINIFPDGGISRIRAFGKPE

SEQ ID NO: 141810 - protein, 330 aa, Unknown
  Bacterial polypetide isolated from the Sargasso Sea
MKKNNIIYLNGLIDLAQARLGSKIVYKTDEFFAPAKRIINPWPPIYKEGVFDNHGKWMDGWETRRKRTKGYDYLILKLGKPGLIKKVDVDTSYFSGNHPEKISLQACISKKNIPDKKTKWTTIIKKNSTKANSHHFFNIKNKNYFTHIKLNIFPDGGVARLRVYGLMKIKNKFQKKIQNLTSVLTGAVPIACNNEHFGRAENILAPEIGKNMGDGWETRRSRGKNFDWIIVKCSSPGKLNKIQLDTHHFKGNYPDKFSVQAAYIPKTLSAKDIVKKSSKWSYILNKSKLYAHKKHNFQNKIMKNKKINYIKINIFPDGGISRIRAFGTPE

SEQ ID NO: 141811 - protein, 320 aa, Unknown
  Bacterial polypetide isolated from the Sargasso Sea
MINLADPRIGTKIIYKTDEFFAAAHRILKTNPPLFKDGLFDNHGKWMDGWETRRRRSKGFDYLILKIGKPGKIFNIDIDTTHFNGNQPTHASLEGCFSKTKPNKKTKWTQLLGKKKLGPSRNHSFKSKNKSVFNYIKLNIFPDGGVARLRLYGKIEMEKNLLNKKNINLTSILNGASIIGCNNEQFGRAENIIAPGKGKNMGDGWETRRSRGKNFDWVIIKFGKPGIIKKLEIDTHHFKGNYPDTCSIQTANIKKDLSNKSIVNNSRNWKSILNNCKLSAHKKHIFNKFLIKRSKENYLRINIYPDGGISRIRAFGNFVK

SEQ ID NO: 141812 - protein, 330 aa, Unknown
  Bacterial polypetide isolated from the Sargasso Sea
MKKNKIIYLNGLIDLAQSRIGSRIVYKTDEFFAPAKRIINPWPPIYKEGVFDKHGKWMDGWETRRKRIKGYDFLILKFGKPGLIKKIDVDTSYFSGNHPNQISLQACKSKKNKPDIKTKWITIIKKSKTKANSHHFFNIKNKNYFTHIKLNIFPDGGVARLRVFGSIKIKNKTQNKIQNLTSIINGAVPIACNNEHFGRAENILAPGIGKNMGDGWETRRSRGNNFDWIIIKCSSPGKINKIQVDTHHFKGNYPDKCSLQAAYIPTKISGNNIVKKSNKWPHILNKVKLYAHKKHNFKNKIMKNKIINYIRINIFPDGGISRIRAFGKPE

SEQ ID NO: 141813 - protein, 166 aa, Unknown
  Bacterial polypetide isolated from the Sargasso Sea
IEFLAQSLFKHRQAERVIAVELPKHRSCMHLDTVMTHIDIDTFSVYPEVVRPDVQCWTLTPDGRGGLKRTQESTLVHALEKALGLDQITLITTGGDAFEAEREQWNDANNVLTLRPGVVVGYERNIWTNEKYDKAGITVLPIPGDELGRGRGGARCMSCPLERDGI

SEQ ID NO: 141814 - protein, 406 aa, Unknown
  Bacterial polypetide isolated from the Sargasso Sea
MSKFYVGSEVGQLRRVMLHRPNLSLKRLTPSNCQDLLFDDVLSVERAGQEHDKFAQVLRDQNVEVFLLTNLLAETLDVPEAKTWLLQHQVSDYRLGTSFANDVRCFLADMPHRELARILSGGLTYSEMPYSGVNMVVGMHAPTDFIIEPLPNHLFTRDTSCWVYGGVSINPMAKAARRRETNHVKAIYRWHPQFAGQDFIKYFGDEDRDYDNSTIEGGDVLVIGRGSVLIGMSERTTPQGVEHLARGLFKHGQAKQVIAMQLPKHRSCMHLDTVMTHMDIDTFSVYPEVIRKDVNCWSLTPGGATGMNIKEEGYFVTAIEKALGVDQLKLITTGGDTFEAEREQWNDANNVLTVRPGVVVGYERNTYTNEKYDKAGITVLPIPGEELGRGRGGARCMSCPMERDGI

SEQ ID NO: 141815 - protein, 193 aa, Unknown
  Bacterial polypetide isolated from the Sargasso Sea
GGGHEVAFGSWSGLAEYLSGNPAPKIGIVNFDAHFDLRDPAHVHSSGTPFAQIAEQCAARGWPFRYACLGVSRASNTRALFARAAELNVLVREDHQIRESTLDAIGAELDAFVAECDALYLTIDIDVLPACEAPGVSAPAARGVRLELLEPLLERLKASGKLRLADLAELNPEYDIDNRTAKVAARLIHLLSL

SEQ ID NO: 141816 - protein, 236 aa, Unknown
  Bacterial polypetide isolated from the Sargasso Sea
MAAWSGRTDPETDSARWHQRIRALAEDSQPGLALLGFACDEGVRRNHGRVGAAAAPQSVRKALANLAWHRQAPAYDAGDVTCEDGDLEAAQARLGHNVCALLDAGHLPLVIGGGHEVAFGSWSGLAEHMSGQATPRIGIINFDAHFDLRDPAHVHSSGTPFAQIAEQCAARGWPFRYACLGVSRASNTRALFARAAELDVLVREDHQIRESTLYAIGAELDAFAAECDALYLTIDI

SEQ ID NO: 141817 - protein, 202 aa, Unknown
  Bacterial polypetide isolated from the Sargasso Sea
MSVWQGRQDPEDGELALRWHDKVQPWPQAGRTAPGVALVGFACDEGVRRNKGRVGAAGAPLAVRKLLANSAWHLGRPVYDCGDVNCEDGDLDAAHGRLAERVARLLDEGHFPLVLGGGHEVAFGSWSGLNLHLAGRGRVGIINFDAHFDLRMKLEQASSGTPFFQIAEQCAAQGTPFTYACLGVAETANTQALFARAEALGV

SEQ ID NO: 141818 - protein, 313 aa, Unknown
  Bacterial polypetide isolated from the Sargasso Sea
MTHWQPASPALWQGRDDRAESPNALRLFQTITQSPTFSPEMYREQIALLGFACDEGVKRNQGRTGAAGAPDVLRKALANLASHDGHHRLVDLGNIVAQAPDLEGAQQALRNAVQRCQQENMRTFVLGGGHETAYAHGAGVLDAFPQAKVGIVNFDAHLDLRHAGQATSGTPFRQLAQLCDEQQREFHYACIGVSRAANTQALWDEAQRLGVTVVEDLHCDTAQAQLAQFIANLDVIYLTIDLDVLPVWEMPGVSAPAALGVPLATLLRLIEPLCRSGKLQAVDMVEFNPRFDDDGRAARVAARLGWQIAHWWH

SEQ ID NO: 141819 - protein, 332 aa, Unknown
  Bacterial polypetide isolated from the Sargasso Sea
MRVPFDDKVWIGRSDDGEPGDTRRIFNQVVAFGGAPAHEVKLHGALQVENDAPVIIGFGSDEGVRRNQGRTGAAHAPKELRRVLAGLPAKTSMATLADAGDVICDDGDLEGAQAELASAISDVLAAGARPLVFGGGHEVAWGTYSGLRLHQDRVAAASVTSAATRKLLIINFDAHFDLRQKRPANSGTPFDQIANDCAERGVPFNYACFGISDLGNTASLFAHAEELGVHYVLDSDMQEPQLPQRLHELQQLLDAADDVYLTIDLDVLPAATAPGVSAPAALGVPLSVVEAMVLRVRTSGKLRAADIAEYNPSLDQDKRTARAAARLAYRLL

SEQ ID NO: 141820 - protein, 322 aa, Unknown
  Bacterial polypetide isolated from the Sargasso Sea
MFKWQGRIDSEDGVEGLRWHQKVNELEVGEDNSLANAVTLVGFESDLGVAFNKGRVGAAAGPNAIRQALANLPWHWPNASLADLGNVTAKENLAQAQTQYADAICYALKQNDGLVIGLGGGHEIAWGSYQGVFNAKPESARIGIINFDAHFDLRKPSPNTSSGTPFRQVYDHCQLHDTPFHYACLGVSKAANTPALFNFANTSNTRYLTDVALNDESLCMQRIDELLSPMLKDIDELYVTVCLDAFPAAQAPGVSAPSALGISPTLVINTLHFLAQHQNTYGYQWRLCDVAEMNPNYDIDSRTAKLAARLIFEAVDAISSHT

SEQ ID NO: 141821 - protein, 325 aa, Unknown
  Bacterial polypetide isolated from the Sargasso Sea
MLAQAEPNVWRGRVDAEEGPLGQRWHQTVRRIDASTPLANTVALAGFACDAGVARNHGRTGAQVGPAAIRKMLANLPARAGRVVVDAGDVTCQGDALEDAQSELSGVLHDLLDRGAFPIALGGGHEIAWASFGGLARHLAAKSDQPPRIGILNLDAHFDLRAGERGSSGTPFRQIAEDCARRGWPFHYACLGVSTYANTEALFARARQLGVRWMHDDEMDVTQLAHVLKVVEVFLSQVDHVYLTMCLDVLPAAVAPGVSAPSARGVGMDLIEPIVDRVVSSGKLRLADVAELNPSLDIDHHTARVAARLVARVADGIGLQGAAHD

SEQ ID NO: 141822 - protein, 161 aa, Unknown
  Bacterial polypetide isolated from the Sargasso Sea
MPEHNKDTPLNVDKALDELSSSSYSDTPAYSTWINCIRRFKNTQNVQHAADAIHASVENIAAQLESGNNVIRYIIWAIPSIGFVGTVRGIGAALAQADAALDGDIAGMTASLGVAFNSTLVALFISLILMLLMHLLNGRQDTMVIRTQESCEHHLLSHLHN

SEQ ID NO: 141823 - protein, 175 aa, Unknown
  Bacterial polypetide isolated from the Sargasso Sea
MCKENNMIEPFLDHQISEGKISYGLSSMGYDVRISDEYRIFTNVNSSLVDPKNFSDDNFIERKGPYCIIPPNSFVLAKTVEYFRIPKDVLCICVGKSTYARTGIICNVTPIENEFEGNIVIELSNTTPNPAKIYSNEGIAQFLFLKSDTQPETTYKSKNGKYQGQTTIQVAKIKK

SEQ ID NO: 141824 - protein, 197 aa, Unknown
  Bacterial polypetide isolated from the Sargasso Sea
MLKNDLWINQKASEGMINPFQSNLVRHLEPDNQQKPVLSYGCSSYGYDLRLSSKEFLIFRHIPGTVMNPKKFNPDNLEKTVLHYDEDGEFFILPAHSYGLGVALEKMKVPENITVICIGKSTYARLGIIVNTTPAEAGWEGHLTLEFSNSSGADCRIYANEGICQLLFFEGDPCSTTYNDRRGKYQNQPEKVTLAKI

SEQ ID NO: 141825 - protein, 186 aa, Unknown
  Bacterial polypetide isolated from the Sargasso Sea
MSIQPDSWIKKMCKEHNMIEPFLDHQVSEGKISYGLSSMGYDVRISDEYRIFTNVNSSLVDPKNFSDDNFIERKGPHCIIPPNSFVLAKTVEYFRIPKDVLCICVGKSTYARTGIICNVTPIENEFEGNIVIELSNTTPNPAKIYSNEGIAQFLFFKSDTQPETTYKSKNGKYQGQTTIQVAKIKK

SEQ ID NO: 141826 - protein, 197 aa, Unknown
  Bacterial polypetide isolated from the Sargasso Sea
MLKCDRWITEQAGQGMIEPFQSGLVRHLEPEQKLRPVLSFGCSSYGYDLRLSPQEFLIFRHVPGTVMNPKRFNPANLEPTPLHEDEDGRYFILPAHSYGLGVALEKLRVPPNITVICLGKSTYARLGIIVNTTPAEASWEGHLTLEFSNSSGADCRIYADEGICQLLFFEGDPCSTTYSDRQGKYQHQPERVTLAKV

SEQ ID NO: 141827 - protein, 164 aa, Unknown
  Bacterial polypetide isolated from the Sargasso Sea
LDHQISEGKISYGLSSMGYDVRISDEYRIFTNVNSSLVDPKNFSDDNFIERKGPYCIIPPNSFVLAKTIEYFRIPKDVLCICVGKSTYARTGIICNVTPIENEFEGNIVIELSNTTPNPAKIYSNEGIAQFLFFKSDTQPESTYKSKNGKYQGQTTIQVAKIKK

SEQ ID NO: 141828 - protein, 138 aa, Unknown
  Bacterial polypetide isolated from the Sargasso Sea
EFKIFTNIKGATADPKNFSEDNFVTVKGEESILIPPNSFALASSLEYFKMPRNVTGLVTAKSTYARCGLGTPPTVLEAGWHGNLVLEFSNHTSNSIKLYANSGAAQILFFKGDQPEVSYSDRKGKYQGQVGITLAKSK

SEQ ID NO: 141829 - protein, 183 aa, Unknown
  Bacterial polypetide isolated from the Sargasso Sea
MILNDKQIKKLVEEKDMIRPFVDKSIAQGISYGLNSFGFDLRCGEEFKIFTNIKGATADPKNFTEDNFVTVKGEPSILIPPNSFALASSLEYFKMPRNVTGLVTAKSTYARCGLGTPPTVLEAGWHGNLVLEFSNHTSNSIRLYANSGAAQILFFQGEEPEVSYADRKGKYQGQTGITLAKSK

SEQ ID NO: 141830 - protein, 107 aa, Unknown
  Bacterial polypetide isolated from the Sargasso Sea
MTIKSDKWIKEMSEKHEMIKPFEPGQIRVDQNNQKLISYGTSSYGYDVRCSTEFKVFTNIHSATVDPKRFDENSFVDIQSDVCVIPPNSFALASTIEYFKIPRNVLT

SEQ ID NO: 141831 - protein, 164 aa, Unknown
  Bacterial polypetide isolated from the Sargasso Sea
GYIQPSSVDLRVGTEFRVFENHKYSHIDPKSPQEDLTTLVEASKDEPFVLHPGEFVLGTTYEKVALSNKIVARLEGKSSLGRIGLLIHSTAGFVDPGFSGYLTLELSNVANLPIKIYPEMKIGQISFYYLNSPSEAEYGDVSYGSKYQGQEGPTPSKSHSDFSS

SEQ ID NO: 141832 - protein, 187 aa, Unknown
  Bacterial polypetide isolated from the Sargasso Sea
MLSDIDIKNSIKNNEIEISPLDEDYIQPSSVDLRVGADFRVFENHKYSHIDPKAQQDDLTSLVAATIEEPFVLHPGEFVLGTTFEKVSLSNKVVARLEGKSSLGRIGLLIHSTAGFVDPGFSGYLTLELSNVANLPIKIYPEMKIGQISFYYLNSPSESGYGSETYGSKYQGQEGPTPSKSHTDFNK

SEQ ID NO: 141833 - protein, 183 aa, Unknown
  Bacterial polypetide isolated from the Sargasso Sea
MILNDKQIIKLAEEHAMINPFVNKSVANGISHGVNPFGYDLRCGSEFKIFTNIKGAIADPKNFSEDNFITVKDEESILIPPNSFALASSLEYFKMPRNVTGLVTAKSTYARCGLGVPPTVLEAGWEGVLVLEFSNHTSNSIRLYANAGAAQILFFQGEEPAVSYADREGKYQGQTGITLAKSK

SEQ ID NO: 141834 - protein, 197 aa, Unknown
  Bacterial polypetide isolated from the Sargasso Sea
MLKNDLWINQKACEGMINPFQSNLVRHLEPDNQQKPVLSYGCSSYGYDLRLSSKEFLIFRHIPGTVMNPKKFNPKNLEKTVLHHDDDGDFFILPAHSYGLGVAFEKMKVPENITVICIGKSTYARLGIIVNTTPAEAGWEGHLTLEFSNSSGADCRIYANEGICQLLFFEGDPCSTTYEDRKGKYQNQPEKVTLAKI

SEQ ID NO: 141835 - protein, 56 aa, Unknown
  Bacterial polypetide isolated from the Sargasso Sea
MTIKSDKWIRKMAVDQGMIEPFQEDQIRYSDDNSRLISYGLSSYGYDVRCANEFKV

SEQ ID NO: 141836 - protein, 179 aa, Unknown
  Bacterial polypetide isolated from the Sargasso Sea
MSIQPDSWIKKMCKEQNMIEPFLDHQVSEGKISYGLSSMGYDVRISDEYRIFTNVNNSLVDPKNFSDDNFIERKGPHCIIPPNSFVLAKTVEYFRIPKDVLCICVGKSTYARTGIICNVTPIENEFEGNIVIELSNTTPNPAKIYSNEGIAQFLFFKSDTQPETTYKSKNGKYQGQTHI

SEQ ID NO: 141837 - protein, 186 aa, Unknown
  Bacterial polypetide isolated from the Sargasso Sea
MSIQPDSWIKKMCKEHNMIEPFLDHQVSEGKISYGLSSMGYDVRISDEFRIFTNVNSSLVDPKNFSDDNFIERKGPHCIIPPNSFVLAKTVEYFRIPKDVLCICVGKSTYARTGIICNVTPIENEFEGNIVIELSNTTPNPAKVYSNEGIAQFLFFKSDTPPETTYKSKNGKYQGQTTIQVAKIKK

SEQ ID NO: 141838 - protein, 179 aa, Unknown
  Bacterial polypetide isolated from the Sargasso Sea
MLSDVDIKMALDEKLIEVSPLDDTYIQPSSIDLRVGSEFRVFENHKYSHIDPKADQDDLTTLVTATIEEPFVLHPGEFVLGTTFERVTLSNKVVARLEGKSSLGRIGLLIHSTAGFVDPGFAGYLTLELSNVANLPIKIYPEMKIGQISFYYLNSPSESEYGSEAYGSKYQGQEGPTPS

SEQ ID NO: 141839 - protein, 96 aa, Unknown
  Bacterial polypetide isolated from the Sargasso Sea
MTIKSDKWIQRMSKKHDMIKPFSSNQIRVDDEGNKLISYGVSSYGYDVRCSSEFKVFTNIHSAIVDPKSFDEKSFVDINSDICVIPPNSFALARTG

SEQ ID NO: 141840 - protein, 186 aa, Unknown; identical to SEQ ID NO: 141825
  Bacterial polypetide isolated from the Sargasso Sea

SEQ ID NO: 141841 - protein, 150 aa, Unknown
  Bacterial polypetide isolated from the Sargasso Sea
SYSFGYDLRCGSEFKIFTNIKGATADPKNFSEDNFVTVKGEEFILIPPNSFALASSLEYFKMPRNITGLVTAKSTYARCGLGTPPTVLEAGWHGNLVLEFSNHTSNSIKLYANSGAAQILFFQGEQPEVSYADRKGKYQGQTGITLAKSK

SEQ ID NO: 141842 - protein, 63 aa, Unknown
  Bacterial polypetide isolated from the Sargasso Sea
MSVQSDRWIIQMARDNDMISPFEDKQVRGDKISFGVSSYGYDARVSDEFKIFTNVNSEIVDPQ

SEQ ID NO: 141843 - protein, 126 aa, Unknown
  Bacterial polypetide isolated from the Sargasso Sea
MNDKWIKKMALEHDMIVPFQDKLISEGKISSGVSSFGFDCTLSDTFKIFHNTHAGIVDPKNFDNSNFIEKKSKEILLPGNSFCLGVTEQVFKLPRHVLAICVGKSTYARAGIIVNVTPIEPEFTVQ

SEQ ID NO: 141844 - protein, 53 aa, Unknown
  Bacterial polypetide isolated from the Sargasso Sea
MSFLTLPPLPAKIYANEGAAQFIFIKGNEKPEITYSKRKGKYMKQRGVTLPKI

SEQ ID NO: 141845 - protein, 186 aa, Unknown
  Bacterial polypetide isolated from the Sargasso Sea
MSIQPDSWIKKMCKEHNMIEPFLDHQVSEGKISYGLSSMGYDVRISDEYRIFTNVNSSLVDPKNFSDDNFIERKGPYCIIPPNSFVLAKTVEYFRIPKDVLCICVGKSTYARTGIICNVTPIENEFEGNIVIELSNTTPNPAKIYSNEGIAQFLFFKSDTQPETTYKSKNGKYQGQTTIQVAKIKK

SEQ ID NO: 141846 - protein, 144 aa, Unknown
  Bacterial polypetide isolated from the Sargasso Sea
NHKYSHIDPKAQQDDLTSLVTATIEEPFVLHPGEFVLGTTFEKVSLSNKVVARLEGKSSLGRIGLLIHSTAGFVDPGFSGYLTLELSNVANLPIKIYPEMKIGQISFYYLNSPSESEYGSETYGSKYQGQEGPTPSRSHTDFKK

SEQ ID NO: 141847 - protein, 186 aa, Unknown
  Bacterial polypetide isolated from the Sargasso Sea
MSIQPDSWIKKMCKEHNMIEPFLDHQVSDGKISYGLSSMGYDVRISDEYRIFTNVNSSLVDPKNFSDDNFIERKGPHCIIPPNSFVLAKTVEYFRIPKDVLCICVGKSTYARTGIICNVTPIENEFEGNIVIELSNTTPNPAKIYSNEGIAQFLFFKSDTQPETTYKSKNGKYQGQTTIQVAKIKK

SEQ ID NO: 141848 - protein, 154 aa, Unknown
  Bacterial polypetide isolated from the Sargasso Sea
SYGLSSMGYDVRISDEYRIFTNVNSSLVDPKNFSDDNFIERKGPHCIIPPNSFVLAKTVEYFRIPKDVLCICVGKSTYARTGIICNVTPIENEFEGNIVIELSNTTPNPAKIYSNEGIAQFLFFKSDTQPETTYKSKNGKYQGQTTIQVAKIKK

SEQ ID NO: 141849 - protein, 184 aa, Unknown
  Bacterial polypetide isolated from the Sargasso Sea
KMILNDKQITKLAKEQEMINPFVNKSVSNGISHGLNSFGYDLSCGSEFKIFTNIKGATADPKNFSEDNFVTVKGEDSILIPPNSFALASSLEYFKMPRNVTGLVTAKSTYARCGLGTPPTVLEAGWHGNLVLEFSNHTSNSIRLYANSGAAQILFFQGEQPEISYADRNGKYQGQKGITLAKSK

SEQ ID NO: 141850 - protein, 186 aa, Unknown; identical to SEQ ID NO: 141825
  Bacterial polypetide isolated from the Sargasso Sea

SEQ ID NO: 141851 - protein, 211 aa, Unknown
  Bacterial polypetide isolated from the Sargasso Sea
MHATSRATTSNPSSGGERLRRQRSGRHVAHGGRQPVTVLSDQQILDEVHIEPKQQSQCGEGVVSFGVSSYGYDVRVGTRFKIFTNTTSGGVAIVDPKRFTDDLFLEVDTEANGVDHVIIPPNSFALAETVEWIEVPRDVLTICVGKSTYARCGLVVNVTPLEPEWRGKVTLEISNTTPLPAKVYANEGIAQMIFLKADTMCRTSYADRRGK

SEQ ID NO: 141852 - protein, 186 aa, Unknown
  Bacterial polypetide isolated from the Sargasso Sea
MSIQPDSWIKKMCKEHNMIEPFLDHQVSEGKISYGLSSMGYDVRISDEYRIFTNVNNSLVDPKNFSDDNFIERKGPHCIIPPNSFVLAKTVEYFRIPKDVLCICVGKSTYARTGIICNVTPIENEFEGNIVIELSNTTPNPAKIYSNEGIAQFLFFKSDTQPETTYKSKNGKYQGQTTIQVAKIKK

SEQ ID NO: 141853 - protein, 186 aa, Unknown
  Bacterial polypetide isolated from the Sargasso Sea
MSIQPDSWIKKMCKEHNMIDPFLDHQVSEGKISYGLSSMGYDVRISDEYRIFTNVNSSLVDPKNFSDENFIERKGPHCIIPPNSFVLAKTVEYFRIPKDVLCICVGKSTYARTGIICNVTPIENEFEGNIVIELSNTTPNPAKIYSNEGIAQFLFFKSDTQPETTYKSKNGKYQGQTTIQVAKIKK

SEQ ID NO: 141854 - protein, 186 aa, Unknown
  Bacterial polypetide isolated from the Sargasso Sea
MSIKPDTWIKKMCKEYNMIDPFLDHQVSEGKISYGLSSMGYDVRISDEYRIFTNVNSSLVDPKNFSDENFIERKGPYCIIPPNSFVLAKTIEYFRIPKDVLCICVGKSTYARTGIICNVTPIENEFEGNIVIELSNTTPNPAKIYSNEGIAQFLFFKSDTQPETTYKSKNGKYQGQTTIQVAKIKK

SEQ ID NO: 141855 - protein, 108 aa, Unknown
  Bacterial polypetide isolated from the Sargasso Sea
MTVLSDKWIKKTVKEKGMIKPFISKQVRKGKISFGLSSYGYDARVSNEFKIFTNVNSGIVDPKIFKKESFVTKIGKECIIPPNSFALARTIKYFKIPDDILVICLGKS

SEQ ID NO: 141856 - protein, 68 aa, Unknown
  Bacterial polypetide isolated from the Sargasso Sea
MTVLSDKWIRKMSKEENMITPFEEKQVRGDSISYGLSSFGYDARVSEEFKIFTNVNSEIVDPKNFKPT

SEQ ID NO: 141857 - protein, 148 aa, Unknown
  Bacterial polypetide isolated from the Sargasso Sea
FFENHKYSHIDPKAQQDDLTSLVTATIEEPFVLHPGEFVLGTTFEKVSLSNKVVARLEGKSSLGRIGLLIHSTAGFVDPGFSGYLTLELSNVANLPIKIYPEMKIGQISFYYLNSPSESEYGSETYGSKYQGQEGPTPSRSHTDFKKQ

SEQ ID NO: 141858 - protein, 135 aa, Unknown
  Bacterial polypetide isolated from the Sargasso Sea
NFYNVNSSLVDPKNFSDENFIERKGPHCIIPPNSFVLAKTVEYFRIPKDVLCICVGKSTYARTGIICNVTPIENEFEGNIVIELSNTTPNPAKIYSNEGIAQFLFFKSETEPETTYKSKNGKYQGQTTIQVAKIK

SEQ ID NO: 141859 - protein, 183 aa, Unknown
  Bacterial polypetide isolated from the Sargasso Sea
MILNDKQIKKLAEEEEMIKPFVGESVSKGISHGLNSFGYDLRCGSEFKIFTNIKGATADPKNFSEDNFITVKDEESILIPPNSFALASSLEYFKMPRNVTGLVTAKSTYARCGLGVPPTVLEGGWNGVLVLEFSNHTSNSIRLYANSGAAQILFFQGEQPDVSYADRNGKYQGQTGITLAKSK

SEQ ID NO: 141860 - protein, 60 aa, Unknown
  Bacterial polypetide isolated from the Sargasso Sea
MPVLSDKWIKKMALEGMIAPFEEKQIREGKISYGLSSYGYDARVSNEFKIFTNINFLILL

SEQ ID NO: 141861 - protein, 58 aa, Unknown
  Bacterial polypetide isolated from the Sargasso Sea
MTIKSDKWIRKMAVEHGMIEPFQEDQIRYSDDNSRLISYGLSSYGYDVRCANEFKVFT

SEQ ID NO: 141862 - protein, 175 aa, Unknown
  Bacterial polypetide isolated from the Sargasso Sea
MCKEHNMIEPFLDHQVSEGKISYGLSSMGYDVRISDEYRIFTNVNSSLVDPKNFSDDNFIERKGPYCIIPPNSFVLAKTVEYFRIPKDVLCICVGKSTYARTGIICNVTPIENEFEGNIVIELSNTTPNPAKIYSNEGIAQFLFFKSDTQPETTYKSKNGKYQGQTTIQVAKIKK

SEQ ID NO: 141863 - protein, 198 aa, Unknown
  Bacterial polypetide isolated from the Sargasso Sea
MLKNDLWINQKASEGMLNPFQSNLVRHLDPGGNQQKPVLSYGCSSYGYDLRLSSQEFLIFRHIPGTVMNPKNFNPNNLEQTVLHHDDDGDFFILPAHSYGLGVALEKMKVPENITVICIGKSTYARLGIIVNTTPAEAGWEGHLTLEFSNSSGADCRIYANEGICQLLFFEGDPCSTTYKDRKGKYQNQPEKVTLAKI

SEQ ID NO: 141864 - protein, 53 aa, Unknown
  Bacterial polypetide isolated from the Sargasso Sea
MSIKSDKWIRRMAAEHGMIEPFEPGQVREVEGRKIISYGTSSYGYDIRCAPEF

SEQ ID NO: 141865 - protein, 183 aa, Unknown
  Bacterial polypetide isolated from the Sargasso Sea
MILSDKQIKKFAEDEGMIDPFVSKSVSKGISHGLNSFGYDLRCGSEFKIFTNIKGATADPKNFSEDNFITVKGEDSILIPPNSFALASSLEYFKMPRTVTGLVTAKSTYARCGLGTPPTVLEAGWHGNLVLEFSNHTSNSIRLYANSGAAQILFFQGEQPEISYADRDGKYQGQTGITLAKSK

SEQ ID NO: 141866 - protein, 188 aa, Unknown
  Bacterial polypetide isolated from the Sargasso Sea
MSIQTDTWIKKMCKEHNMIDPFLDHQVSDGKISYGLSSMGYDVRISDEYRIFTNVNSSLVDPKNFSEDNFIERKGPFCIIPPNSFVLAKTIEYFRIPKDVLCICVGKSTYARTGIICNVTPIENEFEGNIVIELSNTTPNPAKVYSNEGIAQFLFFKSDSQPETTYKSKNGKYQGQTTIQVAKIKKNG

SEQ ID NO: 141867 - protein, 197 aa, Unknown
  Bacterial polypetide isolated from the Sargasso Sea
MLKNDLWINQKASEGMIKPFQSNLVRHLEPDNQQKPVLSYGCSSYGYDLRLSSKEFLIFRHIPGTVMNPKKFNPDNLEKTILHHDNDGDYFILPAHSYGLGVALEKMRVPENITVICIGKSTYARLGIIVNTTPAEAGWEGHLTLEFSNSSGADCRIYANEGICQLLFFEGDPCSTTYEDRRGKYQNQPEKVTLAKI

SEQ ID NO: 141868 - protein, 63 aa, Unknown
  Bacterial polypetide isolated from the Sargasso Sea
MSIKPDVWIKKMAESVGMIEPFSKNQVRVDEKGEKLISYGVSSFGYDVRCANEFKVFTNIHSA

SEQ ID NO: 141869 - protein, 122 aa, Unknown
  Bacterial polypetide isolated from the Sargasso Sea
SKDEPFVLHPGEFVLGTTFEKVALSNKIVARLEGKSSLGRIGLLIHSTAGFVDPGFSGYLTLELSNVANLPIKIYPEMKIGQISFYYLNSPSEAEYGDVSYGSKYQGQEGPTPSKSHSDFSS

SEQ ID NO: 141870 - protein, 185 aa, Unknown
  Bacterial polypetide isolated from the Sargasso Sea
MSIQPDTWIKKMCKEHKMIDPFLDHQVSDGKISYGLSSMGYDVRISDEYRIFTNVNTSLVDPKNFSDDNFIERKGPYCIIPPNSFVLAKTVEYFRIPKDVLCICVGKSTYARTGIICNVTPIENEFEGNIVIELSNTTPNPAKIYSNEGIAQFLFFKSDTQPETTYKSKQGKYQGQTTIQVAKIK

SEQ ID NO: 141871 - protein, 111 aa, Unknown
  Bacterial polypetide isolated from the Sargasso Sea
MPVLSDKWIKKNAKFKGMIKPFVNKQVRKGKISFGLSSYGYDARVSNEFKIFTNVNSGVVDPKIFKKESFVTKKGKECIIPPNSFALASTIEYFKIPEDVLVICLGKSTYA

SEQ ID NO: 141872 - protein, 159 aa, Unknown
  Bacterial polypetide isolated from the Sargasso Sea
SIDLRVGADFRVFENHKYSHIDPKAQQDDLTSLVTASIEEPFVLHPGEFVLGTTFEKVSLSNKVVARLEGKSSLGRIGLLIHSTAGFVDPGFSGYLTLELSNVANLPIKIYPEMKIGQISFYYLNSPSESEYGSETYGSKYQGQEGPTPSRSHTDFKKL

SEQ ID NO: 141873 - protein, 84 aa, Unknown
  Bacterial polypetide isolated from the Sargasso Sea
MTVLSDNWIKKMSKEKDMISPFEEKQIRGDSISYGLSSFGYDARVSNEFKIFTNVNSEIVDPKNFKPTNFVTKRLNECIIPPNS

SEQ ID NO: 141874 - protein, 268 aa, Unknown
  Bacterial polypetide isolated from the Sargasso Sea
KRALEQILEYKKFFDNDLNVIQEFIESEELNQDDRRQIKLLKTNYKKILSHKDYVLKLNSGNKYSQKLIKFIYDSNLPIKILWEGTSQNALPENLFDYKINGFCSSLYEDAINSILRNINNDEGSTLVIYSDQYQNIAQNIASYSPQIWTIPYSASNFQDYAAEILGVRSSNKRFEKISSLNPNQKLQFNPRPRKDLKEIILLVDPKNFKAMIPALRYHGGNNFKYLNFISALEEVDDPLQLIDYEDSYVPLSTYASKKIGSGSMKSM

SEQ ID NO: 141875 - protein, 186 aa, Unknown
  Bacterial polypetide isolated from the Sargasso Sea
MSIQPDTWIKKMCKEHNMIDPFLDHQVSEGKISYGLSSMGYDVRISDEYRIFTNVNSSLVDPKNFSDDNFIERKGPYCIIPPNSFVLAKTVEYFRIPKDVLCICVGKSTYARTGIICNVTPIENEFEGNIVIELSNTTPNPAKIYSNEGIAQFLFFKSDTQPETTYKSKNGKYQGQTTIQVAKIKK

SEQ ID NO: 141876 - protein, 187 aa, Unknown
  Bacterial polypetide isolated from the Sargasso Sea
MLSDKDIKKALEDKWIEISPLDQGYIQPSSVDLRVGTEFRVFENHKYSHIDPKSPQEDLTTLVEASKDEPFVLHPGEFVLGTTYEKVALSNKIVARLEGKSSLGRIGLLIHSTAGFVDPGFSGYLTLELSNVANLPIKIYPEMKIGQISFYYLNSPSEAKYGDVSYGSKYQGQEGPTPSKSHSDFSS

SEQ ID NO: 141877 - protein, 187 aa, Unknown
  Bacterial polypetide isolated from the Sargasso Sea
MLSDVDIKRALDEKLIEVSPLDETYIQPSSIDLRVGSEFRVFENHKYSHIDPKADQDDLTTLVTATIEEPFVLHPGEFVLGTTFERVTLSNKVVARLEGKSSLGRIGLLIHSTAGFVDPGFAGYLTLELSNVANLPIKIYPEMKIGQISFYYLNSPSESEYGSEAYGSKYQGQEGPTPSKSHSDFKK

SEQ ID NO: 141878 - protein, 183 aa, Unknown
  Bacterial polypetide isolated from the Sargasso Sea
MILNDKQIIKLAEEHEMISPFVNKSVANGISHGVNPFGYDLRCGSEFKIFTNIKGATADPKNFSEDNFITVKDEESILIPPNSFALAASLEYFKMPRNVTGLVTAKSTYARCGLGVPPTVLEAGWEGVLVLEFSNHTSNSIRLYANSGAAQILFFQGDQPEVSYADRDGKYQGQTGITLAKSK

SEQ ID NO: 141879 - protein, 180 aa, Unknown
  Bacterial polypetide isolated from the Sargasso Sea
MSIQPDSWIKKMCKEHKMIEPFLDHQVSEGKISYGLSSMGYDVRISDEYRIFTNVNSSLVDPKNFSDENFIERKGPYCIIPPNSFVLAKTIEYFRIPKDVLCICVGKSTYARTGIICNVTPIENEFEGNIVIELSNTTPNPAKIYSNEGIAQFLFFKSDTQPETTYKSKNGKYQGQTTIQ

SEQ ID NO: 141880 - protein, 185 aa, Unknown
  Bacterial polypetide isolated from the Sargasso Sea
MSIQPDSWIKKMCKEKKMIDPFVDHQVSEGKISYGLSSMGYDVRISDEYRIFTNVNTSLVDPKNFSDDNFIEKKGPYCIIPPNSFVLAKTVEYFKIPKDVLCICVGKSTYARTGIICNVTPIENEFEGNIVIELSNTTPNPAKIYSNEGIAQFLFFKSETQPETTYKSKNGKYQGQTTIQVAKIK

SEQ ID NO: 141881 - protein, 186 aa, Unknown; identical to SEQ ID NO: 141825
  Bacterial polypetide isolated from the Sargasso Sea

SEQ ID NO: 141882 - protein, 183 aa, Unknown
  Bacterial polypetide isolated from the Sargasso Sea
MILNDKQIIKLAEKHEMISPFVNKSVANGISHGVNPFGYDLRCGSEFKIFTNIKGATADPKNFSEDNFITVKDEESILIPPNSFALAASLEYFKMPRNVTGLVTAKSTYARCGLGVPPTVLEAGWEGVLVLEFSNHTSNSIRLYANSGAAQILFFQGEQPDVSYADRDGKYQGQTGITLAKSK

SEQ ID NO: 141883 - protein, 49 aa, Unknown
  Bacterial polypetide isolated from the Sargasso Sea
MTIKSDKWIRKMAVEHGMIEPFQEDQIRYSDDNSRLISYGLSSYGYDVR

SEQ ID NO: 141884 - protein, 197 aa, Unknown
  Bacterial polypetide isolated from the Sargasso Sea
MLKNDRWINEQAADGLLEPFQPTLVRHLDPENRTGAVLSFGCSSYGYDLRLSPQEFLIFRHVPGTVMNPKRFNPANLEPAPMQKDEDGSYFILPAHSYGLGVALEKMKVPENITVICLGKSTYARLGIIVNTTPAEAGWEGHLTLEFSNSSGADCRIYANEGICQLLFFEGDPCDTTYKDRSGKYQHQPERVTLARI

SEQ ID NO: 141885 - protein, 197 aa, Unknown
  Bacterial polypetide isolated from the Sargasso Sea
MLKNDLWINQKASEGMINPFQSNLVRHLEPDNQQKPVLSYGCSSYGYDLRLSSKEFLIFRHIPGTVMNPKNFNPDNLEKTVLHNDDDGDFFILPAHSYGLGVALEKMKVPENITVICIGKSTYARLGIIVNTTPAEAGWEGHLTLEFSNSSGADCRIYANEGICQLLFFEGDPCSTTYEDRRGKYQNQPEKVTLAKI

SEQ ID NO: 141886 - protein, 53 aa, Unknown
  Bacterial polypetide isolated from the Sargasso Sea
MSIKSDKWIKEMAESHGMIEPFQYDQVKKNGKGSIVSFGTSSYGYDVRCSDEI

SEQ ID NO: 141887 - protein, 183 aa, Unknown
  Bacterial polypetide isolated from the Sargasso Sea
MILNDKQIKELAEKEEMISPFVSESISKGISHGLNSFGYDLRCGSEFKIFTNIKGATADPKNFSEDNFITIKGEESVLIPPNSFALASSLEYFKMPRNVTGLVTAKSTYARCGLGTPPTVLEAGWHGNLVLEFSNHTSNSIKLYANSGAAQILFFSGDQPEVSYSERKGKYQGQVGITLAKSK

SEQ ID NO: 141888 - protein, 80 aa, Unknown
  Bacterial polypetide isolated from the Sargasso Sea
MAIKSDKWIRKMAKEHNMIEPFEAGQVRKGQNNDKLISYGTSSYGYDVRCSNEFKVFTNIHSATVDPKHFDENSFVDVVD

SEQ ID NO: 141889 - protein, 187 aa, Unknown
  Bacterial polypetide isolated from the Sargasso Sea
MLSDVDIKRALDEKLIEVSPLDEAYIQPSSIDLRVGSEFRVFENHKYSHIDPKADQDDLTTLVTATIEEPFVLHPGEFVLGTTFERVTLSNKVVARLEGKSSLGRIGLLIHSTAGFVDPGFAGYLTLELSNVANLPIKIYPEMKIGQISFYYLNSPSESEYGSEAYGSKYQGQEGPTPSKSHSDFKK

SEQ ID NO: 141890 - protein, 183 aa, Unknown
  Bacterial polypetide isolated from the Sargasso Sea
MILNDKQITKLAKEEEMISPFVSKSVSNGISHGLNSFGYDLSCGSEFKIFTNIKGATADPKNFSEDNFVTVKGEDSILIPPNSFALASSLEYFKMPRNVTGLVTAKSTYARCGLGTPPTVLEAGWHGNLVLEFSNHTSNSIRLYANSGAAQILFFQGDQPEISYADRNGKYQGQKGITLAKSK

SEQ ID NO: 141891 - protein, 191 aa, Unknown
  Bacterial polypetide isolated from the Sargasso Sea
MSVLSDKTILECIKRGDIVITPLDEDDVQPASVDLHFDDKVLVFSNSLRPYIDVRDSLEDLTEVVQIDENTPFILHPGEFVLGSTSEHIELPAHLVARLEGKSSLGRLGLVIHSTAGFVDPGWKGHLTLELSNLSNLPITLFHGMKIGQISFLELTTPATRLYGSKELGSKYQGQSDPTPSKYYENYSGRQ

SEQ ID NO: 141892 - protein, 183 aa, Unknown
  Bacterial polypetide isolated from the Sargasso Sea
MILNDKQIKRLAEEQEMISPFVGESVSRGISHGLNSFGYDLRCGSEFKIFTNIKGATADPKNFSEDNFITVKNEDSILIPPNSFALASSLEYFKMPRNVTGLVTAKSTYARCGLGVPPTVLEGGWNGVLVLEFSNHTSNSIRLYANSGAAQILFFQGDPPEVSYADRKGKYQGQTGITLAKSK

SEQ ID NO: 141893 - protein, 197 aa, Unknown
  Bacterial polypetide isolated from the Sargasso Sea
MLKNDLWINQKASEGMINPFQSNLVRHLEPHNEQKPVLSYGCSSYGYDLRLSSKEFLIFRHIPGTVMNPKKFNPDNLEKTILHHDDDGDFFILPAHSYGLGVALEKMKVPENITVICIGKSTYARLGIIVNTTPAEAGWEGHLTLEFSNSSGADCRIYANEGICQLLFFEGDPCSTTYEDRRGKYQNQPEKVTLAKI

SEQ ID NO: 141894 - protein, 186 aa, Unknown
  Bacterial polypetide isolated from the Sargasso Sea
MSIQPDSWIKKMCKEYNMIEPFLDHQVAEGKISYGLSSMGYDVRISDEYRIFTNVNNSLVDPKNFSDDNFIEKKGPHCIIPPNSFVLAKTVEYFRIPKDVLCICVGKSTYARTGIICNVTPIENEFEGNIVIELSNTTPNPAKIYSNEGIAQFLFFKSETQPETTYKSKKGKYQGQTTIQVAKIKK

SEQ ID NO: 141895 - protein, 58 aa, Unknown
  Bacterial polypetide isolated from the Sargasso Sea
MAVLSDKWIRKNALTKGMIKPFVSKQVRKGKISFGLSSYGYDARVSNEFKIFTNVNSG

SEQ ID NO: 141896 - protein, 82 aa, Unknown
  Bacterial polypetide isolated from the Sargasso Sea
MSIKSDKWIKKMSQNYSMITPFEENQIKANDNGKIISYGTSSYGYDVRCADEFKVFTNINSSLVDPKNFDDQSFVDIKSECL

SEQ ID NO: 141897 - protein, 118 aa, Unknown
  Bacterial polypetide isolated from the Sargasso Sea
MSIKSDKWIRKMAEDHKLIEPFEAGQIRKDEKENRLISYGTSSYGYDVRCSNEFKVFTNIHSATVDPKNFDENSFVDVVDDVCVIPPNSFALASTIEYFKIPRNVLTICLGKSTYARC

SEQ ID NO: 141898 - protein, 81 aa, Unknown
  Bacterial polypetide isolated from the Sargasso Sea
MSVQSDKWIIQMARENDMISPFEDKQVRGDKISFGVSSYGYDARVSDEFKIFTNVNSEIVDPKNFKSSNFITKNSSECIIP

SEQ ID NO: 141899 - protein, 77 aa, Unknown
  Bacterial polypetide isolated from the Sargasso Sea
MSVLSDKWIRKMSKEQDMITPFEEKQIRGDSISYGLSSYGYDARVSDEFKIFTNVNSEIVDPKNFKPTNFVTKSTPE

SEQ ID NO: 141900 - protein, 77 aa, Unknown
  Bacterial polypetide isolated from the Sargasso Sea
MSVQSDKWIIQMARDNDMISPFEDKQVRGDKISFGVSSYGYDARVSDEFKIFTNVNSEIVDPKNFKSSNFITKNSSE

SEQ ID NO: 141901 - protein, 78 aa, Unknown
  Bacterial polypetide isolated from the Sargasso Sea
MTIKSDKWIRKMAVEHGMIEPFQEDQIRYSDDNSKLISYGLSSYGYDVRCANEFKVFTNIHSAIVDPKSFDEIKFCRY

SEQ ID NO: 141902 - protein, 107 aa, Unknown
  Bacterial polypetide isolated from the Sargasso Sea
MSIMPDSWIKKMSKEKNMIEPFADEQNKNGVISYGVSSYGYDARVSDEFKVFTNVNNALVDPKNFSEASFIERKADSCIIPPNSFVLARTVEYFKIPRDGFSDLFRK

SEQ ID NO: 141903 - protein, 150 aa, Unknown
  Bacterial polypetide isolated from the Sargasso Sea
MSIKSDKWIKMMSEDYSMISPFTDKQISKEKISFGLSSYGYDLRVSDEYKIFTNINSSIVDPKSFDSTSFIDFKGDVCIVPPNSFALARSVEYFKIPRNVLTICVGKSTYARCGIIVNVTPFEPEWEGYVTLEISNTTPLPARIYSNEGL

SEQ ID NO: 141904 - protein, 136 aa, Unknown
  Bacterial polypetide isolated from the Sargasso Sea
MSVQSDKWIKKMSLEHNMIDPFVEKQVSSGKISYGLSSFGYDVRVSDEYKIFTNVNSSIVDPKNFSETNFVDRKGPECIIPPNSFVLARTIEYFKIPRDILCICVGKSTYARCGIVINVTPIENEFEGHITLEFLT

SEQ ID NO: 141905 - protein, 137 aa, Unknown
  Bacterial polypetide isolated from the Sargasso Sea
MSVLSDKWIRKMSKEEGMIYPFEEKQVRGDSISYGLSSFGYDARVSDEFKIFTNVNSEIVDPKNFKPSNFVTKNVSECIIPPNSFVLARTVEKFKIPSDVLVICLGKSTYARCGIIVNVTPLEPGWEGYVTLEFLTL

SEQ ID NO: 141906 - protein, 123 aa, Unknown
  Bacterial polypetide isolated from the Sargasso Sea
MSVLSDNWIKKMSKENGMIFPFEEKQIRGDSISYGLSSFGYDARVSDEFKIFTNVNSEIVDPKNFKPTNFVTKKVSECIIPPNSFVLARTVEKFKIPNDVLVICLGKSTYARCGIIVNVTPLE

SEQ ID NO: 141907 - protein, 135 aa, Unknown
  Bacterial polypetide isolated from the Sargasso Sea
MTVQSDKWITKMAKDNNMISPFEDKQIRGNSISYGVSSFGYDARLSDEFKIFTNVNTEIVDPKNFKSTSFITKKGKECIIPPNSFILASTVEYFKIPKDVLVICLGKSTYARCGVIVNVTPLEPGWEGVVTLELS

SEQ ID NO: 141908 - protein, 117 aa, Unknown
  Bacterial polypetide isolated from the Sargasso Sea
MSIQSDKWIKKMSKENNMISPFEEKQIRGNSISYGLSSFGYDARVSDEFKIFTNVNSEVVDPKNFKPTNFVTKKVSECIIPPNSFCLARTVEKFCIPNDVLVICLGKSTYARCGIIV

SEQ ID NO: 141909 - protein, 44 aa, Unknown
  Bacterial polypetide isolated from the Sargasso Sea
PAKIYANEGIAQVLFFEADSECDVSYADKKGKYQKQESIVLPKL

SEQ ID NO: 141910 - protein, 60 aa, Unknown
  Bacterial polypetide isolated from the Sargasso Sea
GWEGHVTLEFSNTTPLPAKIYANEGVAQLVFIKGNEKPSITYAKRKGKYMKQKGVTLPKI

SEQ ID NO: 141911 - protein, 58 aa, Unknown
  Bacterial polypetide isolated from the Sargasso Sea
EGHVTLEFSNTTPLPAKIYANEGVAQFIFLKGNEKPEVTYAKRKGKYMRQKGVTLPKV

SEQ ID NO: 141912 - protein, 73 aa, Unknown
  Bacterial polypetide isolated from the Sargasso Sea
MTVLSDKWIKNMAKEYEMISPFEESQVRGNKISFGTSSYGYDARVNSEFKIFTNVNSEIVDPKNFKSSSLYQN

SEQ ID NO: 141913 - protein, 128 aa, Unknown
  Bacterial polypetide isolated from the Sargasso Sea
MTVLSDKWIRKMSKEEDMISPFEEKQVRGESISYGLSSFGYDARVSNEFKIFTNVNSEIVDPKNFKPTNFVTKNVSECIIPPNSFVLARTVEKFKIPKDVLVICLGKSTYARCGIIVNVTPLEPGWQG

SEQ ID NO: 141914 - protein, 89 aa, Unknown
  Bacterial polypetide isolated from the Sargasso Sea
MSVQSDKWIIQMARNHNMISPFEDKQVRGDKISFGVSSYGYDARVSNEFKIFTNVNSEIVDPKNFKSSNFITKNSSECIIPPNSFVLAR

SEQ ID NO: 141915 - protein, 63 aa, Unknown
  Bacterial polypetide isolated from the Sargasso Sea
MTIKSDKWIRKMAVEHGMIEPFQEDQIRYSGDNSRLISYGLSSYGYDVRCANEFKVFTNIHSA

SEQ ID NO: 141916 - protein, 66 aa, Unknown
  Bacterial polypetide isolated from the Sargasso Sea
MTIKSDKWIRKMAVEHGMIEPFQEDQIRYSDDNSRLISYGLSSYGYDIRCANEFKVFTNIHSAIVT

SEQ ID NO: 141917 - protein, 108 aa, Unknown
  Bacterial polypetide isolated from the Sargasso Sea
ECIIPPNSFVLASTVEHFRIPKDVLVVCLGKSTYARCGIIVNVTPLEPGWEGHVTLEFSNTTPLPAKVYANEGVAQFIFLKGNETPETTYSDRNGKYMGQTGVTLPKI

SEQ ID NO: 141918 - protein, 74 aa, Unknown
  Bacterial polypetide isolated from the Sargasso Sea
ARCGIIVNVTPLEPGWEGYVTLEFSNTTPLPAKIYANEGVAQFIFLKGNEKPEVTYADRDGKYMGQTGVTLPKV

SEQ ID NO: 141919 - protein, 47 aa, Unknown
  Bacterial polypetide isolated from the Sargasso Sea
TPLPAKIYANEGVAQFVFIKGNEDPAVSYADRNGKYQGQKGVTLPKI

SEQ ID NO: 141920 - protein, 67 aa, Unknown
  Bacterial polypetide isolated from the Sargasso Sea
NVTPLEPSWCGNVTLEFSNTTPLPAKIYANEGACQFVFLKGNEKPETTYSDREGKYMDQKGVTLPKV

SEQ ID NO: 141921 - protein, 107 aa, Unknown
  Bacterial polypetide isolated from the Sargasso Sea
MAVLSDKWIRKSALTKGMIKPFVSKQVRKGKISFGLSSYGYDARVSNEFKIFTNVNSGIVDPKVFKKESFVTKIGKECIIPPNSFALARTIEYFKIPEDVLVICLGK

SEQ ID NO: 141922 - protein, 126 aa, Unknown
  Bacterial polypetide isolated from the Sargasso Sea
MTVLSDKWIKKMVKSTNMIKPFVSKQIRKGKISFGLSSYGYDARVSNEFKIFTNVNSGVVDPKVFKKESFVTKIGKECIIPPNSFALGSTIEYFKIPENVLVICLGKSTYARCGIIVNVTLLEPGW

SEQ ID NO: 141923 - protein, 117 aa, Unknown
  Bacterial polypetide isolated from the Sargasso Sea
MSIKSDKWIKDMSIKHEMIKPFSEVQVRLDDSGNKLISYGVSSYGYDVRCSNEFKVFTNIHSAVVDPKSFDEKSFVDINSDVCIIPPNSFALARTIEYFKIPRNVLTVCLGKSTYAR

SEQ ID NO: 141924 - protein, 98 aa, Unknown
  Bacterial polypetide isolated from the Sargasso Sea
MSVQSDKWIKKMAKENGMISPFEEEQVRGNKISFGTSSYGYDARVNSEFKVFTNVNSEIVDPKNFKPTSFVSKTGPECIIPPNSFALASTVEYLKIPK

SEQ ID NO: 141925 - protein, 106 aa, Unknown
  Bacterial polypetide isolated from the Sargasso Sea
MPVLSDKWIKKNALTKGMIKPFVSKQVRKGKISFGLSSYGYDARVSNEFKIFTNVNSGIVDPKVFKKESFVTKIGKECIIPPNSFALARTIEYFKIPEDVLVICLG

SEQ ID NO: 141926 - protein, 185 aa, Unknown
  Bacterial polypetide isolated from the Sargasso Sea
MSVQSDKWIKKMSLEHNMIDPFVEKQVSSGKISYGLSSFGYDVRVSDEYKIFTNVNSSIVDPKNFSETNFVDRKGPECIIPPNSFVLARTIEYFKIPRDILCICVGKSTYARCGIVINVTPIENEFEGHITLEFSNTTPNPAKIYSGEGCAQFLFLKGNEQPETSYKSRGGKYQGQKGVTLAKVK

SEQ ID NO: 141927 - protein, 108 aa, Unknown
  Bacterial polypetide isolated from the Sargasso Sea
MTVLSDKWIKKAAQDGMIKPFVSKQVRKGKISFGLSSYGYDARVSNEFKIFTNVNSGIVDPKVFKKESFVTKIGKECIIPPNSFALARTVEYFKIPENVLVICLGKST

SEQ ID NO: 141928 - protein, 96 aa, Unknown
  Bacterial polypetide isolated from the Sargasso Sea
MSVQSDKWIIQMARENDMISPFEDKQVRGDKISFGVSSYGYDARVSDEFKIFTNVNSEIVDPKNFKSSNFITKNSSECIIPPNSFVLARTVEYFKI

SEQ ID NO: 141929 - protein, 128 aa, Unknown
  Bacterial polypetide isolated from the Sargasso Sea
MKLVKNENNKNAEVVTDEEAREAFVKILKWLGEDPSREGLLETPKRVTKAFKEYFKGYKEDPKEILSKTFGDVEGYSDMVVQKNISVQSHCEHHMAPIIGIAHVAYIPNERVVGLSKIARVVEVFSKR

SEQ ID NO: 141930 - protein, 136 aa, Unknown
  Bacterial polypetide isolated from the Sargasso Sea
MKIVKNLNTTILKEKPEVSDKEAQEAFKIILRWIGENPDREGLRETPRRVTKAFKEYFKGYKQEITSELLKTFGDVNGYDDMVLQKNISVQSHCEHHMAPIIGVAHVAYLPNKRVVGLSKLARVVEVYSKRLQTQE

SEQ ID NO: 141931 - protein, 210 aa, Unknown
  Bacterial polypetide isolated from the Sargasso Sea
MEVIGLSKIFNNKDAVKDISFKVNKNEIIGILGPNGCGKTTTIGMILGLLKPSNGKVLINGIEIEKKRVDLLNHLNFISPYIELPKKLTVKQNLEVYGRLYDIKNLKKKIEMLTEKLRLSEIINKLTGELSSGQKNRVSLAKSIINNPAVLLLDEPTASLDPETGDFVRSFLESYQKENKASILLASHNMSEVERLCSSVLMMNKGSIVD

SEQ ID NO: 141932 - protein, 170 aa, Unknown
  Bacterial polypetide isolated from the Sargasso Sea
MDKERVKKLVRELIIEIGEDPTREGLKDTPRRIADAYTEIFSGYDSDSELSVQFSEDSEMVVAKNIQFYSMCEHHMLPFYGTIQIAYIPNGRVFGISKLVRVVEKFSKRLQIQERITKNVADEIYAQGVKGVAVMAEGEHLCMKMRGVRNDAQMTSSAFRGVFEDQKTKE

SEQ ID NO: 141933 - protein, 111 aa, Unknown
  Bacterial polypetide isolated from the Sargasso Sea
YSMCEHHMLPFFGTIQIAYIPNGRVFGISKLVRVVEKFSKRLQIQERITKNVADEIYAQGVKGVAVMAEGEHLCMKMRGVRNDAQMTSSAFRGVFEDQKTKEELLKAIQNK

SEQ ID NO: 141934 - protein, 82 aa, Unknown
  Bacterial polypetide isolated from the Sargasso Sea
ARVVEVFSKRLQTQERLTMQIASTIMDSLDAKGVAVSIDSTHQCMTMRGIKKEQATTVTNYYLGKFKDDLSYQNRYLRFIAK

SEQ ID NO: 141935 - protein, 144 aa, Unknown
  Bacterial polypetide isolated from the Sargasso Sea
MKLVKDIDNNQNSKKVSDKEAEEAFKTILAWMGEDPNREGLLETPKRVVKAFKEYFKGYKEDPNQVLDKTFGDVEGYDDMVVQKNISVQSHCEHHMAPIIGKAHVAYIPKKRVVGLSKLARVVEVFSKRLQTQERLTMQIANTL

SEQ ID NO: 141936 - protein, 160 aa, Unknown
  Bacterial polypetide isolated from the Sargasso Sea
MRLNKFISHNTRYSRREADQLIEEGRVTIDGKAVRNMGMQVTENHKVMLDKKEIKADKNRMYTVIVYNKPKGELVTKNDPKGRKIIYDSLPSKYKHFLCVGRLDYASEGVLLLSDSVDVVNKLMHSNLERVYKIKVNGTITPQIEEAMLNGLVLDDAKAG

SEQ ID NO: 141937 - protein, 129 aa, Unknown
  Bacterial polypetide isolated from the Sargasso Sea
MKLVKDIDKSSSKKPEVSDKQAEEAFRTILKWIGEDPTREGLIETPKRVIKAFKEYFKGYHQDADADLSKTFGDVEGYDDMVVEKNITLESHCEHHMAPIIGIAHVAYIPNKRVVGLSKLARTVEIFSK

SEQ ID NO: 141938 - protein, 166 aa, Unknown
  Bacterial polypetide isolated from the Sargasso Sea
FKKTPERAAKSWVEEICSGLGEKKFRLTTFPIGENFEPSMIVLQHIPVKSVCAHHLLPFIGEATVAYIPNKMLCGISKLSRIVDYFSRRPQVQEELTNDIVNYLCENLDPQGAGVIIKATHMCMAMRGVSHDGVMTTSTLKGSFLNESNVRAEFMALAHKESLNKL

SEQ ID NO: 141939 - protein, 53 aa, Unknown
  Bacterial polypetide isolated from the Sargasso Sea
TPKGVAVTVDAAHQCMTMRGIKKEKATTVTNYFLGSFREDLSIQNRYLRYIAK

SEQ ID NO: 141940 - protein, 57 aa, Unknown
  Bacterial polypetide isolated from the Sargasso Sea
GLDAYGVAVNIDSTHQCMTMRGIKKEKATTVTNYFTGKFKEDLSFQNRFLRYISDKN

SEQ ID NO: 141941 - protein, 202 aa, Unknown
  Bacterial polypetide isolated from the Sargasso Sea
MTSVITKKNFRQNLEKSISRDEAEKAVETLIRWAGDDPTREGLRDTPRRVIDAFNEFFSGYSESPEEYLSKTFEDVQGYEDIVMLKDISFHSHCEHHMVPIIGKAHIAYIPIKKVVGISKLARTLDIFAKRLQTQETMTQQIANCINKSLKPKGVAVYIEAFHQCMTTRGVHKPNVSTITSCFLGEFKSDKSLEKRFIDYIK

SEQ ID NO: 141942 - protein, 114 aa, Unknown
  Bacterial polypetide isolated from the Sargasso Sea
MSEDKFLGNLYQRFPVTVEKGLGAHVWDIEGKEYIDCMGGYGVALLGHQNKRVTDALKSQLEKIITVHSSLYNKTREEFLENLFKVAPKNLSQVHLNNSGAEAIEAAMKFARKF

SEQ ID NO: 141943 - protein, 142 aa, Unknown
  Bacterial polypetide isolated from the Sargasso Sea
MDPDNLEFLSDKKQKIDFQNDIKLGINNKSDEEKIIVIEELFKKIMIELGLDLNDDSLAGTPKRVAKMYVKEIFSGLNKKNKPKISLFDNHFEYKKILLQKNIELTSTCEHHFLPFTGKAHIGYIANDKIIGLSKLNRIVNF

SEQ ID NO: 141944 - protein, 159 aa, Unknown
  Bacterial polypetide isolated from the Sargasso Sea
MTNNISEEEAEQAFKNIIKWIGEDPSREGLKSTPKRLVKAFREYFKGYNEDPKKILEKTFGDVHGYDDMVIQKNISVQSHCEHHMAPIIGVAHVAYIPKERVVGLSKLARVVEVFSKRLQTQERLTMQIAKTLMESLDAKGVAVSIDATHQCMTTRGIK

SEQ ID NO: 141945 - protein, 154 aa, Unknown
  Bacterial polypetide isolated from the Sargasso Sea
MKLVKNENEINKENISDKEAEEAFIKILKWMGEDPSREGLLETPKRVTKAFKEYFKGYQEDPKKILEKTFGDVEGYSDMVVQKNISVQSHCEHHMAPIIGIAHVAYIPNQRVVGLSKIARVVEVFSKRLQTQERLTVQIANTLMESLDAKGVAV

SEQ ID NO: 141946 - protein, 200 aa, Unknown
  Bacterial polypetide isolated from the Sargasso Sea
GVETPVIDNGLSRKEKIDKIEDHFDQIVATLGLDLNDDSLVDTPKRVAKMYVNEIFWGLDYDAFPKATVVENKMNYNEMIVERNISVQSNCEHHFVVIDGLATVAYVPKKNVLGLSKINRIVEYFSKRPQIQERLTEQIYHALSFILETENVAVMVDAQHYCVKSRGVEDTGSSTITSRLGGSFKEHPEVRAEFLSLIKV

SEQ ID NO: 141947 - protein, 159 aa, Unknown
  Bacterial polypetide isolated from the Sargasso Sea
MKLVKEIGKTGPKKPEVTDKQAEEAFKTILTWIGEDPSREGLIETPKRVVKAFKEYFKGYQQDASADLLKTFGDVEGYDDMVVEKNITLESHCEHHMAPIIGVAHIAYIPNKKVVGLSKLARTVEVFSKRLQTQERLTMQIAKTLMTALDAKGVAVTMT

SEQ ID NO: 141948 - protein, 154 aa, Unknown
  Bacterial polypetide isolated from the Sargasso Sea
MDKGKVLQGMQLLLEGLGVDMDDKHFQKTPERAAKSWVEEICSGLGEKKFRLTTFPIGENYEPSMVVLQHIPVKSVCAHHLLPFIGEATVAYIPNKMLCGISKLSRIVDYFSRRPQVQEELTNDIVNYLSENLDPQGAGVIIKATHMCMAMRGV

SEQ ID NO: 141949 - protein, 153 aa, Unknown
  Bacterial polypetide isolated from the Sargasso Sea
MSLPLEELADHYRAIIDGLGENSNREGLQDTPMRAAKAMQFLTQGYQQDLGTLVNNAVFESAMDEMVVVQDIELYSMCEHHVLPFIGKCHIAYLPQGKVLGLSKFARIVDMYARRLQIQENLTRQIAEAIEQVTGAKGVAVVIEAQHMCMMMR

SEQ ID NO: 141950 - protein, 183 aa, Unknown
  Bacterial polypetide isolated from the Sargasso Sea
MSAVDTIVRYIEGQNGDLREGLANTPKRVVESFDEIFSGYGKDAKSILDSTFNAEGYEGIVLLKDTEFHSTCEHHLQPFSGRGHIAYIPVERIVGISKLARLLDMHSKRLQNQERITQSVADDIVEHLSPLGCAVILEAQHGCMKCRGVMKQNAIMTTSAMRGVFFEKAEARAEVLQLMRRDN

SEQ ID NO: 141951 - protein, 156 aa, Unknown
  Bacterial polypetide isolated from the Sargasso Sea
MKLVKDIDNNLVKDSKVSDKEAEEAIVKILKWMGEDPSREGLIETPKRVIKAFREYFKGYGEDPEKVLKKTFGDVNGYDDMVIQKNISVQSHCEHHMAPIIGVAHVAYIPSKRVVGLSKLARVVEVFSKRLQTQERLTMQIATTLMKALDAKGVAV

SEQ ID NO: 141952 - protein, 122 aa, Unknown
  Bacterial polypetide isolated from the Sargasso Sea
MKLVKDTDKSPIKKEITDKQAEDAFRTILAWIGEDPNREGLVDTPKRVIKAFKEYFQGYTQDPTEELKKTFGEVEGYDDMVVEKNITMESHCEHHMAPMIGVVHIAYLPKDKVVGLSKLART

SEQ ID NO: 141953 - protein, 151 aa, Unknown
  Bacterial polypetide isolated from the Sargasso Sea
MKLVKDIDNIQNQKKISDKEAEEAFKTIITWMGEDPNREGLLETPKRVVKAFKEYFRGYKEDPHQILDKTFGDVDNYDDMVVQKNISVQSHCEHHMAPIIGKAHVAYIPKKRIVGLSKLARLVEIFSKRLQTQERLTMQIANTLMDSLDAK

SEQ ID NO: 141954 - protein, 66 aa, Unknown
  Bacterial polypetide isolated from the Sargasso Sea
LTMQIAKTLMSALDAKGVAVTIDAAHQCMTMRGIKKEKATTVTNYFLGSFKEDLSIQNRYLKYIGK

SEQ ID NO: 141955 - protein, 159 aa, Unknown
  Bacterial polypetide isolated from the Sargasso Sea
STPKRLVKAFKEYFKGYNEDPKKILEKTFGDVHGYDDMVIQKNISIQSHCEHHMAPIIGVAHVAYIPKERVVGLSKLARVVEVFSKRLQTQERLTMQIAKTLMESLDAKGVAVSIDATHQCMTTRGIKKEQATTVTNYYLGKFKEDLSYQNRYLRFISK

SEQ ID NO: 141956 - protein, 137 aa, Unknown
  Bacterial polypetide isolated from the Sargasso Sea
MKLVKDTDNKNLDTKKVSDQEAEEAIRTILSWMGEDPKREGLLETPKRVVKAFKEYFQGYNEDAKKVLDKTFGDVEGYSDMVVQKNISVQSHCEHHMAPIIGKAHVAYIPNERVVGLSKIARVVEIFSKKITDTRKI

SEQ ID NO: 141957 - protein, 218 aa, Unknown
  Bacterial polypetide isolated from the Sargasso Sea
MSYDKTKTDPALGQKVHQHLISVGVETPVIDNGLSRKEKIEKIEDHFDQIVATLGLDLKDDSLMDTPKRVAKMYVNEIFWGLDYDAFPKATVVENKMNYNEMIVERNISVQSNCEHHFVVIDGLATVAYVPKKNVLGLSKINRIVEYFSKRPQIQERLTEQIYHALSFILDTENVAVMVDAQHYCVKSRGVEDTGSSTITSRLGGSFKEHPEVRAEFL

SEQ ID NO: 141958 - protein, 150 aa, Unknown
  Bacterial polypetide isolated from the Sargasso Sea
MKLVKNENQKNLDIVSDKEAEEAFVKILKWIGEDPSREGLLETPKRVTKAFREYFKGYKEDPKEILRKTFGDVDGYDDMVVQKNISVQSHCEHHMAPIIGVAHVAYIPKDRVVGLSKLARVVEVFSKRLQTQERLTMQIAKTIMESLDAK

SEQ ID NO: 141959 - protein, 187 aa, Unknown
  Bacterial polypetide isolated from the Sargasso Sea
MIEESIKKILLEIEDDAALDGNGELREGLRNTPKRVVESWSELYSGYNKDPKEILDATFNGEGYDGIVLLKDIEFYSTCEHHMLSFTGKAHVAYIPTERIVGISKLARIVEVFSRRLQNQERITTQVADALEEYLKPLGAAIIIEAKHECMGCRGVKKGHATMTTSAMRGVFFDKAEARAELMQLIK

SEQ ID NO: 141960 - protein, 79 aa, Unknown
  Bacterial polypetide isolated from the Sargasso Sea
SKRLQTQERLTMQIANTLMESLDAKGVAVTIDSTHQCMTMRGIKKEQATTVTNYYLGQFKEDLSYQNRYLRFISTTLKD

SEQ ID NO: 141961 - protein, 171 aa, Unknown
  Bacterial polypetide isolated from the Sargasso Sea
FILLKDLTDKSDEEIDKLTFKFLDQIQKKLSKNSESELNFEILDKAVHNQPIYINGISYISLCEHHMLPFHGSVNIAVFPKKNILGISKFSDLVSHLSNNLTLQEKLTEKIATFIYEILDADGVFVKMSGKHLCSDLLNAKNSSEEVITTFSAGVYELDFSLRNEAILNFS

SEQ ID NO: 141962 - protein, 170 aa, Unknown; identical to SEQ ID NO: 141932
  Bacterial polypetide isolated from the Sargasso Sea

SEQ ID NO: 141963 - protein, 170 aa, Unknown
  Bacterial polypetide isolated from the Sargasso Sea
MDKGKVLQGMQMLLEGLGVDMDDDHFQKTPERAAKSWMEEICSGLGEKKFRLTTFPIGENYEPSMIVLQHIPVKSVCAHHLLPFIGEATVAYIPNKMLCGISKLSRIVDYFSRRPQVQEELTNDIVSYLCENLDPQGAGVIIKATHMCMAMRGVSHDGVMTTSSLKGSFL

SEQ ID NO: 141964 - protein, 73 aa, Unknown
  Bacterial polypetide isolated from the Sargasso Sea
DFKHRKRLTMQIAQTLMESLDAKGVAVSIDSTHQCMTMRGIKKEQATTVTNYYLGQFKEDLSYQNRYLRFIAK

SEQ ID NO: 141965 - protein, 170 aa, Unknown
  Bacterial polypetide isolated from the Sargasso Sea
MDKERVKKLVRELIIELGEDPTREGLKDTPRRIADAYGEIFSGYDSDSELSVQFSEDSEMVVAKNIQYYSMCEHHMLPFFGTIQIAYIPNGRVFGISKLVRVVEKYSKRLQIQERITKNIADEIYAQGVKGVAVMAEGEHLCMKMRGVRNDAKVTSSAFRGVFEDQKAKE

SEQ ID NO: 141966 - protein, 77 aa, Unknown
  Bacterial polypetide isolated from the Sargasso Sea
VFSKRLQTQERLTMQIAKTLMQGLEAKGVAVTIDAAHQCMTMRGIKKEKATTVTNYYLGSFKEDLSIQNRYLRYIAK

SEQ ID NO: 141967 - protein, 149 aa, Unknown
  Bacterial polypetide isolated from the Sargasso Sea
MKLVKNENEIIKEKVSDKEAEEAFVKILKWMGENPSREGLLETPKRVTKAFKEYFKGYQEDPKKILEKTFGDVEGYSDMVVQKNISVQSHCEHHMAPIIGIAHVAYIPNHRVVGLSKIARVVEVFSKRLQTQERLTVQIANTLMESLDT

SEQ ID NO: 141968 - protein, 114 aa, Unknown
  Bacterial polypetide isolated from the Sargasso Sea
IRVESYCEHHLAPIIGVAKVGYLPDGLVVGISKLVRVVDAFSKRLQIQERLTREIGLAIHEALNPKGVAVAIKAEHHCMCTRGVNKPGTKMLTSSFIGEAEKNLEFRRSFLEFD

SEQ ID NO: 141969 - protein, 127 aa, Unknown
  Bacterial polypetide isolated from the Sargasso Sea
QFSEDSETVVAKNIQFYSMCEHHMLPFYGTIQIAYVPNGRVFGISKLVRVVEKFSKRLQIQERITKNIADELYSQGVKGVAVIADAEHLCMKMRGVKNDAKVTTSAFRGTFEDKKIKEELLKAIHTK

SEQ ID NO: 141970 - protein, 148 aa, Unknown
  Bacterial polypetide isolated from the Sargasso Sea
MNKNKVEEGIKMMLEGLGVDLNGSHFKDTPKRATRAWTNELCSGLGEQSFELTTFDIEPDYEPSMVVLQHIPVKSLCAHHLLPFVGEATVAYIPNKMLCGLSKLARVVDYFARRPQVQEKLTHDIAKYLRSQLDPQGVGVIIKANHMC

SEQ ID NO: 141971 - protein, 185 aa, Unknown
  Bacterial polypetide isolated from the Sargasso Sea
MDEERVKKLVRELIIEVGEDPTREGLRETPKRIASMYKEIFGGYDSDSELSVQFSEDSDVVIARDIQFYSMCEHHMLPFYGKIHIAYSPNGRVFGISKLVRLVEKYSKRLQIQERVTKNIADELYAQGVKGVAVFADAEHLCMKMRGVRNDATLSSSAFRGIYENKEEKEGILALIRKRSSDSSF

SEQ ID NO: 141972 - protein, 80 aa, Unknown
  Bacterial polypetide isolated from the Sargasso Sea
FSKRLQTQERLTMQIANTLMESLDAKGVAVTIDSTHQCMTMRGIKKEQATTVTNYYLGQFKEDLSYQNRYLRFISTTLKD

SEQ ID NO: 141973 - protein, 162 aa, Unknown
  Bacterial polypetide isolated from the Sargasso Sea
MGEDPTREGLKDTPRRIADAYDEIFSGYDSDSELSVQFSEDSEMVVAKNIQYYSMCEHHMLPFFGTIQIAYIPNGRVFGISKLVRVVEKYSKRLQIQERITKNIADEIYAQGVKGVAVMAEGEHLCMKMRGVRNDAKVSSSAFRGVFENQKAKEELLKAIQN

SEQ ID NO: 141974 - protein, 138 aa, Unknown
  Bacterial polypetide isolated from the Sargasso Sea
SGYDSDSELSVQFSEDSEMVVAKNIQFYSMCEHHMLPFYGTIQIAYIPNGRVFGISKLVRVVEKFSKRLQIQERITKNVADEIYAQGVKGVAVMAEGEHLCMKMRGVRNDAQMTSSAFRGVFEDQKTKEELLKAIQNK

SEQ ID NO: 141975 - protein, 184 aa, Unknown
  Bacterial polypetide isolated from the Sargasso Sea
MNKVKVLQGMQMLLEGLGVDMDDKHFRKTPERAAKSWVEEICSGLGEKKFRLTTFPIGENYEPSMIVLQHIPVKSVCAHHLLPFIGEATVAYIPNKMLCGISKLSRIVDYFSRRPQVQEELTNDIVNYLCENLDPQGAGVIIKATHMCMAMRGVSHDGVMTTSTLKGSFLNESNVRAEFMALAH

SEQ ID NO: 141976 - protein, 181 aa, Unknown
  Bacterial polypetide isolated from the Sargasso Sea
VETLLLWAGEDPRREGLIDTPKRVASAYEDWFSGYREDPVKFLERTFEEVEGYDEMIVLRDISFESHCEHHMAPIIGVAHVGYLPSNKVVGISKLARVVEAFARRFQVQEKLTAQIANCIKDVLRPRGVGVVIDASHQCMTTRGIHKSGVSMVTSQMLGAFRKDARTRSEFLTMIGKNSPA

SEQ ID NO: 141977 - protein, 61 aa, Unknown
  Bacterial polypetide isolated from the Sargasso Sea
PNTLMESLDAKGVAVQIDSTHQCMTMRGIKKEQATTVTNFYLGQFKDDLSYQNRYLRFIAK

SEQ ID NO: 141978 - protein, 77 aa, Unknown
  Bacterial polypetide isolated from the Sargasso Sea
IFSKRLQTQERLNMQIAKTLMEGLEAKGVAVTIDAAHQCMTMRGIKKEKATTVTNYYLGSFKDDLSIQNRYLRYISK

SEQ ID NO: 141979 - protein, 156 aa, Unknown
  Bacterial polypetide isolated from the Sargasso Sea
MKLVKDTDINKQKNKISDKEAEEAFKTILAWMGEDPNREGLLETPKRVVKAFKEYFRGYNEDPNQILDKTFGDVDGYDDMVIQKNISVQSHCEHHMAPIIGKAHVAYIPKDRVVGLSKLARVVEVFSKRLQTQERLTMQIANTLMQSLDAKRSSCT

SEQ ID NO: 141980 - protein, 57 aa, Unknown
  Bacterial polypetide isolated from the Sargasso Sea
MDSLDAKGVAVSIDAAHQCMTMRGIKKEQATTVTNYYLGKFKEDLSYQNRYLRFISK

SEQ ID NO: 141981 - protein, 208 aa, Unknown
  Bacterial polypetide isolated from the Sargasso Sea
MDKERVKKLVRELIIELGEDPTREGLKDTPRRIADAYGEIFSGYDSDSELSVQFSEDSEMVVAKNIQYYSMCEHHMLPFFGTIQIAYIPNGRVFGISKLVRVVEKYSKRLQIQERITKNIADEIYAQGVKGVAVMAEGEHLCMKMRGVRNDAKVTSSAFRGVFEDQKAKEELLKAISKLVRSYQKLNNPPIRNLSCQHEITYMFQVNH

SEQ ID NO: 141982 - protein, 118 aa, Unknown
  Bacterial polypetide isolated from the Sargasso Sea
MDKVSDKEAEEAFKTIIKWIGEDPNREGLIETPRRVVKAFKEYFKGYSQESSSELNKTFGDVEGYNDMVLQKNISISSHCEHHMAPILGVAHVAYIPNKRIVGLSKLARTVEVFSKRL

SEQ ID NO: 141983 - protein, 57 aa, Unknown
  Bacterial polypetide isolated from the Sargasso Sea
GLDAYGVAVTIDSTHQCMTMRGIKKEKATTVTNYFTGKFKEDLSFQNRFLRYISDKN

SEQ ID NO: 141984 - protein, 52 aa, Unknown
  Bacterial polypetide isolated from the Sargasso Sea
LINNAMTEGESKDMVIVKNIEFYSLCEHHMIPFYGKAHIGYIPNGKIIGLSK

SEQ ID NO: 141985 - protein, 136 aa, Unknown
  Bacterial polypetide isolated from the Sargasso Sea
MKSPLKSNVEKEDAEEAVRTLIKWIGDNPEREGLIDTPKRVIKSFQEHFAGYFQDPEEILLKTFEQTEGYDDMVILKKIDFESHCEHHMLPIIGQASIAYFPNKRIVKISKLARIVNLYAKRLQTQEVMTSQIIIL

SEQ ID NO: 141986 - protein, 152 aa, Unknown
  Bacterial polypetide isolated from the Sargasso Sea
MVKNENQKNTETISDKEAEEAFIKILQWIGEDPSREGLLETPKRVTKAFKEYFKGYKEDPKEILNKTFGDVNGYDDMVVQKNISVQSHCEHHMAPIIGVAHVAYIPNQRVVGLSKLARVVEVFSKRLQTQERLTMQIAKTIMESLDAKGVAV

SEQ ID NO: 141987 - protein, 57 aa, Unknown
  Bacterial polypetide isolated from the Sargasso Sea
MDALDPKGVAVSIDSTHQCMTMRGIKKEQATTVTNYYLGKFKEDLSYQNRYLRFISK

SEQ ID NO: 141988 - protein, 149 aa, Unknown
  Bacterial polypetide isolated from the Sargasso Sea
MNRTVIEIIGFLSVVGSLAFVGVEIRQNTSAVRGATNQAISDQVGELMLTIATDDNLAELVTRLYDGETQDQFDPIDDMRLYMTIMTGLRRVENIFLQLEDGILDERAFDRIGLSFYRSNYGREIWQANRQFFDREFVPFFDELLGQKP

SEQ ID NO: 141989 - protein, 200 aa, Unknown
  Bacterial polypetide isolated from the Sargasso Sea
MKNVADFKAKVLEKVSKDEAEKAIKVVLKYIGENPSREGLIETPKRVIKAFDEYFSGYSENPEEYLSKTFGDVEGYDDMVIQKNISVQSHCEHHMAPILGTAHVAYMPAEKVVGLSKLARVVDLYSRRLQTQERLTMQIANSIFKGLKAHGSAVSIDAVHQCMTTRGVRKEEAKTVTNYFTGVFRDSHNLQERFLHYIKK

SEQ ID NO: 141990 - protein, 186 aa, Unknown
  Bacterial polypetide isolated from the Sargasso Sea
MREEVEDAVRKLVTWAGDDPDREGLVDTPRRVVKAYEEFFSGYQVDPTDYLERTFEETDGYDEMIVLRDIAFVSHCEHHILPVLGKAHVAYLPNRRVVGISKLARVVEAYARRLQIQERMTAQIANAIETALKPRGIAVVVEAEHQCMTTRGVMKPGVSMVTSRMLGAFREDAKTRLEFESIIGKR

SEQ ID NO: 141991 - protein, 203 aa, Unknown
  Bacterial polypetide isolated from the Sargasso Sea
MKIVKDIFNEKLKDSNQVTDEEAEQAFTSIIKWLGEDPAREGLKSTPKRLVKAYKEYFKGYTEDPKKFLQKTFGDVQGYDDMVVQKNISVQSHCEHHMAPIIGVAHVAYIPKDRVVGLSKLARVVEVFSKRLQTQERLTMQIAKSLMEALDAKGVAVSIDATHQCMTTRGIKKEQATTITNYYLGQFKDDLSYQNRYLRFISK

SEQ ID NO: 141992 - protein, 192 aa, Unknown
  Bacterial polypetide isolated from the Sargasso Sea
MKKPTEKEIHEAVRKLLLWAGDDPDREGLVGTPDRVARAYKEFFAGYEQDPEEILRTTFEEVEGYDEMVLVKDIGVESHCEHHMVPIIGRAHIAYIPNNRVVGISKLARVVDIFAKRLQIQEKMTAQIANSIENVLKPKGIAVVIDASHQCMTTRGVNKPESSTVTSAMRGVFKDNPRTRNEFLSFINLPKF

SEQ ID NO: 141993 - protein, 463 aa, Unknown
  Bacterial polypetide isolated from the Sargasso Sea
MIQYGFERLVLLGSAGYQRAELPLDAAVSLIAPNNTGKTSLINALQFLLIIDQRRMDFGAHDLEKSKRFYFPNNSAYILLEACLPETGTVVLGCVGKGVSHDYQYFAYKGALDLDDYRLDGGALVAEPQLVNHLATRQRLVFVYKSPNDFRDALYGGRRKRAASEPDFTLFHLEHQSDAAAYRQVLTRTLRLDRLTSADVKNYLLEIFKRDLSDAAIDFRQEWEKAFSEVNSERAQYQAAVNQSARILSLAKQVQERLTLRGKLIVWCPQIEEDLKQWHSYYESTAEELAAKVLQCETAQKQSGSRIQELSVERLVKQQSHTQLLALNQQQAELERRFTLLSGREQLETQLAAVKENLEAQITLLGQVKSRSVEDIRRDLRRQQQLSMSLHRQQETLTDNLYRHMADHLSEEELLRLNRVLQAGVMQLGPADFELDMPRLKQQLSQTPGETLMLAGLRINLHR

SEQ ID NO: 141994 - protein, 192 aa, Unknown
  Bacterial polypetide isolated from the Sargasso Sea
MKKPTEKEIHEAVRKLLLWAGDDPDREGLVGTPDRVARAYKEFFAGYEQDPEEILRTTFEEVEGYDEMVLVKDIGVESHCEHHMVPIIGRAHIAYIPNNRVVGISKLARVVDIFAKRLQIQEKMTAQIANAIENVLKPKGIAVVIDASHQCMTTRGVNKPESSTVTSAMRGVFKDNPRTRNEFLSFINLPKF

SEQ ID NO: 141995 - protein, 205 aa, Unknown
  Bacterial polypetide isolated from the Sargasso Sea
MTIIDSANALLKDKEDEKPTREEAEKAVKVLIEWAGDDPSREGLVETPKRFVKAFEEYFAGYSKSPKNILEKTFFETGNYQDFVMLKNIEFRSHCEHHLAPIIGYASVAYIPDGKVVGISKLARIVDVFAKRLQTQETMTSQIANSIQNNLNPKGVAVFISAEHHCMSSRGVKKAHVDMTTTFFTGDFKESQNLQNRFLNSLTNK

SEQ ID NO: 141996 - protein, 138 aa, Unknown
  Bacterial polypetide isolated from the Sargasso Sea
MKIVKNTDNAVLKDKPEVSDKEAEEAFRTILRWIGENPNREGLLETPRRVTKAYKEYFKGYNQEITSELLKTFGDVNGYDDMVLQKNISVQSHCEHHMAPIIGVAHVAYIPNKRVVGLSKLARVVEVYSKRLQTQERL

SEQ ID NO: 141997 - protein, 53 aa, Unknown
  Bacterial polypetide isolated from the Sargasso Sea
DAKGVAVTIDSTHQCMTMRGIKKEQATTVTNYYLGQFKDDLSYQNRYLRFIAK

SEQ ID NO: 141998 - protein, 83 aa, Unknown
  Bacterial polypetide isolated from the Sargasso Sea
VEIFSKRLQTQERLTVQIANSLMEALDAKGVAVTIDSTHQCMTMRGIKKEQATTVTNFYLGQFKEDLSYQNRYLRFISTELKD

SEQ ID NO: 141999 - protein, 141 aa, Unknown
  Bacterial polypetide isolated from the Sargasso Sea
MKLVKNENELHKDNISDKEAEEAFVKILKWMGEDPGREGLLETPKRVVKAFKEYFKGYKEDPKEILNKTFGDVDGYDDMVIQKNISVQSHCEHHMAPIIGIAHVAYIPKDRVVGLSKLARVVEVFSKRLQTQERLTMQIAT

SEQ ID NO: 142000 - protein, 131 aa, Unknown
  Bacterial polypetide isolated from the Sargasso Sea
MQNNVSDKEAEDAFRTILKWMGEDPNREGLLETPKRVVKAFKEYFKGYSEDPKSILEKTFGDVEGYDDMVVQKNISVQSHCEHHMAPIIGIAHVAYIPKERVVGLSKLARVVEVFSKRLQTQERLTMQIAT

SEQ ID NO: 142001 - protein, 85 aa, Unknown
  Bacterial polypetide isolated from the Sargasso Sea
SKLARVVEVFSKRLQTQERLTMQIATTLMESLDAKGVAVTIDSTHQCMTMRGIKKEQATTVTNYYLGQFKEDLSYQNRYLRFIAK

SEQ ID NO: 142002 - protein, 202 aa, Unknown
  Bacterial polypetide isolated from the Sargasso Sea
MDKNSKITSLSRAPSIPSREEAEDAVRTILAWIGEDPGREGLLETPRRFIDAYKEFFKGYNEDGVDVLSKTFSEVGGYDDLVLLKDIQFNSFCEHHMIPFIGKAHVAYLPSNRVVGISKIARLVDIYAQRLQTQETMTAEIANALSQSLNPRGVAIILDAEHMCMSLRGVKKDQVSTITTRFTGEFETNEALRDRFMKLTNN

SEQ ID NO: 142003 - protein, 88 aa, Unknown
  Bacterial polypetide isolated from the Sargasso Sea
SKLARVVEVFSKRLQTQERLTMQIANTLMESLDAKGVAVTIDSTHQCMTMRGIKKEQASTVTNYYLGQFKEDLSYQNRYLRFISISKD

SEQ ID NO: 142004 - protein, 192 aa, Unknown
  Bacterial polypetide isolated from the Sargasso Sea
MSKPTEKEVHEAVRKLLLWAGDDPDREGLVGTPDRVARAYKEFFAGYEQDPEEILRTTFEEVEGYDEMVLVKDIGVESHCEHHMVPIIGRAHIAYIPNNRVVGISKLARVVDIFAKRLQIQEKMTAQIANSIENVLKPKGIAVVIDASHQCMTTRGVNKPESSTVTSAMRGVFKDNPRTRNEFLSFINLPKF

SEQ ID NO: 142005 - protein, 153 aa, Unknown
  Bacterial polypetide isolated from the Sargasso Sea
KDTPRRIADAYTEIFSGYDSDSELSVQFSEDSEMVVAKNIQFYSMCEHHMLPFYGTIQIAYIPNGRVFGISKLVRVVEKFSKRLQIQERITKNVADEIYAQGVKGVAVMAEGEHLCMKMRGVRNDAQMTSSAFRGVFEDQKTKEELLKAIQNK

SEQ ID NO: 142006 - protein, 178 aa, Unknown
  Bacterial polypetide isolated from the Sargasso Sea
MDKERVKKLVRELIIELGEDPTREGLKDTPRRIADAYGEIFSGYDSDSELSVQFSEDSEMVVAKNIQYYSMCEHHMLPFFGTIQIAYIPNGRVFGISKLVRVVEKYSKRLQIQERITKNIADEIYAQGVKGVAVMAEGEHLCMKMRGVRNDAKVTSSAFRGVFEDQKAKEELLKAIQN

SEQ ID NO: 142007 - protein, 66 aa, Unknown
  Bacterial polypetide isolated from the Sargasso Sea
MQIAKSLMDGLDAHGVAVTIDSTHQCMTMRGIKKEKATTITNYFLGKFKDDLSFQNRFLKHISDNN

SEQ ID NO: 142008 - protein, 71 aa, Unknown
  Bacterial polypetide isolated from the Sargasso Sea
QTQERLTMQIALSLMESLEAKGVAVSIDATHQCMTMRGIKKEQATTVTNYYLGKFKEDLSYQNRYLRFISK

SEQ ID NO: 142009 - protein, 56 aa, Unknown
  Bacterial polypetide isolated from the Sargasso Sea
EQTQAAGAAVTIEAKHMCMMMRGVEKQNSVMTTSCMLGIFRTKASTRNEYLSLVSK

SEQ ID NO: 142010 - protein, 172 aa, Unknown
  Bacterial polypetide isolated from the Sargasso Sea
KLVRELIIEIGEDPTREGLKDTPRRIADAYTEIFSGYDSDSELSVQFSEDSEMVVAKNIQFYSMCEHHMLPFYGTIQIAYIPNGRVFGISKLVRVVEKFSKRLQIQERITKNVADEIYAQGVKGVAVMAEGEHLCMKMRGVRNDAQMTSSAFRGVFEDQKTKEELIKAIQNK

SEQ ID NO: 142011 - protein, 82 aa, Unknown
  Bacterial polypetide isolated from the Sargasso Sea
ARVVEVFSKRLQTQERLTMQIAKTIMESLDAKGVAVSIDSTHQCMTMRGIKKEQATTVTNYYLGKFKEDLSYQNRYLRFIAK

SEQ ID NO: 142012 - protein, 137 aa, Unknown
  Bacterial polypetide isolated from the Sargasso Sea
MVKNENEKTQQISDKEAEEAFRVILKWMGEDPSREGLLETPKRVVKAFKEYFKGYGEDPKAILEKTFGDVEGYDDMVVQKNISVQSHCEHHMAPIIGIAHVAYIPKDRVVGLSKLARVVEVFSKKITNPRKINYANS

SEQ ID NO: 142013 - protein, 202 aa, Unknown
  Bacterial polypetide isolated from the Sargasso Sea
MKLVKDTDNKNLETKQVSDKEAEEALIKILTWIGEDPNREGLLETPKRVIKAYKEFFSGYKEDANKVLEKTFGDVEGYNDMVIQKNISVQSHCEHHMVPILGMAHVAYIPKERVVGLSKLARVVDVFAKRLQTQERLTLQIAKSIMTALDAKGVAVTIDAAHQCMTTRGIKKERASTVTNYFLGQFKDDLSIQNRYLRFIKE

SEQ ID NO: 142014 - protein, 441 aa, Unknown
  Bacterial polypetide isolated from the Sargasso Sea
MILFCGSLFFTIYHKWLNIRGFKHAIDITRGRYDNPNDPGEISHFQALTSALSATVGLGNIAGVAVAIHTGGPGAVIWMMLIGLLGMTAKFNECTLAMVYRKVRPDGTVDGGPMHYLEIGLQERGFPFPVAKAFGLVFALFCIGGSFGGGNMFQANQATSAVRGMLGDVAGINWVFGSVLAFLVGLVIIGGIKRIGQVTEKIIPLMCGIYVLAGLVILVIHIKQVPDAAVLIVRSCVSPEAAYGGFIGVLVQGIRRAVFSNEAGVGSAAIAHAAAKTDEPVREGLVAMLGPFIDTVVICTMTALVVIVSGAYNTPEAGQGVEMTRWAFSETLSWFPTILNISVFLFAYSTMISWSYYGEKAWQYIFGTTRTAIIIYRIIFLGFIILGAVASLDNVIEFSDLMILSMAFPNIIGGVILAPRVKTLLEDYWRRYKNNEFVVYD

SEQ ID NO: 142015 - protein, 238 aa, Unknown
  Bacterial polypetide isolated from the Sargasso Sea
MEVIGLSKIYNNKDAVKDISFKVNKNEIIGILGPNGCGKTTTIGMILGLLKPSNGKVLINGIEIEKKRVDLLNQLNFISPYIELPKKLTVKQNLEVYGRLYDVKNLKKKIEMLSEKLRLSEIINKLTGELSSGQKNRVSLAKSIINNPTVLLLDEPTASLDPETGDFVRSFLESYQKENKASILLASHNMSEVERLCSSVLMMNKGSIVDSGKPEQLIKKHGRKNMEEVFLKITRERI

SEQ ID NO: 142016 - protein, 210 aa, Unknown
  Bacterial polypetide isolated from the Sargasso Sea
MAKKKSARPEPAASRPSREEAEDAVRVLLRWAGDDPAREGLVDTPARVVRAYEQFFAGYALEPRDILARTFSEVDGYDEMIVLKDIRFESYCEHHMVPIIGRAHVAYLPNHRVVGISKLARLVDAFAKRLQIQEKMTVQIADTLFDVLQPKGVGVILEAAHQCISTRGVHKPGVEMVTSRMLGTFRTDPSTRREFLSIVANPSSVNLTNT

SEQ ID NO: 142017 - protein, 135 aa, Unknown
  Bacterial polypetide isolated from the Sargasso Sea
LVGSLAFVGVEIRQNTSAVRGATNQAISDQVGELMLTIATDDNLAELVKRLYDGETQNQFDPVDDMRLFMTIMTGLRRIENIFLQIEDGILDDRAFDRIGLSFYRSNYGREIWLANRQFFDREFVPFFDELINKE

SEQ ID NO: 142018 - protein, 206 aa, Unknown
  Bacterial polypetide isolated from the Sargasso Sea
MKLVKDTDDKSLDAKQVSDKEAEDAFRTILSWMGEDPSREGLLETPKRVVKAFKEYFKGYKEDPNKILDKTFGDVEGYDDMVVQKNISVQSHCEHHMAPIIGKAHVAYIPKERVVGLSKLARVVEVFSKRLQTQERLTMQIANTLMESLDAKGVAVTIDSTHQCMTMRGIKKEQATTVTNYYLGQFKEDLSYQNRYLRFISTTLKD

SEQ ID NO: 142019 - protein, 192 aa, Unknown
  Bacterial polypetide isolated from the Sargasso Sea
KKVSDKEAEKAIRTILSWMGEDPKREGLLETPKRVVKAFKEYFQGYNEDAKKVLDKTFGDVEGYSDMVVQKNISVQSHCEHHMAPIIGKAHVAYIPNERVVGLSKIARVVEIFSKRLQTQERLTVQIANSLMEALDAKGVAVTIDSTHQCMTMRGIKKEQATTVTNFYLGQFKEDLSYQNRYLRFISTELKD

SEQ ID NO: 142020 - protein, 206 aa, Unknown
  Bacterial polypetide isolated from the Sargasso Sea
MKLVKNTNNKLNENKQISDKDAEEAFKTILTWMGEDPNREGLLETPKRVVKAFKEYFKGYKEDPDKILDKTFGDIEGYDDMVVQKNISVQSHCEHHMAPIIGKAHVAYIPKERVVGLSKLARVVEVFSKRLQTQERLTMQIANTLMESLDAKGVAVTIDSTHQCMTMRGIKKEQATTVTNYYLGQFKEDLSFQNRYLRFISTTLKD

SEQ ID NO: 142021 - protein, 203 aa, Unknown
  Bacterial polypetide isolated from the Sargasso Sea
MKLVKDVDHLNKAKNKVSDEKAEEAVKTIIQWIGEDPTREGLQSTPRRVIKAFKEYFGGYTQDPSKFLAKTFTEVEGYDDMVIEKNISIQSHCEHHMAPIVGVAHVAYIPSSKVVGLSKLARVVEVFSKRLQTQERLTMQIAKTIMDVLQPRGVAVTIDASHQCMTNRGVKKENTTTVTNYFLGAFKDDLSFQNRYLRYINKE

SEQ ID NO: 142022 - protein, 122 aa, Unknown
  Bacterial polypetide isolated from the Sargasso Sea
YGGQKNISVQSHCEHHMAPIIGIAHVAYIPNQRVVGLSKIARVVEVFSKRLQTQERLTVQIANTLMEALDAKGVAVTIDSTHQCMTMRGIKKEQATTVTNFYLGQFRDDLSYQNRYLRFIAK

SEQ ID NO: 142023 - protein, 200 aa, Unknown
  Bacterial polypetide isolated from the Sargasso Sea
MKLVKNENNNIKNPISDQEAEEAFIKILKWVGEDPSREGLIETPKRVMKAFKEYFNGYSQDAKKDLEKTFGDVEGYDDMVVQKNISVQSHCEHHMAPIIGVAHVAYIPNERVVGLSKLARVVEIFSKRLQTQERLTMQIASTIMEALDPKGVAVSIDATHQCMTMRGIKKEQATTITNYYLGKFKDDLSYQNRYLRFIAK

SEQ ID NO: 142024 - protein, 172 aa, Unknown
  Bacterial polypetide isolated from the Sargasso Sea
MKLVKNENDKNRESITDKEAQEAFVKILKWIGEDPSREGLLETPKRVMKAFKEYFKGYHEDPKAVLDKTFGDVEGYSDMVVQKNISVQSHCEHHMAPIIGIAHVAYIPNQRVVGLSKIARVVEVFSKRLQTQERLTVQIANTLMESLDAKGVAVTIDSTHQCMTMRGIKKEQ

SEQ ID NO: 142025 - protein, 195 aa, Unknown
  Bacterial polypetide isolated from the Sargasso Sea
MKIVKNLEKFIQKDKDEVTDKQAEEAFRTIIKWIGENPNREGLLETPKRVTKAFKEYFKGYKQNATSDLLKTFGDVEGYDDMVLQKNISVSSHCEHHMAPIIGVAHVAYLPNKNVVGLSKLARTVEVFSKRLQTQERLTMQIAQALMKGLDAHGVAVTIDATHQCMTMRGIKKRKATTVTNYFLGKFKNDLSYQK

SEQ ID NO: 142026 - protein, 155 aa, Unknown
  Bacterial polypetide isolated from the Sargasso Sea
RVVKAFKEYFKGINEDPKKILDKTFKDVEGYDDMVIQKNISVQSHCEHHMAPIIGVAHVAYIPKDRVVGLSKLARVVEVFSKRLQTQERLTMQIANVLMESLDAKGVAVSIDSTHQCMTMRGIKKEQATTVTNYYLGKFKEDLSFQNRYLRFISK

SEQ ID NO: 142027 - protein, 90 aa, Unknown
  Bacterial polypetide isolated from the Sargasso Sea
VGLSKLARVVEVFSKRLQTQERLTMQIAETLMKGLDAHGVAVTIDSTHQCMTMRGIKKEKATTITNYFLGKFKNDLSFQNRFLNYISQKR

SEQ ID NO: 142028 - protein, 170 aa, Unknown
  Bacterial polypetide isolated from the Sargasso Sea
MGEDPSREGLIETPKRVIKAFKEYFKGYNEDPKKILEKTFGDVEGYDDMVIQKNISVQSHCEHHMAPIIGVAHVAYIPNNRVVGLSKLARVVEVFSKRLQTQERLTMQIANTLMDSLDAKGVAVSIDSTHHCMTMRGIKKEQATTVTNYYLGKFKEDLSCQNRYLRFISK

SEQ ID NO: 142029 - protein, 203 aa, Unknown
  Bacterial polypetide isolated from the Sargasso Sea
MKLVKDLDQLNKNKHKVSDETAEEAVKTIIQWIGEDPSREGLKSTPKRVIKAFREYFSGYTQDPNKFLQKTFTEVEGYDDMVIEKNISFQSHCEHHMAPIIGVAHVAYIPSAKVVGLSKLARVVEVFAKRLQTQERLTMQIAKTIMEVLQPRGVAVTIDASHQCMTSRGVKKENTLTVTNYFLGAFKDDLSFQNRYLRYINKG

SEQ ID NO: 142030 - protein, 105 aa, Unknown
  Bacterial polypetide isolated from the Sargasso Sea
IGKAHVAYIPNERVVGLSKLARVVEVFSKRLQTQERLTMQIAKTLMESLDAKGVAVTIDSTHQCMTMRGIKKEQASTVTNYYLGQFKEDLSYQNRYLRFISIAKD

SEQ ID NO: 142031 - protein, 204 aa, Unknown
  Bacterial polypetide isolated from the Sargasso Sea
MKLVKNTLDNKDLKKVSDKEAEDAFRTILSWMGEDPAREGLIETPKRVVKAFKEYFKGYKEDPNQILDKTFGDVEGYDDMVIQKNISVQSHCEHHMAPIIGKAHVAYIPKDRVVGLSKLARVVEVFSKRLQTQERLTMQIANTLMESLDAKGVAVTIDSTHQCMTMRGIKKEQATTVTNYYLGQFKEDLSCQNRYLRFISIAKE

SEQ ID NO: 142032 - protein, 181 aa, Unknown
  Bacterial polypetide isolated from the Sargasso Sea
MKLIKSENEKNLDNKISDEEAEQAFVKIIKYIGEDPTREGLQSTPKRLVKAFKEYFKGYKENPEKILEKTFGDVEGYDDMVVQKNISLQSHCEHHMAPIIGVAHVAYIPGERVVGLSKLARVVEVFSKRLQTQERLTMQIAKTLMEALNAKGVAVSIDATHQCMTMRGIKKEQAFTVTNII

SEQ ID NO: 142033 - protein, 200 aa, Unknown
  Bacterial polypetide isolated from the Sargasso Sea
TDNNNLETKKVSDKEAEEAIRTILSWMGEDPKREGLLETPKRVVKAFKEYFQGYNEDANKVLDKTFGDVEGYSDMVVQKNISVQSHCEHHMAPIIGKAHVAYIPNERVVGLSKIARVVEIFSKRLQTQERLTVQIANSLMEALDAKGVAVTIDSTHQCMTMRGIKKEQATTVTNFYLGQFKEDLSYQNRYLRFISTELKD

SEQ ID NO: 142034 - protein, 131 aa, Unknown
  Bacterial polypetide isolated from the Sargasso Sea
FGDVEGYSDMVVQKNISVQSHCEHHMAPIIGIAHVAYIPNERVVGLSKIARVVEVFSKRLQTQERLTVQIANTLMESLDAKGVAVTIDSTHQCMTMRGIKKEQATTVTNFYLGQFKDDLSYQNRYLRFIAK

SEQ ID NO: 142035 - protein, 205 aa, Unknown
  Bacterial polypetide isolated from the Sargasso Sea
MKIVKNLNTTILKEKPEVSDKEAQEAFRTILRWIGENPDREGLRETPRRVTKAFKEYFKGYKQEITSELLKTFGDVNGYDDMVLQKNISVQSHCEHHMAPIIGVAHVAYLPNKRVVGLSKLARVVEVFSKRLQTQERLTMQIAETLMKGLDAHGVAVTIDSTHQCMTMRGIKKEKATTITNYFLGKFKNDLSFQNRFLNYISQKR

SEQ ID NO: 142036 - protein, 117 aa, Unknown
  Bacterial polypetide isolated from the Sargasso Sea
TFYSHCEHHFVPIYGKAHVAYFPNGKVIGLSKINRIVQYYAKRPQVQERLTIQIANELKKTLHTEHIAIVLDATHMCVSSRGVNDTNSQTGTAYFSGKFEDQQFKSEFLNYINSTTK

SEQ ID NO: 142037 - protein, 134 aa, Unknown
  Bacterial polypetide isolated from the Sargasso Sea
EKTFGDVEGYDDMVIQKNISVQSHCEHHMAPIIGVAHVAYIPNNRVVGLSKLARVVEVFSKRLQTQERLTMQIANTLMESLNAKGVAVSIDSTHHCMTMRGIKKEQATTVTNYYLGKFKEDLSCQNRYLRFISK

SEQ ID NO: 142038 - protein, 202 aa, Unknown
  Bacterial polypetide isolated from the Sargasso Sea
MKLVKNENDKIPQKISDKDAEEAFIKILQWMGEDPGREGLLETPKRVVKAFKEYFKGYKEDPKEILNKTFGDVNGYDDMVVQKNISVQSHCEHHMAPIIGVAHVAYIPKDRVVGLSKLARVVDVFSKRLQTQERLTMQIAQTLMQSLDAKGVAVSIDSTHQCMTMRGIKKEQATTVTNYYLGKFKEDLSYQNRYLRFIQNRL

SEQ ID NO: 142039 - protein, 148 aa, Unknown
  Bacterial polypetide isolated from the Sargasso Sea
YFSGYDENPADYLKKTFKEVDGYDDMVIEKNISIRSHCEHHMAPIIGVAHVAYIPKEKVVGLSKLARVVEAFAKRLQTQERLTMQIAKTIMGVLQPRGVAVTIDAVHQCMTSRGIKKENTKTVTNYFLGAFKDDLSFQNRYLRYINKD

SEQ ID NO: 142040 - protein, 205 aa, Unknown
  Bacterial polypetide isolated from the Sargasso Sea
MKLVKDTDNKVIENSDVSDKEAEQAFRTILTWLGEDPNREGLLETPKRVMKAYKEYFGGYKVDPNKILDKTFGDIDGYDDMVIQKNISVQSHCEHHMAPIIGKAHVAYIPKERVVGLSKLARVVEVFSKRLQTQERLTMQVAKTLMESLDAKGVAVTIDSTHQCMTMRGIKKENATTVTNYYLGQFKDDLSYQNRYLRFISIPKD

SEQ ID NO: 142041 - protein, 94 aa, Unknown
  Bacterial polypetide isolated from the Sargasso Sea
IPNQRVVGLSKIARVVEVFSKRLQTQERLTVQIANTLMECLDAKGVAVTIDSTHQCMTMRGIKKEQATTVTNFYLGKFKDDLSFQNRYLRFIAK

SEQ ID NO: 142042 - protein, 166 aa, Unknown
  Bacterial polypetide isolated from the Sargasso Sea
SWQRRLIETPKRVTKAFKEYFKGYKEDPISILSKTFGDVNGYDDMVIQKNISVQSHCEHHMAPIIGIAHVAYIPNQRVVGLSKLARVVEVFSKRLQTQERLTMQIANTLMEALKPKGVAVSIDSTHQCMTMRGIKKEQATTVTNYYLGQFKEDLSYQNRYLRFISK

SEQ ID NO: 142043 - protein, 191 aa, Unknown
  Bacterial polypetide isolated from the Sargasso Sea
MKLVKNPNEKELAKKVTDKEAEEAIVKILDWMGEDSSREGLLETPKRVIKAFKEYFKGYSEDPKKILEKTFGDVEGYDDMVIQKNISVQSHCEHHMAPIIGVAHVAYIPKERVVGLSKLARVVEVFSKRLQTQERLTMQIANTLMESLDAKGVAVSIDSAHQCMTMRGIKKEHATTVTNYYLGKFKEDLSY

SEQ ID NO: 142044 - protein, 107 aa, Unknown
  Bacterial polypetide isolated from the Sargasso Sea
APILGVAHVAYIPNKRIVGLSKLARTVEIFSKRLQTQERLTMQIANALTEGLDAHGVAVNIDSTHQCMTMRGIKKEKATTVTNYFTGKFKEDLSFQNRFLRYISHKS

SEQ ID NO: 142045 - protein, 202 aa, Unknown
  Bacterial polypetide isolated from the Sargasso Sea
MKLVKDLEKPSINQSGVTDKEAEDAFKTILKWIGENPDREGLKETPKRVVKAFKEYFSGYHQDASKVLNKTFGDVDGYDDMVLEKNISFESHCEHHMAPIIGVIHIAYIPNKKVVGLSKLARTVEVYAKRLQTQERLNMQIAKTLMSGLEAKGVAVTIDASHQCMTMRGIKKEKAMTLTNYFLGTFKEDLSLQNRYLKHIGK

SEQ ID NO: 142046 - protein, 197 aa, Unknown
  Bacterial polypetide isolated from the Sargasso Sea
TPLRKDAFEMSDDEKISIIQKNVQEILQTLGMDMKDDSLKGTPLRVAKAYVKEIFGGLNPRNLPKASTFDNKYQYGEMLVEKNITVFSTCEHHLLPIYGKAHVAYFSNGNVIGLSKMNRIVDYFARRPQVQERLNIQIVRKLQQFLNTEDVACVIDAKHMCVNSRGIRHIDCSTVTGEFGGKFKDKLIKREFLDYIR

SEQ ID NO: 142047 - protein, 194 aa, Unknown
  Bacterial polypetide isolated from the Sargasso Sea
MNGKSEVSDKQAEEAFRTIIRWIGENPDREGLVETPRRVTKAFKEYFKGYKQEITSELLKTFGDVNGYDDMVLQKNISVSSHCEHHMAPIIGVAHVAYLPNKRVVGLSKLARVVEVYSKRLQTQERLTMQIADSLMKGLDAHGVAVTIDSTHQCMTMRGIKKEKATTITNYFLGKFKNDLSFQNRFLRYISDKN

SEQ ID NO: 142048 - protein, 186 aa, Unknown
  Bacterial polypetide isolated from the Sargasso Sea
MKLVKNENQKNTDAVSDKEAEEAFVKILQWIGEDPTREGLLETPKRVVKAFKEYFKGYKEDPHEILNKTFGDVNGYDDMVVQKNISVQSHCEHHMAPIIGVAHVAYIPKDRVVGLSKLARVVEVFSKRLQTQERLTMQIAKTLMESLDAKGVAVSIDSTHQCMTMRGIKKEQATTVTNYYLGKFKE

SEQ ID NO: 142049 - protein, 199 aa, Unknown
  Bacterial polypetide isolated from the Sargasso Sea
MTAIAYDAPARAHSSEDVAIGAKPSRAEAEAAVRTLIRWAGDDPTREGLIDTPKRVVKAYTEWFAGYEQDPEALLARTFEETEGYDDIVAMKGIRLESYCEHHIAPVVGVAHVAYLPSNRVVGISKLARLVEAYGKRLQIQEKLTAQIADTIEKVLQPRGVAVMIAAEHHCMTTRGISKPGVDTITTRFTGAFKDDPRM

SEQ ID NO: 142050 - protein, 195 aa, Unknown
  Bacterial polypetide isolated from the Sargasso Sea
MKLVKDTDKASSKKPEITDNQAEEAFRTILSWIGENPNREGLVETPKRVVKAFKEYFKGYHMNASSDLLKTFGDVEGYDDMVVEKNISFESHCEHHMAPIIGVAHIAYIPNKKVVGLSKLARTVEVFSKRLQTQERLTMQVAKTLMSALDAKGVAVTIDASHQCMTMRGIKKEKATTVTNYYLGAFKEDLSYQNR

SEQ ID NO: 142051 - protein, 169 aa, Unknown
  Bacterial polypetide isolated from the Sargasso Sea
PNREGLLETPKRVVKAFKEYFKGYKEDPNQILDKTFGDVEGYDDMVVQKNISVQSHCEHHMAPIIGKAHVAYIPKKRVVGLSKLARVVEVFSKRLQTQERLTMQIANTLMESLDAKGVAVTIDSTHQCMTMRGIKKEQATTVTNYYLGQFKEDLSYQNRYLRFISIVKE

SEQ ID NO: 142052 - protein, 200 aa, Unknown
  Bacterial polypetide isolated from the Sargasso Sea
MKLVKETAKDINQKVTDKEAEEAFIKILNWMGEDPGREGLLETPKRVIKAFKEYFKGYNEDPKKVLEKTFGDVEGYDDMVIQKNISVFSHCEHHMAPIIGVAHVAYIPKDRVVGLSKLARVVEIFSKRLQTQERLTMQIATTLMESLDAKGVAVSIDSTHQCMTMRGIKKEQATTVTNYYLGQFKEDLGFQNRYLRFISK

SEQ ID NO: 142053 - protein, 199 aa, Unknown
  Bacterial polypetide isolated from the Sargasso Sea
MKLVKNESEIRRGKKVSDKEAEEAIIKLLDWMGEDPSREGLLETPKRVVKAFKEYFRGYSEDPKKILEKTFGDVEGYDDMVIQKNISVQSHCEHHMAPIIGVAHVAYIPKDRVVGLSKLARVVEVFSKRLQTQERLTMQIANVLMESLDAKGVAVSIDSTHQCMTMRGIKKEQATTVTNYYLGKFKEDLSFQNRYLRFI

SEQ ID NO: 142054 - protein, 200 aa, Unknown
  Bacterial polypetide isolated from the Sargasso Sea
MKLVKNENNDLGNKISDKEAEDAFVKILKWIGEDPSREGLVETPRRVMKAFKEYFKGYNEDGKKVLEKTFGDVEGYDDMVVQKNISVQSHCEHHMAPIIGVAHVAYIPSERVVGLSKLARVVEVFSKRLQTQERLTMQIASTIMEALDAKGVAVSIDSTHQCMTMRGIKKEQASTVTNYYLGKFKDDLSYQNRYLRFIAK

SEQ ID NO: 142055 - protein, 125 aa, Unknown
  Bacterial polypetide isolated from the Sargasso Sea
MKLVKDADKTSSKKPEVSDKQAEEAFKTILKWIGEDPNREGLVETPKRVIKAFKEYFKGYHQDAEADLSKTFGDVEGYDDMVVEKNITLESHCEHHMAPIIGVAHVAYIPNKKVVGLSKLARTVE

SEQ ID NO: 142056 - protein, 171 aa, Unknown
  Bacterial polypetide isolated from the Sargasso Sea
MKLVKNENQKNLETVSDKEAEEAFIKILRWIGEDPMREGLLETPRRVTKAFKEYFKGYSEDPKKILNKTFGDVDGYDDMVVQKNISVQSHCEHHMAPIIGVAHVAYIPKERVVGLSKLARVVEVFSKRLQTQERLTMQIASTIMDSLDAKGVAVSIDSTHQCMTMRGKKKN

SEQ ID NO: 142057 - protein, 164 aa, Unknown
  Bacterial polypetide isolated from the Sargasso Sea
MLETPKRVVKAFKEYFKGYKEDPIQVLDKTFGDVDGYDDMVIQKNISVQSHCEHHMAPIIGKAHVAYIPNERVVGLSKLARVVEVFSKRLQTQERLTMQIANTLMQSLDAKGVAVTIDSTHQCMTMRGIKKEQATTVTNYYLGQFKEDLSYQNRYLRLISNSKD

SEQ ID NO: 142058 - protein, 192 aa, Unknown
  Bacterial polypetide isolated from the Sargasso Sea
MKLVKDLEKSSINQSGVTDKEAEDAFKTILKWIGENPDREGLKETPKRVVKAFKEYFSGYHQDANKVLNKTFGDVDGYDDMVLEKNISFESHCEHHMAPIIGVIHIAYIPNKKVVGLSKLARTVEVYAKRLQTQERLNMQIAKTLMSGLEAKGVAVTIDASHQCMTMRGIKKEKAMTLTNYFLGTFKEDLSL

SEQ ID NO: 142059 - protein, 200 aa, Unknown
  Bacterial polypetide isolated from the Sargasso Sea
MKLVKNENQKKLDTISDKEAEEAFIKILQWLGEDPSREGLLETPKRVTKAFKEYFKGYKEDPKEILSKTFGDVNGYDDMVIQKNISVQSHCEHHMAPIIGVAHVAYIPKDRVVGLSKLARVVEVFSKRLQTQERLTMQIATTIMESLDAKGVAVSIDSTHQCMTMRGIKKEQATTVTNYYLGKFKEDLSYQNRYLRFIAK

SEQ ID NO: 142060 - protein, 135 aa, Unknown
  Bacterial polypetide isolated from the Sargasso Sea
MLKTFGDVEGYDDMVVEKNITLESHCEHHMAPIIGVAHIAYIPNHKVVGLSKLARTVEVFSKRLQTQERLTMQIAKTLMSALDAKGVAVTIDAAHQCMTMRGIKKEKATTVTNYYLGSFKDDLSFQNRYLRYIAK

SEQ ID NO: 142061 - protein, 109 aa, Unknown
  Bacterial polypetide isolated from the Sargasso Sea
MAPIIGKAHVAYIPKERVVGLSKLARVVEVFSKRLQTQERLTMQIANTLMESLDAKGVAVTIDSTHQCMTMRGIKKEQASTVTNYYLGQFKEDLSYQNRYLRFISIAKE

SEQ ID NO: 142062 - protein, 173 aa, Unknown
  Bacterial polypetide isolated from the Sargasso Sea
MKLVKETSKVVEQKISDKEAEEAFIKILNWMGEDPSREGLIETPKRVIKAFKEYFKGYNEDPKKVLEKTFGDVEGYDDMVIQKNISVFSHCEHHMAPIIGVAHVAYIPKDRVVGLSKLARVVEIFSKRLQTQERLTMQIATTLMEALDAKGVAVSIDSTHQCMTMRGIKKEHA

SEQ ID NO: 142063 - protein, 205 aa, Unknown
  Bacterial polypetide isolated from the Sargasso Sea
MKIVKNIDKVIESNKSEVTDKQAEEAFRTIIKWIGEDPTREGLMSTPKRVVKAFKEYFKGYGQDYKSELGKTFGDIKGYDDMVLQKNISISSHCEHHMAPIIGIAHVAYLPNKRIVGLSKLARTVEVFSKRLQTQERLTLQIADALMKGLDAGGVAVTIDATHQCMTMRGIKKEKATTVTNCFLGKFKSDLSYQNRFLSYIADKN

SEQ ID NO: 142064 - protein, 149 aa, Unknown
  Bacterial polypetide isolated from the Sargasso Sea
QGYNEDAKKVLDKTFGDVEGYSDMVVQKNISVQSHCEHHMAPIIGKAHVAYIPNERVVGLSKIARVVEIFSKRLQTQERLTVQIANSLMEALDAKGVAVTIDSTHQCMTMRGIKKEQATTVTNFYLGQFKEDLSYQNRYLRFISTELKD

SEQ ID NO: 142065 - protein, 138 aa, Unknown
  Bacterial polypetide isolated from the Sargasso Sea
KEDLSKTFGDVEGYDDMVIEKNITLESHCEHHMAPIIGVAHVSYIPNKKVVGLSKLARTVEIFSKRLQTQERLTMQIAKTLMSALDAKGVAVTIDAAHQCMTMRGIKKEKATTVTNYFLGSFKEDLSIQNRYLKYIGK

SEQ ID NO: 142066 - protein, 193 aa, Unknown
  Bacterial polypetide isolated from the Sargasso Sea
MKLVKDINRKPLEKEISEADVEKALKTILTWIGEDPSREGLVDTPKRVIKAFKEYFKGYNLDAQKGLTKTFTEVDGYDDMVVEKNITFESHCEHHMAPIIGVVHIAYLPKNKVVGLSKLARTVEVFSKRLQTQERLTVQIASTLMNALEARGVAVTIDAAHQCMTMRGVKKEKSTTVTNYFLGVFKDDLSYQN

SEQ ID NO: 142067 - protein, 189 aa, Unknown
  Bacterial polypetide isolated from the Sargasso Sea
MKLVKDIDNNVKPKSVSDKDAEEAFKTILTWMGEDPHREGLLETPKRVVKAFKEYFKGYKEDPKQILDKTFGDVDGYDDMVVQKNISVQSHCEHHMAPIIGKAHVAYIPKERVVGLSKLARVVEVFSKRLQTQERLTMQIANTLMESLDAKGVAVTIDSTHQCMTMRGIKKEQATTVTSYYLGQFKEDL

SEQ ID NO: 142068 - protein, 43 aa, Unknown
  Bacterial polypetide isolated from the Sargasso Sea
HYCVKARGVRDATSATTTTSLGGLFKSSQNTRQEFLRAVRHHN

SEQ ID NO: 142069 - protein, 184 aa, Unknown
  Bacterial polypetide isolated from the Sargasso Sea
MGSGKISKNISEILQELGQDPNSANLRDTPERVAQSLKFLTSGYQEKLSSITDKALFEAQYNEMVVVQNIEFYSMCEHHLLPFFGRCHVAYIPNKKIIGISKIPQIIDMFARRLQLQENLTKEIGESLDRCLQPKGCAIIMEAQHLCMMMRGVQKQNSFITTQYKSKDFKNEKEFQTFYSQIRT

SEQ ID NO: 142070 - protein, 188 aa, Unknown
  Bacterial polypetide isolated from the Sargasso Sea
AEEAVRTLFRWAGDNPNREGLLETPHRVVKSYDEFFVGYDQNPADILAKTFEETDDYDEMVVLKNMRFESHCEHHMVPIIGKAHVGYLPSGKVVGISKLARLVDLYAKRLQIQEKLTAQIADTLDAALKPRGVAVVIEAFHQCMTTRGVHKPGTATVTSRMLGSFRSDPTTRREFLSIIHAGSVDFSD

SEQ ID NO: 142071 - protein, 154 aa, Unknown
  Bacterial polypetide isolated from the Sargasso Sea
VVKAFKEYFKGYKENPQEILNKTFGDVNGYDDMVVQKNISVQSHCEHHMAPIIGVAHVAYIPKDRVVGLSKLARVVEVFSKRLQTQERLTMQIAQTLMDSLDAKGVAVSIDSTHQCMTMRGIKKEQATTVTNYYLGQFKEDLSYQNRYLRFIAK

SEQ ID NO: 142072 - protein, 198 aa, Unknown
  Bacterial polypetide isolated from the Sargasso Sea
MKLVKDTDQIQKKDQEISDEKAEAAVKTILQWIGENAEREGLKSTPKRVVKAFKEYFQGYKETPANYLKKTFTEVEGYDDMVIEKNISIRSHCEHHMAPIIGVAHVAYIPHKKVVGLSKLARVVEAFSKRLQTQERLTMQIAKTIMEVLQPRGVAVTIDATHQCMTDRGIKKENASTVTNYFLEAFKDDLSFQNRYLR

SEQ ID NO: 142073 - protein, 133 aa, Unknown
  Bacterial polypetide isolated from the Sargasso Sea
MPTNKSKEEHIVSPDDHISPKSSPSNASENTHPTRSEAEEAVRTLIKWMGDDPTREGLIDTPKRVINSYAELFNGYTQDPSEILERTFEETDGYGDIVLLKDIRVESYCEHHLIPITGVAHVAYIPENRVVGI

SEQ ID NO: 142074 - protein, 201 aa, Unknown
  Bacterial polypetide isolated from the Sargasso Sea
VKDIDNNQDSKSISDKEAEEAFKTILAWMGEDPSREGLLETPKRVVKAFKEYFKGYKEDPKKILDKTFGDVDGYDDMVVQKNISVQSHCEHHMAPIIGKAHVAYIPKERVVGLSKLARVVEVFSKRLQTQERLTMQIANTLMESLDAKGVAVTIDSTHQCMTMRGIKKEQATTVTNYYLGQFKEDLSYQNRYLRFISITKD

SEQ ID NO: 142075 - protein, 204 aa, Unknown
  Bacterial polypetide isolated from the Sargasso Sea
MKLVKDTNLKKELKNVSDSEAEEAFKTILSWMGEDPNREGLLETPKRVVKAFKEYFKGYKEDPLQILEKTFGDVEGYDDMVIQKNISVQSHCEHHMAPIIGKAHVAYIPKERVVGLSKLARVVEVFSKRLQTQERLTMQIANTLMEALDAKGVAVTIDSTHQCMTMRGIKKEQATTVTNYYLGQFKEDLSYQNRYLRFISISKD

SEQ ID NO: 142076 - protein, 83 aa, Unknown
  Bacterial polypetide isolated from the Sargasso Sea
ARIVDMFARRLQIQENITLEIAQAIQSVTNAAGVGVVIEAKHMCMMMRGVEKQNSAMISSVMLGEFRDSSRTRQEFLQLIGRN

SEQ ID NO: 142077 - protein, 149 aa, Unknown
  Bacterial polypetide isolated from the Sargasso Sea
MGFLSKKIENTRSIEEVFTPLNSVAHSEPIFVKGIRFISLCEHHLVPFFGFVNIAIIPEKKIAGLSKYADLVEYYSNSLQIQERFTTQIGNKIHEVLDSQGVYIKVVGNHICAEVGEVKNNISELITTHSTGLYSMDGLLREEALKHFS

SEQ ID NO: 142078 - protein, 198 aa, Unknown
  Bacterial polypetide isolated from the Sargasso Sea
MVKNENEKLQNNVSDKEAEEAFKTILKWMGEDPSREGLLETPKRVVKAFKEYFKGYSEDPKSILEKTFGDVEGYDDMVVQKNISVQSHCEHHMAPIIGIAHVAYIPKERVVGLSKLARVVEVFSKRLQTQERLTMQIATTLMESLDAKGVAVTIDSTHQCMTMRGIKKEQATTVTNYYMGQFKEDLSYQNRYLRFIAK

SEQ ID NO: 142079 - protein, 137 aa, Unknown
  Bacterial polypetide isolated from the Sargasso Sea
EDISSVLKSFENSYGYKGMVIEKDILFQSHCEHHLLPILGRAAIAYIPEDRVLGLSKLNRILHHFARRPQVQERLTMQVADTLSETLQTDDVAVILEARHLCVEMRGVRDSGAETSTMILRGRFEKELKEDFFRQLN

SEQ ID NO: 142080 - protein, 153 aa, Unknown
  Bacterial polypetide isolated from the Sargasso Sea
VKALKEYFKGYREDPKEILKKTFGDVNGYDDMVIQKNISVQSHCEHHMAPIIGIAHVAYIPKDRVVGLSKLARVVEVFSKRLQTQERLTMQIANTLMESLDAKGVAVSIDSTHQCMTMRGIKKEQATTVTNYYLGKFKEDLSYQNRYLRFIAK

SEQ ID NO: 142081 - protein, 201 aa, Unknown
  Bacterial polypetide isolated from the Sargasso Sea
MKLVKNESDIRQGKKVSDREAEEAIIKLLDWMGEDPSREGLLETPKRVVKAFKEYFKGYNEDPKKILEKTFGDVEGYDDMVIQKNISVQSHCEHHMAPIIGVAHVAYIPKDRVVGLSKLARVVEVFSKRLQTQERLTMQIANVLMESLDAKGVAVSIDSTHQCMTMRGIKKEQATTVTNYYLGKFKEDLSFQNRYLRFISK

SEQ ID NO: 142082 - protein, 125 aa, Unknown
  Bacterial polypetide isolated from the Sargasso Sea
MVVQKNISVQSHCEHHMAPIIGKAHVAYIPKERVVGLSKLARVVEVFSKRLQTQERLTMQIANTLMESLDAKGVAVTIDSTHQCMTMRGIKKEQATTVTNYYLGQFKEDLSYQNRYLRFISITKD

SEQ ID NO: 142083 - protein, 187 aa, Unknown
  Bacterial polypetide isolated from the Sargasso Sea
MTEKIDHIEKLTKDLLKTIGEDPEREGLLKTPKRVGKAWEYFSQGYWENLDDIINEAVFHEDCSEIVVVRDIEFFSMCEHHMIPFFGRAHVGYLPNGKVIGLSKIPRIVDMFSRRLQLQERLTSQVANTIQDILDPIGVAVVMEGRHLCMQMRGVEKQNSYASTSAMLGQFRKSAETRAEFLSIIGK

SEQ ID NO: 142084 - protein, 192 aa, Unknown
  Bacterial polypetide isolated from the Sargasso Sea
EKINQAVSDKEAEEAFVKILKWIGEDPSREGLLETPKRVTKAFKEYFKGYTEDPKEILNKTFGDVDGYDDMVVQKNISVQSHCEHHMAPIIGVAHVAYIPKDRVVGLSKLARVVEVFSKRLQTQERLTMQIATTIMESLDAKGVAVSIDSTHQCMTMRGIKKEQATTVTNYYLGKFKDDLSYQNRYLRFIAK

SEQ ID NO: 142085 - protein, 87 aa, Unknown
  Bacterial polypetide isolated from the Sargasso Sea
AGPVQVARIVDMFARRLQIQENLSRQIAEAIEQVTGALGVAVVIEAQHMCMMMRGVEKQNSSMVTSVMLGEFRENPATRGEFLNLVR

SEQ ID NO: 142086 - protein, 135 aa, Unknown
  Bacterial polypetide isolated from the Sargasso Sea
MAFDKTKTDPVLGKKVHEHLMLVGVETPVIDNGLSRKEKIDMIENNFKEIVTTLGLDLEDDSLSDTPKRVAKMYVNEIFWGLDYAAFPKVTVVDNKMQYNEMVVEKGISVQSYCEHHLVNIDGLATVGYIPNNKV

SEQ ID NO: 142087 - protein, 196 aa, Unknown
  Bacterial polypetide isolated from the Sargasso Sea
NNQNPKKISDKEAEEAFKTILSWMGEDPNREGLLETPKRVVKAFKEYFKGYKEDPIQVLDKTFGDVDGYDDMVIQKNISVQSHCEHHMAPIIGKAHVAYIPNERVVGLSKLARVVEVFSKRLQTQERLTMQIANTLMQSLDAKGVAVTIDSTHQCMTMRGIKKEQATTVTNYYLGQFKEDLSYQNRYLRLISNSKD

SEQ ID NO: 142088 - protein, 183 aa, Unknown
  Bacterial polypetide isolated from the Sargasso Sea
AEEAVRLLIRWMGDDPTREGLIDTPKRVINSYTELFNGYTKDPKEILERTFEETNGYGDIVLLKDIRVESYCEHHLIPIIGTAHVAYYPENRVVGISKLARTVELFSKRLQIQEKLTSQIANAINETLKPKGVAVLIEAEHGCMTTRGVHKPGVNMVTKTLLGCFQENNHLRSEFLSLIKKQA

SEQ ID NO: 142089 - protein, 173 aa, Unknown
  Bacterial polypetide isolated from the Sargasso Sea
MGEDPNREGLLETPKRVVKAFKEYFKGYKEDPIQVLDKTFGDVDGYDDMVIQKNISVQSHCEHHMAPIIGKAHVAYIPNERVVGLSKLARVVEVFSKRLQTQERLTMQIANTLMQSLDAKGVAVTIDSTHQCMTMRGIKKEQATTVTNYYLGQFKEDLSYQNRYLRLISNSKD

SEQ ID NO: 142090 - protein, 177 aa, Unknown
  Bacterial polypetide isolated from the Sargasso Sea
LSWMGEDPKREGLLETPKRVVKAFKEYFQGYNEDAKKVLDKTFGDVEGYSDMVVQKNISVQSHCEHHMAPIIGKAHVAYIPNERVVGLSKIARVVEIFSKRLQTQERLTVQIANSLMEALDAKGVAVTIDSTHQCMTMRGIKKEQATTVTNFYLGQFKEDLSYQNRYLRFISTELKD

SEQ ID NO: 142091 - protein, 202 aa, Unknown
  Bacterial polypetide isolated from the Sargasso Sea
MKLVKDAVKSSSKKPEVTDKQAEEAFKTILKWIGEDPNREGLIETPKRVIKAFKEYFKGYHQDAEADLSKTFGDVEGYDDMVVEKNITLESHCEHHMAPIIGVAHVAYIPNKKVVGLSKLARTVEIFSKRLQTQERLTMQIAKTLMNSLDAKGVAVTIDAAHQCMTMRGVKKERATTVTNYFLGSFREDLGIQNRYLRYIKK

SEQ ID NO: 142092 - protein, 203 aa, Unknown
  Bacterial polypetide isolated from the Sargasso Sea
MTHSGVANEKVKDLSSAAKSIKHKRIENAVEEILDALGLDLSNDSLRETPTRVAKMYLNEIFGGLNEDISSVLKSFENSYGYKGMVIEKNIPFQSHCEHHLLPILGRAAIAYIPEDRVLGLSKLNRILHHFARRPQVQERLTMQVADMLSETLQTDDVAVILEARHLCVEMRGVRDSGAETSTMVLRGRFEKELKEDFFRQLN

SEQ ID NO: 142093 - protein, 200 aa, Unknown
  Bacterial polypetide isolated from the Sargasso Sea
LVKDINKESSNKPQVSDKEAEEAIKKLLAWIGEDPSREGLQETPKRVVKAFKEYFKGYHQNAEEDLSKTFGDVEGYDDMVIEKNITLESHCEHHMAPIIGVAHVSYIPNKKVVGLSKLARTVEIFSKRLQTQERLTMQIAKTLMSALDAKGVAVTIDAAHQCMTMRGIKKERATTVTNYFLGSFKEDLSIQNRYLKYIGK

SEQ ID NO: 142094 - protein, 97 aa, Unknown
  Bacterial polypetide isolated from the Sargasso Sea
PNERVVGLSKIARVVEIFSKRLQTQERLTVQIANTLMEALDAKGVAVTIDSTHQCMTMRGIKKEQATTVTNFYLGQFKEDLSYQNRYLRFISTELKD

SEQ ID NO: 142095 - protein, 205 aa, Unknown
  Bacterial polypetide isolated from the Sargasso Sea
IETPLREDAFELSDQEKIDLIKKNVGEILHTLGMDMTDDSLKGTPLRVAKAYVNEIFGGLNPKNLPKGSTFDNKYKYKEMLVEKNITVFSTCEHHLLPIYGKAHVAYFSNGNVIGLSKMNRIVDYYARRPQVQERLNIQIVRKLQDFLDTEDVACVIDAKHMCVNSRGIRHIDCSTVTGEFGGKFKDKSIKREFLDYIRSDSQLK

SEQ ID NO: 142096 - protein, 169 aa, Unknown
  Bacterial polypetide isolated from the Sargasso Sea
GEDPNREGLVETPKRVIKAFKEYFKGYHQDAEADLSKTFGDVEGYDDMVVEKNITLESHCEHHMAPIIGVAHVAYIPSKKVVGLSKLARTVEIFSKRLQTQERLTMQIAKTLMNSLDAKGVAVTIDAAHQCMTMRGVKKERATTVTNYFLGTFREDLGIQNRYLRYIKK

SEQ ID NO: 142097 - protein, 175 aa, Unknown
  Bacterial polypetide isolated from the Sargasso Sea
MKIVKNLNTTILKEKSEVSDKEAQEAFRTILRWIGENPDREGLRETPRRVTKAFKEYFKGYKQEITSELLKTFGDVNGYDDMVLQKNISVQSHCEHHMAPIIGVAHVAYLPNKRVVGLSKLARVVEVFSKRLQTQERLTMQIAETLMKGLDAHGVAVTIDSTHQCMTMRGIKKEK

SEQ ID NO: 142098 - protein, 164 aa, Unknown
  Bacterial polypetide isolated from the Sargasso Sea
EGLASTPKRVVKAFKEYFKGYTQDPNKFLSKTFTEVEGYDDMVIEKNISVQSHCEHHMAPIIGYAHVAYIPSDKVVGLSKLARVVEVYSKRLQTQERLTMQIAKTIMDVLQPRGVAVTIDASHQCMTNRGIKKENATTVTNYFLGAFKDDLSFQNRYLRYINKE

SEQ ID NO: 142099 - protein, 158 aa, Unknown
  Bacterial polypetide isolated from the Sargasso Sea
RRVAKAFKEYFKGYNQEINSEILKTFGDVSGYDDMVLQKNISVQSHCEHHMAPIIGVAHVAYLPNKRVVGLSKLARVVEVFSKRLQTQERLTMQIANTLMNGLDAHGVAVTIDSTHQCMTMRGIKKEKATTITNYFLGKFKSDLSIQNRFLKFISDKD

SEQ ID NO: 142100 - protein, 166 aa, Unknown
  Bacterial polypetide isolated from the Sargasso Sea
KGLLETPKRVMKAYKEYFVGYKVDPTKILDKTFGDVDGYDDMVIQKNISVQSHCEHHMAPIIGKAHVAYIPKERVVGLSKLARVVEVFSKRLQTQERLTMQVAKTLMESLDAKGVAVTIDSTHQCMTMRGIKKENATTVTNYYLGQFKEDLSYQNRYLRFISIPKD

SEQ ID NO: 142101 - protein, 156 aa, Unknown
  Bacterial polypetide isolated from the Sargasso Sea
MKLVKDSDQLRKNKSSISDEKAQEAIKTIIEWIGENPDREGLKSTPKRVIKAFREYFKGYTEDATKFLSKTFTEVEGYDDMVIEKNISFQSHCEHHMAPIIGVAHVAYIPSSKVVGLSKLARVVEVFSKRLQTQERLTMQIAKTIMNVLQPRRVLP

SEQ ID NO: 142102 - protein, 178 aa, Unknown
  Bacterial polypetide isolated from the Sargasso Sea
TILSWMGEDPNREGLLETPKRVVKAFKEYFKGYKEDPSKILDKTFGDVDGYDDMVIQKNISVQSHCEHHMAPIIGKAHVAYIPKDRVVGLSKLARVVEVFSKRLQTQERLTMQIANTLMESLDAKGVAVTIDSTHQCMTMRGIKKEQATTVTNYYLGKFKDDLSYQNRYLRFISISKD

SEQ ID NO: 142103 - protein, 190 aa, Unknown
  Bacterial polypetide isolated from the Sargasso Sea
NKDKVEEGIKMMLEGLGVDLNGSHVKDTPKRATRAWTNELCSGLGEQSFELTTFDIEPDYEPSMVVLQHIPVKSLCAHHLLPFVGEATVAYIPNKMLCGLSKLARVVDYFARRPQVQEKLTHDIAKYLRSQLDPQGVGVIIKANHMCMQMRGVNHDGTMTTSSLKGTFIKEGPVRAEFMALAHSQTLKKV

SEQ ID NO: 142104 - protein, 200 aa, Unknown
  Bacterial polypetide isolated from the Sargasso Sea
MNFLDPKTNKTFSKPTKKEAEEAVKVLLRWAGDDPSREGLQDTPRRVVKAYKEWFAGYDQDPKKLLSRTFKEVEGYSEIVTLGNIRFESFCEHHLAPIIGKAHVAYLPSSRIVGISKIARLVNAYSKRLQVQEKMTSQIANSLQEILKPKGVGVLLEGEHHCMCTRGVHKDSSKMVTSAFTGDFKDRAEIRDEFFRLINQ

SEQ ID NO: 142105 - protein, 199 aa, Unknown
  Bacterial polypetide isolated from the Sargasso Sea
MVKDIQKQQSTSKITDKEAEEAIKTILKWMGEDPNREGLLETPKRVVKAFKEYFKGYSEDPNLVLEKTFGDVEGYSDMVVQKNISIQSHCEHHMAPIIGKAHVAYIPNQRIVGLSKIARVVEIFSKRLQTQERLTVQIAKTLMESLGAKGVAVTIDSTHHCMTMRGIKKEQATTVTNFYLGQFKDDLSYQNRYLRFIAK

SEQ ID NO: 142106 - protein, 185 aa, Unknown
  Bacterial polypetide isolated from the Sargasso Sea
MPKNEDFNLEIGDNHIGTSTNTPLRADAFVLSDEEKIESIKKDVENILNTLGMDLTDDSLKGTPNRVAKMFVKEIFGGLNPSKKPSSSTFENKYKYNEMLVEKNIVVYSTCEHHLLPIVGRAHVAYISNGTVVGLSKMNRIVDYFAKRPQVQERLNIQIVEELQKVLGTEDVACVIDAKHLCVNQ

SEQ ID NO: 142107 - protein, 100 aa, Unknown
  Bacterial polypetide isolated from the Sargasso Sea
IAHVAYIPKDRVVGLSKLARVVEVFSKRLQTQERLTMQIATTLMESLDAKGVAVSIDSTHQCMTMRGIKKEQATTVTNYYLGQFKEDLSYQNRYLRFIAK

SEQ ID NO: 142108 - protein, 95 aa, Unknown
  Bacterial polypetide isolated from the Sargasso Sea
LYSNKKVVGLSKLARTVEVYAKRLQTQERLNMQIAKTLMSGLEAKGVAVTIDASHQCMTMRGIKKEKAMTLTNYFLGTFKEDLSLQNRYLKHIGK

SEQ ID NO: 142109 - protein, 177 aa, Unknown
  Bacterial polypetide isolated from the Sargasso Sea
ILTWMGEDPNREGLLETPKRVVKAFKEYFKGYKEDPNQILDKTFGDVDGYDDMVVQKNISVQSHCEHHMAPIIGKAHVAYIPKERVVGLSKLARVVEVFSKRLQTQERLTMQIANTLMESLDAKGVAVTIDSTHQCMTMRGIKKEQATTVTNYYLGQFKEDLSYQNRYLRFISITKD

SEQ ID NO: 142110 - protein, 106 aa, Unknown
  Bacterial polypetide isolated from the Sargasso Sea
MAPIIGIAHVAYIPNERVVGLSKIARVVEVFSKRLQTQERLTVQIANTLMESLDAKGVAVTIDSTHQCMTMRGIKKEQATTVTNFYLGQFKDDLSYQNRYLRFIAK

SEQ ID NO: 142111 - protein, 202 aa, Unknown
  Bacterial polypetide isolated from the Sargasso Sea
MKSEKNKIIDFKDSSIITDKEAEDAIKTILKWIGEEPSREGLIETPKRVTKAFKEYFKGYKEDPYKILEKTFGDVEGYDDMVVQKNISVQSHCEHHMAPIIGTAHVAYIPRNRVVGLSKLARVVEVFSKRLQTQERLTTQIAKTLMETLDAKGVAVTIDSTHQCMTMRGIKKEQATTVTNFYLGLFKEDLSYQNRYLRFISK

SEQ ID NO: 142112 - protein, 166 aa, Unknown
  Bacterial polypetide isolated from the Sargasso Sea
REGLIETPRRVVKAFKEYFKGYNQEPTTELKKTFGDVEGYDDMVLQKNISVSSHCEHHMAPIIGVAHVAYIPNKRIVGLSKLARTVEVFSKRLQTQERLTMQIANTLTKGLDAKGVAVTINATHQCMTMRGIKKEKATTVTNYFTGKFKEDLGFQNRFLKFISEKN

SEQ ID NO: 142113 - protein, 167 aa, Unknown
  Bacterial polypetide isolated from the Sargasso Sea
MKLVKNENQKKIDSISDKEAEEAFIKILQWIGEDPSREGLLETPKRVTKAFKEYFKGYKEDPKEILSKTFGDVNGYDDMVIQKNISVQSHCEHHMAPIIGVAHVAYIPKDRVVGLSKLARVVEVFSKRLQTQERLTMQIATTIMESLDAKGVAVSIDSTHQCMTMRG

SEQ ID NO: 142114 - protein, 204 aa, Unknown
  Bacterial polypetide isolated from the Sargasso Sea
MKLVKNTEDNKELKKVSDKEAEEAFKTILSWMGEDPNREGLLETPKRVVKAFKEYFKGYREDPNQILDKTFGDVEGYDDMVVQKNISVQSHCEHHMAPIIGKAHVAYIPKDRVVGLSKLARVVEVFSKRLQTQERLTMQIANTLMESLDAKGVAVTIDSTHQCMTMRGIKKEQATTVTNYYLGQFKDDLSYQNRYLRFISIAKE

SEQ ID NO: 142115 - protein, 131 aa, Unknown
  Bacterial polypetide isolated from the Sargasso Sea
DVNGYDDMVCKKNISIQSHCEHHMAPIIGVAHVAYLPNKRVVGLSKLARVVEVYSKRLQTQERLTMQIADTLMKGLDAHGVAVTIDSTHQCMTMRGIKKEKATTITNYFLGKFKNDLSFQNRFLKYISDNN

SEQ ID NO: 142116 - protein, 155 aa, Unknown
  Bacterial polypetide isolated from the Sargasso Sea
RVVKAFKEYFGGYDKDAIQMLQKTFGDVEGYDDMVVEKNISLESHCEHHMAPIIGVVHIAYIPNKKVVGLSKLARTVEVFYKRLQTQERLNMQIAKTLMKGLEAKGVAVTIDAAHQCMTMRGIKKERATTVTNYYLGSFKEDLSLQNRYLRYIAK

SEQ ID NO: 142117 - protein, 102 aa, Unknown
  Bacterial polypetide isolated from the Sargasso Sea
MVAYIPNERVVGLSKIARVVEIFSKRLQTQERLTVQIANSLMEALDAKGVAVTIDSTHQCMTMRGIKKEQATTVTNFYLGQFKEDLSYQNRYLRFISTELKD

SEQ ID NO: 142118 - protein, 193 aa, Unknown
  Bacterial polypetide isolated from the Sargasso Sea
EIKKVSDKDAEEAFKTILTWMGEDPNREGLLETPKRVVKAFKEYFKGYKEDPNQILDKTFGDVDGYDDMVVQKNISVQSHCEHHMAPIIGKAHVAYIPKERVVGLSKLARVVEVFSKRLQTQERLTMQIANTLMESLDAKGVAVTIDSTHQCMTMRGIKKEQATTVTNYYLGQFKEDLSYQNRYLRFISITKD

SEQ ID NO: 142119 - protein, 170 aa, Unknown
  Bacterial polypetide isolated from the Sargasso Sea
MKLVKDIDNNENSKKISDKEAEEAFKTILAWMGEDPSREGLLETPKRVVKAFKEYFKGYKEDPIQVLDKTFGDVDGYDDMVIQKNISVQSHCEHHMAPIIGKAHVAYIPNERVVGLSKLARVVEVFSKRLQTQERLTMQIANTLMRALDAKGVAVTIDSTHQCMTMRGIK

SEQ ID NO: 142120 - protein, 204 aa, Unknown
  Bacterial polypetide isolated from the Sargasso Sea
MKLVKDIDNNQNSKKISDKEAEEAFKTILSWMGENPNREGLLETPKRVVKAFKEYFKGYKEDPVQVLDKTFGDVDGYDDMVIQKNISIQSHCEHHMAPIIGKAHVAYIPNERVVGLSKLARVVEVFSKRLQTQERLTMQIANTLMQSLDAKGVAVTIDSTHQCMTMRGIKKEQATTVTNYYLGQFKEDLSYQNRYLRLISNSKD

SEQ ID NO: 142121 - protein, 147 aa, Unknown
  Bacterial polypetide isolated from the Sargasso Sea
SGLDPKNKPKASTFQNKYKYGEMLVEKNITLFSTCEHHMLPIIGKAHVAYISNGTVVGLSKMNRIVQYYAQRPQVQERLTLQIVEEMQNVLKTKDVACVIDAKHICINSRGVCDPNSSTITSEFDGAFKNEGRKNEFLDYIKIETEF

SEQ ID NO: 142122 - protein, 201 aa, Unknown
  Bacterial polypetide isolated from the Sargasso Sea
MKLVKDTDKNPIKKEVSDKQAEEAFRTILTWIGEDPYREGLVETPKRIVKAFKEYFQGYKQDPSQELKKTFGEVEGYDDMVVEKNITFQSHCEHHMAPIIGVVHIAYLPKDKVVGLSKLARTVEIFSKRLQTQERLTMQIAKTLMDSLNARGVAVTIDASHQCMTMRGIKKEKSTTVTNYFLGTFKDDLSYQNRYLRYIAK

SEQ ID NO: 142123 - protein, 93 aa, Unknown
  Bacterial polypetide isolated from the Sargasso Sea
VVGLSKIARVVEIFSKRLQTQERLTVQIANTLMESLDAKGVAVTIDSTHQCMTMRGIKKEQATTVTNFYLGQFKEDLSYQNRYLRFISTTLKD

SEQ ID NO: 142124 - protein, 200 aa, Unknown
  Bacterial polypetide isolated from the Sargasso Sea
MKLEKNENLKNISSVSDKEAEEAFIKILKWIGEDPSREGLIETPKRVTKAFKEYFKGYKEDPKEILRKTFGDVNGYDDMVVQKNISVQSHCEHHMAPIIGIAHVAYIPKDRVVGLSKLARVVEVFSKRLQTQERLTMQIASTLMEALDPKGVAVTIDSTHQCMTMRGIKKEQATTVTNYYLGKFKDDLSYQNRYLRFVSK

SEQ ID NO: 142125 - protein, 202 aa, Unknown
  Bacterial polypetide isolated from the Sargasso Sea
MKSEKNKIVDFKESTTISDKEAEEAFIKILKWIGEDPTREGLIETPKRVTKAFKEYFKGYKEDPNKILDKTFGDVDGYDDMVVQKNISVQSHCEHHMAPIIGIAHVAYIPNERVVGLSKLARVVEVFSKRLQTQERLTMQIATTLMETLDAKGVAVTIDSTHQCMTMRGIKKEQATTVTNYYLGQFKEDLSYQNRYLRFISK

SEQ ID NO: 142126 - protein, 200 aa, Unknown
  Bacterial polypetide isolated from the Sargasso Sea
MKLVKNENQKNVETVSDKEAEEAFIKILRWIGEDPMREGLLETPRRVTKAFKEYFKGYSEDPKDILSKTFGDVDGYDDMVVQKNISVQSHCEHHMAPIIGVAHVAYIPKERVVGLSKLARVVEVFSKRLQTQERLTMQIAKTIMESLDAKGVAVSIDSTHQCMTMRGIKKEQATTVTNYYLGKFKEDLSYQNRYLRFIAK

SEQ ID NO: 142127 - protein, 118 aa, Unknown
  Bacterial polypetide isolated from the Sargasso Sea
LKDVSFQVFANITFAPIIGKVHIGYIPNNKVVGLSKLARLIEMFARRLQVQEKMTAEIGNTLQTHLDCLGVGVVVEAEHHCMCSRGIKKQGAVMKTMHFTGAILNDLEKKNEFMRSVS

SEQ ID NO: 142128 - protein, 130 aa, Unknown
  Bacterial polypetide isolated from the Sargasso Sea
MINNEEFLDEIGDNHFSSNAKNPLRADAFDITDEEKIEKIKKDVESILQTLGMDLTDDSIKGTPNRVAKMFVKEIFGGLNPAKQPKASTFDNNYKYGEMLVEKNITVYSTCEHHLLPIIGRAHVAYISSG

SEQ ID NO: 142129 - protein, 190 aa, Unknown
  Bacterial polypetide isolated from the Sargasso Sea
MQNQISEKEAEEAFVKILKWMGEDPSREGLIETPKRVIKAFKEYFKGYNEDPKKILEKTFGDVEGYDDMVIQKNISVQSHCEHHMAPIIGVAHVAYIPNDRVVGLSKLARVVEVFSKRLQTQERLTMQIANTLMDSLNAKGVAVSIDSTHHCMTMRGIKKEQATTVTNYYLGKFKEDLSCQNRYLRFISK

SEQ ID NO: 142130 - protein, 186 aa, Unknown
  Bacterial polypetide isolated from the Sargasso Sea
MKLVKDTNTDQEVKKISDKDAEEAFKTILSWMGEDPSREGLLETPKRVVKAFKEYFKGYKEDPNQILDKTFGDVDGYDDMVVQKNISVQSHCEHHMAPIIGKAHVAYIPKDRVVGLSKLARVVEVFSKRLQTQERLTMQIANTLMESLDAKGVAVTIDSTHQCMTMRGIKKKQATTVTNYYLGQFK

SEQ ID NO: 142131 - protein, 121 aa, Unknown
  Bacterial polypetide isolated from the Sargasso Sea
MCKKIFSVQSHCEHHMAPIIGVAHVAYIPKDRVVGLSKLARVVEVFSKRLQTQERLTMQIATTIMDSLDAKGVAVSIDSTHQCMTMRGIKKEQATTVTNYYLGKFKDDLSYQNRYLRFIAK

SEQ ID NO: 142132 - protein, 222 aa, Unknown
  Bacterial polypetide isolated from the Sargasso Sea
MSFDKTKADPALGQKVHQHLVSVGVETPVIDNGLSRKEKIDKIQDNFDEIVTTLGLDLKDDSLIDTPKRVAKMYVNEIFWGLDYAAFPKVTVVENKMQYNEMIVEKGISVQSYCEHHLVNIDGLATVAYIPNNKVLGLSKMNRIVEYFSRRPQIQERLTEQIYHALSFILETENVALTIDAKHFCVKSRGVEDTECSTVTSRLGGNFKAHPEVRAEFLALLK

SEQ ID NO: 142133 - protein, 100 aa, Unknown
  Bacterial polypetide isolated from the Sargasso Sea
GKAHIAYIPNGKIVGLSKIPRIVDAYARRLQVQERLCVEIRDCIQRTLNPIGVAVVMDCAHMCMQMRGVQKQNSTTTTSAFTGIFLENDSTRKEFINLVK

SEQ ID NO: 142134 - protein, 112 aa, Unknown
  Bacterial polypetide isolated from the Sargasso Sea
SHCEHHMAPIIGVVHIAYIPNKKVVGLSKLARTVEVYAKRLQTQERLNMQIAKTLMSGLEAKGVAVTIDASHQCMTMRGIKKEKAMTLTNYFLGTFKEDLSLQNRYLKHIGK

SEQ ID NO: 142135 - protein, 202 aa, Unknown
  Bacterial polypetide isolated from the Sargasso Sea
MKLVKDIENKKSEIQKVSDKEAEEAFVKILEWMGEDPGREGLLETPKRVVKAFKEYFRGYTQDPKKELEKTFGDVDGYDDMVIQKNISVQSHCEHHMAPIIGVAHVAYIPRERVVGLSKLARVVEIYSKRLQTQERLNMQIAKTLMEVLDAKGVAVSIDSTHQCMTMRGIKKEQATTVTNYFLGEFKEDLSIQNRYLRFIAK

SEQ ID NO: 142136 - protein, 201 aa, Unknown
  Bacterial polypetide isolated from the Sargasso Sea
MKKNKLRKPTQSEAEEAVRTLIKWAGDDVTREGLLDTPKRVAKAYKDWFSGYDEDPKEILKRTFSETGGYDEVIMLKDIRIESHCEHHIAPFIGNAHVAYLPNKRVVGISKLARITNIFAKRMQVQEKLTSEIATCIQDCLKPKGVAVVVEAQHECMTTRGVHMPGISMVTSKLLGKFRTDASTRREFYSMLNQGPILKKS

SEQ ID NO: 142137 - protein, 200 aa, Unknown
  Bacterial polypetide isolated from the Sargasso Sea
MKLVKNENENLNNKISDKEAEEAFVKILKWIGEDPSREGLVETPRRVMKAFKEYFKGYNEDGKKVLEKTFGDVDGYDDMVVQKNISVQSHCEHHMAPIIGVAHVAYIPGERVVGLSKLARVVEVFSKRLQTQERLTMQIATTIMEALDAKGVAVSIDSTHQCMTMRGIKKEQATTVTNYYLGKFKEDLSYQNRYLRFIAK

SEQ ID NO: 142138 - protein, 202 aa, Unknown
  Bacterial polypetide isolated from the Sargasso Sea
MKLVKDADKSTSQKPEVSDKQAEEAFKTILKWIGEDPNREGLIETPRRVIKAFKEYFKGYHQDAEADLSKTFGDVEGYDDMVVEKNISLESHCEHHMAPIIGVAHVAYIPNKKVVGLSKLARTVEIFSKRLQTQERLTMQIAKTLMNSLNAKGVAVTIDAAHQCMTMRGVKKEKATTVTNYFLGSFREDLGIQNRYLRYIKK

SEQ ID NO: 142139 - protein, 208 aa, Unknown
  Bacterial polypetide isolated from the Sargasso Sea
MSKIEKINNLKKIKDIRPSQQEAMDAVKTLIRWAGDNPQREGLKETPSRVVRSYKDFFSGYDLDPREILSKKFKEVEGYDEIIILKDIRLESHCEHHMVPFVGTAHVGYLPKNKVVGLSKLARLVEVFAKRLQIQEKLTAQIANAVDEVLQPKGVGVIIEASHLCVATRGIRKPESRMVTSRMLGSFRTDEGTRKEFLDLVGYNKSKF

SEQ ID NO: 142140 - protein, 202 aa, Unknown
  Bacterial polypetide isolated from the Sargasso Sea
MKLVKDLEKSSINQSGVTDKEAEDAFKTILKWIGENPDREGLKETPKRVVKAFKEYFSGYHQDANKVLNKTFGDVDGYDDMVLEKNISFESHCEHHMAPIIGVIHIAYIPNKKVVGLSKLARTVEVYAKRLQTQERLNMQIAKTLMSGLEAKGVAVTIDASHQCMTMRGIKKEKAMTLTNYFLGTFKEDLSLQNRYLKHIGK

SEQ ID NO: 142141 - protein, 206 aa, Unknown
  Bacterial polypetide isolated from the Sargasso Sea
MKLVKDTDNSNLETKKVSDKEAEEAIRTILSWMGEDPKREGLLETPKRVVKAFKEYFQGYNEDAKKVLDKTFGDVEGYSDMVVQKNISVQSHCEHHMAPIIGKAHVAYIPNERVVGLSKIARVVEIFSKRLQTQERLTVQIANSLMEALDAKGVAVTIDSTHQCMTMRGIKKEQATTVTNFYLGQFKEDLSYQNRYLRFISTELKD

SEQ ID NO: 142142 - protein, 202 aa, Unknown
  Bacterial polypetide isolated from the Sargasso Sea
MKLVKDADKTSSKKPEVSDKQAEEAFKTILKWIGEDPNREGLVETPKRVIKAFKEYFKGYHQDAEADLSKTFGDVEGYDDMVVEKNITLESHCEHHMAPIIGVAHVAYIPKKKVVGLSKLARTVEIFSKRLQTQERLTMQIAKTLMNSLDAKGVAVTIDAAHQCMTMRGVKKERATTVTNYFLGSFREDLGIQNRYLRYIKK

SEQ ID NO: 142143 - protein, 220 aa, Unknown
  Bacterial polypetide isolated from the Sargasso Sea
MKYNKFLEELEQIDADHKKFSIETPLRKDAFEMSDDEKISIIQKNVQEILQTLGMDMNDDSLKGTPLRVAKAYVKEIFGGLNPKNLPKASTFDNKYQYGEMLVEKNITVFSTCEHHLLPIYGKAHVAYFSNGNVIGLSKMNRIVDYFARRPQVQERLNIQIVRKLQKFLNTEDVACVIDAKHMCVNSRGIRHIDCSTVTGEFGGKFKDKLIKREFLDYIR

SEQ ID NO: 142144 - protein, 205 aa, Unknown
  Bacterial polypetide isolated from the Sargasso Sea
MKLVKDTDNKIIETPDVSDKEAEQAFKTILKWLGEDPNREGLLETPRRVMKAYKEYFGGYKVDPNKILDKTFGDVDGYDDMVIQKNISVQSHCEHHMAPIIGKAHVAYIPKERVVGLSKLARVVEVFSKRLQTQERLTMQVAKTLMESLDAKGVAVTIDSTHQCMTMRGIKKEQATTVTNYYLGQFKEDLSYQNRYLRFISIPKD

SEQ ID NO: 142145 - protein, 201 aa, Unknown
  Bacterial polypetide isolated from the Sargasso Sea
MKLVKNENEKNINNEVTDKEAEEAFVKILKWLGEDPTREGLLETPKRVTKAFKEYFAGYKEDPKAILDKTFGDVEGYSDMVVQKNISVQSHCEHHMAPIIGIAHVAYIPNERVVGLSKIARVVEVFSKRLQTQERLTVQIANTLMDSLDAKGVAVTIDSTHQCMTMRGIKKEQATTVTNFYLGQFKDDLSYQNRYLRFIAK

SEQ ID NO: 142146 - protein, 202 aa, Unknown
  Bacterial polypetide isolated from the Sargasso Sea
MKLFKDTDKTSSKKPEVSDKQAEEAFKTILKWIGEDPNREGLVETPKRVIKAFKEYFKGYHQDAEADLSKTFGDVEGYDDMVVEKNITLESHCEHHMAPIIGVAHVAYIPNKKVVGLSKLARTVEIFSKRLQTQERLTMQIAKTLMNSLDAKGVAVTIDAAHQCMTMRGVKKERATTVTNYFLGSFREDLGIQNRYLRYIKK

SEQ ID NO: 142147 - protein, 204 aa, Unknown
  Bacterial polypetide isolated from the Sargasso Sea
MKIVKNTENNNDPKKVSDKDAEDAFKTILTWMGEDPSREGLLETPKRVVKAFKEYFKGYKEDPNQILDKTFGDVEGYDDMVIQKNISVQSHCEHHMAPIIGKAHVAYIPKDRVVGLSKLARVVEVFSKRLQTQERLTMQIANTLMQSLDAKGVAVTIDSTHQCMTMRGIKKEQASTVTNYYLGQFKEDLSYQNRYLRFISISKE

SEQ ID NO: 142148 - protein, 206 aa, Unknown
  Bacterial polypetide isolated from the Sargasso Sea
MKLVKDTDDKELLSKEVSDKEAEQAFRTILSWIGEDPNREGLLETPKRVMKAFKEYFKGYKEDASKVLDKTFGDVEGYDDMVVQKNISVQSHCEHHMAPIIGKAHVAYIPKERVVGLSKLARVVEVFSKRLQTQERLTMQIANTLMDSLDAKGVAVTIDSTHQCMTMRGIKKEQATTVTNYYLGQFKEDLSYQNRYLRFISTTLKD

SEQ ID NO: 142149 - protein, 202 aa, Unknown
  Bacterial polypetide isolated from the Sargasso Sea
MKVKKDQVNIDQNKPTREEAMEAVKTLISWAGDDPYREGLIDTPKRVVKAYEEFFAGYNKDPIASLSKTFEEVQGYDDIVFLRDINIETHCEHHMVPILGVAHVAYLPKNKVVGISKLARVIDIFAKRLQTQETMTMQIIETIDEALDPLGTAIMIDAKHQCMTTRGISKPNVSTVTTKFSGLFAEDSELRERFIRLTQAKG

SEQ ID NO: 142150 - protein, 200 aa, Unknown
  Bacterial polypetide isolated from the Sargasso Sea
MKLVKNENNKNTEIVTDEEAREAFVKILKWLGEDPSREGLLETPKRVTKAFKEYFKGYKEDPKEILSKTFGDVEGYSDMVVQKNISVQSHCEHHMAPIIGIAHVAYIPNERVVGLSKIARVVEVFSKRLQTQERLTVQIANTLMESLDAKGVAVTIDSTHQCMTMRGIKKEQATTVTNFYLGQFKDDLSYQNRYLRFIAK

SEQ ID NO: 142151 - protein, 201 aa, Unknown
  Bacterial polypetide isolated from the Sargasso Sea
MKLVKDTDKNPVKKEVSDKQAEEAFRTILTWIGEDPYREGLVETPKRIVKAFKEYFQGYKQDPSQELKKTFGEVEGYDDMVVEKNITFQSHCEHHMAPIIGVVHIAYLPKDKVVGLSKLARTVEIFSKRLQTQERLTMQIAKTLMDSLNARGVAVTIDASHQCMTMRGIKKEKSTTVTNYFLGTFKDDLSYQNRYLRYIAK

SEQ ID NO: 142152 - protein, 201 aa, Unknown
  Bacterial polypetide isolated from the Sargasso Sea
MKLVKDIEKDLQKEKISEKEAEEAFVKILKWIGENPDREGLKSTPKRLVKAFKEYFKGYSEDANLILQKTFGDVQGYDDMVIQKNISLQSHCEHHMAPIIGVAHVSYIPKERVVGLSKLARVVEVFSKRLQTQERLTMQIATTLMQALDAKGVAVSIDATHQCMTMRGIKKEQATTITNYYLGKFKEDLSYQNRYLRFISK

SEQ ID NO: 142153 - protein, 202 aa, Unknown
  Bacterial polypetide isolated from the Sargasso Sea
MKLVKNIHSKSTKNSNVSDKEAEEAVIKILEWMGEDPSREGLIETPKRVVKAFKEYFKGYNEDPKTILNKTFGDVDGYDDMVIQKNISVQSHCEHHMAPIIGVAHVAYIPNKRVVGLSKLARVVEVFSKRLQTQERLTMQIAKTLMSALDAKGVAVSIDSTHQCMTMRGIKKEQATTVTNYYLGSFKDDLSYQNRYLRFISK

SEQ ID NO: 142154 - protein, 202 aa, Unknown
  Bacterial polypetide isolated from the Sargasso Sea
MKVDKNQIDLDQEKPTREEAMDAVKTLISWAGDNPSREGLIDTPKRVVKAYEEFFAGYNQDPLSTLSKTFEDVQGYDDIVFLRDINIETHCEHHMVPILGVAHVAYLPRDKVVGISKLARVIDIFAKRLQTQETMTMQILETIDQALDPLGTAIMIDAKHQCMTTRGISKPNVSTVTTKFSGLFAEDSELRQRFMGLTQAKG

SEQ ID NO: 142155 - protein, 191 aa, Unknown
  Bacterial polypetide isolated from the Sargasso Sea
MNKDKVEEGIKMMLEGLGVDLNGPHFKDTPKRATRAWTNELCSGLGEQSFELTTFDIEPDYEPSMVVLQHIPVKSLCAHHLLPFVGEATVAYIPNKMLCGLSKLARVVDYFARRPQVQEKLTHDIAKFLRSQLDPQGVGVIIKANHMCMQMRGVNHDGTMITSSLKGSFIKEGPVRAEFMALAHSQTLKKV

SEQ ID NO: 142156 - protein, 200 aa, Unknown
  Bacterial polypetide isolated from the Sargasso Sea
MKLVKNENNKNPESVSDEEAREAFIKILRWIGEDPNREGLLETPKRVTKAFKEYFKGYQEDPKEILSKTFGDVEGYSDMVVQKNISVQSHCEHHMAPIIGIAHVAYIPNERVVGLSKIARVVEVFSKRLQTQERLTVQIANTLMESLDAKGVAVTIDSTHQCMTMRGIKKEQATTVTNFYLGQFKDDLSYQNRYLRFIAK

SEQ ID NO: 142157 - protein, 118 aa, Unknown
  Bacterial polypetide isolated from the Sargasso Sea
VQSHCEHHMAPIIGKAHVAYIPNERVVGLSKIARVVEIFSKRLQTQERLTVQIANTLMEVLDAKGVAVTIDSTHQCMTMRGIKKEQATTVTNFYLGQFKEDLSYQNRYLRFISTELKD

SEQ ID NO: 142158 - protein, 202 aa, Unknown
  Bacterial polypetide isolated from the Sargasso Sea
MKLVKDADKTSSKKPEVSDKQAEEAFKTILNWIGEDPNREGLVETPKRVVKAFKEYFKGYHQDPEADLSKTFGDVEGYDDMVVEKNITLESHCEHHMAPIIGVAHVAYIPNKKVVGLSKLARTVEIFSKRLQTQERLTMQVAKTLMSSLDAKGVAVTIDAAHQCMTMRGVKKEKATTVTNYFLGSFREDLGIQNRYLRYIKK

SEQ ID NO: 142159 - protein, 202 aa, Unknown
  Bacterial polypetide isolated from the Sargasso Sea
MKVDKNQIDLDQDKPTREEAMDAVKTLISWAGDNPYREGLIDTPKRVVKAYEEFFAGYNQDPLSTLSKTFEDVQGYDDIVFLRDINIETHCEHHMVPILGVAHVAYLPKDKVVGISKLARVIDIFAKRLQTQETMTMQILETIDQALDPLGTAIMIDAKHQCMTTRGISKPNVSTVTTKFSGLFSDDSELRQRFMGLTQVKG

SEQ ID NO: 142160 - protein, 201 aa, Unknown
  Bacterial polypetide isolated from the Sargasso Sea
MKLVKEINKTNIENEISDKEAEEAFVKILKYIGEDPGREGLLETPKRVRKAFKEYFKGYQEDPYKILSKTFGDVDGYNDIVIQKNISVQSHCEHHMAPIIGIAHVAYIPNERVVGLSKLARVVEAFSKRLQTQERLTMQIAKTVMEALDAKGVAVTIDSNHMCMTMRGVKKEQATTVTNYYLGQFKEDLSYQNRYLRFISK

SEQ ID NO: 142161 - protein, 202 aa, Unknown; identical to SEQ ID NO: 142140
  Bacterial polypetide isolated from the Sargasso Sea

SEQ ID NO: 142162 - protein, 200 aa, Unknown
  Bacterial polypetide isolated from the Sargasso Sea
MKLVKNENNKNTEIVTDEEAREAFVKILKWIGEDPSREGLLETPKRVTKAFKEYFKGYKEDPKEILSKTFGDVEGYSDMVVQKNISVQSHCEHHMAPIIGIAHVAYIPNERVVGLSKIARVVEVFSKRLQTQERLTVQIANTLMESLDAKGVAVTIDSTHQCMTMRGIKKEQATTVTNFYLGQFKDDLSYQNRYLRFIAK

SEQ ID NO: 142163 - protein, 204 aa, Unknown
  Bacterial polypetide isolated from the Sargasso Sea
MKLVKDRDIIENSKKISDKEAEEAFKTILSWMGEDPNREGLLETPKRVVKAFKEYFKGYNEDPKKILDKTFGDVDGYDDMVIQKNISVQSHCEHHMAPIIGKAHVAYIPKKRVVGLSKLARVVEVFSKRLQTQERLTMQIANTLMESLDAKGVAVTIDSTHQCMTMRGIKKEQATTVTNYYLGQFKEDLSYQNRYLRFISISKD

SEQ ID NO: 142164 - protein, 200 aa, Unknown
  Bacterial polypetide isolated from the Sargasso Sea
MKLVKNENQKKTDTISDREAEEAFIKILQWIGEDPLREGLLETPKRVTKAFKEYFKGYREDPKEILSKTFGDVNGYDDMVIQKNISVQSHCEHHMAPIIGVAHVAYIPKDRVVGLSKLARVVEVFSKRLQTQERLTMQIATTIMESLDAKGVAVSIDSTHQCMTMRGIKKEQATTVTNYYLGKFKEDLSYQNRYLRFIAK

SEQ ID NO: 142165 - protein, 136 aa, Unknown
  Bacterial polypetide isolated from the Sargasso Sea
SKVFEEIEGYDEIVLVKDIPLQSHCEHHMVPIIGKAHVAYLPDQRVVGLSKLARVVDMFGKRLQTQETMTAQIADTINDVLQPKGVAVVIDAEHQCMSSRGVNKHGSSTITSRMIGVFRENQKSRMEFLNLISSKL

SEQ ID NO: 142166 - protein, 202 aa, Unknown
  Bacterial polypetide isolated from the Sargasso Sea
MKLVKDLEKTSINQSGVTDKEAEEAFRKILRWIGENPDREGLKETPKRVVKAFKEYFSGYHQDANKSLNKTFGDVDGYDDMVLEKNISFESHCEHHMAPIIGVIHIAYIPNKKVVGLSKLARTVEVFAKRLQTQERLNMQIAKTLMSGLEAKGVAVTIDASHQCMTMRGIKKEKAMTLTNYFLGTFKEDLSLQNRYLKHIGK

SEQ ID NO: 142167 - protein, 204 aa, Unknown
  Bacterial polypetide isolated from the Sargasso Sea
MKLVKDIDNNQNSKKISDKEAEEAFKTILAWMGEDPSREGLLETPKRVVKAFKEYFKGYKEDPIQVLDKTFGDVDGYDDMVIQKNISVQSHCEHHMAPIIGKAHVAYIPNERVVGLSKLARVVEVFSKRLQTQERLTMQIANTLMGALDAKGVAVTIDSTHQCMTMRGIKKEQATTVTNYYLGQFKEDLSYQNRYLRLISNSKD

SEQ ID NO: 142168 - protein, 204 aa, Unknown
  Bacterial polypetide isolated from the Sargasso Sea
MKLVKDTDSKEISNKVSDKEAEEAFKKILSWMGEDPNREGLLETPKRVVKAFKEYFKGYKEDPTKILDKTFGDVDGYDDMVIQKNISVQSHCEHHMAPIIGKAHVAYIPKDRVVGLSKLARVVEVFSKRLQTQERLTMQIANTLMESLDAKGVAVTIDSTHQCMTMRGIKKEQATTVTNYYLGQFKEDLSYQNRYLRFISITKD

SEQ ID NO: 142169 - protein, 205 aa, Unknown
  Bacterial polypetide isolated from the Sargasso Sea
MKLVKNTDNKIVETSEVTDKEAEQAFKTILTWLGEDPNREGLLETPKRVMKAYKEYFGGYKVDPNKILDKTFGDVDGYDDMVIQKNISVQSHCEHHMAPIIGKAHVAYIPKERVVGLSKLARVVEVFSKRLQTQERLTMQIAKTLMESLEAKGVAVTIDSTHQCMTMRGIKKEQATTVTNYYLGQFKEDLSYQNRYLRFISIPKD

SEQ ID NO: 142170 - protein, 206 aa, Unknown
  Bacterial polypetide isolated from the Sargasso Sea
MKLVKDTDNKELLSKEVSDKEAEQAFRTILSWIGEDPNREGLLETPKRVMKAFKEYFKGYKEDASKVLDKTFGDVEGYDDMVVQKNISVQSHCEHHMAPIIGKAHVAYIPKDRVVGLSKLARVVEVFSKRLQTQERLTMQIANTLMESLDAKGVAVTIDSTHQCMTMRGIKKEQATTVTNYYLGQFKEDLSYQNRYLRFISTTLKD

SEQ ID NO: 142171 - protein, 205 aa, Unknown
  Bacterial polypetide isolated from the Sargasso Sea
MKIVKNLNTAILKEKQEVSDKEAQEAFKTILRWIGENPDREGLVETPRRVTKAFKEYFKGYKQEITSELLKTFGDVNGYDDMVLQKNISVQSHCEHHMAPIIGVAHVAYLPNKRVVGLSKLARVVEVYSKRLQTQERLTMQIAESIMKGLDAHGVAVTIDSTHQCMTMRGIKKERATTITNYFLGKFKNDLSFQNRFLNYISQKR

SEQ ID NO: 142172 - protein, 204 aa, Unknown
  Bacterial polypetide isolated from the Sargasso Sea
MKLVKDIDNNQNSKKISDKEAEEAFKTILSWMGEDPNREGLLETPKRVVKAFKEYFKGYKEDPIQVLDKTFGDVDGYDDMVIQKNISVQSHCEHHMAPIIGKAHVAYIPNERVVGLSKLARVVEVFSKRLQTQERLTMQIANTLMQSLDAKGVAVTIDSTHQCMTMRGIKKEQATTVTNYYLGQFKEDLSYQNRYLRLISNSKD

SEQ ID NO: 142173 - protein, 198 aa, Unknown
  Bacterial polypetide isolated from the Sargasso Sea
MKLVKNESKNIQVKDEEVEEAFKTILTWIGEDPNREGLIETPKRVVKAFREYFKGYKEDPKKILEKTFGDVHGYDDMVIQKNISVQSHCEHHMAPIIGFAHVAYIPNERVVGLSKLARVVEVFSKRLQTQERLTMQIAKCLMESLDAKGVAVSIDSTHQCMTMRGIKKEQASTVTNYYLGKFKEDLAYQNRYLRFISK

SEQ ID NO: 142174 - protein, 199 aa, Unknown
  Bacterial polypetide isolated from the Sargasso Sea
NIDNNQNSKEVSDKEAEEAFKTILTWMGEDPTREGLLETPKRVVKAFKEYFKGYKEDPIQVLDKTFGDVDGYDDMVIQKNISVQSHCEHHMAPIIGKAHLAYIPNERVVGLSKLARVVEVFSKRLQTQERLTMQIANTLMGALDAKGVAVTIDSTHQCMTMRGIKKEQATTVTNYYLGQFKEDLSYQNRYLRLISNSKD

SEQ ID NO: 142175 - protein, 200 aa, Unknown
  Bacterial polypetide isolated from the Sargasso Sea
MKLVKNENQKKIDTISDKEAEEAFIKILQWLGEDPSREGLLETPKRVTKAFKEYFKGYKEDPKEILSKTFGDVNGYDDMVIQKNISVQSHCEHHMAPIIGVAHVAYIPKERVVGLSKLARVVEVFSKRLQTQERLTMQIAKTIMDSLDAKGVAVSIDSTHQCMTMRGIKKEQATTVTNYYLGKFKEDLSYQNRYLRFIAK

SEQ ID NO: 142176 - protein, 80 aa, Unknown
  Bacterial polypetide isolated from the Sargasso Sea
QSYSEVFAQRPQVQERLTQQIQVSLQALLGVKDVAVSINAVHYCVKSRGVMDTSSSTKTMALGGAFKTDAATRSEFLSNF

SEQ ID NO: 142177 - protein, 200 aa, Unknown
  Bacterial polypetide isolated from the Sargasso Sea
MKLVKNENDKKPESVSDEEAREAFIKILRWIGEDPTREGLLETPKRVTKAFKEYFKGYQEDPKEILSKTFGDVEGYSDMVVQKNISVQSHCEHHMAPIIGIAHVAYIPNERVVGLSKIARVVEVFSKRLQTQERLTVQIANTLMESLDAKGVAVTIDSTHQCMTMRGIKKEQATTVTNFYLGQFKDDLSYQNRYLRFIAK

SEQ ID NO: 142178 - protein, 196 aa, Unknown
  Bacterial polypetide isolated from the Sargasso Sea
KNENQKNIDSVSDKEAEEALFKILKWIGEDPSREGLLETPKRVTKAFKEYFKGYQEDPKAILEKTFGDVEGYSDMVVQKNISVQSHCEHHMAPIIGVAHVAYIPNQRVVGLSKMARVVEVFSKRLQTQERLTVQIATTLMETLDAKGVAVTIDSTHQCMTMRGIKKEQATTITNYYLGQFKDDLSFQNRYLRFIAK

SEQ ID NO: 142179 - protein, 205 aa, Unknown
  Bacterial polypetide isolated from the Sargasso Sea
MAKQHKEKNVTEVFSKPSRKEAEEAVKTLIKWAGDNPEREGLLDTPKRVVKAYEEFFEGYEHNPTEILSRTFDDVEGYDEMVIVRDIRIESHCEHHMVPIIGIAHIGYIPNQRVVGISKLARVADVFSKRLQTQETMTAQIADIIDEVLQPKGVAVVVDSKHMCMTTRGVHKPESSTITSRMLGLFRTNSNTRNEFMNLINSSKD

SEQ ID NO: 142180 - protein, 106 aa, Unknown
  Bacterial polypetide isolated from the Sargasso Sea
MAPIIGVVHIAYIPNKKVVGLSKLARTVEVFSKRLQTQERLTMQIAKTLMSSLEAKGVAVTIDAAHQCMTMRGIKKERATTVTNYYLGTFKEDLSYQNRYLRYIAK

SEQ ID NO: 142181 - protein, 175 aa, Unknown
  Bacterial polypetide isolated from the Sargasso Sea
MKLVKNENQKKLDTISDKEAEEAFIKILQWLGEDPSREGLLETPKRVTKAFKEYFKGYKEDPKEILSKTFGDVNGYDDMVIQKNISVQSHCEHHMAPIIGVAHVAYIPKDRVVGLSKLARVVEVFSKRLQTQERLTMQIATTIMESLDAKGVAVSIDSTHQCMTMRGIKKEQATT

SEQ ID NO: 142182 - protein, 200 aa, Unknown
  Bacterial polypetide isolated from the Sargasso Sea
MKLVKNENEKKINEVTDKEAEEAFVKILKWLGEDPTREGLLETPKRVTKAFKEYFKGYKEDPKAVLDKTFGDVEGYSDMVVQKNISVQSHCEHHMAPIIGIAHVAYIPNQRVVGLSKIARVVEVFSKRLQTQERLTVQIANTLMESLDAKGVAVTIDSTHQCMTMRGIKKEQATTVTNFYLGQFKDDLSYQNRYLRFIAK

SEQ ID NO: 142183 - protein, 86 aa, Unknown
  Bacterial polypetide isolated from the Sargasso Sea
MENKLEEITKELITEIGEDPNREGLLKTPKRVAKAWQFFSKGYNQKIDDVINEAIFNEDAEDMVIVRDIEFFSLCEHHLIPFFGKA

SEQ ID NO: 142184 - protein, 186 aa, Unknown
  Bacterial polypetide isolated from the Sargasso Sea
MKLVKNENELRKDNISDKEAEDAFVKILKWMGEDPGREGLLETPKRVVKAFKEYFKGYKEDPKEILNKTFGDVNGYDDMVIQKNISVQSHCEHHMAPIIGIAHVAYIPKDRVVGLSKLARVVEVFSKRLQTQERLTMQIATTLMESLDAKGVAVSIDSTHQCMTMRGIKKEQATTVTNYYLGQFKE

SEQ ID NO: 142185 - protein, 185 aa, Unknown
  Bacterial polypetide isolated from the Sargasso Sea
MSSKNETKSNIEIALFEFLKTKTDKSEEEIMKLSKKFLEQIELKLHKSHLPSEILSNLDNVEHNQPIYLKGINFVSLCEHHLLPFSGLVNIAVYPNSKIAGVSKFSELVNILSNNLTLQETLTKNIAIEIQNALDPKGVMVKISANHMCSSLLNIENSQTEFETTYSTGIYEIDHTLRNEALLNF

SEQ ID NO: 142186 - protein, 191 aa, Unknown
  Bacterial polypetide isolated from the Sargasso Sea
MNKDKVEEGIKMMLEGLGVDLNGSHFKDTPKRATRAWTNELCSGLGDKSFKLTTFDIEPDYEPSMVVLQHIPVKSLCAHHLLPFVGEATVAYIPNKMLCGLSKLARVVDYFARRPQVQEKLTHDIAKYLRSQLDPQGVGVIIKANHMCMQMRGVNHDGTMTTSSLKGTFIKEGPVRAEFMALAHSQTLKKV

SEQ ID NO: 142187 - protein, 204 aa, Unknown
  Bacterial polypetide isolated from the Sargasso Sea
MNIVEKNLTGSAEQEFRNGVSSDDAKKALELLLTWIGENPDREGLKETPKRVLKAYKEWFAGYNQNPVEILDKTFKEVEGYKEMISLKDVSFHSFCEHHFAPIVGKVHIGYIPNNKVVGLSKLARLIEVFARRLQVQEKMTAEIGNCLQTHLDCLGVGVIIEAEHHCMSSRGVKKHGSVMRTMHFTGVFLNDSEKKNEFIRSAS

SEQ ID NO: 142188 - protein, 200 aa, Unknown
  Bacterial polypetide isolated from the Sargasso Sea
MKLVKNENDKIIQNVSDKEAEEAFIKILKWIGEDPSREGLIETPRRVMKAFKEYFKGYNEDAKKALEKTFGDVDGYDDMVVQKNISVQSHCEHHMAPIIGVAHVAYIPNQRVVGLSKLARVVEVFSKRLQTQERLTMQIATTIMEALNAKGVAVSIDSTHQCMTMRGIKKEHATTVTNYYLGKFKEDLSYQNRYLRFIAK

SEQ ID NO: 142189 - protein, 204 aa, Unknown
  Bacterial polypetide isolated from the Sargasso Sea
MKLVKDTDNKNQNKQISDKEAEEAFKTILSWMGEDPNREGLLETPKRVVKAFKEYFKGYKEDPNQILDKTFGDVDGYDDMVIQKNISVQSHCEHHMAPIIGKAHVAYIPKDRVVGLSKLARVVEVFSKRLQTQERLTMQIANTLMESLDAKGVAVTIDSTHQCMTMRGIKKEQATTVTNYYLGQFKDDLSYQNRYLRFISIPKD

SEQ ID NO: 142190 - protein, 133 aa, Unknown
  Bacterial polypetide isolated from the Sargasso Sea
RTFGDVNGYDDMVIQKNISVQSHCEHHMAPIIGVAHVAYIPKDRVVGLSKLARVVEVFSKRLQTQERLTMQIATTIMDSLDAKGVAVSIDSTHQCMTMRGIKKEQATTVTNYYLGKFKEDLSYQNRYLRFIAK

SEQ ID NO: 142191 - protein, 124 aa, Unknown
  Bacterial polypetide isolated from the Sargasso Sea
YLLKTKEILMHGYMNVEALKLTIETKEAHYWSRSRKQIWHKGKTSGFVQIVKEIRIDDDQDSVWLTVDIGDGASCHVGYRSCFYRSIPLGEIKNGKQVEMKFEEKEKKFDPDEVYKGQPNPTKI

SEQ ID NO: 142192 - protein, 314 aa, Unknown
  Bacterial polypetide isolated from the Sargasso Sea
TDGDGLHDGLDTDDDGDGIGDDNDAFPLDSSEDTDTDGDGTGDNADTDDDGDGTADSDDWAPLDDSEDTDTDGDGTGDNADTDDDGDGVDDSAEDAGCDLLVDCDGDGVNDDTDAFDTDANESADADGDGIGDNADEFDSDATEDTDTDGDGVGDNGDAFPDDASESADTDGDGVGDNGDAFPSDASETTDTDGDGVGDNSDWNATDSTESNDNDGDGVGDNADTDDDDDGVLDVDEDSNATLDCSILSDCDGDGVGDATDAFDVDPEAWDDLDGDGLADTFPNLLVNSYETIQLCAPEGGTEWYDATTYSDGP

SEQ ID NO: 142193 - protein, 141 aa, Unknown
  Bacterial polypetide isolated from the Sargasso Sea
MFKKRENVADIEEGNLLSPKFDNDGLIPVITTCAETKEILMHGYMNVEALKLTIETKEAHYWSRSRKEIWHKGKTSGFTQKVKEIRIDDDQDAVWITVDIGDGASCHVGYRSCFYRSVPTGKIENGRKVEMKFEEEKKKFD

SEQ ID NO: 142194 - protein, 153 aa, Unknown
  Bacterial polypetide isolated from the Sargasso Sea
MNEKLIKIIKFNKDGLVPAIAQQHDTGEVLMLAWMNKDSIQETLTTNQVCYWSRSRQKLWRKGETSGNTQRLIEFRYDCDEDTILLIIDQTGAACHTGRRNCFYRVAKNESGEIETTLTEKKNITPKSKFDPNLNKKLNPSSIREEDVLSIQK

SEQ ID NO: 142195 - protein, 155 aa, Unknown
  Bacterial polypetide isolated from the Sargasso Sea
MFKKRENVAEIEEGKLLSPKFDNDGLIPVITTCSKTKEILMHGYMNVEAFKLTIETKEAHYFSRSRKQIWHKGKTSGFVQKVKEIRIDDDQDAVWITVDIGEGASCHVGYRSCFYRSVPMGKIDNARNIEMKFEEDKKKFDPEKVYKGQPNPTKI

SEQ ID NO: 142196 - protein, 155 aa, Unknown
  Bacterial polypetide isolated from the Sargasso Sea
MFKKRESVFEVEEGKFLSPKFDKDGLIPVTTSDSGSGELLMHGYMNEEALKKTIETKEAHYWSRSRKDIWHKGKTSGFVQKVIDLRIDDDQDALWMSVDIGNGSSCHVGYKSCFYRSIPLGKIKNSEEIKLEFKEKEKKFDPEKVYKGQPNPTKL

SEQ ID NO: 142197 - protein, 217 aa, Unknown
  Bacterial polypetide isolated from the Sargasso Sea
MDIDESVDTDGDGVCNGDDADDDGDGVDDADEADGSGLATATDCTLVTDCDGDGVDDSAEADGSALDLDGDGTADGIDCAVDTDCDDDGTADDADAFPVDASETTDTDGDGTGNNADTDDDGDGYSDADETTNCGDGTTTTAYSSSSDPLDSTDTPDDMDGDGICDYTDTDRDGDGLANGWDACPDDGSGYTDTDGDGACDESDTDDDDDGTLDADD

SEQ ID NO: 142198 - protein, 280 aa, Unknown
  Bacterial polypetide isolated from the Sargasso Sea
MNEQLIKIIKFNRDGLVPAIAQQHDTGEVLMLAWMSKDSIKQTLTTNQVCYWSRSRQKLWRKGETSGNTQRLIEFRYDCDEDTILLVVDQTGSACHTGRRNCFYRVAKNESGEIETTLTEKKNITLKSKFDTNSNKKFNSTTIREEDVLSIQKEWADSIISIGKIFLDKGNYRLEAEKTLKKLYAFDISNVLFKPTFASQNQFRNSFEDALSYFVGGNIKEDNGFAIKPWFKIRFSENKIVISRDNAIAMGNYYFTSVEDKKNETKVEYTFGYIKDKKGN

SEQ ID NO: 142199 - protein, 129 aa, Unknown
  Bacterial polypetide isolated from the Sargasso Sea
MFKKRENVTDIEEGNFLSPKFDNDGLIPVVTTCVNTKEILMHGYMNVEALRLTIETKEAHYWSRSRKEIWHKGKTSGFVQKVKEIRIDDDQDSVWLSVDLGGGASCHVGYKSCFYRSIPLGKIDNGRKS

SEQ ID NO: 142200 - protein, 155 aa, Unknown
  Bacterial polypetide isolated from the Sargasso Sea
MFKKRENIEEIEEGKLLSPKFDNDGLIPVVTTCYNTKEILMHGYMNVEALKLSIETKEAHYWSRSRKQIWHKGKTSGFVQKIKEIRIDDDQDSVWMSVDIGDGASCHVGYKSCFYRSIPLGKISNARQIEMKFEEKEKKFNPEEVYKGQPNPTKI

SEQ ID NO: 142201 - protein, 108 aa, Unknown
  Bacterial polypetide isolated from the Sargasso Sea
EALTKTIETGEAFYWSRSRKVLWHKGATSGLTQKIIEMRIDDDQDAIWLRVTVSGNGASCHVGYRSCFYRSIPTGAVPENPIELIYEETEKTFDPEEVYGDAPNPTKL

SEQ ID NO: 142202 - protein, 155 aa, Unknown
  Bacterial polypetide isolated from the Sargasso Sea
MFKKRENVAEIEEGKLLSPKFDNDGLIPVITTCSKTKEILMHGYMNVEAFKLTIETKEAHYWSRSRQSIWHKGKTSGFVQKVKEIRIDDDQDAVWMTVDIGEGSSCHVGYRSCFYRSVPLGKIDNARQIEMKFEEEEKKFDPEVVYKGQPNPTKI

SEQ ID NO: 142203 - protein, 155 aa, Unknown
  Bacterial polypetide isolated from the Sargasso Sea
MFKKRENVLEIEEGNLLSPKFDNDGLIPVITMCSKTKEILMHGYMNVEALKKTIETKEAHYFSRSRNALWHKGKTSGFTQKVTEIRIDDDQDSIWLTVDIGEGSSCHVGYRSCFYRSIPLGPIDNGREVEMKFTEKEKKFDPEKVYKGQPNPTKI

SEQ ID NO: 142204 - protein, 155 aa, Unknown
  Bacterial polypetide isolated from the Sargasso Sea
MFKKRENVADIEEGSLLSPKFDNDGLIPVITTCSKTKEILMHGYMNMEALKLTIETKEAHYWSRSRKQIWHKGKTSGFVQKVKEVRIDDDQDSVWLTVDIGDGASCHVGYRSCFYRSVPLGKIDNARQIEMKFEEKEKKFDPKKVYKDEPNPTKI

SEQ ID NO: 142205 - protein, 155 aa, Unknown
  Bacterial polypetide isolated from the Sargasso Sea
MFKKRENVAEIEEGNLLSPKFDNDGLIPVVTTCSTTKEILMHGYMNVEAFKLTIETKEAHYWSRSRKQIWHKGKTSGFVQKVIEIRIDDDQDAVWLSVDIGDGASCHVGYRSCFYRSIPLGKIENGRNVEMKFEEKEKKFDPDKVYEGQPNPTKI

SEQ ID NO: 142206 - protein, 143 aa, Unknown
  Bacterial polypetide isolated from the Sargasso Sea
MFKKRENVFEVEEGNLLSPKFDKEGLIPVTTTDSSSGDLLMHGYMNDEALKKTIETKEAHYWSRSRKDIWHKGKTSGFIQKVIDLRIDDDQDALWMSVDIGNGASCHVGYKSCFYRSIPLGQIKNPENIKLEFKEKEKKLIQK

SEQ ID NO: 142207 - protein, 155 aa, Unknown
  Bacterial polypetide isolated from the Sargasso Sea
MFKKRENVLEIEEGNLLSPKFDNDGLIPVITMCAKTKEILMHGYMNVEALKKTIETKEAHYFSRSRNALWHKGKTSGFTQKVTEIRIDDDQDSIWLTVDIGEGSSCHVGYRSCFYRSIPLGPIDNGREVEMKFTEKEKKFDPEKVYKGQPNPTKI

SEQ ID NO: 142208 - protein, 86 aa, Unknown
  Bacterial polypetide isolated from the Sargasso Sea
LDTTLKTGEAHYWSRSRAELWHKGATSGHVQRVHEVRVDCDQDVILMKVDQTGGACHTHRKSCFYRIASAADAPLVFDETLPRPTE

SEQ ID NO: 142209 - protein, 155 aa, Unknown
  Bacterial polypetide isolated from the Sargasso Sea
MFKKRENVADIEEGNLLSPKFDNDGLIPVITTCAETKEILMHGYMNVEALKLTIETKEAHYWSRSRKEIWHKGKTSGFTQKVKEIRIDDDQDAVWITVDIGDGASCHVGYRSCFYRSVPTGKIENGRKVKMKFEEEKKKFDPEVVYKGQPNPTKI

SEQ ID NO: 142210 - protein, 155 aa, Unknown
  Bacterial polypetide isolated from the Sargasso Sea
MFKKRESVFEIEEGKFLSPKFDEKGLIPVTTTDHKSGEVLMHGYMNQEALKLTIEKKEACYWSRSRNTLWHKGKTSGFVQKVVDIRIDDDQDSLWLTVDIGDGASCHVGYKSCFYRSIPLGKINNSEEIKLEYKEKEKKFDPEKVYKGQPNPTKL

SEQ ID NO: 142211 - protein, 155 aa, Unknown
  Bacterial polypetide isolated from the Sargasso Sea
MFKKRESVFEIEEGKFLSPKFDEKGLIPVTTTDHKSGEVLMHGYMNQESLKLTIEKKEAFYWSRSRNALWHKGKTSGFVQKVLDIRIDDDQDSLWMTVDIGDGASCHVGYKSCFYRSIPLGKISNSEEVKLEFKEKEKKFDPEKVYKGQTNPTKL

SEQ ID NO: 142212 - protein, 155 aa, Unknown
  Bacterial polypetide isolated from the Sargasso Sea
MFKKRENVADIEEGNLLSPKFNNDGLIPVITTDFKTKEVLMQGFMNSEALKKTIETKEAHYWSRSREEVWHKGETSGFVQKVIEMRIDDDQDSIWMSVDIGDGASCHVGYKSCFYRSITLGKIENTEKVKIDFKEKKKKFDPKVIYKNKPNPTKI

SEQ ID NO: 142213 - protein, 155 aa, Unknown
  Bacterial polypetide isolated from the Sargasso Sea
MFKKRDSVFEVEEGKFLSPKFDDQGLIPVVTTDSKTGEVLMHGYMNSEALKKTIETKEAHYWSRSRKSIWHKGKTSGFTQKVIQIRIDDDQDSVWLNVDIGDGASCHVGYKSCFYRSIPLGKIDQSEKVEMKFEEKEKKFDPEKVYKGQPNPTKL

SEQ ID NO: 142214 - protein, 155 aa, Unknown
  Bacterial polypetide isolated from the Sargasso Sea
MFKKRENVVEIEEGNLLSPKFDNDGLIPVITMCAKTKEILMHGYMNIEALQKTIETKEAHYFSRSRKSIWHKGKTSGFVQKVTEIRIDDDQDSIWLTVDIGDGASCHVGYRSCFYRTIPLGPIENGRKVEMKFTEKEKKFDPKKVYKGQPNPTKI

SEQ ID NO: 142215 - protein, 133 aa, Unknown
  Bacterial polypetide isolated from the Sargasso Sea
NDGLIPVITTCAETKEILMHGYMNVEALKLTIETKEAHYWSRSRKEIWHKGKTSGFTQKVKEIRIDDDQDAVWITVDIGDGASCHVGYRSCFYRSVPTGKIENGRKVEMKFEEEKKKFDPEVVYKGQPNPTKI

SEQ ID NO: 142216 - protein, 155 aa, Unknown; identical to SEQ ID NO: 142202
  Bacterial polypetide isolated from the Sargasso Sea

SEQ ID NO: 142217 - protein, 157 aa, Unknown
  Bacterial polypetide isolated from the Sargasso Sea
MTEIFKKRKTVEQVEEGNELAPKFDENGLMPVVTTDAKTGDVLMLGYQNEEAVKLTIETGEAYYWSRSRKCLWHKGATSGLIQKVIDIRIDDDQDAIWLKVELQGLEASCHVGYKSCFYRSIPTGNIKEDIKLIYKEDKKAFKPEEVYGDAPNPTKL

SEQ ID NO: 142218 - protein, 155 aa, Unknown
  Bacterial polypetide isolated from the Sargasso Sea
MFKKRENVAEIEEGNLLSPKFNNDGLIPVITTDHKTNEVLMQGFMNEEALKKTIETKEAHYWSRSRKEVWHKGETSGYVQKVVELRIDDDQDSIWMTVNIGDGASCHVGYKSCFYRSVPLGKIEDSEKIKMEFKEKKKKFDPRKVYKDKPNPTKI

SEQ ID NO: 142219 - protein, 155 aa, Unknown
  Bacterial polypetide isolated from the Sargasso Sea
MFKKRENVVEIEEGNLLSPKFDNDGLIPVITMCFKTKDILMHSYMNVEALKKTIETKEAHYFSRSRNAIWHKGKTSGFIQKVIEIRIDDDQDSIWLTVDIGDGASCHVGYRSCFYRSLPLGPIDNAKKIEMKFLEKEKKFDPKKVYKGQPNPTKI

SEQ ID NO: 142220 - protein, 162 aa, Unknown
  Bacterial polypetide isolated from the Sargasso Sea
MCYIITPMFKKRENIYDIEEGNLLSPKFDNDGLIPVITMCSKTKDILMHGYMNVEAFKKTIETKEAHYFSRSRKTIWHKGKTSGFTQKVTEIRIDDDQDSVWLTVDIGDGASCHVGYRSCFYRSIPMGPIDNGRKVEMKFLEKEKKFDPEEVYKGQPNPTKI

SEQ ID NO: 142221 - protein, 165 aa, Unknown
  Bacterial polypetide isolated from the Sargasso Sea
MVLKIGKKVETINFAERSSIEFVEEGNALAPKFNSEGIIPVIVTESSSDLVLMLGYMNKEALDKTILTREGHYWSRSRELLWKKGESSGMTHRVDEILIDDDQDSVWLKVSIDGLGASCHVGYKSCFYRSVESVDQGNVVLNFTESEKVFDPEVVYPGADNPTKL

SEQ ID NO: 142222 - protein, 149 aa, Unknown
  Bacterial polypetide isolated from the Sargasso Sea
MFKKRENVADIEEGSLLSPKFDNDGLIPVITTCSKTKEILMHGYMNVEALKLTIETKEAHYWSRSRKQIWYKGKTSGFIQKVKEIRIDDDQDSVWLTVDIGEGASCHVGYRSCFYRSVPLGKIDNARQIEMKFEEKEKKFDPEKVYKDE

SEQ ID NO: 142223 - protein, 155 aa, Unknown
  Bacterial polypetide isolated from the Sargasso Sea
MFKKRENIADIEEGNLLSPKFDNDGLIPVVTMCQKTKEILMHGYMNVEALKKTIETKEAHYWSRSRKEIWHKGKTSGFIQKVKEIRIDDDQDSLWLTVDIGDGSSCHVGYRSCFYRSVPLGKIDNARKIEMKFEENEKKFDPDKVYKGQPNPTKI

SEQ ID NO: 142224 - protein, 105 aa, Unknown
  Bacterial polypetide isolated from the Sargasso Sea
KKTMETKEAHYFSRSRNTIWHKGQTSGFVQRVKEIKIDDDQDSICLTVDIGDGASCHVGYRSCFYRSIPLGPIENGRKIKMKFTEKEKKFDPEKVYKGQTNPTKI

SEQ ID NO: 142225 - protein, 129 aa, Unknown
  Bacterial polypetide isolated from the Sargasso Sea
IPVVTTDYNTGEVLMHGYMNSEALKKTIETKEAYYWSRSRKEIWHKGETSGFVQKVVELRIDDDQDSIWMNVDIGNGASCHVGYKSCFYRAVPLGKIQNAEKIEMKFKDKKKKFDPEVVYKGKPNPTKI

SEQ ID NO: 142226 - protein, 151 aa, Unknown
  Bacterial polypetide isolated from the Sargasso Sea
RESVFEVEEGKFLSLLFDKDGLIPVTTSDSSSGELLMHGYMNEEALKKTIETKEAHYWSRSRKDIWHKGNTSGFVQKVIDLRIDDDQDALWMSVDIGNGSSCHVGYKSCFYRSIPLGKIKNSEEIKLEFKEKEKKFDPEKVYKDQPNPTKL

SEQ ID NO: 142227 - protein, 117 aa, Unknown
  Bacterial polypetide isolated from the Sargasso Sea
ILMHGYMNTEALKKTLETKEAHYWSRSRKQIWHKGKTSGFVQKVVEFRIDDDQDAVWLTVDIGSGSSCHVGYRSCFYRSVTLGKIGNASEIKMKFEEIEKKFDPDIVYKDQSNPTKI

SEQ ID NO: 142228 - protein, 141 aa, Unknown
  Bacterial polypetide isolated from the Sargasso Sea
MFKKRESVFEVEEGKFLSPKFDKDGLIPVTTSDSSSGELLMHGYMNEEALKKTIETKEAHYWSRSRKDIWRKGKTSGFVQKVIDLRIDDDQDALWMSVDIGNGASCHVGYKSCFYRSITLGKIENSEEIKLEFKEKEKKFD

SEQ ID NO: 142229 - protein, 136 aa, Unknown
  Bacterial polypetide isolated from the Sargasso Sea
MFKKRENVADIEEGSLLSPKFDNDGLIPVITTCSKTKEILMHGYMNVEALKLTIETKEAHYWSRSRKQIWHKGKTSGFVQKVIEIRIDDDQDSVWLTVDIGDGSSCHVGYRSCFYRSIPLGEIINGREVEMKFEEK

SEQ ID NO: 142230 - protein, 155 aa, Unknown
  Bacterial polypetide isolated from the Sargasso Sea
MFKKRESVTEIEEGSFLSPKFDNDGLIPVVTTCVNTKEILMLGYMNVEAFKKTIETKEAHYWSRSRKQVWHKGKTSGFIQKVKEIRIDDDQDSVWLSVDIGNGSSCHVGYRSCFYRSIPLGKIENAREIKMKFEESKKKFDPEKVYKGQPNPTKI

SEQ ID NO: 142231 - protein, 155 aa, Unknown
  Bacterial polypetide isolated from the Sargasso Sea
MFKKRENIYDIEEGNLLSPKFDNDGLIPVITMCSKTKDILMHGYMNVEALKKTIETKEAHYFSRSRKAIWHKGKTSGFTQKVTEIRIDDDQDSVWLTVDIGDGASCHVGYRSCFYRSIPMGPIENGRKVKMDFLEKEKKFDPEKVYKGQPNPTKI

SEQ ID NO: 142232 - protein, 155 aa, Unknown
  Bacterial polypetide isolated from the Sargasso Sea
NVKKRENVTDIEEGDLFSPKFDNDGLIPVVTTCSNTKEILMHGYMNTEALKKTIETKEAHYWSRSRKQIWHKGKTSGFVQKVTEIRIDDDQDSVWLVVDIGTGSSCHVGYRSCFYRSVPLGKINNAKEIKMKFEEKEKKFDPEEVYKGQSNPTKI

SEQ ID NO: 142233 - protein, 123 aa, Unknown
  Bacterial polypetide isolated from the Sargasso Sea
MFKKRENVKEIEEGDLLSPKFDNDGLIPVVTTCFDTKEILMHGYMNVEAFKLTIETKEAHYWSRSRKSIWHKGKTSGFVQKVKAIRIDDDQDAVWLTVDIGKGSSCHVGYRSCFYRSVPLGKI

SEQ ID NO: 142234 - protein, 155 aa, Unknown
  Bacterial polypetide isolated from the Sargasso Sea
MFKKRENVKDIEEGNLLSPKFDNDGLIPVITTCYKTKEILMHGYMNTEAFKLTIETKEAHYWSRSRKQIWHKGKTSGFVQKVKEVRIDDDQDSIWLVVDIGDGASCHVGYRSCFYRSIPMGKINDAKNIEMKFEENKKKFDPDIVYKDQPNPTKI

SEQ ID NO: 142235 - protein, 155 aa, Unknown
  Bacterial polypetide isolated from the Sargasso Sea
MFKKRENVADIEEGSLLSPKFDNDGLIPVITTCFKTKEILMHGYMNMEALKLTIETKEAHYWSRSRKQIWHKGKTSGFVQKVKEIRIDDDQDSVWLTVDIGDGASCHVGYRSCFYRSVPLGKIDNARQIEMKFEEKEKKFDPKKVYKDEPNPTKI

SEQ ID NO: 142236 - protein, 122 aa, Unknown
  Bacterial polypetide isolated from the Sargasso Sea
MFKKRESVFEVEEGKFLSPKFDADGLIPVVTTDSKTGDVLMHGFMNKEALKKTIETKEAYYWSRSRKVLWHKGKNSGYIQKIIEIRVDDDQDSIWIKVDIGDGASCHVGYKSCFYRSVPLGK

SEQ ID NO: 142237 - protein, 155 aa, Unknown
  Bacterial polypetide isolated from the Sargasso Sea
MFKKRENVADIEEGILLSPKFDNDGLIPVVTTCSTTKEILMHGYMNVESLKLTIETKEAHYWSRSRKQIWHKGKTSGFVQKVVEIRIDDDQDSVWLTVDIGDGASCHVGYKSCFYRSIPLGEIKNGREVEMKFEEKEKKFDPEKVYKGQPNPTKI

SEQ ID NO: 142238 - protein, 155 aa, Unknown
  Bacterial polypetide isolated from the Sargasso Sea
MFKKRENVADIEEGNLLSPKFDNDGLIPVITTCAETKEILMHGYMNVEALKLTIETKEAHYWSRSRKEIWHKGKTSGFTQKVKEIRIDDDQDAVWITVDIGDGASCHVGYRSCFYRSIPTGKIENGRKVEMKFEEEKKKFDPEVVYKGQPNPTKI

SEQ ID NO: 142239 - protein, 147 aa, Unknown
  Bacterial polypetide isolated from the Sargasso Sea
AEIEEGNLLSPKFDNDGLIPVVTTCANTKEVLMHGYMNVEALKLTIETKEAHYWSRSRKQIWHKGKTSGFLQKVKEIRIDDDQDSIWLSVDIGDGASCHVGYKSCFYRSIPLGKIDNGRKVEMKFEEKEKKFDPEKVYKGQPNPTKI

SEQ ID NO: 142240 - protein, 131 aa, Unknown
  Bacterial polypetide isolated from the Sargasso Sea
MFKKRENIYDIEEGNLLSPKFDNDGLIPVITMCSKTKDILMHGYMNVEALKKTIETKEAHYFSRSRKTIWHKGKTSGFTQKVTEIRIDDDQDSIWLTVDIGDGASCHVGYRSCFYRSVPMGPIENGRKVEM

SEQ ID NO: 142241 - protein, 110 aa, Unknown
  Bacterial polypetide isolated from the Sargasso Sea
MVEAFKKTIETKEAHYFSRSRKAIWHKGKTSGFVQKVIEIRIDDDQDSVWLTVDIGDGASCHVGYRSCFYRSIPLGQIDDGRKIEMKFLEKNKKFDPEKIYKGQPNPTKI

SEQ ID NO: 142242 - protein, 155 aa, Unknown
  Bacterial polypetide isolated from the Sargasso Sea
MFKKRENVQEIEEGKLLSPKFDNNGLIPVITMCSKTKDILMHGYMNVEALKKTIETKEAHYFSRSRKAIWHKGKTSGFTQKVTEIRIDDDQDSIWLTVDIGDGASCHVGYRSCFYRSVPLGTIDNGRKIEMKFLEKEKKFDPEEIYKDQPNPTKI

SEQ ID NO: 142243 - protein, 125 aa, Unknown
  Bacterial polypetide isolated from the Sargasso Sea
MFKKRENVADIEEGSLLSPKFDNDGLIPVITTCFKTKEILMHGYMNVEALKLTIETKEAHYWSRSRKQIWHKGKTSGFIQKVKEIRIDDDQDSVWLAVDIGDGASCHVGYRSCFYRSIPLGKIEN

SEQ ID NO: 142244 - protein, 155 aa, Unknown
  Bacterial polypetide isolated from the Sargasso Sea
MFKKRENVADIEEGPLLSPKFDNDGLIPVITTCSKTKEILMHGYMNVEALKLTIESKEAHYWSRSRKQIWHKGKTSGFVQKVIEIRIDDDQDAVWLTVDIGDGASCHVGYRSCFYRSIPLGEIKNGREIEMKFEEKEKKFDPEKVYKGQTNPTKI

SEQ ID NO: 142245 - protein, 115 aa, Unknown
  Bacterial polypetide isolated from the Sargasso Sea
MHGYMNEDALKKTIETKEAHYWSRSRKTLWHKGKSSGFIQKVIELRIDDDQDSVWIKVDIGNGASCHVGYKSCFYRSVPLGKIENDKQIKMDFKEKEKKFDPKKVYKDQSNPTKL

SEQ ID NO: 142246 - protein, 115 aa, Unknown
  Bacterial polypetide isolated from the Sargasso Sea
MHGYMNVEALKLTIETKEAHYWSRSRKEIWHKGKTSGFVQKVKEIRIDDDQDAVWLSVDIGKGSSCHVGYRSCFYRSVPLGEIDNARQIKMKFEEKEKKFDPEIVYKDQPNPTKI

SEQ ID NO: 142247 - protein, 129 aa, Unknown
  Bacterial polypetide isolated from the Sargasso Sea
MTYQNVLSSINFDERGLVPAIAQQFDSGEVLMMAWMNAESLTETLNTGQVCYWSRSRKMLWFKGETSGQTQSLKELIVDCDYDTLLLKVDQLGVACHTGRQSCFFNAFRDNSLVTIKEQIVDPSDLYRS

SEQ ID NO: 142248 - protein, 130 aa, Unknown
  Bacterial polypetide isolated from the Sargasso Sea
MFKKRENVADIEEGSLLSPKFNNDGLIPVVTTCSKTKEILMHGYMNVEALKLTIETKEAHYWSRSRKQIWHKGKTSGFVQKVKEIRIDDDQDSVWLTVDIADGASCHVGYRSCFYRSVPLGKIDNARQIE

SEQ ID NO: 142249 - protein, 122 aa, Unknown
  Bacterial polypetide isolated from the Sargasso Sea
SKTKEILMHGYMNVEALKLTIETKEAHYWSRSRKQIWHKGKTSGFVQKVIEIRIDDDQDSVWLTVDIGDGASCHVGYRSCFYRSIPLGKIKNGREVEMKFEEKEKKFDPEKVYKGQPNPTKI

SEQ ID NO: 142250 - protein, 99 aa, Unknown
  Bacterial polypetide isolated from the Sargasso Sea
KEAHYWSRSRNEIWHKGKTSGFVQKIKEIRIDDDQDSIWLSVDIGNGASCHVGYKSCFYRSVPLGKIDNAKEIKMKFEEKEKKFDPKIVYKGKANPTKI

SEQ ID NO: 142251 - protein, 155 aa, Unknown
  Bacterial polypetide isolated from the Sargasso Sea
MFKKRENVQEIEEGNLLSPKFDNDGLIPVITMCSQTKDILMHGYMNVEALKKTIETKEAHYFSRSRKAIWHKGKTSGFTQKVTEIRIDDDQDSIWLTVDIGDGASCHVGYRSCFYRSIPMGPIENGRQVEMKFLEDEKKFDPEEVYKDQPNPKKI

SEQ ID NO: 142252 - protein, 155 aa, Unknown
  Bacterial polypetide isolated from the Sargasso Sea
MFRKRESIFEVEEGKFLSPKFDKDGLIPVTTSDSGSGELLMHGYMNDEALKKTIETKEAHYWSRSRKNIWHKGQTSGFVQRVVDLRIDDDQDALWMSVDIGNGASCHVGYKSCFYRSIPLGKIENSEEIKLEFKEKEKKFDPEKVYKGQPNPTKL

SEQ ID NO: 142253 - protein, 140 aa, Unknown
  Bacterial polypetide isolated from the Sargasso Sea
FLSPKFDNQGLIPVITTDSKTGEVLMHGYMNSEALKKTIETKEAHYWSRSRKSIWHKGKTSGFTQKVIQIRIDDDQDSVWLSVDIGNGASCHVGYKSCFYRSIPLGKIDHSEKVEMKFEEKEKKFDPEKVYKGQPNPTKL

SEQ ID NO: 142254 - protein, 155 aa, Unknown
  Bacterial polypetide isolated from the Sargasso Sea
MFKKRENIFEIEEGNLLSPKFDNNGLIPVITMCSKTKDILMHGYMNVEALKKTIETKEAHYFSRSRNAIWHKGKTSGFIQKVNEIRIDDDQDSIWLSVDIGEGSSCHVGYRSCFYRSIPLGRIDNGRKIEMKFLEKEKKFNPEEVYKNQPNPTKI

SEQ ID NO: 142255 - protein, 92 aa, Unknown
  Bacterial polypetide isolated from the Sargasso Sea
TIAWEKTLETGKAWFYSRSRDKQWMKGEESGNVQIVKEVFVDCDDDTVLLKVEQVGKAACHKGYTSCFFRKVNGDVEVIEEKIFDPEKVYKK

SEQ ID NO: 142256 - protein, 155 aa, Unknown
  Bacterial polypetide isolated from the Sargasso Sea
MFKKRDNIKEVEEGKYLEPKFDENGLIPVITTDFKTGDILMHGYMNDESLKKTIETKEAHYWSRSRKKIWHKGQISGFVQKVKEIRIDDDQDSIWLSVDIGNGASCHVGYRSCFYRSIPLGKIKNVEEIEMEFKEKKKTFNPKKIYKDEPNPTKL

SEQ ID NO: 142257 - protein, 155 aa, Unknown; identical to SEQ ID NO: 142234
  Bacterial polypetide isolated from the Sargasso Sea

SEQ ID NO: 142258 - protein, 129 aa, Unknown
  Bacterial polypetide isolated from the Sargasso Sea
IPVITTDHQTNEVLMQGFMNEEALKKTIETKEAHYWSRSRKEVWHKGETSGFVQKVVELRIDDDQDSIWMTVNIGDGASCHVGYKSCFYRSIPLGKIEDSKKIKMEFKEKKKKFDPNKIYKDKPNPTKI

SEQ ID NO: 142259 - protein, 127 aa, Unknown
  Bacterial polypetide isolated from the Sargasso Sea
MFKKRENVTDIEEGSLLSPKFDNDGLIPVITTCSKTKEILMHGYMNVEALKLTIETKEAHYWSRSRKQIWHKGKTSGFVQKVIEIRIDDDQDSVWLTVDIGDGASCHVGYRSCFYRSIPLGEIKNGR

SEQ ID NO: 142260 - protein, 155 aa, Unknown
  Bacterial polypetide isolated from the Sargasso Sea
MFKKRENIYDIEEGNLLSPKFDNDGLIPVITMCSKTKDVLMHGYMNVEALKKTIETKEAHYFSRSRKAIWHKGKTSGFTQKVTEIRIDDDQDSIWLTVDIGDGASCHVGYRSCFYRSIPMGPIENGRKVKMEFLEKEKKFDPEEVYKGQPNPTKI

SEQ ID NO: 142261 - protein, 155 aa, Unknown
  Bacterial polypetide isolated from the Sargasso Sea
MFKKRENIYDIEEGNLLSPKFDNDGLIPVITMCSKTKDILMHGYMNVEALKKTIETKEAHYFSRSRKAIWHKGKTSGFTQKVIEIRIDDDQDSVWLTVDIGDGASCHVGYRSCFYRSIPMGPIENGRKVEMEFLEKEKKFDPEEVYKGQPNPTKI

SEQ ID NO: 142262 - protein, 155 aa, Unknown
  Bacterial polypetide isolated from the Sargasso Sea
MFKKRENVAEIEEGNLLSPKFDNDGLIPVITMCSKTKDILMHGYMNVEALKKTIETKEAHYFSRSRKAVWHKGKTSGFVQKVKEIRIDDDQDSIWLTVDIGDGASCHVGYRSCFYRSVPLGKIDNGREIEMKFLEKEKKFDPEEVYKDQPNPTKI

SEQ ID NO: 142263 - protein, 155 aa, Unknown
  Bacterial polypetide isolated from the Sargasso Sea
MFKKRENVQEIEEGNLLSPKFDNDGLIPVITTCSKTKEILMHGYMNTEALKLTIETKEAHYWSRSRKQIWHKGKTSGFTQKVIEIRIDDDQDSVWLTVDIGDGASCHVGYRSCFYRSIPLGEIKNGREVKMNFEEKEKKFDPDKVYKGQPNPTKI

SEQ ID NO: 142264 - protein, 155 aa, Unknown
  Bacterial polypetide isolated from the Sargasso Sea
MFKKRENVAVIEEGNLLSPKFDNDGLIPVVTTDYKTGEVLMHGYMNSEALKKTIETKEAYYWSRSRGEIWHKGETSGFVQKVIEIRIDDDQDSVWISVDIGSGASCHVGYKSCFYRSVPLGKIEKTEKVEMEFKDKKKKFDPKVVYKGKSNPTKI

SEQ ID NO: 142265 - protein, 154 aa, Unknown
  Bacterial polypetide isolated from the Sargasso Sea
FKKRENIYDIEEGNLLSPKFDNDGLIPVITMCSKTKDILMHGYMNVEALKKTIETKEAHYFSRSRKAIWHKGKTSGFTQKVTEIRIDDDQDSIWLTVDIGDGASCHVGYRSCFYRSIPMGPIDNGRKVEMEFLEKEKKFDPEEVYKGQPNPTKI

SEQ ID NO: 142266 - protein, 112 aa, Unknown
  Bacterial polypetide isolated from the Sargasso Sea
LGNMIKEALDKTILPKKAHYWSRSRKALWKKGESSGMVHKIDEILIDDDQDSIWLKVTIEGLGASCHVGYKSCFYRSVDSIEKDEVILNFTESEKVFDPEEVYPGIENPTKL

SEQ ID NO: 142267 - protein, 135 aa, Unknown
  Bacterial polypetide isolated from the Sargasso Sea
MFKKREKIYDIEEGNLLSPKFDNDGLIPVITMCSKTKDILMHGYMNVEALKKTIETKEAHYFSRSRKAIWHKGKTSGFTQKVTEIRIDDDQDSIWLTVDIGDGASCHVGYRSCFYRSIPMGPIENGRKVEMEFVE

SEQ ID NO: 142268 - protein, 155 aa, Unknown
  Bacterial polypetide isolated from the Sargasso Sea
MFKKRENVTEIEEGTLLSPRFDNDGLIPVVTTCAKTKEVLMHGHMNTEALKLTIETGEAHYWSRSRKQIWHKGSTSGFVQKIIEIRVDDDQDSIWLRVDIGNGASCHVGYRSCFYRSVPIGKIENGRNIKIKFEEKEKKFDPDKVYKGQPNPTKI

SEQ ID NO: 142269 - protein, 131 aa, Unknown
  Bacterial polypetide isolated from the Sargasso Sea
GLIPVITTDFKTGDILMHGYMNADSLKKTIETKEAHYWSRSRKKIWHKGQVSGFVQKIKEIRIDDDQDSLWLSVDIGNGASCHVGYRSCFYRSIPLGKIKNAEELEIKFEEKKKIFNPKEVYKGQPNPTKI

SEQ ID NO: 142270 - protein, 119 aa, Unknown
  Bacterial polypetide isolated from the Sargasso Sea
KEILMHGYMNMEALKLTIETKEAHYWSRSRKVIWHKGKTSGFVQKVKEIRIDDDQDAVWLTVDIGDGASCHVGYRSCFYRSIPLGEIKNGREVEMKFEEKEKKFDPEKVYKGQPNPTKI

SEQ ID NO: 142271 - protein, 155 aa, Unknown
  Bacterial polypetide isolated from the Sargasso Sea
MFKKRESVTEIEEGNFLSPKFDNDGLIPVVTTCVNTKEILMLGYMNVEAFKKTIETKEAHYWSRSRKQVWHKGKTSGFVQKIKEIRIDDDQDAVWLTVDIGNGSSCHVGYRSCFYRSIPLGKIENAREIKMKFEEKEKKFDPEKVYKDQLNPTKI

SEQ ID NO: 142272 - protein, 155 aa, Unknown
  Bacterial polypetide isolated from the Sargasso Sea
MFKKRESVFEIEEGKFLSPKFDEKGLIPVTTTDHKSGEVLMHGYMNEEALKLTIEKKEACYWSRSRNTLWHKGKTSGFVQKVIDIRIDDDQDSLWMTVDIGDGASCHVGYKSCFYRSIPLGKIKNSEEIKLEFKEKEKKFDPKKVYKDQPNPTKL

SEQ ID NO: 142273 - protein, 155 aa, Unknown
  Bacterial polypetide isolated from the Sargasso Sea
MFKKRENVAEIEEGSLLSPKFDNDGLIPVVTTCSKTKEILMHGYMNVEAFRLTIETKEAHYWSRSRKQIWHKGKTSGFVQKVKEIRIDDDQDSVWLSVDIGDGSSCHVGYRSCFYRSVPLGKIDNARQIEMKFEEKEKKFDPKKVYKDEPNPTKI

SEQ ID NO: 142274 - protein, 107 aa, Unknown
  Bacterial polypetide isolated from the Sargasso Sea
ALKKTIENKKAHYWSRSRKEVWLKGETSGFFQKVIEIRIDDDQDSIWMSVDIGNGASCHVGYKSCFYRSVPLGKIEDTEKVEMEFNDKKKKFDPSIIYKGKPNPTKI

SEQ ID NO: 142275 - protein, 155 aa, Unknown
  Bacterial polypetide isolated from the Sargasso Sea
MFKKRENVTDIEEGNLLSPKFDNDGLIPVITTCSKTKEILMHGYMNVEALKKTIETKEAHYWSRSRNQIWHKGKTSGFVQKVIEVRIDDDQDAVWLTVDIGSGSSCHVGYRSCFYRSVPLGKIENAREIKMKFEEKEKKFDPEIVYKGQPNPTKI

SEQ ID NO: 142276 - protein, 155 aa, Unknown
  Bacterial polypetide isolated from the Sargasso Sea
MFKKRKNVAAIEEGKLLSPKFDKDGLIPVVTTDCKTGEVLMHGYMNSEALKKTIETKEAYYWSRSRKEVWHKGETSGFVQKVVEVRVDDDQDSIWMSVDIGDGASCHVGYKSCFYRIVPLGKIQNSEKVEMKFKDKKKKFDPNVVYKGKPNPTKI

SEQ ID NO: 142277 - protein, 155 aa, Unknown
  Bacterial polypetide isolated from the Sargasso Sea
MFKKRENVEEIEEGNLLSPKFDNDGLIPVVTTCANTKEVLMHGYMNVEALKLTIETKEAHYWSRSRKQIWQKGKTSGFVQNVKELRIDDDQDTIWMSVDIGNGSSCHVGYRSCFYRSVPLGKIENGRNVKMKFEEKEKKFNPEEVYKDQPNPTKI

SEQ ID NO: 142278 - protein, 155 aa, Unknown
  Bacterial polypetide isolated from the Sargasso Sea
MFKKRESVTEIEEGSFLSPKFDNDGLIPVITTCINTKEILMLGYMNVEAFKRTIETKEAHYWSRSRKQVWHKGKTSGFIQKVKEIRIDDDQDSVWLSVDIGNGSSCHVGYRSCFYRSIPLGKIENAKEIKMKFEEKEKKFDPEKVYKDQPNPTKI

SEQ ID NO: 142279 - protein, 155 aa, Unknown
  Bacterial polypetide isolated from the Sargasso Sea
MFKKRENVADIEEGKLLSPKFDNDGLIPVITTCSNTKEILMHGYMNMEALKLTIETREAHYWSRSRKQIWHKGKTSGFVQKVHEIRIDDDQDAVWLTVDIGDGASCHVGYRSCFYRSVPMGKIENGRKIEMKFEEKEKKFDPEEVYKGQPNPTKI

SEQ ID NO: 142280 - protein, 149 aa, Unknown
  Bacterial polypetide isolated from the Sargasso Sea
MFTKRKSIKQVEEGKDLAPKFDKSGLIPVITTDSKNGNVLMHGYMNKEALKRTIETGEVYYWSRSRKKIWHKGDSSGFVQIVKEIRIDDDQDAIWVKVSTRASCHVGYKSCFYRSVPMKKKKTKLIFKETKKTFDPKKIYKGLPNPTKI

SEQ ID NO: 142281 - protein, 124 aa, Unknown
  Bacterial polypetide isolated from the Sargasso Sea
MFKKRENVVEIEEGNLLSPKFDNNGLIPVITMCAKTKEILMHGYMNVEALKKTIETKEAHYFSRSRNAIWHKGKTSGFTQKVNEIRIDDDQDSIWLTVDIGDGASCHVGYRSCFYRSIPLGPIN

SEQ ID NO: 142282 - protein, 127 aa, Unknown
  Bacterial polypetide isolated from the Sargasso Sea
MPKTTFEKSEKRIEILSVSDLDFENFSGLLPVIAQEHGSGRILMLAYANLEAVRKTQETGYAHYWSRSRKTLWKKGATSGHVQQITEVLVDCDKDTLLYKVIQTGPACHTGAKSCFYRKLHFETIEN

SEQ ID NO: 142283 - protein, 155 aa, Unknown
  Bacterial polypetide isolated from the Sargasso Sea
MFKKRENVAVIEEGPLLSPKFDNDGLIPVITTCSRTKEILMHGYMNVEALKLTIETKEAHYWSRSRKQIWHKGKTSGFVQKVIEIRIDDDQDAVWLTVDIGDGASCHVGYRSCFYRSIPLGKIENGRKVEMKFEEKEKKFDPEKVYKGQPNPTKI

SEQ ID NO: 142284 - protein, 117 aa, Unknown
  Bacterial polypetide isolated from the Sargasso Sea
ILVLMLGYMNKEALDKTILTKEAHYWSRSRKALWKKGESSGMVHKIDKILIDDDQDSIWLKVTIEGLGASCHVGYKSCFYRSVDSIEKDEVILNFTESEKVFDPEEVYPGIENPTKL

SEQ ID NO: 142285 - protein, 165 aa, Unknown
  Bacterial polypetide isolated from the Sargasso Sea
MTEKQIKFEKRVSIEQVEEGISLSPKFDKTGVIPCITVHAKTKEVLMFAYMNEEAMKLTISSGFAHYWSRSRKSLWKKGETSGMFQKVERILIDDDQDSIVIEVLLGEPTKGGREASCHVGYRSCFYRSIPIGESKDKIALKFIEKEKSFDPDKIYEGHENPTKL

SEQ ID NO: 142286 - protein, 155 aa, Unknown
  Bacterial polypetide isolated from the Sargasso Sea
MNNSLFKDRVSVEQVEESNDLAPSFGDQGLIPVVTTDVHSGDVLMVGYMNKDAFALTIETKKAHYWSRSRNKIWKKGETSGLVQNVIELRIDDDQDSLWLKVDVEGSGASCHVGYKSCFYRSVPLGGNENISLDFKEKEKTFDPKKIYGEIPNPT

SEQ ID NO: 142287 - protein, 155 aa, Unknown
  Bacterial polypetide isolated from the Sargasso Sea
MFKKRENVDEIEEGNLLSPKFDNDGLIPVITMCSQTREILMHGYMNVEALKLTIETKEAHYWSRSRKEVWHKGKTSGYIQRVKEIRIDDDQDSIWLLVDIGNGSSCHVGYRSCFYRSIPLGKIDDAKKIKMKFEEKEKKFDPEKVYKGQPNPTKI

SEQ ID NO: 142288 - protein, 133 aa, Unknown
  Bacterial polypetide isolated from the Sargasso Sea
MFKKRENIADIEEGALLSPKFDNDGLIPVVTMCQKTKEILMHGYMNVEALKLTIETKEAHYWSRSRNEIWHKGKTSGFVQKVKEIRIDDDQDSLWLTVDIGEGSSCHVGYRSCFYRSVPLGKIDNARKYKNEV

SEQ ID NO: 142289 - protein, 155 aa, Unknown
  Bacterial polypetide isolated from the Sargasso Sea
MFKKRENVIEIEEGNLLSPKFDNDGLIPVITTCYQTKEILMHGYMNVEALKKTIETKEAHYWSRSRKVIWHKGKTSGFVQKVKEIRIDDDQDAVWLTVDIGDGASCHVGYRSCFYRSIPLGEIKNGREVEMKFEEKEKKFDPEKVYKGQPNPTKI

SEQ ID NO: 142290 - protein, 155 aa, Unknown
  Bacterial polypetide isolated from the Sargasso Sea
MFKKRENVVEIEEGKLLSPKFDNDGLIPVITVCHKTKDILMHGYMNVEAFKKTIETKEAHYFSRSRNALWHKGRTSGFVQKVLEIRIDDDQDSLWLTVDIGDGASCHVGYRSCFYRSIPLGPIKNGREIEMKFLEDEKKFDPEEVYKGQPNPTKI

SEQ ID NO: 142291 - protein, 191 aa, Unknown
  Bacterial polypetide isolated from the Sargasso Sea
MIEVRTNNSDNQVSFQPPFPFWNKSVADTHSSSDALRLFAPRTSIEQVEEGNELAPKFDEKGFIPCVTTDHVSGELLMVAVMNQEALEKTIVTGEAHYFSRSRQCLWHKGATSGLVQKVVEMRIDDDQDCIWLRVDVAGGASCHVGYRSCFYRKVPVGVQRDSGSELEYIEAEKTFDPKEVYGDAPNPTQL

SEQ ID NO: 142292 - protein, 155 aa, Unknown
  Bacterial polypetide isolated from the Sargasso Sea
MFKKRDSIFEVEEGKFLSPKFDSQGLIPVITTDSKTGEVLMHGYMNSEALKKTIETKEAHYWSRSRKSIWHKGKTSGFTQKVIQIRIDDDQDSVWLSVDIGNGASCHVGYRSCFYRSIPLGKIDQSEKVEMKFEEKEKKFDPEKVYKGQPNPTKL

SEQ ID NO: 142293 - protein, 155 aa, Unknown
  Bacterial polypetide isolated from the Sargasso Sea
MFKNRENVKEIEEGNLLSPKFDNDGLIPVITMCSKTKEILMHGYMNVEALKLTIEKKEAHYWSRSRKEIWHKGKTSGFVQKVKEIRIDDDQDSIWIVVDIGEGSSCHVGYRSCFYRTVPLGKIDNAREIKMEFKEKEKKFDPDKVYKGQPNPTKI

SEQ ID NO: 142294 - protein, 161 aa, Unknown
  Bacterial polypetide isolated from the Sargasso Sea
MRTTVNKVIFANRSSIEQVEEGNFLAPKFDRDGIIPVIVTETSSGDVLMLGYMNNESLEKTIETREAYYWSRSREVLWKKGDSSGMVHQVDEILIDDDQDSLWLKVSITGLGASCHVGYKSCFYRSIKNVVEQGVELEFTEDEKVFDPEIVYPGAENPTKL

SEQ ID NO: 142295 - protein, 160 aa, Unknown
  Bacterial polypetide isolated from the Sargasso Sea
MNFKKRISIEQVEEGVELAPKFDSKGVIPCITVHAQTKEVLMFAYMNEEAMQLTMSTGLAHYWSRSRKSLWKKGETSGMVQNIQRMLIDDDQDSLVIEVTLTEPSLGGEEASCHVGYRSCFYREVPIGQENIDKPLKFIEDEKSFDPEKIYKNIPNPTKL

SEQ ID NO: 142296 - protein, 155 aa, Unknown
  Bacterial polypetide isolated from the Sargasso Sea
MFKKRENIEEIEEGNLLSPKFDNDGLIPVITTCSNTKEILMHGYMNVEALKKTIETKEAHYWSRSRKQIWHKGKTSGFVQKVKEIRIDDDQDSIWLSVDIGDGASCHVGYRSCFYRSVPLGKIDNAREIKMKYEEKEKKFDPEKVYKGQPNPTKI

SEQ ID NO: 142297 - protein, 155 aa, Unknown
  Bacterial polypetide isolated from the Sargasso Sea
MFKKRENIYDIEEGNLLSPKFDNDGLIPVITMCSKTKDILMHGYMNVEALKKTIETKEAHYFSRSRKAIWHKGKTSGFTQKVTEIRIDDDQDSIWLTVDIGDGASCHVGYRSCFYRSIPMGPIENGRKVEMEFLEKEKKFDPEEVYKGQPNPTKI

SEQ ID NO: 142298 - protein, 155 aa, Unknown
  Bacterial polypetide isolated from the Sargasso Sea
MFKKRENVIEIEEGNLLSPKFDNDGLIPVITMCSQTKDVLMHGYMNVEALKKTIETKEAHYFSRSRNAIWHKGKTSGFTQKVIEIRIDDDQDSIWLTVDIGDGASCHVGYRSCFYRSIPMGPIENGRKVEMKFLEDEKKFDPEEVYKGQPNPTKI

SEQ ID NO: 142299 - protein, 155 aa, Unknown
  Bacterial polypetide isolated from the Sargasso Sea
MFKKRESVTEIEEGSFLSPKFDNDGLIPVITTCINTKEILMLGYMNVEAFKKTIETKEAHYWSRSRKQVWHKGKTSGFIQKVKEIRIDDDQDSVWLSVDIGNGSSCHVGYRSCFYRSIPLGKIENAREIKMKFEEKEKKFDPEKVYKDQPNPTKI

SEQ ID NO: 142300 - protein, 155 aa, Unknown; identical to SEQ ID NO: 142202
  Bacterial polypetide isolated from the Sargasso Sea

SEQ ID NO: 142301 - protein, 115 aa, Unknown
  Bacterial polypetide isolated from the Sargasso Sea
MHGYMNVEALKRTIETKEAHYWSRSRNEIWHKGKTSGFVQKVMEIRIDDDQDSVWLSVDIGDGASCHVGYKSCFYRSIPLGKIENGRKVEMKFEEKKKKFDPEKVYKGQPNPTKI

SEQ ID NO: 142302 - protein, 155 aa, Unknown
  Bacterial polypetide isolated from the Sargasso Sea
MFKKRESVLEVEEGKFLSPKFNAEGLIPVITTDHKTGDVLMHGYMNEDALKKTIETKEAHYWSRSRKVLWHKGKSSGFIQKVIEIRIDDDQDSIWMRVDIADGASCHVGYKSCFYREVPLGKIQDQEKVKMEFKEKKKKFDPKKVYKNQNNPTEL

SEQ ID NO: 142303 - protein, 155 aa, Unknown
  Bacterial polypetide isolated from the Sargasso Sea
MFKKRENVADIEEGNLLSPKFNNDGLIPVITTDFKTKEVLMQGFMNSEALKKTIETKEAHYWSRSRKEVWHKGETSGFVQKVVEMRIDDDQDSIWMSVDIGDGASCHVGYKSCFYRSITLGKIENTEKIKIDFKEKKKKFDPEVVYKNKPNPTKI

SEQ ID NO: 142304 - protein, 111 aa, Unknown
  Bacterial polypetide isolated from the Sargasso Sea
MNVEALKKTIETKEAHYWSRSRKQIWHKGKHSGFIQKVIELRIDDDQDAVWLTVDIGNGSSCHVGYRSCFYRSVPLGKIDNAREIEMKFEEKEKSFDPDEVYKNQSNPTKI

SEQ ID NO: 142305 - protein, 155 aa, Unknown
  Bacterial polypetide isolated from the Sargasso Sea
MFKKRENVVEIEEGNLLSPKFDNDGLIPVITMCSQTKDVLMHGYMNVEALKKTIETKEAHYFSRSRNAIWHKGKTSGFTQKVTEIRIDDDQDSIWLTVDIGDGASCHVGYRSCFYRSIPMGPIENGRKVEMKFLEDEKKFDPEEVYKGQPNPTKI

SEQ ID NO: 142306 - protein, 129 aa, Unknown
  Bacterial polypetide isolated from the Sargasso Sea
MFKKRENVADIEEGNLLSPKFDNDGLIPVVTTCAKTKEILMHGYMNVEALKLTIETKEAHYWSRSRKAIWHKGKTSGFTQKVKEIRIDDDQDAVWITVDIGNGASCHVGYRSCFYRSVPMGKIENGRKV

SEQ ID NO: 142307 - protein, 123 aa, Unknown
  Bacterial polypetide isolated from the Sargasso Sea
CANTKEILMHGFMNVEALKLTIETKEAHYWSRSRKQLWHKGKTSGFVQKVKEIRIDDDQDSIWLSVDIGDGASCHVGYKSCFYRSIPLGKIDNGRKIEMKFEEKEKKFDPEEVYKGQPNPTKI

SEQ ID NO: 142308 - protein, 158 aa, Unknown
  Bacterial polypetide isolated from the Sargasso Sea
MSNMFKKRENVQEIEEGILLSPKFDNDGLIPVVTTCSKTEEVLMQGYMNVEALKRTIETKEAHYWSRSRKQIWHKGKTSGYIQKVIEIRIDDDQDSIWLKVDIGQGASCHVGYRSCFYRSIPLGKIDNARNIKMRFEEKEKLFDPEEVYKGEENPTKV

SEQ ID NO: 142309 - protein, 106 aa, Unknown
  Bacterial polypetide isolated from the Sargasso Sea
SLQKTIETKEAHYFSRSRNIIWHKGASSGYVQKIDEILIDDDQDALCIKVNIGENGASCHVGYKSCFYRKIDLEDTANKPGLEFTTEEKVFDPNVVYGDAPNPTKL

SEQ ID NO: 142310 - protein, 110 aa, Unknown
  Bacterial polypetide isolated from the Sargasso Sea
MTLKVIDNIDFEKGNGLVPVIVQDSESKDVLTLAYTNKESLELTKKTGNSWFWSRSRNKLWMKGEESGNTQKVKKILVDCDSDAIIYLVEPSGPACHLGEDTCFHNEMNS

SEQ ID NO: 142311 - protein, 122 aa, Unknown
  Bacterial polypetide isolated from the Sargasso Sea
MFKKRENVKEIEEGKLLSPKFDNDGLIPVVTTCANTKEILMHGYMNVESLRLTIETKEAHYWSRSRKQIWHKGKTSGFVQKVKELRIDDDQDSVWISVDIGNGSSCHVGYRSCFYRSVPLGK

SEQ ID NO: 142312 - protein, 155 aa, Unknown
  Bacterial polypetide isolated from the Sargasso Sea
MFKKRDSVFEVEEGKFLSPKFDSQGLIPVITTDSKTGEVLMHGYMNSEALKKTIETKEAHYWSRSRKSIWHKGKTSGFTQKVIQIRIDDDQDSVWLSVDIGNGASCHVGYRSCFYRSIPLGKIDQSEKVEMKFEEKEKKFDPEKVYKGQPNPTKL

SEQ ID NO: 142313 - protein, 155 aa, Unknown
  Bacterial polypetide isolated from the Sargasso Sea
MFKKRENVADIEEGSLLSPKFDNDGLIPVITTCSKTKEILMHGYMNVEALKLTIETKEAHYWSRSRKQIWHKGKTSGFVQKVIEIRIDDDQDSVWLTVDIGDGASCHVGYRSCFYRSIPLGEIKNGREIEMKFEEKEKKFDPEKVYKGQPNPTKI

SEQ ID NO: 142314 - protein, 165 aa, Unknown
  Bacterial polypetide isolated from the Sargasso Sea
MVLKIGKKVKTINFAERSSIEFVEEGNVLAPKFNSDGIIPVIVTESSSDLVLMLGYMNKEALDKTILTREAHYWSRSRELLWKKGESSGMTHRVDEILIDDDQDSVWLKVSIDGLGASCHVGYKSCFYRSVESVEQGNVVLNFTESEKVFDPEVVYPGADNPTKL

SEQ ID NO: 142315 - protein, 155 aa, Unknown
  Bacterial polypetide isolated from the Sargasso Sea
MFKKRENVADIEEGSLLSPKFDNDGLIPVITTCYKTKEILMHGYMNVEAFKLTIETKEAHYWSRSRKQIWHKGKTSGFVQKVKEIRIDDDQDSAWLTVDIGDGASCHVGYRSCFYRSVPLGKIDNARQIEMKFEEKEKKFDPKKVYKDEPNPTKI

SEQ ID NO: 142316 - protein, 97 aa, Unknown
  Bacterial polypetide isolated from the Sargasso Sea
ACYWSRSRKALWYKGKTSGFVQKVIDIRIDDDQDALWMTVDIGNGASCHVGYKSCFYRSIPLGKINNSEEVKLEFREKEKKFDPEKVYKGQPNPTKL

SEQ ID NO: 142317 - protein, 155 aa, Unknown; identical to SEQ ID NO: 142297
  Bacterial polypetide isolated from the Sargasso Sea

SEQ ID NO: 142318 - protein, 139 aa, Unknown
  Bacterial polypetide isolated from the Sargasso Sea
MVDIPLAQRESVFEVEEGTALAPKFDENGLIPVVTTDSKSGEVLMHGYMNKEALLLTIQNKEAYYWSRSRKSIWHKGKTSGLTQKVSSIRIDDDQDSIWLIVDVEGVGASCHVGYRSCFYRSISFESKNKVVLKLKKKR

SEQ ID NO: 142319 - protein, 120 aa, Unknown
  Bacterial polypetide isolated from the Sargasso Sea
MFKKRENVAEIEEGNLLSPKFDDDGLIPVVTTCSKTNEVLMHGFMNVESLRLTIETKEAHYWSRSRKEIWRKGNVSGFVQKVKQIRIDDDQDSIWLSVDIGKGSSCHVGYRSCFYRSIPL

SEQ ID NO: 142320 - protein, 152 aa, Unknown
  Bacterial polypetide isolated from the Sargasso Sea
MTDEFGKRISIEEVEEGKCFTPKFDENGLIPVITVEDSSGDILMHGYMNSEALIKSIESKEAHYWSRSRQKLWKKGEISGLKQSIVKILVDDDQDCMIFRVNVAGSGASCHVGYKSCFYRVLEDKKNLKFIETEKLFDPAEIYEGEDNPTIL

SEQ ID NO: 142321 - protein, 152 aa, Unknown
  Bacterial polypetide isolated from the Sargasso Sea
MKNKFGKRISIEQVEEGNSLMPKFDDNGLIPVITVESGTELILMHGYMNEESLDLSIDTNLAHYWSRSRKKIWKKGETSGQFQHIKEILIDDDQDCLIIKVVLDGLGASCHVGYKSCFYRKVDKDLSLEFIEKEKVFDPEEVYEGEENPTIL

SEQ ID NO: 142322 - protein, 155 aa, Unknown
  Bacterial polypetide isolated from the Sargasso Sea
MFKKRENVADIEEGNLLSPKFDNDGLIPVITTCAETKEILMHGYMNVEAFKLTIETKEAHYWSRSRKEIWHKGKTSGFTQKVKEIRIDDDQDAVWITVDIGDGASCHVGYRSCFYRSVPMGEIENGRKVEMKFEEEKKKFDPEVVYKGQPNPTKI

SEQ ID NO: 142323 - protein, 155 aa, Unknown
  Bacterial polypetide isolated from the Sargasso Sea
MFKKRENIYDIEEGNLLSPKFDNDGLIPVITMCSKTKDILMHGYMNVEALKKTIETKEAHYFSRSRKAIWHKGKTSGFTQKVTEIRIDDDQDSIWLTVDIGDGASCHVGYRSCFYRSIPMGPIDNGRKVEMEFLEKEKKFDPEEVYKGQPNPTKI

SEQ ID NO: 142324 - protein, 141 aa, Unknown
  Bacterial polypetide isolated from the Sargasso Sea
MSETLVRQVIESIKFDTNGLVPAIAQDEDTKEVLMMAWMNDDAIKETLDTGMACYFSRSRSKLWRKGEESGHVQILKEFRIDCDADTILLIVDQKGVACHTGRPNCFFKKVDDGSIKIISEVLIDPQDLYIKNEYWKPIPE

SEQ ID NO: 142325 - protein, 136 aa, Unknown
  Bacterial polypetide isolated from the Sargasso Sea
MLNLKELESSASGTTFDLDSILEALKFNQEGLIPAVAQDIDTKEVLMLAWMDAKAIRSTLEEGQVCYYSRSRKTYWKKGEESGHKQKMVEMYIDCDGDSILLLVNQEGPACHTNRSGCFYLKTESDKVMISSDPIK

SEQ ID NO: 142326 - protein, 155 aa, Unknown
  Bacterial polypetide isolated from the Sargasso Sea
MFKKRENVADIEEGSLLSPKFDNDGLIPVVTTCSKTKEILMHGYMNVEALKLTIETKEAHYWSRSRKQIWHKGKTSGFVQKIKEIRIDDDQDSVWLSVDIGDGASCHVGYRSCFYRSVPLGKIDNARQIEMKFEEKEKKFDPKKVYKDEPNPTKI

SEQ ID NO: 142327 - protein, 155 aa, Unknown; identical to SEQ ID NO: 142202
  Bacterial polypetide isolated from the Sargasso Sea

SEQ ID NO: 142328 - protein, 155 aa, Unknown
  Bacterial polypetide isolated from the Sargasso Sea
MFKKRENVADIEEGNLLSPKFDNDGLIPVITTCAETKEILMHGYMNVEALKLTIETKEAHYWSRSRKEIWHKGKTSGFTQKVKEIRIDDDQDAVWITVDIGDGASCHVGYRSCFYRSVPTGKIENGRKVEMKFEEEKKKFDPEVVYKGQPNPTKI

SEQ ID NO: 142329 - protein, 155 aa, Unknown
  Bacterial polypetide isolated from the Sargasso Sea
MFKKRENVADIEEGSLLSPKFDNDGLIPVITTCSKTKEILMHGYMNVEALKLTIETKEAHYWSRSRKEIWHKGKTSGFVQKVIEIRIDDDQDSVWLTVDIGDGASCHVGYRSCFYRSIPLGEIKNGREVEMKFEEKEKKFDPEKVYKGQPNPTKV

SEQ ID NO: 142330 - protein, 152 aa, Unknown
  Bacterial polypetide isolated from the Sargasso Sea
KRENIYDIEEGNLLSPKFDNDGLIPVITMCSKTKDILMHGYMNVEALKKTIETKEAHYFSRSRKAIWHKGKTSGFTQKVTELRIDDDQDSVWMTVDIGNGASCHVGYRSCFYRSIPMGKIDNARQIEMKFLEKEKKFDPEEVYKGQPNPTKI

SEQ ID NO: 142331 - protein, 157 aa, Unknown
  Bacterial polypetide isolated from the Sargasso Sea
MFKKRENVADIEEGNLLSPKFDNDGLIPVVATCSKTKEILMHGYMNVEALKLTIETSEAHYWSRSRKQIWHKGKTSGFVQKVKEIRIDDDQDSVWISVDIGDGASCHVGYRSCFYRSIPLGKIDNARQIEMNFEEKEKKFDPEKVYKGQPNPTKIKK

SEQ ID NO: 142332 - protein, 110 aa, Unknown
  Bacterial polypetide isolated from the Sargasso Sea
MTLKIIDEIDFEKGDGLVPVIVQDSESKDVLTLAYTNKESLELTKKTGNSWFWSRSRKKLWMKGEESGNTQKVKKILVDCDSDAIIYLVEPSGPACHLGERTCFHNDMES

SEQ ID NO: 142333 - protein, 169 aa, Unknown
  Bacterial polypetide isolated from the Sargasso Sea
MQIAILSFFHYFTFMFKKRENVFEVEEGKFLSPKFDKDGLIPVTTSDSGSGELLMHGYMNEEALKKTIETKEAHYWSRSRKDIWHKGKTSGFVQKVIDLRIDDDQDALWMSVDIGNGASCHVGYKSCFYRSIPLGKIKNSEEIELEFKEKEKKFDPEKVYKGQPNPTKL

SEQ ID NO: 142334 - protein, 226 aa, Unknown
  Bacterial polypetide isolated from the Sargasso Sea
MGVSNNPSRLGSSPIHFKIVLNASSASLSETLFCNFSFSFLTNFIASLYNTKYAFFKIFIICANMLHNSINMFKKRENIAEIEEGNLLSPKFDNEGLIPVVTTCSNTKEILMHGYMNVEAFKKTIETKEAHYWSRSRKQIWHKGKTSGFVQKIKEIRIDDDQDSIWLSVDIGDGASCHVGYRSCFYRSVPLGKIDNAREIKMKFEEKEKKFDPEKVYKGQPNPTKI

SEQ ID NO: 142335 - protein, 127 aa, Unknown
  Bacterial polypetide isolated from the Sargasso Sea
MSWLDKINWNKENLVPVIVQEIDTNQVLMHAWMNRESLEETYKSGRATYWSRSRQSLWIKGESSGHYQYVESIRADCDYDALLITVKQKEGIACHTGRHHCFFTKLVDGNWVETEKILKASEDIYDK

SEQ ID NO: 142336 - protein, 161 aa, Unknown
  Bacterial polypetide isolated from the Sargasso Sea
MHPLSPAFMDQLRFTEAGLIPAVAQDWLDGAVLMVAWMNRESIEKTLQSGEVHYWSRSRAELWHKGATSGHTQILRGIRYDCDADVLLLNIEQTGDVACHTGARSCFYEDDDNPTEGGVDALPPPADACTELYRVILDRKTQPEEGSYTNKLLQGGDNAIL

SEQ ID NO: 142337 - protein, 128 aa, Unknown
  Bacterial polypetide isolated from the Sargasso Sea
MSSWLEKIKWNEKELVPVIVQEVETKQILMHAWMNRDALKQTYESGKATYWSRSREKIWVKGEKSGHYQFVESILTDCDYDVLLINVRQKGGIACHTGRHRCFFNKLTDKNWLESGEILKNPKDIYGK

SEQ ID NO: 142338 - protein, 196 aa, Unknown
  Bacterial polypetide isolated from the Sargasso Sea
MQPLSPAFIDQLRFNEAGLIPAVAQDWLDGAVLMVAWMNREAIKATLRSGEVHYWSRSRQELWHKGATSGHVQTMREIRYDCDADVLLVIVEQAGDVACHTGSRSCFYENSDARTTGGAEALAPPTDACTELFRVIEGRRDQPEEGSYTNKLLAGGDNSILKKIGEESAEFVMACKDDNAAEIAGEAADIVFHMQV

SEQ ID NO: 142339 - protein, 129 aa, Unknown
  Bacterial polypetide isolated from the Sargasso Sea
MSSFLDQVKWNQDGLVPVVTVDAASRRVLMQAWVNREALQITVNEGFATYWSRSRGKLWKKGEQSGNTQKLVGIYLDCDNDSLCYEVEQKGGIACHTGRESCFFQKYEKGRWSISDPVLKDPSEIYNNH

SEQ ID NO: 142340 - protein, 158 aa, Unknown
  Bacterial polypetide isolated from the Sargasso Sea
MSRFDQVSPDALFKQLEHASTDDSLPAVSALLDAVRFNSDGLIPAIAQQHDSKEVLMVAWMKPQALEENFGTQRVCYYSRSRQTLWRKGETSGQQQQLKSAALDCDGDTLLLQVDQTGPACHTGRRSCFYVAVSNELASITSEPLIDPAELYGKKTES

SEQ ID NO: 142341 - protein, 222 aa, Unknown
  Bacterial polypetide isolated from the Sargasso Sea
MQPLSPAFILQLRFNEAGLIPAIAQDWLDGAVLMVAWMNRESIQQTLNSGEAHYWSRSRQELWHKGATSGHTQTLRSIRYDCDADVLLLTIEQRGDIACHTGARSCFYEGGDQRSDGGSDALPPPADACTELFRVIEARRDTPEEGSYTNKLLEGGDNKILKKIGEESAEFVMACKDDNPEEIAGEAADILFHMQVALAHHGVSWRQVQEVLAARRGAPRRH

SEQ ID NO: 142342 - protein, 129 aa, Unknown
  Bacterial polypetide isolated from the Sargasso Sea
MSSFIDQIKWNQDGLLPVVTVDAKSGRVLMQAWVNSEALEITVSGGSAVYWSRSRGKLWKKGEQSGNTQKIVNIYLDCDKDSLLYEVEQKGGIACHTGRESCFYQKYKDGKWLVNDPVLKDPSSIYGKH

SEQ ID NO: 142343 - protein, 138 aa, Unknown
  Bacterial polypetide isolated from the Sargasso Sea
MNTETNALPAWLDKVRWDDNGLVPVIAQEASTNDVLMFAWMNREALAKTIETQRAVYYSRSRKRLWFKGEESGHVQHVHEVRLDCDEDVVLLKVEQVSGIACHTGRHSCFFQKFEGTVDSGDWVAVEPVLKDPEHIYK

SEQ ID NO: 142344 - protein, 106 aa, Unknown
  Bacterial polypetide isolated from the Sargasso Sea
MFLPDGVVVVSDGKIQDVMAISDYKKSGGDISVVEHLEDSLIVPGFIDAHIHHTQMGIIASYGYQLLDWLENYAFPAEKVFSDPELSRKQAESFLECLFKHGTTTA

SEQ ID NO: 142345 - protein, 172 aa, Unknown
  Bacterial polypetide isolated from the Sargasso Sea
MLQVHLASILHFLEDPAKSGEEDSYRYYSDGALVVEDGLVKQVGDSEGLLGSLPKDADIFDHGNSLLVPGFIDVHVHYPQIEIIASYGEHLLEWLEKYTFPAEAQFGDFSYSHEVSERFIKEMLRVGTTSALVFGTVHPVSVDSFFEVCEKKNLRMIAGKVMMDRNAPSNLL

SEQ ID NO: 142346 - protein, 107 aa, Unknown
  Bacterial polypetide isolated from the Sargasso Sea
MSDFDRRQFLGLGAAAAAGLTTGCEPSREGALVPDLIVVNANVLTQDDSQPKAEAFAIHNERFVAVGSSSDVKNLAGPNSTLLDVAGMTVVPGFIDAHSHPSGAGLN

SEQ ID NO: 142347 - protein, 274 aa, Unknown
  Bacterial polypetide isolated from the Sargasso Sea
MQDNLINRFSVPNLSNCTIDLAKVASNKKEPDLVLTNARVISTYTDRLLKDKEIWIYKGRIACIKSSGSYKNYFNIDQNKIYNVNKNILAPGLVDPHMHIESSMMTGCAYAEAALLNGTTTVFCDSHEIGNVCDIEGIEWMLQDCREAPLSIFLTLPSTIPATNDFLETAGGNLTAKKTSLLFDKWPEILGLGEKMDFVSVCNSDERSHSIIAESLKRNLPVSGHVFGREFVAAYAASGISDTHEAEEKLFTNDLLESGLWIFLRGGKSKNTWN

SEQ ID NO: 142348 - protein, 196 aa, Unknown
  Bacterial polypetide isolated from the Sargasso Sea
ESSMTHIESSMTHNESSMTHNESSMTHNESSMTHNESSMTHIESSMTHIDSSMTHIDSSMTHIDSSIANIDSSMTHIDSSMAHIDSSMTHIDSSMTHIDSLVAHIDSSIAHIDSSMTHIDSSIANIDSSMTHIDSSMTHIDSLVAHIDSSMTHIDSLLAHIDSSMTHIDSLMAHIDSSIANIDSSMTHIDSLMAHM

SEQ ID NO: 142349 - protein, 248 aa, Unknown
  Bacterial polypetide isolated from the Sargasso Sea
MLQVHLANILHFLEDPAKSGEEDSYRYYSDGALVVEDGLVKHVGGSEELLSSLSQDADIFDHGDSLLVPGFIDVHVHYPQMEIIASYGEHLLEWLEKYTFPAEAQFGDVSYAREVSEQFVKEMLRVGTTSALVFGTVHPVSVDSFFEVCERKNLRMIAGKVMMDRNAPSNLLDTAESSYTDSKALIEKWHGRGRLQYAVTPRFSVTSSPQQLEKAGQLREEYPSIYLQTHLSESKEELSMVRKLFPEY

SEQ ID NO: 142350 - protein, 560 aa, Unknown
  Bacterial polypetide isolated from the Sargasso Sea
MKTYIKQISALLFISLIISCSKEEVCYEADLVLVNSKIYTANADQWEAAALAILGDKFIFIGSNDDSSAYACGSNRVLDLKDSFVFPGFIDAHAHLKGIGYREITLNLQGADSLKNMLTLVQIHSNKLSDGDWVVGRGWIEKKWPEGRFPTIEELDAISSKKPIALERADGHAIIVNSLALKLAGIDRSTPDPIGGKIDKDSNGEPNGVLIDKASSLVESIIPKRTREEEKRALREGLNRTAKMGWTQLHDAGSPLSDYEILNELKKNEGLPVRIQFYVSDGEDGNKFLDEGPYLDPDHFLTSRGIKFYADGAIGSRGAAFFDKYDDYETKGFLIFQKEETMPKLVKALVNGIQIQTHAIGDLANKITLDWYEEAFNKVSPENRIIENPRWRVEHAQNIKPEDQKRYSDLEVIASMQPSHAIGDLHFAHKRLGEERLKDAYTWKKLIELGVVVVGGSDAPVEIGDPRIEFKAAVSRKDLDGFYEDWWNIEEVVSREEALYMFTKWASYSVFEEDIKGTIEVGKLADLTIFNKDLMTIPEEDIMSSEVIMTIVGGKVVYSK

SEQ ID NO: 142351 - protein, 370 aa, Unknown
  Bacterial polypetide isolated from the Sargasso Sea
MQQISVARLFDGQNWQQNVTLEIEAGRIHAIHPAAGAVLAGTLVPGFIDVQVNGGGGALFNTDTSLEALRTMVKAHAQFGSTALLPTVITDSVAVMQQAADVIAQAIANKEPGVLGVHFEGPHLSVPKRGVHPQNFIRPLSEAELAIYRRTDLGIKLVTVAPETISAEQIKELVQANVIVCLGHSNTDAATVQAALAAGATGFTHLYNAMSPLTSREPGVVGAALADPHSWCGVILDGLHVHPLAVKVALAAKPKGKLLIVTDAMSPVGTTQTEFDFFDGKVIRDGNKLTNLNGNLAGSVLDMASAVSYAVKELGLELAEAVRMASLYPAEFLGISAQRGQILVGAKADLVLLNDEGLVQQCWLEGRPAI

SEQ ID NO: 142352 - protein, 542 aa, Unknown
  Bacterial polypetide isolated from the Sargasso Sea
MLHSIERADLIISSNKVILMTGHQKAQPLSIAVQNKKIVWIGSHTQAKKIQGQRIDYHNQAILPGFIDAHGHASYLAFATQVANIASPPVGEVKTIKDLQENLKKFIKDSNLKPGEWVMGLGYDDSLLAEQRHPTKDDLDAVSTDHPIYLIHVSAHLGAANSMGLSLANINSESNDPPGGKIRRYENSLEPNGVFEETAAYPLQQLAMSAYKDPIGSVKKAMDIYARNGITTAQDGASSQETIALMQAADAQGMINLDIISYPIGQNGLDQNLDSISFGNYTGRLKIGGIKLILDGSPQGKTAYLTEPYYKPPHSESDSYKGYPLIPQSEVSKWVKRYADLNIPIMAHANGDAAADMLIEAVKNADITSDHRTIMIHAQTVREDQLDKMKELSIIPSYFSTHTFYWGDWHRDSVFGEDRAMRISPTKSTLNRKIPFSVHNDAPVVPPDMIRLLWSTTNRKTRSGKVLGEEQKISTYSALEAMTINAAFQHFEDDIKGSIEVGKLADLVILSKDPLSMPVDELLELKIMATYSHGKEIFKNEK

SEQ ID NO: 142353 - protein, 105 aa, Unknown
  Bacterial polypetide isolated from the Sargasso Sea
MNNLKKKIQQGLGTQKADIVLRGGKVFDLITGDFLEGDVAITGDTIVGTCTSYDAKKVIDVKNQFLVPGFIDTHLHIESSMVSPFEFERCVLPSGTPLLFVILMR

SEQ ID NO: 142354 - protein, 130 aa, Unknown
  Bacterial polypetide isolated from the Sargasso Sea
MSSVNLKKVIDAARGLIKADLVLKSGKLFDLVTGEITETDIAIVDDTIIGVHSKYEGENTIDISGKFVVPGFIDTHLHIESSMVTPFEFEKFVLPRGITSAICDPHEIANVKGVDGIKYFLDASEKMLMN

SEQ ID NO: 142355 - protein, 308 aa, Unknown
  Bacterial polypetide isolated from the Sargasso Sea
EFERCVLPLGTTTAICDPHEIANVVGVEGIKYFQESSEHTVMDIFVQLSSCVPSTEMETAGARVSSLELQKLKNHKSNIGLSEMMNYPGVINQDNEIIKKLKLFEGGHIDGHAPQLSGKELNAYIAAGIKTEHEATSEDEALEKLKKGMRILIREGSVSKDLKSLHKILTDKTAPYICLCTDDRNPLDIHEQGHINYMIKALIKLGVKPLNAYRASSLSAAEAFSLSDRGLIAPGKKADIVCLQDIEECKPAMVISGGRVVSDKIFSTVNRIKPIGLNSVKSKSVKSSDFIIKDASEDTNVIGILEGK

SEQ ID NO: 142356 - protein, 349 aa, Unknown
  Bacterial polypetide isolated from the Sargasso Sea
RQGASPSDGGLVSGALVAAVDGLDLDSLDRFRAMGNEALRLVVTAHRIASMGLSPAEINELEHAGYSIPLRRAVNMQEILALACSSDVVHETAASQLSSATPGEAAGLSLVRLSRLLPAVVAMPAGIPPASRIDEALSTGELLSVDVGEVNEYYTASCDGHVVAISEAPVPLSENEESRFVLFRESHGLQEHVAIIVGNPKYWPDPLPVRLHSACFTGDLFGSLKCDCGEQLLGSMKFFEEKGGGVLLYLAQEGRGIGLNNKFRAYTLQENGLDTIDADRTLGFGPDERRYGVAAQILHEIGIGRIELLTNNPDKVQAMQDAGIEVVNRRPLHGTLNRYNRPYVEAKVV

SEQ ID NO: 142357 - protein, 65 aa, Unknown
  Bacterial polypetide isolated from the Sargasso Sea
YENIAGMVKYLAIKELDLMTNNPKKIKALEDMGIKVNQRVPIFSNTNKYNEKYISTKKSKLGHLI

SEQ ID NO: 142358 - protein, 74 aa, Unknown
  Bacterial polypetide isolated from the Sargasso Sea
IRFQDDERTYENIAGMVKYLAIKKLDLMTNNPKKIKALEDMGIKVNQRVPIFSDTNKYNEKYISTKKSKLGHLI

SEQ ID NO: 142359 - protein, 289 aa, Unknown
  Bacterial polypetide isolated from the Sargasso Sea
IKKGEIIIVVDDESRENEGDFVCASSKVTPEIINFMAKEGRGLICCSLESDRCNELGLDLMVGKNTDVYGTSFTVSVDLKGSGVTTGISASDRSKTVKALVDPKIEASNFSKPGHIFPLRSIDGGVLRRAGHTEASVDLPKLAGLYPSGVICEILNEDGSMARLNNLYKVADKHGLVIISIKDLIEYKIERESLIEEKETVDLPTEYGNFKLISFEQKDTKDIHLALKKGDWTKEDEVLVRVHSSCVTGDILGSLRCDCGSQLQRALRMIDKKGQGLVLYMNQEGRGMA

SEQ ID NO: 142360 - protein, 187 aa, Unknown
  Bacterial polypetide isolated from the Sargasso Sea
DLGIHHLRLLTNNPRKIAGLGGYGLKVEERVPLVMDAGDHNAEYLATKRDKLGHLMAEQGPCTVLALAVDAATDQWPQIRRRAESAASDHGFQLEAVQTPRLLALWERPQFVWTLRPGQEDPLPLLRLMAQWPETRRLGLLKAATDRMALHPPHTLERTELGLNDLVDGQGDGPLPSEPSLLHWTTD

SEQ ID NO: 142361 - protein, 65 aa, Unknown
  Bacterial polypetide isolated from the Sargasso Sea
YENISDMINFLGIKKIDLMTNNPKKINALKNMGIVVNQRVSITSDTNKYNEKYISTKIKKLGHLI

SEQ ID NO: 142362 - protein, 116 aa, Unknown
  Bacterial polypetide isolated from the Sargasso Sea
ESGVFLYMKQEGRGIGLLNKLKAYELQDDGADTVEANEMLGFPPDLRHYGVGAQILADLGLKKIKLLTSNPKKVVGLDGYGLEIVETVNLNVEPNPVNQAYLKTKKDKLGHNIENV

SEQ ID NO: 142363 - protein, 80 aa, Unknown
  Bacterial polypetide isolated from the Sargasso Sea
MKQIINCGFKDDERTYENIAGMVKYLAIKKLDLMTNNPKKIKALEDMGIKVNQRIPIFSDTNKYNEKYLSTKKSKLGHLI

SEQ ID NO: 142364 - protein, 127 aa, Unknown
  Bacterial polypetide isolated from the Sargasso Sea
SNALNTISKNGSGVLLYMRGHEGRGIGLGNKIKAYSLQDEGDDTVDANLKLGFKNDQRDYGTGALILRSLGIEKMNLLTNNPSKRAGLEGYGLSITKRTPLLGQTTPENEKYLETKESKMGHLFNEE

SEQ ID NO: 142365 - protein, 274 aa, Unknown
  Bacterial polypetide isolated from the Sargasso Sea
EFDSIPDALAAIRNGACVVVVDDEQRENEGDLICAAQFATPEAINFMATEARGLICLAMEGSRLDALDLPLMVDRNTDVNETAFTVSIDAGREHGVSTGISAEDRARTIQVALNPSTRPADLRRPGHIFPLRARPGGVLKRAGHTEAAVDLAQLSGLAPAGVICEIQNTDGSMARLAQLREYATRWGLKLINIADLIRYRLENERFVRRQAQASMPSQFGDFQAIGYRNELDGSEHVALIKGDPAALKEPVLVRMHSECLTGDAFGSLRCDCRS

SEQ ID NO: 142366 - protein, 108 aa, Unknown
  Bacterial polypetide isolated from the Sargasso Sea
MIAIKPTRDFSNLGRISFSANNASKPKQNTAINRYRAEQAQGGLMSRKGLAASSQNEYKENLCSAMGIGIGPRVHSECPFSSVNDQYAATGNEALEVAIEAAYRQVLG

SEQ ID NO: 142367 - protein, 140 aa, Unknown
  Bacterial polypetide isolated from the Sargasso Sea
MTSKLKFIETSKLPTDVGEFTVHAFTDEKDSKDHLAIGMGDLLTNEPVLCRIHSQCITGESFFSMRCDCRFQLTESLNQIAAKGRGVVFYLQQEGRGIGLSNKIRAYNLQDKGLDTVEANHQLGFREDERGYEIVSDMAN

SEQ ID NO: 142368 - protein, 130 aa, Unknown
  Bacterial polypetide isolated from the Sargasso Sea
RRSGHTEASLELAELAGFKSSGVLCEIMAEDGTMLRGKDLQNFADEHDLKLISIAELISYVRIKKSLIEKIEKTKLPTDYGDFTLHLYQDKFESKQHIALTHGKMDKKKPTLIRVHSECITGDIFSSKRC

SEQ ID NO: 142369 - protein, 101 aa, Unknown
  Bacterial polypetide isolated from the Sargasso Sea
RAYELQDKGANTVEANEQLGFPADMRKYDMIQPMLEQIGVKHVRLMTNNPRKVKAMKEIGIEVVERVPLQVGKNRYNEAYLKTKSTELGHMMSEYHFTDEE

SEQ ID NO: 142370 - protein, 98 aa, Unknown
  Bacterial polypetide isolated from the Sargasso Sea
KHKIKAYKLQEEGLDTVEANEKLGFKPDLRDYGVGAQILKDLGATKLTVLTNNPKKLVGLQGHGLEITSRIPIQIEMNQENKEYLNTKKNKLGHLLNL

SEQ ID NO: 142371 - protein, 144 aa, Unknown
  Bacterial polypetide isolated from the Sargasso Sea
MKSSLKFIETSSLPTDLGEFKVHAFTDEAKSHDHLAISMGDLLTNEPVLCRIHSQCITGESFFSMRCDCRYQLTESLTQIADRGRGVIFYLQQEGRGIGLSNKIRAYNLQDKGLDTVEANHQLGFKEDERDYENVSGMINFLAI

SEQ ID NO: 142372 - protein, 55 aa, Unknown
  Bacterial polypetide isolated from the Sargasso Sea
LGIKEVDLMTNNPKKLKALEAMGVKINQRVPLSSNTNKYNEKYISTKIKKLGHLI

SEQ ID NO: 142373 - protein, 59 aa, Unknown
  Bacterial polypetide isolated from the Sargasso Sea
MINFLAIKKVDLMTNNPKKIDALKSMGVIINERVPLSTNSNKYNEKYISTKIKKLGHLI

SEQ ID NO: 142374 - protein, 232 aa, Unknown
  Bacterial polypetide isolated from the Sargasso Sea
GGTLIRAGHTEAIVDIVNAAGMTPAGVICEILKDDGTMARMPDLITFSQLHGLKVATIADLISYRLKTESTVRRSIESNFPSQFGGDWRAIVYIDTISGVEHLALVMGNITSSDSIPVRMHAVNFLGDLLGATNQDKNDVHLASAMKTISKIGKGAVVLLRDLSPTTIRDQLATINNNTSKDSWKFKNYGAGAQILVDLGLKNILLLTNNPKKPVALDSYGLKITGHQKLDV

SEQ ID NO: 142375 - protein, 220 aa, Unknown
  Bacterial polypetide isolated from the Sargasso Sea
QNNFINVDVNDIKSYENYNAQSLSIAVRAKVPIAETDDCEVIIFRPSDGGDEHFCLVFGKTRENHNNFKKETLVRIHSQCITGDVLDSLKCDCGQQLKQSIKVMASANEGVLIYLAQEGRDIGLLNKLRAYSLQETGMDTVEANEDLGFNDDERLYYPAKEMLSQLRINKVKLITNNPRKIEHLTKLGIKVTQRIPITINPNKYNQKYLETKSKKSGHIL

SEQ ID NO: 142376 - protein, 72 aa, Unknown
  Bacterial polypetide isolated from the Sargasso Sea
FREDERGYEIVSDMANFLGIKEVDLMTNNPKKLKALEAMGVKINQRVPLSSNTNKYNEKYISTKIKKLGHLI

SEQ ID NO: 142377 - protein, 295 aa, Unknown
  Bacterial polypetide isolated from the Sargasso Sea
MKETSPKSNNGTIVDNNENFNIVFDPISDALAAIRNGECIIVVDDERRENEGDLICAAQFATPQQINFMATEGRGLICLAMQGEKLDALDLPLMVDRNTDENQTAFTISIDAGPENNVTTGISAEDRAKTIQVAINPSTKPEDLRRPGHIFPLRAKKGGVLKRAGHTEAAVDIAAMSGLYPAGVICEIQNPDGSMSRLPQLKQYAKEWGMKLISIADLISYRFQNERFVYRKSDAILPSIFGNFKAYGYINELDGSEHIALVKQKSNKLSEPVLVRMHSECLTGDAFGSLRCDCR

SEQ ID NO: 142378 - protein, 221 aa, Unknown
  Bacterial polypetide isolated from the Sargasso Sea
LRNYGVGAQILTDLGIKKLKLLTNNPRKIAGLGGYGIEVIERVPLVICPNDNNAEYLSVKKTKLGHMIDEDNSNSRNIDPYISIFLDGVYKSIDLVPIKNKVIKFCSDQNINIKLESSPRLLAFWNRPKLVWRILHDPNRTNSNITDVEIKNIELFIQFLSKYENSTKIGIIVSRNIEQALHPKSSIKLINTKFTINNEILYSSTRKFNLDKETFSIVFEG

SEQ ID NO: 142379 - protein, 248 aa, Unknown
  Bacterial polypetide isolated from the Sargasso Sea
MRARSDLRLGIPIVLAGKKIDAVVTPVEVLNQARLNELRLIDTNSFVLITSRRAQTLKCPIYDGNFVRIELGEKSTPNSVKAIADPMLDLNNPLKGPFKIVREMPLEIENEALIVLKSAQLLPAAVISQVTNGENFAQTHKLTYLKTEQLVEMAISPKGIADAITAEVPTARAENAQFHIFRPNISGEEHYAMEIGKIDRDQPTLVRIHSACFTGDVLGSLKCDCGPQLHAATKMINDKGGGLLIYLN

SEQ ID NO: 142380 - protein, 300 aa, Unknown
  Bacterial polypetide isolated from the Sargasso Sea
MIAIKPTRDFTNLGRISFSANNASKPKQNTAINRYRAEQAQGGLISRKGLPASSQNEYKENLCSAMGIGIGPRVHSECPFSSVNDQYAATGNEALQVAIEAAYRQVLGNLGPTISQRCIELESQLKNGEISVRDFVAGLAKSDLYRENYFSKVSPIRGIELNYKHLLGRPPINQAEVSAAISLIASKGFNAFIDQITRSGEYLEVFGTDTVPYLRAWTSEARAYCSTFANLARVTPGNAGSDTIVERRSQLVVEFSNARSLSEAGNKYEVSGFSYSKATCDPTSAAFLRMYQSKTAKSWN

SEQ ID NO: 142381 - protein, 293 aa, Unknown
  Bacterial polypetide isolated from the Sargasso Sea
MPLSNIEDCIKDIQNGKMVIIVDDEDRENEGDFAIAAEFITPEIITFMASYGRGLICMPIIGQRLEHLDIPLMVPENTARLGTAFTVSIDTKTDGATTGISAYDRAATVKAVLNPLTRPEDLQKPGHIFPLRYAEGGVLVRAGQTEGSVDLAKLAGLYPASVICEVMNEDGTMARMPELEKISEEYDIKIVSVEQIIQYRHEKDNMIAKVAETKLPTKFGEFMSVAFRSLTDSDEHVALVKGDLTAADTIPLVRVHSQCLTGDTFKSLRCDCGEQMEKSLELIANSECGVFLY

SEQ ID NO: 142382 - protein, 303 aa, Unknown
  Bacterial polypetide isolated from the Sargasso Sea
MKETSPKSNNGTILDINDSFKIEFDPISDALAAIRNGECIIVVDDERRENEGDLICAAQFATPQQINFMATEGRGLICLAMQGEKLDSLDLPLMVDRNTDENQTAFTVSIDAGPENNVTTGISAEDRAKTIQVAINPNTKPDDLRRPGHIFPLRAKKGGVLKRAGHTEAAVDIAAMSGLYPAGVICEIQNPDGSMSRLPQLKEYAKQWGMKLISIADLISYRFQTERFVYRKSDAVLPSIFGNFKAYGYVNELDGSEHVALVKQKSSKLSEPVLVRMHSECLTGDAFGSLRCDCRPQLEAAFI

SEQ ID NO: 142383 - protein, 320 aa, Unknown
  Bacterial polypetide isolated from the Sargasso Sea
MKETSPKSNNGTILDINESFKIEFDPISDALAAIRNGECIIVVDDERRENEGDLICAAQFATPQQINFMATEGRGLICLAMQGEKLDSLDLPLMVDRNTDENQTAFTISIDAGPENNVTTGISAEDRAKTIQVAINPNTKPDDLRRPGHIFPLRAKKGGVLKRAGHTEAAVDIAAMSGLYPAGVICEIQNPDGSMSRLPQLKEYAKQWGMKLISIADLISYRFQTERFVFRKSDAVLPSIFGNFKAYGYVNELDGSEHVALVKQKSSKLSEPVLVRMHSECLTGDAFGSLRCDCRPSIRGCFIKDRKGGRGSCCLLETRR

SEQ ID NO: 142384 - protein, 56 aa, Unknown
  Bacterial polypetide isolated from the Sargasso Sea
VELMTNNPKKLAALEALGIDVISRKPIDHGVTKDNKNYLKTKTEKLGHAFDPHIFK

SEQ ID NO: 142385 - protein, 91 aa, Unknown
  Bacterial polypetide isolated from the Sargasso Sea
REKIPTRPIVLWGCPDDSRDFTDAAILLKHFVGNESFRLMTNNPKKLDDLAKYGLTNLTAVKHVTGTGEWNRTYLNAKRGWGHNIEESDLV

SEQ ID NO: 142386 - protein, 155 aa, Unknown
  Bacterial polypetide isolated from the Sargasso Sea
MSDKLKFIETSKLPTDIGEFTVHAFTDENESKDHLAICMGDLLTNEPVLSRIHSQCITGESFFSMRCDCRFQLTESLKQIAQIGRGVIFYLQQEGRGIGLSNKIKAYSLQDKGLDTVEANHQLGFKDDERTYENIAGMVKYLAIKELDLMTNNPK

SEQ ID NO: 142387 - protein, 196 aa, Unknown
  Bacterial polypetide isolated from the Sargasso Sea
MTSKLKFIESSSLPTDLGEFKVHAFTDEIKSKDHLAISMGDLLTNEPVLCRIHSQCITGESFFSMRCDCRYQLTESLAQIAESGRGVVFYLQQEGRGIGLSNKIRAYNLQDKGLDTVEANHQLGFKEDERDYETVSGMIKFLAIKKVDLMTNNPKKIEALKTMGITVNQRVPLASNPNKYNEKYINTKIKKLGHLL

SEQ ID NO: 142388 - protein, 117 aa, Unknown
  Bacterial polypetide isolated from the Sargasso Sea
KEGNGVILYLPQEGRGIGLINKLHAYKLQEDGADTVEANHKLGFKDDLRDYGMGAQMLYMLGVRRMRLMTNNPRKIVGLQGHGLEVVERVPLEIESNPGNKDYLHAKKSKLGHILNV

SEQ ID NO: 142389 - protein, 254 aa, Unknown
  Bacterial polypetide isolated from the Sargasso Sea
AQSVLRVCSECAQSVLRVPSGCLQSACRVCSECLQSAFRVRSECLQSAFRVPSECLQSAFRVCSECVQSAFRVPSECVQSAFKVPSECVRSVFRVPSECIQSVFKVSSECLQSAFRVPSECLQSAFRVPSGCLQSVFRVPSECVQSAFRVHSECLQSAFRVPSECLQSAFRVPSESVQSAFRVPSECLQSAFRVPSECLQSAFRVPSECLQGAFRVHSECVQSAFRVRSECVQSAFRVPSECLQSAFRVPSECV

SEQ ID NO: 142390 - protein, 90 aa, Unknown
  Bacterial polypetide isolated from the Sargasso Sea
LQEDGADTVEANHKLGFKDDLRDYGMGAQMLYMLGVRRMRLMTNNPRKIVGLQGHGLEVVERVPLEIESNPGNKEYLFTKKSKLGHMLNV

SEQ ID NO: 142391 - protein, 66 aa, Unknown
  Bacterial polypetide isolated from the Sargasso Sea
YSLQDKGLDTVEANHQLGFKDDERTYENIAGMIKYLAIKELDLMTNNPKKIKALKDMGIKVNQKSS

SEQ ID NO: 142392 - protein, 128 aa, Unknown
  Bacterial polypetide isolated from the Sargasso Sea
CRYQLTESLTQIAEKGRGVVFYLQQEGRGIGLSNKIRAYNLQDKGFDTVEANHQLGFKEDEREYENISDMINFLGIKKIDLMTNNPKKINALKNMGIVVNQRVSITSDTNKYNEKYISTKIKKLGHLI

SEQ ID NO: 142393 - protein, 68 aa, Unknown
  Bacterial polypetide isolated from the Sargasso Sea
MEKKVPANFVASSKLPTAFGEFAMHGFEDSDSGQEHIALVFGDLTKNTPTLCRVHSECLTGDALFSMR

SEQ ID NO: 142394 - protein, 297 aa, Unknown
  Bacterial polypetide isolated from the Sargasso Sea
ENEGDLMIAAEKATPELINFMARFGRGLICLTLTEERTKELGLSMMVEDNQSTFETPFTVSIDARQGVTTGISAADRAHTIKVAIDSLTVKEDLVKPGHIFPLRAKDGGVLVRMGQTEASVDIARIAGLNPYGVICEIMNEDGTMARVPQLTEFVEEHDLKMITVKDLAEYRLMKEALVEEVTSTILPTHSGKFQSVAFKNLLDDQVHIALVKGEINEEKPTLVRVHSQCLTGDVFGSYRCDCGEQLSKSMEMIEQEGTGVLLYLYQEGRGIGIVNKLKAYALQDEGKDTVQANEAL

SEQ ID NO: 142395 - protein, 85 aa, Unknown
  Bacterial polypetide isolated from the Sargasso Sea
KGLDTVEANHQLGFKDDERTYENIAAMVKYLAIKKLDLMTNNPKKIKALEDMGIKVNQRVPIFSETNKYNEKYISTKKSKLGHLI

SEQ ID NO: 142396 - protein, 196 aa, Unknown
  Bacterial polypetide isolated from the Sargasso Sea
MNSKLKFIETSKLPTDIGEFTVHAFTDEKDSKDHLAISMGDLLTNEPVLCRIHSQCITGESFFSMRCDCRFQLTESLNQIATVGRGVVFYLQQEGRGIGLSNKIRAYNLQDKGLDTVEANHQLGFKEDERGYEIVSDMVNFLGIKEVDLMTNNPKKLKALEAMGVVINQRVPLSSNTNKYNEKYISTKIKKLGHLI

SEQ ID NO: 142397 - protein, 168 aa, Unknown
  Bacterial polypetide isolated from the Sargasso Sea
KESKDHLAISMGDLLTDEPVLCRIHSQCITGESLFSMRCDCRYQLTESLKQIAASGRGVIFYFQQEGRGIGLSNKIRAYNLQDKGLDTVEANHQLGFKEDERNYEIVSEMITFLAIKKIDLMTNNPKKIEALKSMNIEVNQRIPLSSDTNKYNEKYISTKIKKLGHLI

SEQ ID NO: 142398 - protein, 288 aa, Unknown
  Bacterial polypetide isolated from the Sargasso Sea
MPISKIEDAIKDFKKGKMIILVDDADRENEGDLIVASEFATPNVINFMATHGRGLICVTMDTEVADRLDLSPVKNSPKENLDTTAFTISIDANKGTTTGISAQDRSTTAKLVANPKSKPQDFDRPGHMFPLVARDGGILVRAGHTEASVDMAKICGLQSSAVICEIMNSDGTMARLKDCEKFAKKHKIKIATIADLIRYRLKKDSLVEKIAECQLPTHMTNFKCYAYESMIDGKTHIALIKGKISKTKPTLVRVHSECLTGDLFGSLRCDCGSQLHAAIEMISNEGSR

SEQ ID NO: 142399 - protein, 128 aa, Unknown
  Bacterial polypetide isolated from the Sargasso Sea
CRFQLTESLAQIAERGRGVVFYLQQEGRGIGLSNKIRAYNLQDKGLDTVEANHQLGFKEDERNYENVSGMINFLAIKKIDLMTNNPKKIESLKSMGIIVNQRVPLSSNTNKYNEKYISTKIKKLGHLI

SEQ ID NO: 142400 - protein, 255 aa, Unknown
  Bacterial polypetide isolated from the Sargasso Sea
MRARADLRLGIPIVLTNKKNDAVVAPLDVLSQTRLDQLKSIDNNPFILITARRAQTLKCPIYEGNFARIEVDQSSKISSLKAIADPSLDLKNPLKGPFEILRENPLKLETEVLWLLKSAHLLPAAIISKVNNGENFAAKNNLTYLQTEQLMNLAMSSESISNAITAEVPTARAKSTQFHIFRPALSGEEHYAMEIGKINRDRATLVRIHSACFTGDVLGSLKCDCGPQLHAATKMINDQGGGLLIYLNQEGRGIG

SEQ ID NO: 142401 - protein, 161 aa, Unknown
  Bacterial polypetide isolated from the Sargasso Sea
MPAQVRSKCAFPVKGGRMVAEIITFDALTDGKEHVALRFGPNTGSLPPLVRLHSECVTGDVFGSQRCDCGPQLDEAMETLEKEGGYLLYLRQEGRGIGLNAKMDAYVLQMAGMDTYQANLELGFEADLRDYSCAAQMLHALGHSSVRLLSNNPDKAMQLER

SEQ ID NO: 142402 - protein, 272 aa, Unknown
  Bacterial polypetide isolated from the Sargasso Sea
NCSSLINPKTKPKDLGKPGHIFPLRAKAEGVLRRAGHTEAAVDLSRLAGFEPAGLIVEIMNKDGSMARLPELKSIAKKFSLKIITIESLIAYRMQHETLIKEVVEVNLPTKYGDFKLKAYKQISNNKEHLALIKGKWDENESILVRVHSSCFTGDILGSLRCDCGDQLSTAMKMINKFGKGVVLYINQEGRGIGLLNKLKSYKLQENGYDTLDANLKLGFKADARDYGIGAQILRAVGVKKMKLLSNNPKKRSGLTGYGLEITETISIETKI

SEQ ID NO: 142403 - protein, 269 aa, Unknown
  Bacterial polypetide isolated from the Sargasso Sea
MKFSSVADILSDIADGKPVIVIDSEDRENEGDLVIASELATPETINFMAKEGRGLICVSLTEERADYLDLEVIENKNSGLHKTNFTVSVDAKENTTTGISAFDRSITIKTLISDNTNSRDLSRPGHIFPIVGKNGGVLRRAGHTEASIDLATLAGLKPSGVICEIMADDGKMAKGKELERFAIKHDLKIISISSLIAHLSKKRDLVKKIESIKLPTKNGEYDLHSYEGIFDGKTHLALTKGNYLSKESVLVRVHSECLTGDVFHSLRCD

SEQ ID NO: 142404 - protein, 147 aa, Unknown
  Bacterial polypetide isolated from the Sargasso Sea
VRLHSQCLTGDLLGSLRCDCGDQLRGAIKAISEYGGGVLIYLAQEGRDIGLVNKLRAYNLQDLGSDTVEANHQIGFEVDERIYAPAAEILKQLGIQKVKLLTNNPNKIDQLAATGIDVIERVKHAFPPNPHNAEYLKTKAAKTGHLF

SEQ ID NO: 142405 - protein, 264 aa, Unknown
  Bacterial polypetide isolated from the Sargasso Sea
PEAVNFMAKYARGLVCVSVNKDDANRLQLDLMEQKNTSLHETNFTISIDAVKDTTTGISAQDRSKTIRLMVDEHSKPKDFARPGHIFPILAKEGGVLRRSGHTEASLELAELAGFKPSGVLCEIMAEDGTMLRGKDLFRFADEHNLKLISITELISYVRVKKSLIEKIETTKLPTDYGDFMLHLYQDKFENKQHIALTHGKVQNNKPTLVRVHSECVTGDIFSSKRCDCGAQLDHAMKKIVEVGCGIIIYLKQEGRGIGLKHKI

SEQ ID NO: 142406 - protein, 250 aa, Unknown
  Bacterial polypetide isolated from the Sargasso Sea
DSEDRENEGDLVIASELVTPDTINFMAKEGRGLICVSITSERSKELDLEPMDRRNSSLHETNFTISVDAKQNTTTGISAFDRSKTILALINDGTRSSDLARPGHIFPIVGKDGGVLRRAGHTEASIDLAMMAGLRPSGVICEIMADDGTMARGDELQKFSEKHNLKIISISDLIRHLRRERSLVKKIETIKLPTDELDFELHLYEGIFDNQTHLALTTGNYLDSESVLVRVHSECLTGDVFKSLRCDCGE

SEQ ID NO: 142407 - protein, 102 aa, Unknown
  Bacterial polypetide isolated from the Sargasso Sea
IANKLKAYKLQEEGADTVEANEKLGFKADLRDYGVGAQMLLDLNIKKLRLMTNNPKKIVGLEGYGLEVTDRVSIEMSPGKFNKKYLSTKANKLGHMLDNHGH

SEQ ID NO: 142408 - protein, 94 aa, Unknown
  Bacterial polypetide isolated from the Sargasso Sea
YELQDQGMDTVEANEALCFAADERDYSYCKEILSSVDISSVKLMTNNPRKIEGLEKAGIKVTERVPVHIDSNKHNENYLKVKAKKLGHMMDRSD

SEQ ID NO: 142409 - protein, 185 aa, Unknown
  Bacterial polypetide isolated from the Sargasso Sea
MTSTLKFIETSKLPTDVGEFTVHAFTDEKDSKDHLAIGMGDLLTNEPVLCRIHSQCITGESFFSMRCDCRFQLTESLNQIAAKGRGVVFYLQQEGRGIGLSNKIRAYNLQDKGLDTVEANHQLGFREDERGYEIVSDMANFLGIKEVDLMTNNPKKLKALEAMGVKINQRVPLSSNTNKYNEKYI

SEQ ID NO: 142410 - protein, 218 aa, Unknown
  Bacterial polypetide isolated from the Sargasso Sea
GRAGIFPLSESDIGNLKIKSEETKFLPNLSSARLPISGQQNISLSVFREVTDLTEHYAIVFGNPKINQPALTRVHSACFTGDLLGSEKCDCGEQFSVSMSKMRTEGNGILLYLNQEGRGIGLANKMRAYHLQNIGFDTVDANHRLGFEDDERDLEIAAKILKSLGVSDIKLMTNNPKKVELLTDNGITVKERVPLIVSMNPNNENYLKTKAKKSGHLF

SEQ ID NO: 142411 - protein, 309 aa, Unknown
  Bacterial polypetide isolated from the Sargasso Sea
VIIVVDDEDRENEGDFLTAAQNATPEIINFMATHGRGLICTPLTEERCDNLNLDLMVQKNSATYETPFTVSVDLNGHGCTTGISASDRSKTIKALIDPNTNPNDLGKPGHIFPLKAKKGGVLRRAGHTEAAIDLSRLAGFDPAGIIVEILNEDGSMARLPQLIKIAERFNLKIVSIEDLIAYRMQNETLIEELVEIQLPTKFGDFKLKAFKQITTGEEHLALIKGKWAPDEAVLVRVHSSCFTGDILGSLRCDCGDQMADAMKMIEKEGKGVVLYMNQEGRGIGLINKLKAYKLQEEGYDTLEANLELG

SEQ ID NO: 142412 - protein, 263 aa, Unknown
  Bacterial polypetide isolated from the Sargasso Sea
MISDIKEIIDLFSKGEMIILIDDEERENEGDLVISSKYLTSDHINFMITYGKGLVCAPISSSIAKKLKLPLMEGVNNEMQTPYTHSVDLKGDGVTTGISAEDRFKTIKGLASDDSTRESFNVPGHIFPLQAMDGGVLRRAGHTEAAVDLCTISNHKQVAVICEIINEDGTMARLEDLIKFSQVHKIPIGTIKDLIQYRLDSSNPVEFVSKSKIPTDYGEFMGHVFKDNVDNTEHIALTFGDYLSGEDTMVRVHSECLTGDTLF

SEQ ID NO: 142413 - protein, 88 aa, Unknown
  Bacterial polypetide isolated from the Sargasso Sea
MSEKKGPLVEARMPTKFGTFRLIAFDGEAKEKENLALVMGNIDEGEVLVRVHSECFTGDVLHSMRCDCGEQLDLAMERIATERKGMII

SEQ ID NO: 142414 - protein, 120 aa, Unknown
  Bacterial polypetide isolated from the Sargasso Sea
LNQIAAKGRGVVFYLQQEGRGIGLSNKIRAYNLQDKGLDTVEANHQLGFREDERGYEIVSDMANFLGIKEVDLMTNNPKKLKALEAMGVKINQRVPLSSNTNKYNEKYISTKIKKLGHLI

SEQ ID NO: 142415 - protein, 279 aa, Unknown
  Bacterial polypetide isolated from the Sargasso Sea
MITDINQIINRFKSGEMIILIDDEERENEGDLVISSEYLTPDHINFMITKGKGLVCAPISTEVAKKLDLTLMTGVNNETETQFTASVDLRGDGVSTGISAEDRYKTIKGLCNEKSTRSSFNVPGHVFPLQSMDGGVLRRAGHTEAAIDLCKLSDHYPVAVICEIINEDGSMARYDDLIEFSKIHNLPIGTIKDLIEYRINKTEMITFVSKAKVPTQYGEFTAHVYRDNLDNTEHIALTHNNYLESDETMVRVHSECLTGDVLYSNKCDCGSPLENAFKK

SEQ ID NO: 142416 - protein, 196 aa, Unknown
  Bacterial polypetide isolated from the Sargasso Sea
MTVSLKFIESSNLPTDLGEFKVHAFTDEKKSKDHLAISMGDLLTNEPVLCRIHSQCITGESFFSMRCDCRYQLTESLTQIAEIGRGVIFYLQQEGRGIGLSNKIRAYNLQDKGLDTVEANHQLGFKEDERDYENVSEMINFLAIKKIDLMTNNPKKIEALKTMGVIVNERVPLSSNPNKYNEKYINTKIKKLGHLL

SEQ ID NO: 142417 - protein, 193 aa, Unknown
  Bacterial polypetide isolated from the Sargasso Sea
MDIDKLPKSKLPMPWGEFSVIGFEDHDGEEHLAIYLGEVSENPLLRIHSQCLTGDALFSLRCDCGPQLAMALEKIASDGNGMVIYMAQEGRGIGLMNKIRAYELQDQGLNTVEANEKLGFADDEREYAFCAEILTSMGISSVRLMTNNPSKIKGLEDSGIKVSERIEIKAKPTDQNKEYLKVKSEYMGHMLEE

SEQ ID NO: 142418 - protein, 145 aa, Unknown
  Bacterial polypetide isolated from the Sargasso Sea
HAFSDEKDSKDHLAIGMGDLLTNEPVLSRIHSQCITGESFFSMRCDCRFQLTESFNQIAERGRGVVFYLQQEGRGIGLSNKIRAYNLQDKGLDTVEANHQLGFKEDERGYEIVSDMVNFLGIKEVDLMTNNPKKIKALEAMGVVV

SEQ ID NO: 142419 - protein, 196 aa, Unknown
  Bacterial polypetide isolated from the Sargasso Sea
MEKKLKFIETSKLPTDLGEFKVHAFTDEENSKDHLAISMGDLLTNEPVLCRVHSQCITGESFFSMRCDCRYQLTESLTQIAEKGRGVVFYLQQEGRGIGLSNKIRAYNLQDKGFDTVEANHQLGFKEDEREYENISDMINFLGIKKIDLMTNNPKKINALKNMGIVVNQRVSITSDTNKYNEKYISTKIKKLGHLI

SEQ ID NO: 142420 - protein, 155 aa, Unknown
  Bacterial polypetide isolated from the Sargasso Sea
MKKILKFIETSVLPTDLGEFKVHAFTDEHESKDHLAISMGDLLTNEPVLCRIHSQCITGESFFSMRCDCRYQLTESLKQIAEKGRGVIFYLQQEGRGIGLSNKIRAYNLQDKGFDTVEANHQLGFKDDERNYENISEMIKFLAIKKIDLMTNNPK

SEQ ID NO: 142421 - protein, 166 aa, Unknown
  Bacterial polypetide isolated from the Sargasso Sea
MTIQKKAEAKLPTHWGDFSVIAYEDEKKDEEHLLLYMGELTNDLLLRIHSQCLTGDTLYSLKCDCGSQLAMALEKIASEGQGMIIYMAQEGRGIGLVNKIRAYELQDKGMDTVEANEALGFADDERDYSYCKEILSSVDISSVKLMTNNPRKIKGLEDVGINVSER

SEQ ID NO: 142422 - protein, 117 aa, Unknown
  Bacterial polypetide isolated from the Sargasso Sea
MAEKGRGVVFYLQQEGRGIGLSNKIRAYNLQDKGFDTVEANHQLGFKEDEREYENISDMINFLGIKKIDLMTNNPKKINALKNMGIVVNQRVSITSDTNKYNEKYISTKIKKLGHLI

SEQ ID NO: 142423 - protein, 196 aa, Unknown
  Bacterial polypetide isolated from the Sargasso Sea
MTIQKIAKAKLPTHWGDFSVIAYEDERLGEEHLLLYLGELNENSLLRIHSQCLTGDALYSLKCDCGSQLAKAMEVIAREGCGMIIYMAQEGRGIGLVNKIRAYELQDKGLNTIEANEALGFAADERDYSYCKEILASVGISSVRLMTNNPAKIKGLEEVGIGVTERVSMRFEPNKHNEDYLKIKAEYMGHMLSESD

SEQ ID NO: 142424 - protein, 155 aa, Unknown
  Bacterial polypetide isolated from the Sargasso Sea
LLTNEPVLSRIHSQCITGESFFSMRCDCRFQLTESLNQIAERGRGVVFYLQQEGRGIGLSNKIRAYNLQDKGLDTVEANHQLGFKEDERGYEIVSDMVNFLGIKEVDLMTNNPKKIKALEAMGVVVNQRVPLYSSTNKYNEKYISTKVKKLGHLF

SEQ ID NO: 142425 - protein, 131 aa, Unknown
  Bacterial polypetide isolated from the Sargasso Sea
KCDCGSQLERAIEKLFSVGEGILLYLNQEGRGIGLLNKVRAYKLQEQGYDTVDANHRLGFEDEERDFQIGAEILHLLGFSKAKLMTNNPKKIKMLEDCEIKVVERVSLLTQPTEQNLHYLQTKAKKSGHLF

SEQ ID NO: 142426 - protein, 188 aa, Unknown
  Bacterial polypetide isolated from the Sargasso Sea
MTSKLQFIETSKLPTDVGEFTVHAFTDEKDSKDHLAIGMGDLLTNEPVLSRIHSQCITGESFFSMRCDCRFQLTESLNQIAERGRGVVFYLQQEGRGIGLSNKIRAYNLQDKGLDTVEANHQLGFKEDERGYEIVSDMVNFLGIKEVDLMTNNPKKIKALEAMGVVVNQRVPLHSSTNNIIKSIYQQK

SEQ ID NO: 142427 - protein, 136 aa, Unknown
  Bacterial polypetide isolated from the Sargasso Sea
TFFSKKCDCGHQLRRSMELISEKGSGIILYLRQEGRGIGLVNKIKAYSLQDEGYDTVEANEMLGFNADERSYEICSDMLSHFSVKSVNVLTNNPNKVKGLEESNVSVSKRIPLHVGKNEVNSAYLKTKKDKLGHLD

SEQ ID NO: 142428 - protein, 341 aa, Unknown
  Bacterial polypetide isolated from the Sargasso Sea
MVSDLRLGLPIILYDAKTYILTAAIETLYSEKLDKIMEIAKNKNFEIAITNRRAKVLNVRLYNESVTRISIREKVSLQLLQAIADPSKDLDYPLKGPFQSERNGKFNVASVSLSLCKKARLLPASILINIPKSMRDELVSSQISESDIDDLKVKHEETKFLPNLSSAQLPISGQQNINLSVFREVTDLTEHYAIVFGNPKINQPALTRVHSACFTGDLLGSEKCDCGEQFSVSMSKMKNEGNGVLLYLNQEGRGIGLANKMRAYHLQNIGFDTVDANHRLGFEDDERDLEIAAKILKSLGVSNIKLMTNNPKKIELLTDNGITVKERVPLIVSMNPNNENY

SEQ ID NO: 142429 - protein, 233 aa, Unknown
  Bacterial polypetide isolated from the Sargasso Sea
MISILGPIPLPLIKAEKTVDVSWYACVRHTELSKVEQLAEELRGGNRKNSFANLASSMAVNSVLVMGDPSSWTNPLIRVHSSCLTGDVLGSGRCECGPQLDKAIQDISNDSQGGFVIYMAGHEGRGIGLWAKAATYILQDEGENTYQANRSLGLDEDSRDFSDAATLIKYFYGNKPFRLLTNNPKKIDDLKDKGLETITPMKHIIGVTGTNREYLFAKKDWGHTLEDKDISED

SEQ ID NO: 142430 - protein, 222 aa, Unknown
  Bacterial polypetide isolated from the Sargasso Sea
SRRISKQHNIKILSIAQIIAHRRQTETLVKRVAEARMPTKYGEFTIIGYESEVEPGEHLALVIGDWQEGDEVLTRVHSACLTGESLGSLRCDCGDQIERSLEMIASNGSGVLLYMRQEGRGIGLHNKIKAYSLQDTGLDTIEANRRLGFDSDLRQYGIGAQILTDLKVTKLRLLTNNPQKIAGLSGFNLEVTERIPMPPSVNTENHPYLDAKKSKMGHMIDM

SEQ ID NO: 142431 - protein, 215 aa, Unknown
  Bacterial polypetide isolated from the Sargasso Sea
MSSRPQSPTQGNDQADECVTLVATASLPTRYGTFKSYAFRVSGSDAEHLALVMGDVAGEQSVLTRLHSECLTGDVFGSYRCDCGEQLDLALRYIAAEDRGVLLYLRGHEGRGIGLSNKIRAYALQEQGRDTVEANLDLGLPDDAREYDSAAAILRILGVTSVRLMSNNPAKFDTLAKHGIPVCERVALAVPVREENERYIRTKQTKFGHYFEENE

SEQ ID NO: 142432 - protein, 259 aa, Unknown
  Bacterial polypetide isolated from the Sargasso Sea
MRQEGRGIGLINKLKAYSLQDGGLDTVEANEKLGFPADLRNYGVGAQILTDLGIKKLKLLTNNPRKIAGLGGYGIEVIERVPLVICPNDNNAEYLSVKKTKLGHMIDEDNSNSRNIDPFISIFLDGKYKSIDLVPIKNDVIKFCSYKSINIKLESTPRLLAFWNRPKLVWRILHDQNRTNSNITDEEIKNIELFIQFLSNYENSTKIGIIVSRNIEQALHPKSSIKLINTKFTINNEILYSSTRKFNLDKETFSIVFEG

SEQ ID NO: 142433 - protein, 400 aa, Unknown
  Bacterial polypetide isolated from the Sargasso Sea
MITDINEIINKFKAGEMIILIDDEERENEGDLVVSSEYLTPDHINFMITKGKGLVCAPISTDVAKKLDLTLMTGVNNETETQFTASVDLKGDGVSTGISAEDRYKTIKGLCNENSTRSSFNVPGHVFPLQSMDGGVLRRAGHTEAAIDLCKLSDHYPVAVICEIINEDGSMARYDDLISFSKEHNLPIGTIKDLIEYRISKTEMITFVSKAKVPTQYGDFTAHVYRDNLDNTEHIALTYNDYLESDETMVRVHSECLTGDVLYSNKCDCGSQLENAFKKITTNGSGVLLYMRGHEGRGIGLGNKIKAYSLQEDGDDTVDANLKLGFKMDQRDYGTGALILRDLGITNMNILTNNPSKRAGLEGFGLNITSRTPLIGNITKENESYLETKEEKMGHKYKDE

SEQ ID NO: 142434 - protein, 294 aa, Unknown
  Bacterial polypetide isolated from the Sargasso Sea
MISVSEESNNLVQDLIDNFETYNINLLKGFDDCTIIDAGINCPGSIECGRVVSEICLGGLGRVHLLNTFQSKSWPFSIHVNTKHPVISCLGSQYAGWNLKSNLKSEKFQALGSGPARALAQKEEIFDHINYKDKFSRTALVMEVDSIPPEDVVKKIIQDTGVEGKNLTIIITPTTSIVGNIQVVSRVLEVALHKSHELGFDLSKILEGFGSAPIPPNSNDFLEAMGRTNDAIIFSGVIQLWVNCEDEEAEKLCKDLPSSTSQDYGMPFADIFKKYEYDFFKIDPNLLAQPKLLL

SEQ ID NO: 142435 - protein, 90 aa, Unknown
  Bacterial polypetide isolated from the Sargasso Sea
PLTVCPLSNVKLKVFNKLEEHNLKKMLDKKLMVMVNSDDPAYFGGYLNKNLTETQAALNLSYEQVKTLLINSFKSSFLKDNEKKKWISKI

SEQ ID NO: 142436 - protein, 89 aa, Unknown
  Bacterial polypetide isolated from the Sargasso Sea
LTVCPLSNIKLCVFDKLENHNLKEMLDNGLRVMVNSDDPAYFGGYLNTNLIETSKALNLSMEDIKVLIENSFKSSFLDEISKNSWLNKI

SEQ ID NO: 142437 - protein, 134 aa, Unknown
  Bacterial polypetide isolated from the Sargasso Sea
KKDRHLTIWEAIELLDVDRIDHGVRCQEDEALMDLLKERQIPLTVCPLSNLKLCVINDMKDHNIVQLLDAGLLVTVNSDDPTYFGGFLNDNFEALHQSLGIDEKTIRTLVANSFKASFLPQEQKNQLVEKVLSA

SEQ ID NO: 142438 - protein, 91 aa, Unknown
  Bacterial polypetide isolated from the Sargasso Sea
IPLTVCPLSNIKLCIFKKLEDHNLKKMLDKKLMVMINSDDPAYFGGYINKNLIECQKSLKLSMHEVKTLIINSFKSSFLTKEKKSEWISKV

SEQ ID NO: 142439 - protein, 138 aa, Unknown
  Bacterial polypetide isolated from the Sargasso Sea
AHAGEEGHASYIWEAIELLDVDRIDHGVRCEEDEALMALLKERQIPLTVCPLSNLKLCVIDDMKDHNIVQLLNTGLLVTVNSDDPTYFGGFLNDNFEALHESLGIDEKIIRTLVANSFKASFLPQEQKDALVDQVLSA

SEQ ID NO: 142440 - protein, 137 aa, Unknown
  Bacterial polypetide isolated from the Sargasso Sea
MNNLDNIINFINKVPKAELHLHIEGSLEPELMFKLSKRNKVEIPFKSVEEIKSAYNFKNLDSFLKIYYEGSNVLITEEDFFDLTWEYILRCKNDNIVHTEIFFDPQSHTERGIEFDLVINGINKALKKANSVFGITS

SEQ ID NO: 142441 - protein, 225 aa, Unknown
  Bacterial polypetide isolated from the Sargasso Sea
RLTSQGVVEAVVDGIKSATKNANIKANLIGILSRTYGVKTCQHELEALLAFKNDLVAVDLAGDEIGFPGELFIEHFKQVRDAYLASTIHAGEALGAPSIWQAINELGASRIGHGVKAIEDLTLMDYLRDNRIGIESCLTSNIQTSTVTDLATHPLKQFLDHGILACLNTDDPAVEGIEIEHEYTIAAPKAGLSQTDIEKAQANALEIAFLSDGDKKALLAQVSAR

SEQ ID NO: 142442 - protein, 280 aa, Unknown
  Bacterial polypetide isolated from the Sargasso Sea
MINKNFPLLDLHRHLDGTVRLQTILELGQQFNICLPAYSLEGLRPHVQVMEIAPDLVSFLDKLTWGVKVLGSLDACKRVAMENVEDAAKQGIDYTELRFSPYFMAESHGLPTQGVVEAVIDGIKSATKDHDIKVNLIGILSRSYGAKVCQHELDSILACKAHITAIDLAGDEKGFPGNMFIEHFTKVRGEGLPITIHAGEAEGPQSIWQAINDLGAVRIGHGVNAINDAKLMDYLRDNRIGIESCLTSNVLTNTVTSLTEHPLTPFWTRHTRLSEYRRPG

SEQ ID NO: 142443 - protein, 96 aa, Unknown
  Bacterial polypetide isolated from the Sargasso Sea
LSKSQIPLTVCPLSNVKLKVFNKLEEHNLKKMLDKKLMVMVNSDDPAYFGGYLNKNLIETQAALDLSYEQVKTLIVNSFKSSFLKDSQKKKWISKI

SEQ ID NO: 142444 - protein, 108 aa, Unknown
  Bacterial polypetide isolated from the Sargasso Sea
VQCLKDEKLIEKLSKNKIPLTVCPLSNIKLRVFDNLKDHSLKKMLDKKLIAMVNSDDPAYFGGYLNQNLIETQEALNLTIDDIKTLLINSFKSSFLNEEKKKEWINKI

SEQ ID NO: 142445 - protein, 110 aa, Unknown
  Bacterial polypetide isolated from the Sargasso Sea
MVFSASKMKNCVEILSKSQIPLTVCPLSNIKLRVFNSLKEHNLKKMLEKKLMVMVNSDDPAYFGGYLNKNFIEIQEALNLSYEQVKTLLINSFKSSFLIDKKKKEWISKI

SEQ ID NO: 142446 - protein, 106 aa, Unknown
  Bacterial polypetide isolated from the Sargasso Sea
CLKDEKLVKELFKSQMPLTVCPLSNIKLKVFNKLEDHNLKKMLDKKLMVMINSDDPAYFGGYLNQNLIEIQAALNLSKDDVKTLLVNSFKSSFLEEEKKSEWISKI

SEQ ID NO: 142447 - protein, 138 aa, Unknown
  Bacterial polypetide isolated from the Sargasso Sea
MNIEEFIKKSPKAELHLHIEGTLEPELMFFLAKRNNIEIPFKNIDDVKKAYNFNNLDSFLKIYYEGAKVLIKEQDFFDLTWAYILKCKEDNIVHTEIFFDPQTHTDRGIDFDIIINGIFNALKKAEKEFGLSFKIIMC

SEQ ID NO: 142448 - protein, 138 aa, Unknown
  Bacterial polypetide isolated from the Sargasso Sea
HTERGIPFKAVITGIHNALEAAREKYGITSFLILCFLRHLSEKAALETLEEAIPFREWIKGVGLDSSEVGFPPENFERAFARAAEHGFRKVAHAGEEGPPEYIWNSLDVLGVSRIDHGVRCTEDQKLAGTYCTWRKYL

SEQ ID NO: 142449 - protein, 105 aa, Unknown
  Bacterial polypetide isolated from the Sargasso Sea
MEKIPLTVCPLSNIKLRVFEKMENHNLKKMLEKGIRVTINSDDPAYFGGYINQNFFAVQQALKLNENEIVEIAKNGFRSSFLPQESIEKHLESIEEFTFKLKNST

SEQ ID NO: 142450 - protein, 241 aa, Unknown
  Bacterial polypetide isolated from the Sargasso Sea
FALAERNRVDLPYNSVEELRQAYQFTNLQSFLDIYYAGARVLLVEQDFYDLTWAYLTRMQEQNVKHVEIFFDPQTHAERGVAISTVIEGIDSALKDARREYGISSYLILCFLRHLSEEDAFKTLEEALPFREKIIGIGLDSSEVGHPPEKFQRVFQRASEEGFRRVAHAGEEGPPEYIIGALDLLGVERIDHGVKCEKDPELLRRLAESRMPLTVCPLSNTRLCVFEKIKDHNLKRLLDAG

SEQ ID NO: 142451 - protein, 107 aa, Unknown
  Bacterial polypetide isolated from the Sargasso Sea
IVHEEIPLTVCPLSNVKLRVFNKMEDHNLKKMLNKGIRVTINSDDPAYFGGYINQNFIEVQKALKLNQNEIIEIAKNGFRSSFLPQEIINMHLDSIDEFANRAIKSS

SEQ ID NO: 142452 - protein, 142 aa, Unknown
  Bacterial polypetide isolated from the Sargasso Sea
MTSTNLKEIIQGIPKAELHLHIEGSFEPELMFEIAKRNNISLDYDSVESLKKAYKFNNLQEFLDIYYIGAKVLIHEQDFYDLTWAYLKKVHSQNVVHVEVFFDPQTHTDRGVGFDTVINGIYKALEKAKNELNISFKLIMSY

SEQ ID NO: 142453 - protein, 161 aa, Unknown
  Bacterial polypetide isolated from the Sargasso Sea
MNIKEFIKKSPKAELHLHIEGTLEPELMFSLAKRNNIKIPFNNIEEVKKAYNFSNLDSFLKIYYEGAKVLIKEQDFFDLTWDYILKCREDNIVHTEIFFDPQTHTDRGIDFETVINGIFNALKKGEKEFGLSFKIIMCFLRHLNEDECFKILDKAIAHKDK

SEQ ID NO: 142454 - protein, 279 aa, Unknown
  Bacterial polypetide isolated from the Sargasso Sea
MKITDSVLNQLPKVELHCHLDGSLRIETIIDLAKKNKINLPYTNKKDLQKALSIGKKRVTLEEYIARFDITLSVMQTPSALNRIAYELIEDVSKENVRYIEVRYSPILHTKNGMTLEEAIISVRNGLEKGKKDFGVKSGIIICGIRHISPQASLKLADLCVKFKNKGVVGFDLAGAEENFPAKDHREAFYMILNNNINATIHAGEAFGPSSIHQAIHHCGAHRIGHGTRLKEDLDLMEYVNNHRITMEVCLTSNWHTFSVKSLKQHPFKFYYDKGIRVT

SEQ ID NO: 142455 - protein, 356 aa, Unknown
  Bacterial polypetide isolated from the Sargasso Sea
MKVNKSLLQKLPKVELHCHLDGSLRIPTIIDLANQDKINIPTSNPDKLSKLLTIGKKRGSLEDYIKRFDITLSVMQTPEALERTSYELIEDVFKENVRYIEIRYSPILHTEKGMTISDSVEAVRKGLKRGEKDFGVKSGIIVCGIRNISSEASLKLADLTVRYKNRGVVGFDLAGAEENYPAKDHREAFYMILNNNINATIHAGEAFGPSSIHQAIHHCGAHRIGHGTRLKEDKDLMNYVNDHRITLEVCLTSNWQTRSIRSLKFHPLKYYYDQGIRVTLNTDNRLMSGTNLTNEYLLAHELFGFKLHDFREMIIMAIKSAFIPYNERKKIIGEIANELEQEFGLMPEFVQRKPSL

SEQ ID NO: 142456 - protein, 354 aa, Unknown
  Bacterial polypetide isolated from the Sargasso Sea
MQSISYELITQLPKVELHCHLDGSIRTQSILEQAEIDKVKLPFHNYNELDTYLRIGKKRGSLEDYIKRFDVTLSVMQTPQSLFRFAYELIEDVAKENVRYIEVRYSPILHTNKGMTLDNAIDCVQKGLKKGQKEFGVKSGIIICGIRHISPDTSLKLADLAVRYKNRGVVGFDLAGAEENFPAKEHREAFYLIRNNNINATIHAGEAFGPSSIHQAIHQCGANRIGHGTRLKEDKDLMNYVNDHRIPLEVCLTSNWQTKSVRLLKYHPVKEYFKQGIRVTLNTDNRLISDTTLTKEFMLAHNLFQFGLNDFREITIIAMKSAFMKHSNRIKMVQSIANEFEKDFGLHPEFISKK

SEQ ID NO: 142457 - protein, 220 aa, Unknown
  Bacterial polypetide isolated from the Sargasso Sea
DFDIVINGIFKALKKAEKEFGLSFKIIMCFLRHLSEDECFKILDKALAHKDKIYGVGLDSSEKGNPPKKFEKLFKKALENEFITVAHAGEEGPSEYIWEALNLLNVHRIDHGVQCLKDDKLVEVLSKSQIPLTVCPLSNVKLKVFNKLEEHNLKKMLDKKLMVMVNSDDPAYFSGYLNKNLIETQAALDLSYEQVKTLLVNSFKSSFLKDTEKKKWISKI

SEQ ID NO: 142458 - protein, 179 aa, Unknown
  Bacterial polypetide isolated from the Sargasso Sea
MFKIPPISAERLPSLLRAMPKAELHIHIEGSLEPELIFALAQRNGLTLPYASVDALRSAYAFTNLQSFLDIYYAGASVLLHEQDFYDMARAYLGRAARDNVLHAELFFDPQTHTARGVPMETVINGLHRACEDARAELGISATLILCFLRHLSEESAFETLEQAMPLLDKIVGVGLDSS

SEQ ID NO: 142459 - protein, 158 aa, Unknown
  Bacterial polypetide isolated from the Sargasso Sea
MEPGFIEGIPKAELHLHIEGSLEPELMFALAERNRVDLPYNSVEELRQAYQFTNLQSFLDIYYAGARVLMVEQDFYDLTWAYLTRMQEQNVKHVEIFFDPQTHTERGVTFSTVIEGIYSALRDARREYGISSYLILCFLRHLSEDDSFKTLEEALSVP

SEQ ID NO: 142460 - protein, 170 aa, Unknown
  Bacterial polypetide isolated from the Sargasso Sea
GVGLDSSEKGNPPNKFKKLFELAIKEGFLTVAHAGEEGPPEYIWDSLDLLKVKRIDHGVQCLNDEKLTSRLNIEQIPLTVCPLSNVKLCVFDKLENHNLKKMLDKGLRVMINSDDPAYFGGYLNKNLIETSKALNLDLQDVKLLIENSFKSSFLSEEEKINWLKKINNEI

SEQ ID NO: 142461 - protein, 134 aa, Unknown
  Bacterial polypetide isolated from the Sargasso Sea
MQEKKVLRSIFWEALNLLKVKRIDHGVQCLQDKKLVKKLLHDQIPLTVCPLSNIKLCVFKKLQDHNLKKLLNNGLMVMVNSDDPAYFGGYINKNLIECQAALDLSKEDIKKLIINSFKSSFLTEREKKVWIEKI

SEQ ID NO: 142462 - protein, 261 aa, Unknown
  Bacterial polypetide isolated from the Sargasso Sea
VLIKEQDFFDLTWAYVLKCKENNVVHTEIFFDPQTHLNRGVEFDLVINGIYKALQKANKEFGLTFGIIMCFLRHLDEISAFKMLDHALLHKDKIIGVGLDSSEVGHPPRKFERVFKKAIEKGFLTVAHAGEEGPPEYIWEALNFLKVKRVDHGVQCLKDQKLVEKLRNDQIPLTVCPLSNIKLCVFNKLDEHNLKKMLDKKLMVMINSDDPAYFGGYINENLIESQTALDLSMKEIKTLIVNSFKSSFLKEEKKKEWIKQI

SEQ ID NO: 142463 - protein, 178 aa, Unknown
  Bacterial polypetide isolated from the Sargasso Sea
MNIEEFIKKSPKAELHLHIEGTLEPELMFFLAKRNNIEIPFKNIDDVKKAYNFNNLDSFLKIYYEGAKVLIKEQDFFDLTWAYILKCKEDNIVHTEIFFDPQTHTDRGIDFDIIINGIFNALKKAEKEFGLSFKIIMCFLRHLTEDECFQILDKALAHKDKIYGVGLDSSEKGNPPKK

SEQ ID NO: 142464 - protein, 201 aa, Unknown
  Bacterial polypetide isolated from the Sargasso Sea
MCFLRHLNEDDCFKILDKALTHKDKIYGVGLDSSEKGNPPKKFERLFKKALENEFITVAHAGEEGPPEYIWEALKLLNVRRIDHGVQCLKDEKLVEMLSKSQIPLTVCPLSNIKLKVFNKLEEHSLKKMLDKKLMVMVNSDDPAYFGGYLNKNLTETQSALNLSYEEVKTLLINSFKSSFMKDNKKEEWISKINEKNNIIN

SEQ ID NO: 142465 - protein, 206 aa, Unknown
  Bacterial polypetide isolated from the Sargasso Sea
MFEQIIDYINKIPKAELHLHIEGSLEPELMFKLSKRNKVEIPFKSVEEIKSAYNFTNLDSFLKIYYEGSNVLINEEDFFDLTWEYVLRCKQDNIVHTEIFFDPQSHLVRGVSFDKIINGIDKALKKAEKEFNITSKIIMCFLRHLDEDACFDVLNHACNHKDKIIGVGLDSSEKGNPPKKFKSLFEKAIEERFLTVAHAGEEVLQN

SEQ ID NO: 142466 - protein, 234 aa, Unknown
  Bacterial polypetide isolated from the Sargasso Sea
RFSPYYMAMNHKLPIEGVVEAVIDGVKAGLKDYQVKINLIGIMSRSFGQAACTQELEGLLAHKQHLVAMDLAGDELGFPGELFNEHFKRVRDAGLAITAHAGEAAGSQSMWQAIQELGATRIGHGVNAIHDPKLMEYLAKHRIGIESCPTSNLHTSTVSSYAEHPFRTFMDAGVLISLNTDDPGVSAIDIKHEYRIAKSELGLSDAELAQVQRNGVEMAFLSESERKALYAAKA

SEQ ID NO: 142467 - protein, 238 aa, Unknown
  Bacterial polypetide isolated from the Sargasso Sea
MNNLDNIIDFIKKSPKTELHLHIEGSLEPELMFKLSKRNKIEIPFKSVEEIRSAYNFTNLDSFLKIYYEGSNVLINEEDFFDLTWEYILRCKQDNIVHTEIFFDPQSHIPRGVNFDKIINGIDKALKKAEKDFNITSKIIMCFLRHLDEESCFDVLKKACNYKDKIVGVGLDSSEKGNPPTKFKRLFELAMKEGFLTVAHAGEEGPPDYIWDSLNILKVKRIDHGVQCLNDEKIVDKL

SEQ ID NO: 142468 - protein, 148 aa, Unknown
  Bacterial polypetide isolated from the Sargasso Sea
LFKKALENEFITVAHAGEEGPPEYIWEALNFLNVHRIDHGVQCLKDDKLVGMLSESQIPLTVCPLSNVKLKVFNKLEEHNLKKMLDKKLMVMVNSDDPAYFGGYLNKNLTETQAALNLSYEQVKTLLVNSFKSSFLKDVEKKKWISKI

SEQ ID NO: 142469 - protein, 189 aa, Unknown
  Bacterial polypetide isolated from the Sargasso Sea
MILEEFIKKSPKAELHLHIEGTLEPELMFSLAKRNNIKIPFKNINDVKKAYNFSNLDSFLKIYYEGAKVLIKEQDFFDLTWAYVLKCRENNIVHAEIFFDPQTHTDRGIDFDTVINGIFNALKRGKKEFGLSFKIIMCFLRHLNEDECFKILDKALAHKDKIFGVGLDSSETGNPPKKFKNLFKKGVRK

SEQ ID NO: 142470 - protein, 274 aa, Unknown
  Bacterial polypetide isolated from the Sargasso Sea
MHIEGTLEPELMFALGQRNGVALPWPDVDSLRAAYEFDGLQSFLDLYYLGASVLIHEQDFFDLTWAYLERCVADHVVHVEIFFAPQTHTARGVPFATVLGGIERALQAGEAAFGISWRLIMSFLRHLSEEAAFATLAEAMPHLVRLHGVGLDSGEQGNPPSKFARVFARARELGLPVVAHAGEEGPADYIWQAIRELGVQRIDHGVRCVEDPSLLSYLADTRLPLTVCPLSNVRLRVFDQMAHHNVLRLLEQGLCVTVNSDDPAYFGGYLGANF

SEQ ID NO: 142471 - protein, 147 aa, Unknown
  Bacterial polypetide isolated from the Sargasso Sea
FRRVAHAGEEGPPEYIIGALDLLGVERIDHGVQCEKDPELLRRLAESRMPLTVCPLSNTRLCVFEEMKDHNLKRLLDAGLCVTVNSDDPAYFGGYMNENLTAVQQGLNLSKENLVELVKNGFRASFLPKTAIESRVQAVDEYASKNL

SEQ ID NO: 142472 - protein, 190 aa, Unknown
  Bacterial polypetide isolated from the Sargasso Sea
QTLEAALPLRDRFIGVGLDSSELGNPPEKFARVFERCKQLGLRLVAHAGEEGPPAYIWGALDVLNVERIDHGVQSEQDALLMQRLVKEQIPLTVCPLSNLKLCVIKDLADHNLPRLLAAGLKVMINSDDPAYFGGYVNENYTQLFAATGMGAPEAYQLARNSLEASFASEAQKQEWIAGLDEVFRQYAAA

SEQ ID NO: 142473 - protein, 177 aa, Unknown
  Bacterial polypetide isolated from the Sargasso Sea
MILEEFIKKSPKAELHLHIEGTLEPELMFSLAKRNNIKIPFKNIDDVKKAYNFSNLDSFLKIYYEGAKVLIKEQDFFDLTWAYILKCKEDNIVHTEIFFDPQTHTDRGIEFDTVINGIFNALKKAKKEFGLSFKIIMCFLRHLSEDECFKILDKALAHKDKIFGVGLDSSESGNPPK

SEQ ID NO: 142474 - protein, 270 aa, Unknown
  Bacterial polypetide isolated from the Sargasso Sea
MSSIIKNIPKAELHLHIEGSLTPELMWRLAEKHSVSLPYASVEEIEAAYNFKDLQSFLDLYYAGAGVLRDEDDFFILMWEYLTRCAEENIVHTEIMFDPQTHTERGIGFDVFMPGFLRAIQKAETEYGISSYLIMSFLRHLPESEAYQTLEAAKPYYQHIKAVGLDSSELGHPPSKFERVFKKARSLGFKIVAHAGEEGPASYIWEAIELLDVDRIDHGVRCQEDQALMAYLKEKQIPLTVCPLSNLKLCVIDDMKEHNIVQLLDAGLLV

SEQ ID NO: 142475 - protein, 145 aa, Unknown
  Bacterial polypetide isolated from the Sargasso Sea
KALENEFITVAHAGEEGPPEYIWEALNLLNVHRIDHGVQCLKDEKLVEMLSKSQIPLTVCPLSNIKLKVFNKLEEHSLKKMLDKKLMVMVNSDDPAYFGGYLNKNLIETQAALNLSYEQVKTLLVNSFKSSFLKDTEKKKWISKI

SEQ ID NO: 142476 - protein, 115 aa, Unknown
  Bacterial polypetide isolated from the Sargasso Sea
VKRIDHGVQCLKDEKLVEKLSKNQVPLTVCPLSNIKLKVFDKLYDHNLKKMLDKKLMVTINSDDPAYFGGYLNQNLIETQAALNLSFQDIKTLLINSFQSSFLSEEKKQEFILKI

SEQ ID NO: 142477 - protein, 207 aa, Unknown
  Bacterial polypetide isolated from the Sargasso Sea
MEPGFIEGIPKAELHLHIEGSLEPELMFALAERNRIDLPYNSVEELRQAYQFTNLQSFLDIYYAGARVLLVEQDFYDLTWAYLTRMQEQNVKHVEIFFDPQTHTERGVAFSTVIEGIDSALKDARREYGISSYLILCFLRHLSEDDAFKTLEEAFPFREKIIGVGLDSSEVGHPPEKFQRVFQRASEEGFRRVAHAGEEGPPEYIIG

SEQ ID NO: 142478 - protein, 248 aa, Unknown
  Bacterial polypetide isolated from the Sargasso Sea
MPNKSLKSFINLMPKAELHIHIEGSLEPELMLRLAGKNKIKLPYDSVEDVRDAYSFDNLQSFLDIYYLGANVLQTAEDFYELMQNYLEKCLDSNILHTEIMFDPQTHMDRGIAFAAMFQGFDQAVSEAREKGMSIGLIMCFLRHLSEQSAFETIKSASPFKDRIQSIGLDSGEKGNPPAKFTRVFQYAKSQGYRLVAHAGEEGPPAYVAQALEKLKVERIDHGVRSLEDPKLVETLASTRLPLTVCPL

SEQ ID NO: 142479 - protein, 144 aa, Unknown
  Bacterial polypetide isolated from the Sargasso Sea
AAENNFITVAHAGEEGPPEYMWEALNLLNVKRIDHGVQCLKDKKLVEKLLKNQVPLTVCPLSNIKLKVFDKLNDHNLKKMLDKKLMVTINSDDPAYFGGYLNQNLIETQAALNLSFEDIKTLLINSFKSSFLSEEKKQEFILKI

SEQ ID NO: 142480 - protein, 153 aa, Unknown
  Bacterial polypetide isolated from the Sargasso Sea
KKFKNLFKKALENEFVTVAHAGEEGPPEYIWEALNFLNVHRIDHGVQCLKDDKLVAMLSESQIPLTVCPLSNVKLKVFNKLEEHSLKKMLDKKLMVMVNSDDPAYFGGYLNKNLTETQAALNLSYDQVKTLLVNSFKSSFLKDTEKKKWISKI

SEQ ID NO: 142481 - protein, 274 aa, Unknown
  Bacterial polypetide isolated from the Sargasso Sea
SFFNVDEIKSAYNFKNLESFLNIFYQGSKVLIKEQDFFDLTWAYVLKCKENNVVHTEIFFDPQTHLNRGIDFNVVINGIYNALHKANKEFGLTFGIIMCFLRHLDEDSAFQMLDHALDHKDKIIGIGLDSSEVGHPPRKFERVFKKAIEKGFFTVAHAGEEGPPEYIWEALNLLGVKRIDHGVQCLKDQKLVKKLKNDQTPLTVCPLSNVKLCVFNNLNQHNLKKMLDEKLMVMINSDDPAYFGGYINDNLIESQIALDLSMDEIRTLIINSFK

SEQ ID NO: 142482 - protein, 267 aa, Unknown
  Bacterial polypetide isolated from the Sargasso Sea
YYEGSNVLVTEEDFFDLTWEYVLRCKQDNIVHTEIFFDPQSHIPRGIRFNTVINGIHKALTKANTEFGITSKIIMCFLRHLDEEPCFEVLDEAVKHKDKIIGVGLDSSEKGNPPEKFKKLFEKAIQEGFLTVAHAGEEGPPEYIWDSLNLLKVRRVDHGVQCLRDEKLVQLLKEKNVPLTVCPLSNIKLCVFDKLENHNLKKMLEKGLRVMVNSDDPAYFGGYLNTNLIETSKALNLSLEDVKLLIKNSFKSSFLDEKTKNNWLNKI

SEQ ID NO: 142483 - protein, 252 aa, Unknown
  Bacterial polypetide isolated from the Sargasso Sea
DLTWAYVLKCKEDNVVHTEIFFDPQAHVNRGINFDVVINGIYKALLKANKEFGLTSKIIMCFLRHLDETAAFEILDLALVHKDKIVGVGLDSSEKGHPPSKFERVFKKAIDNGFLTVAHAGEEGPAEYIWESLNLLKVSRVDHGVQCLSDEKLVKKLRDEQIPLTVCPLSNIKLRVFNKLKEHNLKKMLNKGLMVMVNSDDPAYFGGYVNDNLIESQVALNLSKKELKTLIINSFKSSFLDKEEKMKWIEKV

SEQ ID NO: 142484 - protein, 209 aa, Unknown
  Bacterial polypetide isolated from the Sargasso Sea
MILEEFIKKSPKAELHLHIEGTLEPELMFSLAKRNNIVIPFKSIDDVKKAYNFSNLDSFLKIYYEGAQVLIKEQDFFDLTWAYILKCKEDNIVHTEIFFDPQTHTDRGIEFDTVINGIFNALKKGEKEFGLTFKIIMCFLRHLNEDECFKILDKALAHKDKIFGVGLDSSETGNPPKKFKNLFKKALENEFITVAHAGEEGPPEYIGKP

SEQ ID NO: 142485 - protein, 293 aa, Unknown
  Bacterial polypetide isolated from the Sargasso Sea
SIPYKNFEEVKAAYNFKNLDSFLNIYYQGCKVLIHENDFFDLTWAYVLKCKKDNIVHTEIFFDPQAHVDRGISFDTVINGISKALDKANSEFGLTSKIIMCFLRHLEEKSGFNVLNQALKHKDKIFGVGLDSSELGNSPKKFEKLFQKAREEGFVPVAHAGEEGPPEYIWDSINLLKVKRIDHGVQCLKDNKLVEELKKRQIPLTVCPLSNVKLCVFDKLENHNLKKMLNLGLRVMVNSDDPAYFGGYLNENLIRSQLALDLKLEDVKTLIVNSFKSSFLDSRSKNKWIEKIN

SEQ ID NO: 142486 - protein, 195 aa, Unknown
  Bacterial polypetide isolated from the Sargasso Sea
IIMCFLRHLDEELCFDVLKYAINHKDKIIGVGLDSSEKGNPPKKFKRLFEEAIKEGFLTVAHAGEEGPPEYIWDSLNLLKVKRIDHGVQCLKDEKLVEKLKEKNIPLTVCPLSNIKLCVFDKLENHNLKKMLDKGLRVMVNSDDPAYFGGYLNTNLIETSKALNLNLEEVKILIRNSFKSSFLDENSKNNWLNKI

SEQ ID NO: 142487 - protein, 230 aa, Unknown
  Bacterial polypetide isolated from the Sargasso Sea
YFMGESHGLPTQGVVEAVIDGVESAAKNHDVKVNLIGILSRSYGAKVCQHELDSILACKAHITAIDLAGDEKGFPGNMFIEHFTKVRREGLPITIHAGEAVGPQSIWQAINDLGAVRIGHGVNAVNDAKLMDYLRDNRIGIESCLTSNVLTNTVTSLTEHPLTTFLDHGILACLNTDDPAVQGVELDHEFSVAAKQASLMPSHIKQLQENALAIAFLSESEKAALKRKVN

SEQ ID NO: 142488 - protein, 208 aa, Unknown
  Bacterial polypetide isolated from the Sargasso Sea
LVAFLKKLDWMVAVLADLDAVKRVAYENVADAALSGLDYAELRFSPYYMAMNHKLPIEGVVEAVIDGVKAGLKDYQVKINLIGIMSRSFGQAACTQELEGLLAHKQHLVAMDLAGDELGFPGELFNEHFKRVRDAGLAITAHAGEAAGSQSMWQAIQELGATRIGHGVNAIHDPKLMEYLAKHRIGIESCPTSNLHTSTVSSYAEHPF

SEQ ID NO: 142489 - protein, 172 aa, Unknown
  Bacterial polypetide isolated from the Sargasso Sea
KDKIIGVGLDSSEKGNPPTKFKKLFEEAIKEGFLTVAHAGEEGPPEYIWDSLDQLKVKRIDHGVQCLKDEKLVNKLKESQIPLTVCPLSNVKLCVFDKLENHNLKLMLEKGLNVMVNSDDPAYFGGYLNKNLIETSMALNLKLDEVKILIENSFKASFLDQKIKDEWIKKIN

SEQ ID NO: 142490 - protein, 250 aa, Unknown
  Bacterial polypetide isolated from the Sargasso Sea
ENVEDAAKQGIDYTELRFSPYFMGESHGLPTQGVVEAVIDGVKSATKNHDVKVNLIGILSRSYGAKVCQHELDSILACKAHITAIDLAGDEKGFPGNMFIEHFTKVRREGLPITIHAGEAVGPQSIWQAINDLGAVRIGHGVNAINDAKLMDYLRDNRIGIESCLTSNVLTNTVTSLTEHPLTTFLDHGILACLNTDDPAVQGVELDHEFSVAAKQAGLMPSHIKQAQENALAIAFLSESEKAALKRKVN

SEQ ID NO: 142491 - protein, 153 aa, Unknown
  Bacterial polypetide isolated from the Sargasso Sea
FKKLFKKAIENNFITVAHAGEEGPPEYMWEALKLLNVKRIDHGVQCLKDEKLVEKLSKNQIPLTVCPLSNIKLRVFNKLEDHNIKKMLDKKLMVMVNSDDPAYFGGYLNKNLIDTQAALNLSEDEVKTLLINSFKSSFLNEEKKRQWISKILD

SEQ ID NO: 142492 - protein, 125 aa, Unknown
  Bacterial polypetide isolated from the Sargasso Sea
LGVERIDHGVQCEKDPELLRRLAESRMPLTVCPLSNTRLCVFEEMKDHNLKRLLDAGLCVTVNSDDPAYFGGYMNENLTAVKQGLNLSKENLVELVKNGFRASFLPKTAIESRVQAVDEYASKNP

SEQ ID NO: 142493 - protein, 117 aa, Unknown
  Bacterial polypetide isolated from the Sargasso Sea
LNVHRIDHGVQCLKDDKLVEMLSETQIPLTVCPLSNVKLKVFNKLEEHNLKKMLNKKLMVMVNSDDPAYFGGYLNKNLIETQVALNLSYEQVKTLLINSFKSSFLKDTEKKKWISKI

SEQ ID NO: 142494 - protein, 120 aa, Unknown
  Bacterial polypetide isolated from the Sargasso Sea
MDLLKVERIDHGVQCLHDEKLVQRLCEDQTPLTVCPLSNIKLCVFNKLEKHNLKKMLNKGLMVMLNSDDPAYFGGYINENIVECQIALNLSKEEVRTLIVNSFKASFLKEEIKNKWISKI

SEQ ID NO: 142495 - protein, 205 aa, Unknown
  Bacterial polypetide isolated from the Sargasso Sea
VKKNFGLSFKIIMCFLRHLNEEECFKTLDKALRHKDKIFGVGLDSSEKGNPPKKFEKLFKKALENEFITVAHAGEEGPPEYIWEALNLLNVHRIDHGVQCLKDEKLVEILSKSQIPLTVCPLSNIKLRVFNSLKEHNLKKMLEKKLMVMVNSDDPAYFGGYLNKNFIEIQEALDLSHEQVKTLLINSFKSSFLKDNKKKEWISKI

SEQ ID NO: 142496 - protein, 98 aa, Unknown
  Bacterial polypetide isolated from the Sargasso Sea
HGVRAIEDERLMQRIIDEQIPLTVCPLSNIKLCVFEHMGQHNILEMLERGVKVTVNSDDPAYFGGYVGENFAALHEHLGMTEAQAKRLAQNSLDARLA

SEQ ID NO: 142497 - protein, 288 aa, Unknown
  Bacterial polypetide isolated from the Sargasso Sea
TLAPFVQIQGKETSLVAFLKKLDWMVAVLADLDAVKRVAYENVADAALSGLDYAELRFSPYYMAMNHKLPIEGVVEAVIDGVKAGLKDYQVKINLIGIMSRSFGQAACTQELEGLLAHKQHLVAMDLAGDELGFPGELFNEHFKRVRDAGLAITAHAGEAAGSQSMWQAIQELGATRIGHGVNAIHDPKLMEYLAKHRIGIESCPTSNLHTSTVSSYAEHPFRTFMDAGVLISLNTDDPGVSAIDIKHEYRIAKSELGLSDAELAQVQRNGVEMAFLSESERKALYAA

SEQ ID NO: 142498 - protein, 301 aa, Unknown
  Bacterial polypetide isolated from the Sargasso Sea
TGIALPADSLETLAPFVQIQGKETSLVAFLKKLDWMVAVLADLDAVKRVAYENVADAALSGLDYAELRFSPYYMAMNHKLPIEGVVEAVIDGVKAGLKDYQVKINLIGIMSRSFGQAACTQELEGLLAHKQHLVAMDLAGDELGFPGELFNEHFKRVRDAGLAITAHAGEAAGSQSMWQAIQELGATRIGHGVNAIHDPKLMEYLAKHRIGIESCPTSNLHTSTVSSYAEHPFRTFMDAGVLISLNTDDPGVSAIDIKHEYRIAKSELGLSDAELAQVQRNGVEMAFLSESERKALYAAKA

SEQ ID NO: 142499 - protein, 222 aa, Unknown
  Bacterial polypetide isolated from the Sargasso Sea
MEPGFIEGIPKAELHLHIEGSLEPELMFALAERNRVDLPYNSVEELRQAYQFTNLQSFLDIYYSGARVLLVEQDFYDLTWAYLTRMQKQNVKHVEIFFDPQTHTERGVAFSTVIEGIDSALKDARREYGISSYLILCFLRHLSEDEAFKTLEEALPFREKIIGIGLDSSEVGHPPEKFQRVFQRASEEGFRRVAHAGEEGPPDYIIEALDLLGVERIDHGVQ

SEQ ID NO: 142500 - protein, 187 aa, Unknown
  Bacterial polypetide isolated from the Sargasso Sea
MSLLEFIKKSPKAELHLHIEGTLEPELMFRLAKRNNIKIPFNNIDEAKKAYNFSNLESFLKIYYEGAKVLIKEQDFFDLTWAYVLKCNEDNIVHTEIFFDPQTHTDRGINFNIVINGIYKALKKGEKEFGLSFKIIMCFLRHLNEDEGFKILDQAIAHKDKIFGVGLDSSETGNPPSKFEKLFKKAN

SEQ ID NO: 142501 - protein, 282 aa, Unknown
  Bacterial polypetide isolated from the Sargasso Sea
KSAYNFSNLDSFLKIYYQGSNVLITEQDFFDLTWEYILKCKRDNIVHTEIFFDPQSHTERGVEFDTVINGINKALMKAKSEFGITSEIIMCFLRHLDEEPCFEVLKHATKHKDKIIGVGLDSSEKGNPPQKFKRLFDAAIKEGFLTVAHAGEEGPPEYIWESINLLKVKRIDHGVQCLKDKKLVETLKKKNIPLTVCPLSNIKLCVFDKLENHNLKEMLDNGLRVMVNSDDPAYFGGYLNTNLIETSKALNLSIEDIKVLIKNSFKSSFLDEKSKNSWLNKI

SEQ ID NO: 142502 - protein, 97 aa, Unknown
  Bacterial polypetide isolated from the Sargasso Sea
GQRIGIESCLTSNIQTSTVASLSVHPLKTFLEHGVLASLNTDDPAVQGVDIIHEYTVAAPAAGLSREQIRQTQINGLEIAFLSAAEKQVLRDKVAAA

SEQ ID NO: 142503 - protein, 333 aa, Unknown
  Bacterial polypetide isolated from the Sargasso Sea
MIDRSLPLTDLHRHLDGNIRPQTILELGRQHNIQLPAFELEALRPHVQIVENEPSLVAFLKKLDWGVAVLADYDACRRVAYENVEDLLRAGIDYAELRFSPAYMAMAHKLHPQGVVEAIIDGVAAGSRDFGIKTNLIGIMSRTFGTEQCKQELDACLAHRDRLVAIDLAGDELGFPGELFTDHFRRVRDAGMRVTVHAGEAAGPESMWQAIRELGAERIGHGVKAVQDPTLMAYLAEHRIGIESCLTSNVQTTTVASLTEHPIRQFLAAGVLACLNTDDPAVEGIDLPHEYQVAAPAAGMTVSEIRTAQQNGLTLAFLSEADKAELSARAARR

SEQ ID NO: 142504 - protein, 187 aa, Unknown
  Bacterial polypetide isolated from the Sargasso Sea
MEPGFIEGIPKAELHLHIEGSLEPELMFALAERNRVDLPYNSVEELRQAYQFTNLQSFLDIYYAGARVLLVKQDFYDLTWAYLTRMQEQNVKHVEIFFDPQTHTERGVAFSTVIEGIDTALKDARREYGISSYLILCFLRHLSEDDAFKTLEEALPFREKIIGVGLDSSEVGHPPEKFQRVFQRASE

SEQ ID NO: 142505 - protein, 332 aa, Unknown
  Bacterial polypetide isolated from the Sargasso Sea
MSLSSIIKNIPKAELHLHIEGSLTPELMWRLAEKHSVSLPYASVEEIEAAYNFEDLQSFLDLYYAGAGVLRDEDDFFALMWEYLTRCHEDNIVHTEIMFDPQTHTERDIGFDIFMPGFLKAMEKAKDEYGISSYLIMSFLRHLPEDAAFDTLSAAEPYYEHITAVGLDSSELGHPPSKFERVFKKAKALGFKIVAHAGEEGPASYIWEAIELLDVDRIDHGVRCQEDEALMDLLKERQIPLTVCPLSNLKLCVINDMKDHNIVQLLDAGLLVTVNSDDPTYFGGFLNDNFEALHQSLGIDEKTVRTLVANSFKASFLPQEQKNQLVEKVLSA

SEQ ID NO: 142506 - protein, 239 aa, Unknown
  Bacterial polypetide isolated from the Sargasso Sea
MHLHIEGTLEPELMFFLAKRNNVEIPFKNIDDVKEAYNFSNLDSFLKIYYEGAKVLVEEQDFFDLTWAYILKCKENNIVHTEIFFDPQTHTDRGIDFDKVINGIFNAFKKGEKEFGLSFKIIMCFLRHLNEEECFKTLDNALRHKDKIFGVGLDSSEKGNPPKKFKKLFKKALENEFITVAHAGEEGPPEYIWEALNLLNVHRIDHGVQCLKDEKLVEILSKSQIPLTVCPLSNIKLRV

SEQ ID NO: 142507 - protein, 254 aa, Unknown
  Bacterial polypetide isolated from the Sargasso Sea
MTRMQEQNVKHVEIFFDPQTHTERGVAFSTVIQGIDSALKDARREYGISSYLILCFLRHLSEDDAFKTLEEALPFREKIIGIGLDSSEVGHPPEKFQRVFQRASEEGFRRVAHAGEEGPPEYIIGALDLLGVERIDHGVKCEKDPELLRRLAESRMPLTVCPLSNTRLCIFEKMKDHNLKRLLDAGLCVTVNSDDPAYFGGYMNENLTAVQQGLNLSKEDLVELVKNGFRASFLPKTAIESRIQAVDEYASKNR

SEQ ID NO: 142508 - protein, 235 aa, Unknown
  Bacterial polypetide isolated from the Sargasso Sea
MAKPPISEFYVGAIAKGKSGDIYMGANLELPGEALFHSVHAEQSAISHAWLSGESQIVDMIVNASPCGHCRQFMNELVEGGQIKIHLPSQDSHLLSYYLPYAFGPKDLNVQSPLLVKQETEFALDSSDPMVIEALDHAGLSYAPYTQSYAAVVLETADGATYCGRYAENAAFNPSMLPMQMALSNLTRHNRDFGEIRRAVLVESSQGKISLVGATMDALHAVAAIELEHIVVDPV

SEQ ID NO: 142509 - protein, 296 aa, Unknown
  Bacterial polypetide isolated from the Sargasso Sea
MQDRFIKSITQLPTPLADTLIPLLHQNFAGHIDAQQLAELVQSSKMTEAEVLLALLPIAAALAKPPISEFYVGAIAKGKSGDIYMGANLELPGEALFHSVHAEQSAISHAWLSGESQIVDMIVNASPCGHCRQFMNELVEGGQIKIHLPSQDSHLLSYYLPYAFGPKDLNVQSPLLVKQETEFALDSSDPMVIEALDHAGLSYAPYTQSYAAVVLETADGATYCGRYAENAAFNPSMLPMQMALSNLTRHNRDFGEIRRAVLVESSQGKISLVGATMDALHAVAAIELEHIVVDPV

SEQ ID NO: 142510 - protein, 296 aa, Unknown
  Bacterial polypetide isolated from the Sargasso Sea
MQDRFIRSITQLPTPLADALIPLLHQGFAGHIDAQQLAELVKSSNMTESEVLLALLPIAAALAKPPISEFYVGAIAKGKSGDIYMGANLELPGEALFHSVHAEQSAISHAWLSGESQIVDMIVNASPCGHCRQFMNELVEGGQIKIHLPSQDSHLLSYYLPYAFGPKDLNVQSPLLVKQETEFALDSSDPMVIEALDHAGLSYAPYTQSYAAVVLETADGATYCGRYAENAAFNPSMLPMQMALSNLTRHNRDFGEIRRAVLVESSQGKISLVGAAMDALHAVAAIELEHIVVDPI

SEQ ID NO: 142511 - protein, 214 aa, Unknown
  Bacterial polypetide isolated from the Sargasso Sea
MFVANQIKNLIEEKASKGEYAVLGLATGVSPIYLYKELVKMHESGLSFSNVITFNLDEYYPMDPKAIQSYHRFMEENLFDKIDILKENINIPKGTLTMDEIPDYCKQYEEKIDDLGGIDIQILGIGRTGHIGFNEPGSTSRSYTRLVTLDKKTRRDASKDFKSIESVPRKAITMGVGTIFKAKSIYLMAWGEKKSKIVSKAVESNVSPLIPATF

SEQ ID NO: 142512 - protein, 123 aa, Unknown
  Bacterial polypetide isolated from the Sargasso Sea
MQKRGLDIQILGIGRTGHIGFNEPGSELDSVTRQVTLAQITIDDAAPGFGGVENVPAKAITMGVASVLKARCIYLMAYGENKAQIVSDTLTNDITDQVPATYLQKHSNTVFVLDTEASALLPA

SEQ ID NO: 142513 - protein, 247 aa, Unknown
  Bacterial polypetide isolated from the Sargasso Sea
MEKIQNKVFASAKEGTLFVANQIKNLIEEKASKGEQAILGLATGVSPISLYKELVKMHKQGLSFSNVVTFNLDEYYPMDPKAIQSYHRFMEEHLFDKIDILKDNINIPKGTLTMDEIPKYCKQYEDKIDELGGIDIQILGIGRTGHIGFNEPGSTFRSFTRLVTLDKKTRRDASKNFKSIESVPRKAITMGVGTIFKAKSIYLMAWGEKKAQIISKAVESNVSHLIPATFLQNHPNATLIIDTAAAS

SEQ ID NO: 142514 - protein, 206 aa, Unknown
  Bacterial polypetide isolated from the Sargasso Sea
MSFQDCTSFNLDEYVGLPPEDERSYHHYMRTHLFDQVDMDPEHVHLPNGCAGDLRQACRDYEQKIKESGGIDLQVLGIGANGHIGFNEPTGSLASRTWVKILSEQTIRDNAVYFDRPEDVPRHVVTMGIATVMETRHCLLLANGAKKADAVRNMIEGPVSASCPASILQMHRRVTIVLDEEAAYLLTFKDHYKWVEQNKLDWQKLD

SEQ ID NO: 142515 - protein, 192 aa, Unknown
  Bacterial polypetide isolated from the Sargasso Sea
MVLPTGSTPLGLYDELVKRELDWSNITTFNLDEYVINPNHLQSYHNFMRMNLFDKTNIYPKNYNFPNRNTQAYEDKIKEKGGIDLCILGIGTNGHIAFNEPCSSFESRTRVVNLAPQTIRDNSRFFDSIDDVPKQAITMGLGTIMESKRIILMAQGHKKKEILDKALFGKITEEIPASVLQLHENMEAVYCD

SEQ ID NO: 142516 - protein, 258 aa, Unknown
  Bacterial polypetide isolated from the Sargasso Sea
MIRDTPEEGARVASRLVRKILSTRSNPVLGLATGGTPLRLYREMIRMHQAGELSFQDCTSFNLDEYVGLPPEDERSYHHYMRTHFFDQVDMAPEHIHLPNGCAGDLRQACRDYEQKIKESGGIDLQVLGLGANGHIGFNEPTGSLASRTWVKILSEQTMRDNAVYFDRPEDVPRHVVTMGIATVMETRQCLLLANGAKKADAVRNMIEGPVSASCPASILQMHRRVTIVLDEEAAYLLTFKDHYKWVEQNKLDWQKLD

SEQ ID NO: 142517 - protein, 258 aa, Unknown
  Bacterial polypetide isolated from the Sargasso Sea
MIRDTPEEGARVASRLVKKILSSRSNPVLGLATGGTPLRLYREMIRMYQAGELSFQDCTSFNLDEYVGLPPEDERSYHHYMRNHLFDQVDMDPENIHLPNGCAGDLRQACRDYEQKIKESGGIDLQVLGIGANGHIGFNEPTGSLASRTWVKILSEQTMRDNAVYFDRPEDVPRHVVTMGIATVMETRHCLLLANGAKKADAVRNMIEGPVSASCPASILQMHRRVTIVLDEEAAYLLTFKDHYKWVEQNKIDWQKLD

SEQ ID NO: 142518 - protein, 269 aa, Unknown
  Bacterial polypetide isolated from the Sargasso Sea
MEVLIFPDAESLAKKSADLVESQITKYADSVLGLATGSTPLGLYRELIERHKTHGLSFKKVKTFNLDEYVGIPSDHPQSYRTFMDEHFFNQIDIEKSNTKVPEGMAENPLEIGPAYEKSIEEAGGLDLQVLGVGTDGHIGFNEPTSSLGSITRVKTLTQQTIEDNSRFFEPDEFQPKLAITMGIKTILDARRILLLANGENKAQAVRDMVEGPLSAFCPASALQLHQRTTVLIDEPAASKLTLKGYYKFVGEMQDDLLRKHRPSDWISR

SEQ ID NO: 142519 - protein, 509 aa, Unknown
  Bacterial polypetide isolated from the Sargasso Sea
DGDMDKKMVDKFCKEYEKKIKSFGGMIFQILGIGANGHIGFNEPGSNLNSITRLVKLDYQTRHDARLNFNGIKNVPSSAITMGIKTILASKRIILMAWGKSKSNAIKNAVEVRQNVKVPASLIQSHGNATIILDKDSSSLLTRISQPWQVGEQPLDDEMKNRAIHWLSSKTEKPILRLTEKDYNQNNLSDLLVQKSHYDINLEAFNKLQRTITGWPGGKPNADDTHRPERKNPAQKRVIIFSPHPDDDVVSMGGTFDRLVSQGHDVHVAYQTSGNIAVSNEEVLKFVELYEDFFDRSSNLISELKNLLSDEKKIIKDRSVRKLASLIREKESLAATRFIGVNDSNVHFLKLPFYETGKIKKNKPTSKDLKIMYDLIKSIKPHQIFAAGDLADPHGTHKVCIELLFESLKHLKKLNFMKDCWVWLYRGAWHEWDSHEIDMAVPLSPEQVLRKRRAIFYHQSQNNSVMFQGDDEREFWQRVEERNREIAITYNDLGMADYQAMETFRRYHF

SEQ ID NO: 142520 - protein, 81 aa, Unknown
  Bacterial polypetide isolated from the Sargasso Sea
MRIRSNTYQKVCHLISNNIRDLVRTHSNPVLGLATGSTPIGIYQELSKMRDTNFSDTITFNLDEYVGLNGWHPQSYNHFMY

SEQ ID NO: 142521 - protein, 171 aa, Unknown
  Bacterial polypetide isolated from the Sargasso Sea
MSEYFGLGLATGSTPLGIYKYMRDETWDSKKVFTYNLDEYADLPYNHPQSYEHFMEENLFAYRQFRKSYFPSEKNYRNYDVMIQRFPIDIQILGIGTNGHIAFNEPGTSRDSLTRKVELTDNTRKDNSRFFDSMDDVPTHAYSMGIESIMRAKQIYLLANGKHKKDILEKA

SEQ ID NO: 142522 - protein, 209 aa, Unknown
  Bacterial polypetide isolated from the Sargasso Sea
MIQLQNNWIPNSSLNQVKPGLNEEEENISTYEKSIFQERINLEIYKNSEEGSKIAANEIAELIRKKQKVGKNCILGLATGSSPISVYKKLIQIHKNEGLSFKNVITFNLDEYVPMNPKSKHSYHLFMYENLFNHIDIKKENIYIPKGDLDVKKIQDHCMGFEKKIKDYGGIDLQLLGIGRTGHIGFNEPGALRSSITRLVNIDFLTKFD

SEQ ID NO: 142523 - protein, 163 aa, Unknown
  Bacterial polypetide isolated from the Sargasso Sea
NLDEYVGLDKHHEQSYHYFMNKHLFSNLNFRKHYFPTEENYNEYDLMIKNSGGIDIQILGIGTNGHIAFNEPGSNRYSSTRIVDLTENTIKDNSRFFESIEDVPTQAYTMGMSSIMGAEKIYLVAVGKHKKEILEEAVYGDVTEDIPASLLQEHPNCEVYYSE

SEQ ID NO: 142524 - protein, 46 aa, Unknown
  Bacterial polypetide isolated from the Sargasso Sea
MNLDKFEKYSLTFGPTPIEYLPRLTEAIGADVEIYAKRDDCNSGLA

SEQ ID NO: 142525 - protein, 67 aa, Unknown
  Bacterial polypetide isolated from the Sargasso Sea
MNLNKFEKYSLTFGPTPIEYLPRLTEAIGADVEIYAKRDDCNSGLAMGGNKLRKLEYIVPRCNCFRS

SEQ ID NO: 142526 - protein, 161 aa, Unknown
  Bacterial polypetide isolated from the Sargasso Sea
KFANKKKKLGFKFDYFIVCVVTGSTQAGMIVGFAEDNRADRVIGIDASATYDQTRTQVKQIVDNTAELVELGRNVRDDEIIINPDYAYPAYGVPSEETNSAIRLAARTEALITDPVYEGKSMQGLIDLANKNFFPEHSKILYAHLGGAPALNGYSYYYKDG

SEQ ID NO: 142527 - protein, 188 aa, Unknown
  Bacterial polypetide isolated from the Sargasso Sea
SGGKPYAIPAGASVHKYGGLGYVGFAEEVRMQEKEMSLKFDYIIVCVVTGSTQAGMIVGFAEDDRAHRVIGIDGSGTPDKLAKQVREIVDNTADLVELGRTIRDDEIIIIPDYAYPAYGVPSEETNEAIRMAAKTEAMITDPVYEGKSMQGMIDLARKGYFKKGSKILYAHLGGVPAINGYSYTYRNG

SEQ ID NO: 142528 - protein, 217 aa, Unknown
  Bacterial polypetide isolated from the Sargasso Sea
MGADSRLVPDGFDIGIRKSWEDAIQSVKDSGGKPYAIPAGASVHKYGGLGYVGFAEEVRMQEKEMSLKFDYIIVCVVTGSTQAGMIVGFAEDDRAHRVIGIDGSGTPDKLVKQVREIVDNTADLVELGRTIRDDEIIIIPDYAYPAYGVPSEETNEAIRMAAKTEAMITDPVYEGKSMQGMIDLARKGYFKKGSKILYAHLGGVPAINGYSYTYRNG

SEQ ID NO: 142529 - protein, 272 aa, Unknown
  Bacterial polypetide isolated from the Sargasso Sea
SGADTLVSIGGVQSNHTRQVAAVAAKIGMKCHLVQESWVPFEDPVYDKVGNILMSRLMGAKTELVDEGFDIGIRESWKRAIDQVKKNGGKPYPIPAGASEHKYGGLGYVGFAEEVRNQENEMEINFDYIIVCTVTGSTHAGMVVGFSSDNRQQKVIGIDASCTPIQTKAQVLKIAQNTADLIELNKQLTNDDIVLIEDYAYPEYGVPSNETNDAISLCAKLEGMITDPVYEGKSMQGLIDLVKKGFFPEGSNILYAHLGGVPAINGYHTIYS

SEQ ID NO: 142530 - protein, 52 aa, Unknown
  Bacterial polypetide isolated from the Sargasso Sea
MKLLDQFERYPLTFGPTPIESLPRLTEALGGDVAIYAKRDDCNSGLALGETS

SEQ ID NO: 142531 - protein, 228 aa, Unknown
  Bacterial polypetide isolated from the Sargasso Sea
MEKVLVTGASGFIAEHCIIELLKNGYTVKGSLRSMNREQEVRDAVKTETDDTKLEFCKLDLLEDEGWEDAMWDCDYLMHVASPFVIEDPKDENELIKPAKEGTLRALNAAKKAGIKRVVLTSSVAAVNSHMMSGTSDHTTWTDINSKYVTPYQKSKTIAEKAAWDFYNNQDNSNKMELAVINPGGVMGPQLGNDLGGASTQIVSQLISGKFPMIPALSFPFIDVRDVA

SEQ ID NO: 142532 - protein, 251 aa, Unknown
  Bacterial polypetide isolated from the Sargasso Sea
IEDLKDENDFIKPAKEGTLRALNAAKKAGIKRVVITSSVAAINSHMMSGKCDHNTWTDINSKYVTPYQKSKTIAEKAAWDFYNSQDDNKIEMVVVNPGGVMGPQLGNDLGGASTQIVSQLISGKFPMIPALSFPFIDVRDVAILHLRAMITPEANGKRFIAAHAEPTWMFQVAKVLSKAGYGKIKLKKAPSLILKLIGLFDNKTKSLIPMLDKYVPCDISQTVEILKWKPMPWEQAFIEHAKSIEAIEDKA

SEQ ID NO: 142533 - protein, 336 aa, Unknown
  Bacterial polypetide isolated from the Sargasso Sea
MALAKDMPSYKKLFKYMLTMSLVLTLIHILIAFTPIFFFVARDLMNVPESLLEPGKIGLQIMTPWTLMIAWRRLNQGVMIKHGSSNMVAIGTSIRLITLVLVLSYGRWFSNLSGIVAGSSAVALAVTAEAIYAQLAVRKILRKTLPKENVSNQITRKSFTKFYLPLAITPLASLLIHPVGSAGMSRMPEALPSLAAWPVVYGLVFITRSMGFAFNEVVVALLPRPNGKYELLRFTRILAFSTSAFLGLLALTPIGSYWFIYISGLSSELAHLSSITLIFAVIMPSYQVYQAWYAGLLVNKNQTNGISYAVLVYAIIAIIGLWIGTHFASFPGIYWA

SEQ ID NO: 142534 - protein, 115 aa, Unknown
  Bacterial polypetide isolated from the Sargasso Sea
MHNSPLYAAIDLGSNSFHMLVVREVASALRTVTKVKRKVRLAAGLDPEFRLSRAAMERGWDCLRLFSEQLQDIPADNIRVVGTATLRLATNVDEFLSEAERVLNHSIEIISGEEE

SEQ ID NO: 142535 - protein, 151 aa, Unknown
  Bacterial polypetide isolated from the Sargasso Sea
MGRKLGNDLGGASTQIVSQLISGKFPMIPALSFPFIDVRDVAILHLRAMITPEADGKRFIAAHSEPTWMFQVAEVLSKAGYGKIKLKKAPSLILKLIGLFDNKTKSLIPMLDKYVPCDISQTVEILKWKPMPWEQAFIEHAKSIEVIEDKA

SEQ ID NO: 142536 - protein, 337 aa, Unknown
  Bacterial polypetide isolated from the Sargasso Sea
MEKVLVTGASGFIAEHCIIELLKNGYSVKGSLRSMNREQEVRDAVKTETDDTKLEFCKLDLLEDDGWEDAMWDCDYLMHVASPFVIEDPKDENELIKPAKEGTLRALNAAKKAGIKRVVLTSSVAAVNSHMMSGTSDHTTWTDIDSKYVTPYQKSKTIAEKAAWDFYNNQDNSNKMELAVINPGGVMGPQLGNDLGGASTQIVSQLISGKFPMIPALSFPFIDVRDVAILHLKAMTTPDADGKRFIAAHSEPTWMYQVAEVLSAAGYEKIKLKKAPSFMLKLIGLFDNKTKSLVPMLDKYVPCDNSQTVEILNWKPMPWEQAFIEHAKSIEAIKDKA

SEQ ID NO: 142537 - protein, 266 aa, Unknown
  Bacterial polypetide isolated from the Sargasso Sea
MEKVLVTGASGFIAEHCIIELLKKGYSVKGSLRTMGREQEVRDAVKTETDDAKLEFCKLDLLDDDGWEEAMRDCNYLMHVASPFVIEDPKDENELIKPAKEGTLRALNAAKKAGIKRVVLTSSVAAVNSHMMSGTSDHTTWTDINSKYVTPYQKSKTIAEKAAWDFYNNQDNSNKMEMAVINPGGVMGPQLGNDLGGASTQIVSQLISGKFPMIPALSFPFIDVRDVAILHVKAMTTPEADGKRFIAAHSEPTWMYQVAEVLSAAG

SEQ ID NO: 142538 - protein, 329 aa, Unknown
  Bacterial polypetide isolated from the Sargasso Sea
MNDTFGVLDLGSNSFHLVISEYHDNLFRKKYKKKEYTYLGSGLKPDGTIEAKLADKSIQALDSFKVNIEEQNPTFLKVIATNSFRRISDYDFLTQSEKALGNKINIITPLEEANLIYQGVTHTTEINYKNFYIIDIGGSSSEVITVKDKKLTNLASFQFGSSTINNYFFDIGDIKRQWYKACFHVFNEINKSSDSASLQGKYVYRGSENKAIDKLLINSNDNIAFGGSGTIKAVHKALKAILIDQDEIDISKIDYLVQILLNQHDKVYDSDFKKITLVINPERLRVFLAGLSILHSLMVILDISILSKANGALREGAMYELLKDSNIKS

SEQ ID NO: 142539 - protein, 44 aa, Unknown
  Bacterial polypetide isolated from the Sargasso Sea
KQIEHFFEHYKDLEEGKWVKIDGWADAAAAKEEITASIARFEAE

SEQ ID NO: 142540 - protein, 135 aa, Unknown
  Bacterial polypetide isolated from the Sargasso Sea
MDLSSIPPSPMKGIVNIVVEIPAGSRNKYEYCSDAGIMALDRVLHSSVRYPFDYGFIPNTLADDGAPLDAMVIMDEPTFAGCLIKARPIGVLDMHDCGAYDGKLLCVPVANPRQANIVSINQIAPNQLEDVAEFF

SEQ ID NO: 142541 - protein, 297 aa, Unknown
  Bacterial polypetide isolated from the Sargasso Sea
SPVIFIALAFGLITYLDISLNVWFCVLTGAVGGVLIGLITEYYTGGTPVEKIAKSGETGSATVMISGLSVGMQSVVIPILILATIIFISTTLFDLYGVGIAAVGMLATVGITMAIDAYGPVADNAGGIAEMSGMGDDVREITDSLDELGNTTAAIGKGFAIGAAALAALAIIAAFVQVVGVNNDGFELILSDPIVLVGMFIGGSIPFLVSSITMTAVGDAAFEMINEIRRQFREIPGILEGTGEPDTDKCVEIATRAALQRMLLPGVIAVSMPPLVGLLLGAKALGGMLAGGLLGCV

SEQ ID NO: 142542 - protein, 199 aa, Unknown
  Bacterial polypetide isolated from the Sargasso Sea
MDNLIIPPALGLLGMVMAFVVYMLVMKYPDGEDKVKKIGDQIHTGALTFMKTEYKYLFIFMAVIVVLAWYALGPYTAIAVIVGALCSSIAGFIGMYAATKANVRTATAAQKDGSAAALTVSFYGGSIMGLCVASLGLIGLGGLYFFYIPAEIDPHKLEGFAMGASVVALFSRVGGGIFTKSADVGADLVGKIEAGIPED

SEQ ID NO: 142543 - protein, 285 aa, Unknown
  Bacterial polypetide isolated from the Sargasso Sea
MSLPLALASIGLISSILGILIVRAQSAKAPAAALRTGTIGSPVIFIALAFGLISYLDISLNVWFCVLTGAVGGVLIGLITEYYTGSTPVEKIAKSGETGSATVMISGLSVGMQSVVIPILILATIIFISTTLFDLYGVGIAAVGMLATVGITMAIDAYGPVADNAGGIAEMSGMGEDVREITDSLDELGNTTAAIGKGFAIGAAALAALAIIAAFVQVVGVNNDGFQLILSDPIVLVGMFIGGSIPFLVSSITMTAVGDAAFEMINEIRRQFREIPGILEGTGEP

SEQ ID NO: 142544 - protein, 281 aa, Unknown
  Bacterial polypetide isolated from the Sargasso Sea
FIVKLQSAKAPASALRSGTLLAPVIFVAMAYFIVDSFEGVEMKVWWCVIAGAVGGVLIGLITEYYTGGKPVRKIAESGETGSATVMISGLSVGMQSVVIPIVILAGIIFVSTQLADVYGVGIAAVGMLATVGITMAIDAYGPVADNAGGIAEMSGMGKEVRDITDSLDELGNTTAAIGKGFAIGAAALAALAIISAFSTVVTKANPEFSLALTNPIVLVGMFIGICIPFLVSSITMTAVGDAAFEMINEIRRQFREISGLMEGTAEPDSQKCVEIATTAAL

SEQ ID NO: 142545 - protein, 161 aa, Unknown
  Bacterial polypetide isolated from the Sargasso Sea
PRNQGASLTSYELNEEGVPNTVIADNAGGILMQRGQVDMCIVGTDRTLSTGDVANKIGTYLKALAAKDNNVPFYVALPSSTIDWNIKDFKKIPIEERNSEELSHVEGLDENKNLKKVRIYPEKSKTLNLAFDITPSKYVTGLITEKGVCEASEKGLKELFK

SEQ ID NO: 142546 - protein, 193 aa, Unknown
  Bacterial polypetide isolated from the Sargasso Sea
MNLVPIILGFSGLLAAYLLYAAVKKYPAGEKNLTDISDEIHLGAMAFMKKEYSILFVFSLILVFGIYIGLGLDSTIAFIVGALSSSITGFIGMYTATKANVRTATAAQNSGVSDSLSVAFFGGSIMGLTVAAMGLLGLGLLYILYGSDPTTASTIHGFGMGASTVALFSRVGGGIFTKSADVGADLVGKVEKD

SEQ ID NO: 142547 - protein, 280 aa, Unknown
  Bacterial polypetide isolated from the Sargasso Sea
MPLALASIGLICSMIGIYSVKLFSSKSPEVALRIGTMGSSIIFIIAAFILIKELGVSVNVWVAVLTGAVGGIVIGLVTEYYTGGSPIRKIAQGGETGPATIMITGLAVGMQSVAIPVITICAIIFISSHFTGLYGVGIAAVGMLSTVGITMAIDAYGPVADNAGGIAEMAELGKETRQITDSLDEVGNTTAAIGKGFAIGAAALAALALISAYIEKVSLGNEDFILKINDPIVLSGMFLGAIFPYLVSSITMTAVGDAAFDMIKEIRRQFKEIPGLMEGT

SEQ ID NO: 142548 - protein, 269 aa, Unknown
  Bacterial polypetide isolated from the Sargasso Sea
AVGGIMIGLITEYYTGGDTEDSPVGKIAKSGETGPATVMITGLSVGMQSVVLPLFVIAGIIGVSTYFSGLYGVGIAAVGMLATVGITMAIDAYGPVADNAGGIAEMSGMKPEVREITDSLDELGNTTAAIGKGFAIGAAALAALAIIAAYMLATGLESLSLNDPRVLMGMFIGGTIPFLVSSITMTAVGDAAFEMIEEIRRQFREIPGLLEGKAEPDNAKCVDIATKAALNKMLLPGAIAIGSPVLVGFALGPVHLGGMLAGALLGCVL

SEQ ID NO: 142549 - protein, 141 aa, Unknown
  Bacterial polypetide isolated from the Sargasso Sea
MDLSSIPPSPMKGIVNIVVEIPAGSRNKYEYCSDAGIMALDRVLHSSVRYPFDYGFIPNTLADDGAPLDAMVIMDEPTFAGCLIKARPIGVLDMHDCGAYDGKLLCVPIANPRQDNIVSINQIAPNQLEDVAEFFRTSKRT

SEQ ID NO: 142550 - protein, 270 aa, Unknown
  Bacterial polypetide isolated from the Sargasso Sea
NIGSPVIFIALAFGLITYLDISLSVWFCVLTGAVGGVLIGLITEYYTGSTPIEKIAKSGETGSATVMISGLSVGMQSVVIPILILATIIFISTTLFDLYGVGIAAVGMLATVGITMAIDAYGPVADNAGGIAEMSGMGEDVREITDSLDELGNTTAAIGKGFAIGAAALAALAIIAAFVQVVGVNNDGFQLILSDPIVLVGMFIGGSIPFLVSSITMTAVGDAAFEMINEIRRQFREIPGILEGTGEPDTDKCVEIATRAALQRMLLPGV

SEQ ID NO: 142551 - protein, 61 aa, Unknown
  Bacterial polypetide isolated from the Sargasso Sea
AWDNAKKYIEAGGGAGKGSEEHKAAVIGDTIGDPFKDTSGPAMNIVIKVMTIVSLIFASAF

SEQ ID NO: 142552 - protein, 37 aa, Unknown
  Bacterial polypetide isolated from the Sargasso Sea
AGIPEDDPGNPAVIADNVGDNVGDCAGMAADLLKLMQ

SEQ ID NO: 142553 - protein, 240 aa, Unknown
  Bacterial polypetide isolated from the Sargasso Sea
LKKSAEDLIASRPTAINLKWAVDRMMKRISGINSNEVFKIALNEAKKIVEEDVTFCKNIGENGLKIIEEISNKKKDKINILTHCNAGWLATINWGTATSPIYHAHQKGIKVHVWVDETRPRNQGANLTSYELNEEGISNTIITDNAGGILMQRGQVDMCIVGTDRTLSNGDVCNKIGTYLKALSAKDNNVPFYVALPSSTIDWSIKDHKQIPIEERNSEELSHVEGVDENNEIKKVRIYP

SEQ ID NO: 142554 - protein, 91 aa, Unknown
  Bacterial polypetide isolated from the Sargasso Sea
IRCRAVGMFRMTDEAGGDDKVLCVPAGDPRMEHVRDIHHVAEFDRLEIQHFFEVYKDLEPGKSVEGATWVGRSDAEIEIHQSWERYRSSHT

SEQ ID NO: 142555 - protein, 155 aa, Unknown
  Bacterial polypetide isolated from the Sargasso Sea
NLTSYELNEEGVSNTVITDNAGGILMQRGEVDMCIVGTDRTLSNGDVCNKIGTYLKALSAKDNNVPFYVALPSSTIDWSIKDHKQIPIEERNSEELSHVEGVDENNEMKKVRIYPQKSKSLNLAFDVTPAKLVTGLITEKGICEASEKGLKGLFK

SEQ ID NO: 142556 - protein, 248 aa, Unknown
  Bacterial polypetide isolated from the Sargasso Sea
NDKDILNIAIDEAKSITEEDVGFCKNIGLNGLKIIEKIFDKKKDTVNILTHCNAGWLATIDWGTATSPIYHAHQKGIKVHVWVDETRPRNQGANLTSYELNEEGVSNTVITDNAGGILMQRGQVDMCIVGTDRTLSNGDVCNKIGTYLKALSAKDNKIPFYVALPSSTIDWNIKDHKEIPIEERNSEELSHVEGVDENNKIKKIRIYPQKSKSLNLAFDVTPAKLVTGLITEKGICEASEKGLKGLFK

SEQ ID NO: 142557 - protein, 241 aa, Unknown
  Bacterial polypetide isolated from the Sargasso Sea
VALDEAKAICEEDISFCKNIGLNGLKLIEEISKKKKDTVNILTHCNAGWLATIDWGTATSPIYHAHQKGIKVHVWVDETRPRNQGANLTSYELNEEGISNTVIADNAGGILMQRGQVDMCIVGTDRTLSNGDVCNKIGTYLKALSAKDNNVPFYVALPSSTIDWNIKDHKKIPIEERNSEELSHVEGVDENNKIKKVRIYPQKSKSLNLAFDVTPAKLVTGLITEKGVCEASENGLKGLFK

SEQ ID NO: 142558 - protein, 181 aa, Unknown
  Bacterial polypetide isolated from the Sargasso Sea
MDLSSIPPSPMKGIVNIVVEIPAGSRNKYEYCSDAGLMALDRVLHSSVRYPFDYGFIPNTLADDGAPLDAMVIMDEPTFAGCLIKARPIGVLDMHDCGAYDGKLLCVPVANPRQANIVSINQIAPNQLEDVAEFFRTSKGLDGRTVQIDGWRDFDVVENLLKSCIPLKKKNFKVLKKSKIS

SEQ ID NO: 142559 - protein, 53 aa, Unknown
  Bacterial polypetide isolated from the Sargasso Sea
KRKLGGKGSETHSATVVGDTVGDPFKDTSGPSMNILINVMAIVSLVIAPLLSI

SEQ ID NO: 142560 - protein, 81 aa, Unknown
  Bacterial polypetide isolated from the Sargasso Sea
MDLSSIPPSPMKGIVNIVVEIPAGSRNKYEYCSDAGIMALDRVLHSSVRYPFDYGFIPNTLADDGAPLNAMVIMDEPTFAG

SEQ ID NO: 142561 - protein, 178 aa, Unknown
  Bacterial polypetide isolated from the Sargasso Sea
MQSSFELLYLITFTGILAVAYSYLLSGQILSSSPGNDKMQEIAGAIQIGAKAYLNRQYKTIAIVGFIVLIIVSYFFSLLVGLGYFIGAFLSGAAGYVGMLISVKANVRTAEASRKSLQDGLTIAFKSGAITGLLVAGLALLAITVYYTVLLSLGVENREIINALVALGFGASLISILR

SEQ ID NO: 142562 - protein, 301 aa, Unknown
  Bacterial polypetide isolated from the Sargasso Sea
GSDVYESYIVTILASLLIAALIGSPENFAYPILIGASGLVASIIGTATIGSRKITDVMKPLNISFYVSAAIAIALNFVFTYVLLGTSPIAYALFGSTVIGVILVPVIQKITDYYTNANSKPVEEISESAKWGYASLTLMGIIKGLQSTGPFMIALVAAIIISFALTSSMAPEGSDPLLYGIFGTSLTAMAMLSLAGIVLSIDAFGPIADNAGGIVEMTEMGEDNRKITDEIDAVGNTTKAVTKGFAIASAALAALAMIQAFQFEASHYFKDLVIDYGLSNPSVVIGLLVGGLFHLSLLVNN

SEQ ID NO: 142563 - protein, 201 aa, Unknown
  Bacterial polypetide isolated from the Sargasso Sea
ILTHCNAGWLATIDWGTATSPIYHAHQKGIKVHVWVDETRPRNQGANLTSYELNEEGISNTVITDNAGGILMQRGEVDMCIVGTDRTLSNGDVCNKIGTYLKALSAKDNNVPFYVALPSSTIDWSIKDQKQIPIEERNSEELSHVEGIDENNEIKKVRIYPQKSKSLNLAFDVTPAKLVTGLITEKGVCEASEKGLKGLFK

SEQ ID NO: 142564 - protein, 138 aa, Unknown
  Bacterial polypetide isolated from the Sargasso Sea
TDNAGGILMQRGEVDMCIVGTDRTLSNGDVCNKIGTYLKALSAKDNNVPFYVALPSSTIDWGIKDHKQIPIEKRNSEELSHVEGIDENNEIKKVRIYPQKSKSLNLAFDVTPAKLVTGLITEKGICEASEKGLKGLFK

SEQ ID NO: 142565 - protein, 222 aa, Unknown
  Bacterial polypetide isolated from the Sargasso Sea
DIPSQNIFYSTIVCLAVGYLISAFTEYYTALGKKPVLNIVQNSSTGAATNIIAGLATGMKSTFSSVILFALAIWGAYELGGFYGVAISASAMMATTAMQLAIDAFGPISDNAGGVAEMSELPKEVRERTDILDSVGNTTAATGKGFAIASAALTALALFAAYVTFTGIDGINIFKADVLAALFIGGMIPVIFSALAMESVGKAAMKMVQEVRRQFKEIPGIL

SEQ ID NO: 142566 - protein, 269 aa, Unknown
  Bacterial polypetide isolated from the Sargasso Sea
MCNVIGLACGVLIGEATEQATSFAYRPTISIAEAGRTGAATVIIQGLGVGMMSCVPPAFLVVVTVLACYALGSVYGVAIAAVGMLSTLGVTLATDAYGPVADNAGGIAEMAELGHGVREITDKLDALGNTTAATGKGFAVGSAVLTALALMTAFAQQSGVHSISLTEPIVLAGTLVGAVLPYLFASMSMLSVRAAAQKIIEEIIYQFYDDPELEGLLAGKEGVEPNSKRCVEIATKSSLREMIMPGIVATFMPSVVGLLVGAKALGGML

SEQ ID NO: 142567 - protein, 106 aa, Unknown
  Bacterial polypetide isolated from the Sargasso Sea
MDLSSIPPSPMKGIVNIVVEIPAGSRNKYEYCSEAGIMALDRVLHSSVRYPFDYGFIPNTLADDGAPLDAMVIMDEPTFAGCLIKARPIGVLDMHDCGAYDGKLLC

SEQ ID NO: 142568 - protein, 37 aa, Unknown
  Bacterial polypetide isolated from the Sargasso Sea
QRMTPRNPATIADNVGDNVGDVAGIGADLFESYVVES

SEQ ID NO: 142569 - protein, 243 aa, Unknown
  Bacterial polypetide isolated from the Sargasso Sea
TEYYTGGKPVRKIAEGGETGAATIMITGLAVGMQSVAIPVLAIVVIIFTANSFAGLYGVGMAAVGMLSTVGITMAIDAYGPVADNAGGIAEMSEMGKETREITDSLDEVGNTTAAIGKGFAISAAALAALALISAYIEKISGSDASFILAINDPLVLAGMFLGGIFPFLVSSMTMTAVGDAAFDMIKEIRRQFKEIPGLLEGKAKPDTAKCVDIATKAALRKMIAPGALAVLAPVVVGSILGP

SEQ ID NO: 142570 - protein, 184 aa, Unknown
  Bacterial polypetide isolated from the Sargasso Sea
MDLSSIPPSPMKGIVNIIVEIPSGSRNKYEYCSDAGIMALDRVLHSSVRYPFDYGFIPNTLADDGAPLDAMVIMDEPTFAGCLIKARPIGVLDMHDCGAYDGKLLCVPMANPRQANIVSINQIAPNQLEDVAEFFRTSKGLDGRTVQIDGWRDFDVVENLLKSCIPLKKKNFKVLKKSNIGKLN

SEQ ID NO: 142571 - protein, 42 aa, Unknown
  Bacterial polypetide isolated from the Sargasso Sea
VVGDTVGDPFKDTSGPSMNILINVMAIVSLVIAPLLTLNGML

SEQ ID NO: 142572 - protein, 275 aa, Unknown
  Bacterial polypetide isolated from the Sargasso Sea
MGSLLWSLRTGIFSAGVIVLAVTLFMALTNAFPMEIFWIILTGLIAGVIIGTASEIATSYEYSYTKNLAEQAKTGAATIIIGGLGLGMISTIIPTLVIIISMAIAHALGDFYGIALAAVGMLSTLGITLATDAYGPVADNAGGIAEQAKLKPEVRERTDALDSLGNTTAATGKGFAIGSAVLTAGALLFSYAQIAGISKIDIMQVEVLIGLIIGTLMPFVFSALTMQAVGSAAIDMVNEVRRQFKEIKGLMEGKAVADYAKAVEISTDGSLKAMI

SEQ ID NO: 142573 - protein, 172 aa, Unknown
  Bacterial polypetide isolated from the Sargasso Sea
IKVHVWVDETRPRNQGANLTSYELNEERIPNTVITDNAGGILMQRGQVDMCIVGTDRTLSNGDVCNKIGTYLKALSAKDNNVPFYVALPSSTIDWKIKDHKQIPIEERNSEELSHVEGIDENNEIKKVRIYPQKSKSLNLAFDVTPAKLVTGLITEKGICEASEKGLKGLFK

SEQ ID NO: 142574 - protein, 115 aa, Unknown
  Bacterial polypetide isolated from the Sargasso Sea
MSVDTILLYTIFAGILSIVYGFVTGSSILNASAGNARMQEIASAIQIGAKAYLNRQYKTIAIVGVVVLVIISFAFSLLVGIGYLIGAALSGIAGYVGMLVSVQANVRTAEASRKG

SEQ ID NO: 142575 - protein, 150 aa, Unknown
  Bacterial polypetide isolated from the Sargasso Sea
ELNEEGISNTIITDNAGGILMQRRQVDMCIVGTDRTLSNGDVCNKIGTYLKALSAKDNNVPFYVALPSSTIDWSIKDYRQIPIEERNSEELSHVEGVDKNNEIKKVRIYPQKSKSLNLAFDVTPAKLVTGLITEKGICEASENGLKGLFK

SEQ ID NO: 142576 - protein, 246 aa, Unknown
  Bacterial polypetide isolated from the Sargasso Sea
KDILKIALSEARSITDEDEKFCKNIGLNGLKIIEDISKKKKDRVNILTHCNAGWLATIDWGTATSPIYHAHQKGIKVHVWVDETRPRNQGANLTSYELNEEGISNTVITDNAGGILMQRGDVDMCIVGTDRTLSNGDVCNKIGTYLKALSAKDNNVPFYVALPSSTIDWNIKDHKKIPIEERNSEELSHVEGIDENNEIKKVRIYPRKSKSLNLAFDITPAKLVTGLITEKGVCEASEKGLKGLFK

SEQ ID NO: 142577 - protein, 254 aa, Unknown
  Bacterial polypetide isolated from the Sargasso Sea
GMGSDIFESYCGSMIASIAIAYTLGNKDMMMLPLALASTGLVASIIGIFIVKLQSAKAPASALRSGTLLAPVIFVAMAYFIINSFDGVGMNVWWCVIAGAVGGVLIGLITEYYTGGSPVKKIAESGETGSATVMISGLSVGMQSVVIPISILAGIILASTQLSGIYGVGIAAVGMLATVGITMAIDAYGPVADNAGGIAEMSGMGEEVREITDSLDELGNTTAAIGKGFAIGAAALAALAIISAFSAVVADANP

SEQ ID NO: 142578 - protein, 276 aa, Unknown
  Bacterial polypetide isolated from the Sargasso Sea
SIELIASRPTAINLKWAVDRMMKKLSGVNDKDILKIALDEAKAITEEDINFCKNIGLNGLKIIENIANKKKDTVNILTHCNAGWLATIDWGTATSPIYHAHQKGIKIHVWVDETRPRNQGANLTSYELNEEGISNTVITDNAGGILMQRGQVDLCIVGTDRTLSNGDVCNKIGTYLKALAARDNNIPFYVALPSSTIDWKIKDHRQIPIEERNSEELSYMEGVDDNNKITKVRIYPKKSKSLNLAFDITPAKFVSGLITEKGVCEASEKGLKGLFK

SEQ ID NO: 142579 - protein, 140 aa, Unknown
  Bacterial polypetide isolated from the Sargasso Sea
MDAIYWFALACGVVSLLYGIYAVRSVFAASTGSERMQEIAAAVQEGARAYLNRQYITIGIVGIVIFGILTGLLGYKVGIGFAIGAILSAAAGYIGMYVSVRANVRTAQAATEGLKAALSIAFRSGAVTGMLVVGLGLLGV

SEQ ID NO: 142580 - protein, 100 aa, Unknown
  Bacterial polypetide isolated from the Sargasso Sea
FTPIIIGLVLGQKEMLGGILAGVTVTGVLLAIFMSNAGGSWDNAKKYIESGNHGGKGSTAHKAAVVGDTVGDPFKDTAGPSLNILIKLISVVSLVIAPLI

SEQ ID NO: 142581 - protein, 64 aa, Unknown
  Bacterial polypetide isolated from the Sargasso Sea
EKIDPFQAEIKDLDDLSNKTKERIAHFFEHYKDLEKGKWVKLLGWGNRVEALGIIKDSIKQGEK

SEQ ID NO: 142582 - protein, 47 aa, Unknown
  Bacterial polypetide isolated from the Sargasso Sea
IAVYYYLLLSFNVEEREIVNALVALGFGASLISIFARMGGGIFTKGA

SEQ ID NO: 142583 - protein, 315 aa, Unknown
  Bacterial polypetide isolated from the Sargasso Sea
INAIKKMEVRGAPLIGATAAYGLVLSIIEKNDLSFLNKSSEDLIKSRPTAINLKWAVDRMMKKLSGKNDKEILNIALNEAKTIVEEDIKFCESIGKNGLKIIEEISNKKKDTVNILTHCNAGWLATIDWGTATSPIYHAHQKGIKVHVWVDETRPRNQGASLTSYELNEEGVPNTVITDNAGGILMQRGQVDMCIVGTDRTLSNGDVCNKIGTYLKALAAKDNNVPFYVALPSSTIDWSIKDHNKIPIEERNSEELSHVEGIDENNSIKKVRIYPQKSKSLNLAFDVTPAKYITSLITERGICEASERGLKNLFK

SEQ ID NO: 142584 - protein, 192 aa, Unknown
  Bacterial polypetide isolated from the Sargasso Sea
MTDNIALWLSISAGGLAILYGIFSAQWIVKQSAGNEKMQQIAGFIQEGANAYMNRQYRTIGIVGLVLFILLSVYLDIATGIGFAIGAIFSALAGYIGMFVSVRANVRTAEAARIGVNPALNIAFKGGAITGLLVVGLGLFGVAGYYLILMNMGMTSEDAIHSLVGLAFGGSLISIFARFGGGIFTKGADVGA

SEQ ID NO: 142585 - protein, 246 aa, Unknown
  Bacterial polypetide isolated from the Sargasso Sea
LSLRETGPATVMITGLSVGMQSVVLPLFVIAGIIGVSTYFSGLYGVGIAAVGMLATVGITMAIDAYGPVADNAGGIAEMSGMKPEVREITDSLDELGNTTAAIGKGFAIGAAALAALAIIAAYMLATGLESLSLNDPRVLMGMFIGGTIPFLVSSITMTAVGDAAFEMIEEIRRQFREIPGLLEGKAEPDNAKCVDIATKAALNKMLLPGAIAIGSPVVVGFALGPVHLGGMLAGALLGCVLMALM

SEQ ID NO: 142586 - protein, 177 aa, Unknown
  Bacterial polypetide isolated from the Sargasso Sea
MLNYLELLYLISFTGILAVAYSYLLSGQIISSSPGNAKMQEIAEAIQIGAKAYLNRQYKTIAIVGVIVLAIVTYFFNYLVGLGYFIGAFLSGVAGYVGMLISVKANVRTAEASRNSLQSGLTIAFKSGAITGLLVAGLALLAITIYYIILINLNVDNREIINALVALGFGASLISIF

SEQ ID NO: 142587 - protein, 313 aa, Unknown
  Bacterial polypetide isolated from the Sargasso Sea
GDSAKAIHLYKKAIELNPDRPFSYVNLFILYMDQGNYTKAIKLLEEAIDVRPEFSEYYVNLGLAYYRQGNLSKAIQSYEKAIALDYNYANAYNGLGLAYYHQGNLSKAIQSYEKAIALDPNFALAYYNLGIVYDYQGNTTKAIELYKKAIALDPNFALAYYNLGFAYKNQGNLTKAIQSYEKSIALDPDNADIYVNLGLAYKNQGNLTKAIQSYEKSIALDPDNADVYYNLGIVYDNQGNTTKAIQSYEKSIALDPDNADVYYNLGLAYKNQGNLTKAIQSYEKVIELFEKAIVLDPDHNPFYANAYAQPGGC

SEQ ID NO: 142588 - protein, 294 aa, Unknown
  Bacterial polypetide isolated from the Sargasso Sea
MSLPLALASIGLISSILGILIVRAQSAKAPAAALRTGTIGSPVIFIALAFGLISYLDISLNVWFCVLTGAVGGVLIGLITEYYTGSTPVEKIAKSGETGSATVMISGLSVGMQSVVIPILILATIIFISTTLFDLYGVGIAAVGMLATVGITMAIDAYGPVADNAGGIAEMSGMGEDVREITDSLDELGNTTAAIGKGFAIGAAALAALAIIAAFVQVVGVNNDGFQLILSDPIVLVGMFIGGSIPFLVSSITMTAVGDAAFEMINEIRRQFREIPGILEGTGEPDTDKCVEIA

SEQ ID NO: 142589 - protein, 183 aa, Unknown
  Bacterial polypetide isolated from the Sargasso Sea
HDDPMPDDSDEGWKIFACIQIGLVAGILIGECTEYCTSYAYQPTKSIMMAGKTGPATVIIQGLGVGMLSCVGPVVIIVAAILGCTSLSGEYGVAIAAVGMLSTLGITLATDAYGPVADNAGGIAEMAELPDDVRETTDALDALGNTTAATGKGFAIGSAVLTALSLLSAFKEEIGTPFAGESL

SEQ ID NO: 142590 - protein, 230 aa, Unknown
  Bacterial polypetide isolated from the Sargasso Sea
PIACIILIIYISTELTGLYGVGIAAVGMLSTVGITMAIDAYGPVADNAGGIAEMAGMPSETRVITDELDEQGNTTAAIGKGFAIGAAALAALAIISAFVETVSANRAEPLQLVLSNPTVLIGIFIGGAIPFLIASITMTAVGDAAFEMINEIRRQFKEIPGLLEGNAEPDTAKCVDIATAAALKKMLLPGVIAVSAPPLVGLGIGAEALGGMLAGGLLVCVLMALFMANA

SEQ ID NO: 142591 - protein, 242 aa, Unknown
  Bacterial polypetide isolated from the Sargasso Sea
EIALNEAKEICEEDIKFCKNIGENGLEIIEQIANKKKDKVNILTHCNAGWLATINWGTATSPIYHAHEKGIKIHVWVDETRPRNQGANLTSYELNEEGISNTVITDNAGGILMQRGQVDMCIVGTDRTLSNGDVCNKIGTYLKALSAKDNNVPFYVALPSSTIDWSIKDHKQIPIEERNSEELSHVEGIDENNEIKKVRIYPQKSRSLNLAFDVTPAKLVTGLITEKGVCEASENGLKELFK

SEQ ID NO: 142592 - protein, 145 aa, Unknown
  Bacterial polypetide isolated from the Sargasso Sea
DFSQKVNKDGPRVIDYLPYPFNYGFIPQTLIPLKEGGDGDALDIIVIGPNLKRGSVVKAKPIGAVEMLDKGEIDTKIISLSINDLGISYSNSIDDLNRDYIGVMEIIKVWLENYKGSEVKILNISGKNRALEYIKTFHSKFLSQK

SEQ ID NO: 142593 - protein, 143 aa, Unknown
  Bacterial polypetide isolated from the Sargasso Sea
MDLSSIPPSPMKGIVNIVVEIPAGSRNKYEYCSDAGIMALDRVLHSSVRYPFDYGFIPNTLADDGAPLDAMVIMDEPTFAGCLIKARPIGVLDMHDCGAYDGKLLCVPIANPRQDNIVSINQIAPNQLEDVAEFFRTSKGLDG

SEQ ID NO: 142594 - protein, 234 aa, Unknown
  Bacterial polypetide isolated from the Sargasso Sea
AITEEDEKFCKNIGLNGLKIIEDISNKKKDTVNILTHCNAGWLATIDWGTATSPIYHAHQKGIKVHVWVDETRPRNQGANLTSYELNEEGISNTVITDNAGGILMQRGEVDMCIVGTDRTLSNGDVCNKIGTYLKALSAKDNNVPFYVALPSSTIDWSTKDHKQIPIEERNSEELSHVEGIDENNEIKKVRIYPQKSKSLNLAFDITPAKLVTGLITEKGICEASKKGLKGLFK

SEQ ID NO: 142595 - protein, 303 aa, Unknown
  Bacterial polypetide isolated from the Sargasso Sea
MKTFPPNYPINDLALTGCLSLINLKVEDISIIANNSSCEDTVNLINVNGTVNEIRINDSFSDALDIDFSDLYISKIKIKSALNDCSDFSGGNYNLNELELNNCGDKALSVGEKSIIKLNNILAENVNIGIASKDSSVVTLKNAKMKNLKTCVSAYNKKQEFNGGIIKMQNLDCKNYFRKADIDYMSKIFEGDKNIVNNLYGSKYDPSALKVSKVKDEDAVKNFHKDYKTFYEDKSINAVIEIPAGMNEKWQVSKQTGSLSREFFMGKPRIINYEPYPINYGMIPRTALPTRIGGDGDPLDIIV

SEQ ID NO: 142596 - protein, 184 aa, Unknown
  Bacterial polypetide isolated from the Sargasso Sea
MDLSSIPPSPMKGIVNIIVEIPAGSRNKYEYCSVAGIMALDRVLHSSVRYPFDYGFIPNTLADDGAPLDAMVIMDEPTFAGCLIKARPIGVLDMHDCGAYDGKLLCVPIANPRQDNIVSINQIAPNQLEDVAEFFRTSKGLDGRTVQIDGWRDFDVVENLLKSCIPLKKKNFKVINKSKIGKLN

SEQ ID NO: 142597 - protein, 175 aa, Unknown
  Bacterial polypetide isolated from the Sargasso Sea
MSFNHVPAGKDLPQDFNVIIEIPAQSDPVKYEADKELGLLVVDRFIGTGMRYPVNYGYIPQTLSGDGDPVDVLVITPFPLLAGSIVRSRVLGMLQMTDESGVDAKLVAVPHDKVCPMTANLKSIDDVPEYLKDQIKHFFEQYKALEKGKWVKVEGWAGIEAAHKEITDGAANYKK

SEQ ID NO: 142598 - protein, 186 aa, Unknown
  Bacterial polypetide isolated from the Sargasso Sea
MENLPMISALVGVAGVVFAAILAGVVKGAPAGNEKMREIADAISEGAIAYLNRQLITMSMTGIVIFVIIWLSIDLKTGVGFLVGAVASFIAGYVGMRVSVLANVRTAEAARQGLAAGLSLAFKGGAVTGMMVAGLALTAVAGFYHFTHDVIALVALGFGGSLISIFARLGGGIFTKGADVGADLVG

SEQ ID NO: 142599 - protein, 59 aa, Unknown
  Bacterial polypetide isolated from the Sargasso Sea
LGGKGSDTHAAAVVGDTVGDPFKDTSGPAMNILINVMAIVSLVIAGLLPVDGLIVTLFN

SEQ ID NO: 142600 - protein, 247 aa, Unknown
  Bacterial polypetide isolated from the Sargasso Sea
NDKNILKVALAEAKKITEEDEKFCKNIGLNGLKIIEEIANKKKDTVNILTHCNAGWLATIDWGTATSPIYHAHQKGIKVHVWVDETRPRNQGANLTSYELNEEGISNTVITDNAGGILMQRGEVDMCIVGTDRTLSNGDVCNKIGTYLKALSAKDNNIPFYVALPSSTIDWSIKDHREIPIEERNSEELSHVEGVDENNEIKKVRIYPQKSKSLNLAFDVTPAKLVTGLITEKGVCEASEKGLKGLF

SEQ ID NO: 142601 - protein, 342 aa, Unknown
  Bacterial polypetide isolated from the Sargasso Sea
MPLRLPPLPALRFFEAAGRHQSFKLAAAELNVTPSAISHGIVGLEQSLGVELFVREPRGISLTAAGADYLSYVSEAFSLIAIGTQRLPNHRANRPIALSCAPTLASRWLLPRLGAFRSRWPDANITVDTSHRQVGFPVDGFDFAIRLSRAPVAGTAWTRLFGERLVPVCSPAYLDNLRNGHGHLDLRRATLIHVNSASEDWQAWLDGVAVEGDPVEGDTVDGDPVDGDPVDLSDGLRVDTIQLAFEAASMGLGVALGRRPLMDRDLASGALVEACPQTIASANAYWLVSAQDADSAAHRPELLDFKQWLLGEAAQFANPSGSEVTEPPAESLNLRSAKSTNL

SEQ ID NO: 142602 - protein, 57 aa, Unknown
  Bacterial polypetide isolated from the Sargasso Sea
MSLSAISAGKNVPDEVNVIIEIPAHADPVKYEVDKDTGALFVDRFMATCMHYPTNYG

SEQ ID NO: 142603 - protein, 162 aa, Unknown
  Bacterial polypetide isolated from the Sargasso Sea
AGSRNKYEYCSEAGIMALDRVLHSSVRYPFDYGFIPNTLADDGAPLDAMVIMDEPTFAGCLIKARPIGVLDMHDCGAYDGKLLCVPMANPRQANIVSIKQIAPNQLEDVAEFFRTSKGLDGRTVQIDGWRDFDVVENLLKNCTPLKKKNFKVLKKSTFNKVN

SEQ ID NO: 142604 - protein, 356 aa, Unknown
  Bacterial polypetide isolated from the Sargasso Sea
MKIEGKSYKTIWFENNLVKIIDQTKLPHQFIVKDLKTVQDAINAIKTMEVRGAPLIGATAAYGLVLSIIEKNDLSFLKKSSEDLIASRPTAINLKWAVDRMMKKLTGVNDKDILKIALVEAKAITEEDEKFCKNIGLNGLKIIEDIANKKKDTVNILTHCNAGWLATIDWGTATSPIYHAHQKGIKVHVWVDETRPRNQGANLTSFELNEEGISNTVITDNAGGILMQRGKVDMCIVGTDRTLSNGDVCNKIGTYLKALSAKDNNVPFYVALPSSTIDWSIKDHRKIPIEERNSEELSHVEGIDENNEIKKVRIYPQKSKSLNLAFDVTPAKLVTGLITEKGICEASEKGLKGLFK

SEQ ID NO: 142605 - protein, 164 aa, Unknown
  Bacterial polypetide isolated from the Sargasso Sea
IPAGSRNKYEYCSDAGIMALDRVLHSSVRYPFDYGFIPNTLADDGAPLDAMVIMDEPTFAGCLIKARPIGVLDMHDCGAYDGKLLCVPIANPRQDNIVSINQIAPNQLEDVAEFFRTSKGLDGRTVQIDGWRDFDVVENLLKSCIPLKKRNYKVLKKSKISKLN

SEQ ID NO: 142606 - protein, 44 aa, Unknown
  Bacterial polypetide isolated from the Sargasso Sea
GTDTHSAAVVGDTVGDPFKDTSGPSMNILINVMAIVSLVIAPLL

SEQ ID NO: 142607 - protein, 152 aa, Unknown
  Bacterial polypetide isolated from the Sargasso Sea
KYETDAKTGFIVADRFQSMPVAYPANYGSLTQSLAGDGDPLDVIFYTRAPLAPGTLIKLRAIGVLKMIDGGEKDDKIVAVPASKIDPTYDNIKELSDLPKIEVQRLESFFRVYKDLPEGRKKVELNGFNDAATAKQEIKQAWDAWKEKKSQQ

SEQ ID NO: 142608 - protein, 184 aa, Unknown
  Bacterial polypetide isolated from the Sargasso Sea
MDLSSIPPSPMNGIVNIVVEIPAGSRNKYEYCSEAGIMALDRVLHSSVRYPFDYGFIPNTLADDGAPLDAMVIMDEPTFAGCLIKARPIGVLDMHDCGAYDGKLLCVPMANPRQANIVSINQIAPNQLEDVAEFFRTSKGLDGRTVQIDGWRDFDVVENLLKSCMAPKKKNFKVLKKSNISKLN

SEQ ID NO: 142609 - protein, 150 aa, Unknown
  Bacterial polypetide isolated from the Sargasso Sea
MFFIIFFVFNFNSYSNEISSQVTKVDEFKIVGKKNFLFDYKNFITPLTVNVVIEIPKNTSEKWEVSKLDGSLEHEFFMGEPRIINYLPYPMNYGMIPRTVMPLQLGGDGDPVDAIVLGDALPRGEVVEAKVLGLIKMNDMGEVDDKVITV

SEQ ID NO: 142610 - protein, 184 aa, Unknown
  Bacterial polypetide isolated from the Sargasso Sea
MTEVLYFAIASGVIALIYGLITAKSVIGADAGSKKMQEIAGAIQAGAYAYLNRQYRTIFIVGIVIFALLAFLLGIKVALAFAVGAILSGAAGYIGMVVSVKANVRTAQAASEGLAQGLSIAFKSGAVTGMLVAGLALLAVTGTYYILLLNGAEGRELIDPLVALGFGASLISIFARLGGGILLK

SEQ ID NO: 142611 - protein, 41 aa, Unknown
  Bacterial polypetide isolated from the Sargasso Sea
IADHVGDNVGDVAGMGADLFGSYVATVLASMVLGNYIITAP

SEQ ID NO: 142612 - protein, 181 aa, Unknown
  Bacterial polypetide isolated from the Sargasso Sea
MPAFIPPLLGLIGLLIALGIFRVVLSYPEGNPEVKKIGDMIHSGAMSFMKTEYMYLVVFVLVLAVLVFFALGWETATAVLVGASSSALAGFIGMYAATKANTRTAAAAQDSGAASALSISFYGGSIMGLCVASLGLLGLGGLFYFLGEGHYLEGFGMGASVVALFSRVGGGIFTKSADVRG

SEQ ID NO: 142613 - protein, 251 aa, Unknown
  Bacterial polypetide isolated from the Sargasso Sea
SGVNSEEILNIAIKEAKNICEEDVGFCKNIGVNGLKIIEEISKKKKDTINILTHCNAGWLATIDWGTATSPIYHAHKKGIKVHVWVDETRPRNQGANLTSYELNEEGISNTIITDNAGGILMQRGQVDMCIVGTDRTLSNGDVCNKIGTYLKALAAHDNKVPFYVALPSSTIDWNIKNSKDIPIEERNSEELSHVEGLDKNNKLTKVLIYPKKSQSMNLAFDITPAKYVTGLITEKGVCNASKEGLESLFK

SEQ ID NO: 142614 - protein, 104 aa, Unknown
  Bacterial polypetide isolated from the Sargasso Sea
GVIAVSAPPLVGLGIGAEALGGMLAGGLLVCVLMALFMANAGGAWDNAKKYIEKGNLGGKGTDTHSAAVVGDTVGDPFKDTSGPSMNILINVMAIVSLVIAPLL

SEQ ID NO: 142615 - protein, 176 aa, Unknown
  Bacterial polypetide isolated from the Sargasso Sea
IPFLVSSITMTAVGDAAFEMINEIRRQFREIPGILEGTGEPDTDKCVEIATRAALQRMLLPGVIAVSMPPLVGFLLGAKALGGMLAGGLLGCVLLALMMANAGGAWDNAKKYIEKGNLGGKGSDTHAAAVVGDTVGDPFKDTSGPAMNILINVMAIVSLVIAGLLPVDGLIVNLFN

SEQ ID NO: 142616 - protein, 90 aa, Unknown
  Bacterial polypetide isolated from the Sargasso Sea
GGLLGCVLLALMMANAGGAWDNAKKYIEKGNLGGKGSDTHAAAVVGDTVGDPFKDTSGPAMNILINVMAIVSLVIAGLLPVDGLIVTLFN

SEQ ID NO: 142617 - protein, 31 aa, Unknown
  Bacterial polypetide isolated from the Sargasso Sea
VGDPYKDTAGPAVNPMIKITNIVALLLLAAL

SEQ ID NO: 142618 - protein, 330 aa, Unknown
  Bacterial polypetide isolated from the Sargasso Sea
GGNPQKALNIGEFGSSAIMIAVMYFLISNLLPNSFTLGDNSYSNLGVFWASTIGLLAGLGIGLITEHYTGTNTSPTLSIARQSLTGPATNIIAGLGVGMQSTAGPILIIAAGIVGAHYFAGLYGVAMAALGMLANTGIQLAVDAYGPISDNAGGIAEMAELPAEVRERTDKLDAVGNTTAAIGKGFAIGSAALTTLALFAAYMVKSGIIDKGIDIANPAVMAGLFVGGMLPFLFSSMAMGAVGRAAMSMIEEVRRQFRDIPELKSALEILNKSEESQWSEKDREVYELGLMKADHGQCVEISTQAAIKEMVLPGLLAVITPVVFGFGPKI

SEQ ID NO: 142619 - protein, 58 aa, Unknown
  Bacterial polypetide isolated from the Sargasso Sea
EDDPRNPGVIADNVGDNVGDVAGMGSDIFESYCGSMIATIAIAYTMTEANNGPLMSYL

SEQ ID NO: 142620 - protein, 244 aa, Unknown
  Bacterial polypetide isolated from the Sargasso Sea
IAEMSSMGEEVREITDSLDELGNTTAAIGKGFAIGAAALAALAIISAFSAVVADANPEFSLALTEPIVLVGMFIGVCIPFLVSSITMTAVGDAAFEMINEIRRQFKEIPGLMEGTAEPDSEKCVEIATTAALKKMMLPGIIAVSMPTIVGFGLGAQALGGMLAGGLLGCVSLALMMANAGGAWDNAKKYVEKGNLGGKGSDTHAAAVVGDTVGDPFKDTSGPSMNILINVMAIVSLVIAPLLSI

SEQ ID NO: 142621 - protein, 188 aa, Unknown
  Bacterial polypetide isolated from the Sargasso Sea
LSLGQPIVLVGMFIGICIPFLISSITMTAVGDAAFEMINEIRRQFREITGLMEGTADPDSEKCVEIATKAALKKMMLPGIIAVAMPAVVGFGLGAMALGGMLAGGLLGCVALALFMANAGGAWDNAKKYVEKGNLGGKGSDTHAAAVVGDTVGDPFKDTSGPSMNILINVMAIVSLVIAPLLTLNGML

SEQ ID NO: 142622 - protein, 279 aa, Unknown
  Bacterial polypetide isolated from the Sargasso Sea
SGLIVGLCVGKVTEYYTATGKSPVLSIVRQSETGPATTIIAGLGVGMISTAIPILLISVAILSSYYFAGLYGIAISAVGMLANTGIQLAVDAYGPISDNAGGIAEMAELPPEVRERTDKLDAVGNTTAAIGKGFAIASAALTALALFAAFMQTAKIKSIDISNPTVMVGLLIGAMLPFVFSALSMNAVGKAAMSMIEEVRRQFKELPKLKAALEVMKKYDSDLSKASKTDLKIFEEADGIAEYSKCVEISTNAALKEMILPGLMAILVPVIIGFGGGAE

SEQ ID NO: 142623 - protein, 170 aa, Unknown
  Bacterial polypetide isolated from the Sargasso Sea
YVEDLKLVENLTPNFSLENPYVVVGLLIGGLLPYLFASMGMMAVGRAGGAVVEEVRKQFADNPGIMTGDSKPDYSRSVDMLTRSAIKEMIIPSMLPVLSPIILFFIVSIVADQNAAVSAVGAMLLGVIVTGIFVAISMTAGGGAWDNAKKYVEDGNFGGKGSEAHKAAVT

SEQ ID NO: 142624 - protein, 210 aa, Unknown
  Bacterial polypetide isolated from the Sargasso Sea
MSGIIETILLYTIGAGLLSIVYGFLTGKNILNSSAGNSKMQDIASAIQIGAKAYLARQYKTIAIVGAVVLVIVSIAFSPLVGLGYLIGAALSGIAGYVGMLVSVEANVRTAEASRKGLAQGLSVAFKSGAVTGMLVAGLALLSIAVYYYILLKSGVDEREIVNALVALGFGASLISIFARLGGGIFTKGADVGADLVGKVEAGIPEDDPR

SEQ ID NO: 142625 - protein, 100 aa, Unknown
  Bacterial polypetide isolated from the Sargasso Sea
SVFPVIVGLGFGPEMLGGLLGGGLLSCVLLALTMSNAGGAWDNAKKFVEHGNLGGKGSDVHKAAVVGDTVGDPLKDTSGPSMNILINVMAIVSLVIAPLL

SEQ ID NO: 142626 - protein, 28 aa, Unknown
  Bacterial polypetide isolated from the Sargasso Sea
KDTAGPAVNPMIKITNIVALLLLAVIAG

SEQ ID NO: 142627 - protein, 230 aa, Unknown
  Bacterial polypetide isolated from the Sargasso Sea
MNLSLIYVLGAGTLAMAFSFWKTIWISNQKEGNDRMKSIGLSISKGAMAFLRAEYRILAIFVIFVAMLLAFSNRNAENSSPLIAMSFIIGAVASALAGYLGMKVATKSNNRTTHAAKTSLSSALNVAFTGGSVMGLSVVGLGVMGLAGLFFVYSSGLLFDVDPLMNKSINKILNILSGFSLGASSIALFARVGGGIYTKAADVGADLVGKVEAGIPEDHPLNPATIADNV

SEQ ID NO: 142628 - protein, 195 aa, Unknown
  Bacterial polypetide isolated from the Sargasso Sea
MNNNVETILIYSILAGILSIVYGYFTGKNILASSTGNSKMQEIASAIQIGAKAYLNRQYKTIAIVGLVVLVIISFSFSFLVGLGYLIGAALSGIAGYVGMLVSVQANVRTAEASRKGLSSGLSIAFKSGAVTGMLVAGLALLSIAVYYYLLLKFNVDKRELINALIALGFGASLISIFARLGGGIFTKGADVEQI

SEQ ID NO: 142629 - protein, 167 aa, Unknown
  Bacterial polypetide isolated from the Sargasso Sea
GRAASSVVLEVRQQFKEKKGIMSGKEKPDYGRCVDILTKSAIKEMIIPSLLPVLSPVVVFFGVYSLTGSVNTAFQALGALLIGVIITGFFVAISMTAGGGAWDNAKKYIEDGNLGGKGSETHKASVTGDTVGDPYKDTAGPAVNPMIKITNIVSILLLSIVVHLNIV

SEQ ID NO: 142630 - protein, 144 aa, Unknown
  Bacterial polypetide isolated from the Sargasso Sea
HLEKFLGLKEGKKGVKPDVAKAVEISTTGSLKAMIAPGLLAVIVPIVVGLLPFLGPEALGGLLVGSIVSGFLLAIFMANSGGAWDNAKKYIELGNHGGKGSDAHAAAVTGDTVGDPFKDTSGPAINILMKLMAIVSIIFGPLFL

SEQ ID NO: 142631 - protein, 171 aa, Unknown
  Bacterial polypetide isolated from the Sargasso Sea
TINAIVEIPAGTSEKWQVSKDGFEISKEIYNSDTRVIDYLSYPFNYGFIPQTYLSAKLGGDGDPLDIIIIGSNIKRGSAIKAKPIGTLVLLDKNEIDSKVIALMINDTNISKMNSIDDLEKYYIGLMDIIKIWIINYKGESLELKRVLGKTATKEYIQKYHEAFLNSSKKP

SEQ ID NO: 142632 - protein, 227 aa, Unknown
  Bacterial polypetide isolated from the Sargasso Sea
SLDEVGNTTAAIGKGFAISAAALAALALISAYIEKISGTDSSFVLAINDPLVLAGMFLGGIFPFLVSSMTMTAVGDAAFDMIKEIRRQFKEIPGLLEGKAKPDTAKCVDIATKAALRKMVAPGALAVLAPVVVGTILGPKALGGMLGGALICCVMMALMMANAGGAWDNAKKYVEKGNLGGKGSEVHKAAVVGDTVGDPLKDTSGPSMNILINVMAIVSLVIAPLLV

SEQ ID NO: 142633 - protein, 194 aa, Unknown
  Bacterial polypetide isolated from the Sargasso Sea
MTVLTITIACGVCALIYGLWASQSILTSSAGSEKMQEIAGAIQEGAAAYLNRQYTTITIVGVIVAIILFLTLGLYVSIGFLIGAVLSGIAGYIGMNVSVRANVRTTQAATEGLQPALDIAFKSGAITGLLVVGLGLLGVAGYYAFLLSANVETRLLIESLVALSFGASLISIFARLGGGIFTKGADVGADLVGK

SEQ ID NO: 142634 - protein, 262 aa, Unknown
  Bacterial polypetide isolated from the Sargasso Sea
ILMPVFIAGVGLIFSIVGTWVIKIKNNESKEKEVQGAFNLGNWGSLLLTAVASFFIIQWMLPNKMNMTFFGEGIKEIGYNRVFYAVLIGLAVGGLISVLTEYYTAMGKKPVNGIIKNSSTGAATNIISGLSLGMMSTAAPVILFAAAIWGAYTCAGFYGVAIGASAMMSTTALQLAIDAFGPIADNAGGIAEMSELDPEVRERTDILDAVGNTTAAVGKGFAIASAALTALALFAAYVTFTGIDGINIFKAKVLSALFIGGM

SEQ ID NO: 142635 - protein, 224 aa, Unknown
  Bacterial polypetide isolated from the Sargasso Sea
EYYTGIEDVFFFKVKAIPYIGEASKTGSATNAIAGLAVGMQSVFLPVLLMAAGIFGANHVMGGGELGLYGIAMAAMGMLGTVGVTMTVDAYGPVADNAGGIAEMSGLGDDVREITDGLDSIGNTTAAIGKGFAIGSAALTALALFAAFKTSANLEAEDLSLTEPMVVIGLLIGAALPFVVAAMTMKSVGRAAEDMITEIRRQFKEIDGLLEGREGVEPDSATCV

SEQ ID NO: 142636 - protein, 279 aa, Unknown
  Bacterial polypetide isolated from the Sargasso Sea
MISMQKGVWIGFWTAISYAVGAGCSMLAGFFGMNAATTSGVRTSQAAVDGGQSKALLLAFNGGAVMGLSVASLGLLGVGGLFLLFGRGDSFTVISGFAMGASSIALFARVGGGIYTKTADVGSDLVGKVEAGIPEDDPRNPGVIADNVGDCVGDTAGLGADIFESYCGSMIAAIVIGASMATLRFEYMALPIMIAMVGLIASVIGIRAMTTLGSMDPSAALRNCTFISAGAMLFVAFFLIKVMGLPSGVFIALLFGCLAGIGIGLITEYYTASKPVIRI

SEQ ID NO: 142637 - protein, 41 aa, Unknown
  Bacterial polypetide isolated from the Sargasso Sea
GGKGSEAHKAAVTGDTVGDPYKDTAGPAVNPMIKIINIVAL

SEQ ID NO: 142638 - protein, 97 aa, Unknown
  Bacterial polypetide isolated from the Sargasso Sea
LPLIIGFWNKEALGGFLPGSLVTGFLLAIFMANSGGAWDNAKKYIEAGGGAGKGSDEHKAAVIGDTIGDPFKDTSGPAMNIVIKVMTIVSLIFASAF

SEQ ID NO: 142639 - protein, 291 aa, Unknown
  Bacterial polypetide isolated from the Sargasso Sea
AASGIIISVIGTFMVSVKEGGDPQKALNQGEFGSAAIMVGVIFLLTQKFLPETFNQGSEIYTSLGVFYATVIGLLAGLGIGLITEFYTGTGTSPVKSISKQSITGPATNIIAGLGVGMQSTAIPILIIASSIVGAFHFSGLYGIAMAALGMLANTGIQLAVDAYGPISDNAGGIAEMAELPKEVRERTDKLDAVGNTTAAIGKGFAIGSAALTALALFAAFMVQSGIKNIDIANPWVMAGLFVGGMLPFLFSSMAMGAVGRAAMSMIEEVRRQFRDIPELKKALELMNLKK

SEQ ID NO: 142640 - protein, 48 aa, Unknown
  Bacterial polypetide isolated from the Sargasso Sea
GKGSETHKAAVTGDTVGDPYKDTAGPAVNPMIKITNIVALLLLAVISH

SEQ ID NO: 142641 - protein, 198 aa, Unknown
  Bacterial polypetide isolated from the Sargasso Sea
MNEGQALWIALTASVVAIICGVVFSLQIIKESDGNDRMREIAGAIQEGAQAYLTRQYSTIAIVGVVIFILMGVSGIGWASAIGFAIGAIFSGLAGYIGMSISVRANVRTAQAAHQGMNAALSMAFRGGAVTGLLVVGLGLLSIAGYYLILTSSGVSVDDSLHALIGLAFGGSLISIFARLGGGIFTKGADVGADLVER

SEQ ID NO: 142642 - protein, 220 aa, Unknown
  Bacterial polypetide isolated from the Sargasso Sea
GIPEDDPRNPGVIADNVGDNVGDVAGMGSDIFESYCGSMIASIAIAYTLGNQDMMMLPLALAATGLIASIIGIFIVKLQSAKAPASALRSGTLLAPVIFVAMAYFIINSFDGVGMNVWWCVIAGAVGGVLIGLITEYYTGGGPVKKIAESGETGSATVMISGLSVGMQSVVIPIVILAGIILTSTQLSGIYGVGIAAVGMLATVGITMAIDAYGPVADNA

SEQ ID NO: 142643 - protein, 193 aa, Unknown
  Bacterial polypetide isolated from the Sargasso Sea
MYYIIAAGILSIVYGFITGRNILNSSSGNAKMLEIASAIQEGARAYLNRQYKTIAIVGVVVLIVITILFSPLVGLGYLIGATLSGIAGYVGMIVSVQANVRTAEASRKSLASGLSIAFKSGAVTGMLVAGLALLAIAVYYYFLVKNGVDEREIVNALVALGFGASLISIFARLGGGIFTKGADVGADLVGKVE

SEQ ID NO: 142644 - protein, 84 aa, Unknown
  Bacterial polypetide isolated from the Sargasso Sea
MLLGGLLGCVSLALMMANAGGAWDNAKKYVEKGNLGGKGSDTHAAVVVGDTVGDPFKDTSGPSMNILINVMAIVSLVIAPLLSI

SEQ ID NO: 142645 - protein, 185 aa, Unknown
  Bacterial polypetide isolated from the Sargasso Sea
MENLYLIILAGIIAVVYSYILSNQIVSASPGNSKMQEIAEAIQIGAKAYLNRQYKTIAIVGVVVLIIISYFFSLLVGLGYLIGALLSGVAGYIGMLISVKANVRTAEASRKSLQSGLTMAFKSGAITGLLVAGLALLAISLYYLALLAFNVDSRELINALIALGFGASLISIFARLGGGILRKEL

SEQ ID NO: 142646 - protein, 246 aa, Unknown
  Bacterial polypetide isolated from the Sargasso Sea
ESYVGSIIGTMVLGAVYATLPEFQSQFDGLGAVYLPLALAAVGIIMSIIGSFFVKVKDDGSPHTALNMGEFGSAGLMLVASWFIIQAMLPESWVESGIQYTSMGVFWATIAGLVAGLLVGKVTEYYTGTGTRPVNSIVKQSETGSATNIIAGLGVGMMSTAIPIILIAAAIIVSHKFAGLYGIAIAAVGMLANTGIQLAVDAYGPISDNAGGIAEMAELDPEVRERTDKKDAVGNTTAAIGKGFAI

SEQ ID NO: 142647 - protein, 297 aa, Unknown
  Bacterial polypetide isolated from the Sargasso Sea
VGALGGIVIGLVTEYYTAGAPVKKIAGAGETGPATIMITGLSVGMQSVVVPVLMLCVIILVSSWLAGLYGVGIAAVGMLATVGITMAIDAYGPVADNAGGIAEMAGLGEEVREITDTLDELGNTTAAIGKGFAIGAAALAALAIISAYIETVTFHLPDFSLEINDPVVLAGMFLGGIFPFLVSSMTMTAVGDAAFDMIREIRRQFKEIPGLLEGTAEPDTDRCVEIATTAALKRMVPPGVLAVGAPVVVGFTLGPAALGGMLGGALLGCVLLALTMANAGGAWDNAKKYIEKGNLGG

SEQ ID NO: 142648 - protein, 218 aa, Unknown
  Bacterial polypetide isolated from the Sargasso Sea
MLANTGIQLAVDAYGPISDNAGGIAEMAELDPKVRERTDKLDAVGNTTAAIGKGFAIASAALTALALFAAFMQTAEITAIDISKPVVMAGLLLGAMLPFVFSALSMKAVGKAAMSMIEEVRRQFKDLPKLKAALEVMRKYDSDLSKASKEDLKIFNDADGVAEYSKCVEISTQAALREMVLPGLMAISVPVIIGFAGGAEMLGGLLDGVTSCGVLMAI

SEQ ID NO: 142649 - protein, 245 aa, Unknown
  Bacterial polypetide isolated from the Sargasso Sea
GLDPEVRERTDALDSLGNTTAATGKGISVTSAVLTSLALLATYATVAGIDSLNLLNPKILVGAIIGGLLPFIFAGLTMAAVGRAAGAMIEEVRRQFREIKGLKEGKKGVKPDVAKAVEISTNGALKEMIVPGTLAILAPIAVGIIPFLGPEALGSMLAGSIISGFLLAIFLNNFGGAADNAKKYIELGNHGGKGSDAHEAGVIGDTVGDPTKDTSGPALNILLKLMAMVSIVFGPIIFRKLVDRS

SEQ ID NO: 142650 - protein, 285 aa, Unknown
  Bacterial polypetide isolated from the Sargasso Sea
MRIAVYSNARTTIAASRSWSEGFLTAFRGGAVMGFSLCSLGLLILYACISLFNLYYDLNVLGNSQALFEAISGFGLGGSSIALFGRVGGGIYTKAADVGADLVGKVENNIPEDDVRNPATIADNVGDNVGDVAGMGSDLFGSFGEATCAALVVASTSPDLNSNWTSLLFPLMITSIGILAGILTTFVNYCCKVTNEKHVERNLKLQLILSTILTSPFIALVSYLFLPNKFCVQLSDNIDSLNFTWTSDNPDWCDHVSTNWGSMICILSGLWSGLIIGYFTDIYDK

SEQ ID NO: 142651 - protein, 90 aa, Unknown
  Bacterial polypetide isolated from the Sargasso Sea
AEALGGMLAGSIVSGFLLAIFMANSGGAWDNAKKYIELGNHGGKGSDAHKAAVTGDTVGDPFKDTSGPSINILLKLMTIVALVFGPLFIG

SEQ ID NO: 142652 - protein, 60 aa, Unknown
  Bacterial polypetide isolated from the Sargasso Sea
NAKKYIEDGNYGGKGSESHKAAVTGDTVGDPYKDTAGPAVNPMIKITNIVALLLLAVIAH

SEQ ID NO: 142653 - protein, 119 aa, Unknown
  Bacterial polypetide isolated from the Sargasso Sea
MLLPGVIAVSMPPLVGFLLGAKALGGMLAGGLLGCVLLALMMANAGGAWDNAKKYIEKGNLGGKGSDTHAAAVVGDTVGDPFKDTSGPAMNILINVMAIVSLVIAGLLPVDGLIVNLFN

SEQ ID NO: 142654 - protein, 238 aa, Unknown
  Bacterial polypetide isolated from the Sargasso Sea
LNIGVFGSGAVLTIVSYFLIGKLIENPVALADGYQNVQALDLFLATVVGLVSGILIGVLTEYYTSDHQKPSQNVAAASETGSATNIISGLANGMFSTALPVLVIAMSILGAYHFAHLYGIALAALGMLSTIGIQLAVDAYGPIADNAGGIAEMAELPKEVRERTDKLDAVGNTTAAIGKGFAIGSAALTSLALFAAFRETVGGLTLDINNPYVMVGLLIGSALPFVFSALAMQAVGDA

SEQ ID NO: 142655 - protein, 123 aa, Unknown
  Bacterial polypetide isolated from the Sargasso Sea
TAKCVDIATSAALKKMLIPGIIAVSAPPLVGFILGPESLGGMLAGGLLACVLMALFMANAGGAWDNAKKYIEKGNLGGKGTDTHAAAVVGDTVGDPFKDTSGPSMNILINVMAIVSLVIAPLL

SEQ ID NO: 142656 - protein, 178 aa, Unknown
  Bacterial polypetide isolated from the Sargasso Sea
VYLFTAYACAAVGRSAQEVVNEVRRQFAEKPGIMTRECKPDYGRCVSIVAASALREMVKPGALAVLGPVCVGLAFRTVGAWTGQELLGARAVAGMLMFATVSGILMALFLNTAGGAWDNAKKYIETGAHGGKNSDAHRAAVTGDTVGDPFKDTAGPSIHVLIKMLATITLVMAPMFLD

SEQ ID NO: 142657 - protein, 178 aa, Unknown
  Bacterial polypetide isolated from the Sargasso Sea
GSIPFLVSSITMTAVGDAAFEMINEIRRQFREIPGILEGTGEPDTDKCVEIATRAALQRMLLPGVIAVSMPPLVGFLLGAKALGGMLAGGLLGCVLLALMMANAGGAWDNAKKYIEKGNLGGKGSDTHAAAVVGDTVGDPFKDTSGPAMNILINVMAIVSLVIAGLLPVDGLIVTLFN

SEQ ID NO: 142658 - protein, 76 aa, Unknown
  Bacterial polypetide isolated from the Sargasso Sea
FLAYHLANTGGAWDNAKKLIEMKGEKGTEEHKVAVVGDIIGDPYKDTAGPALNTVIKLLNTIAIVFVPVFFAVIVL

SEQ ID NO: 142659 - protein, 73 aa, Unknown
  Bacterial polypetide isolated from the Sargasso Sea
YVVVGLLIGGLFPFLFGAMSMTAVGRAAGAVVVEVRRQFKEIPGIMEGKGKPEYGPCVDILTKAAIKEMFIPS

SEQ ID NO: 142660 - protein, 126 aa, Unknown
  Bacterial polypetide isolated from the Sargasso Sea
DGVAEYSKCVEISTQAALREMVLPGLMAISVPVIIGFTGGAEMLGGLLAGVTSCGVLMAIFQSNSGGAWDNAKKMIEEDGRKGTEAHKAAVVGDTVGDPFKDTSGPSLNILLKLIAVVALVIAPLL

SEQ ID NO: 142661 - protein, 190 aa, Unknown
  Bacterial polypetide isolated from the Sargasso Sea
LNKTDKDHFDATVVGDTVGDPFKDTSGPALNILIKLMSVISLVIAPMLKSLQVENGVVQEWKPVSVAIGCGILVVLIIACYLLQRYIDAGYDVKRKEVEASIAEQKELAKKAEEAAVAANPAAYAALKAMHKAEQNAAGVGAADMMAQLKESAAELIAAIANPKPQVQATPSQAVAAPVSAMEVEVKTSK

SEQ ID NO: 142662 - protein, 89 aa, Unknown
  Bacterial polypetide isolated from the Sargasso Sea
GPEMLGGLLAGVTSFGVLMAIFQSNAGGAWDNAKKMIEEAGNKGTEAHKAAVVGDTVGDPFKDTSGPSLNILLKLISVVALVIAPLLVS

SEQ ID NO: 142663 - protein, 289 aa, Unknown
  Bacterial polypetide isolated from the Sargasso Sea
GVAVGMESTTYATICTGVSILIAYHLGDWAIPGGGLFGTSVATMGMLSSAVYVLAMDTFGPIADNAGGIVEMSDQPEIVRDITDRLDAVGNVTKAATKGYSIGSAGLACFLLFSAFMEVVETQSGLPFKTVDFAIPAVFVGGLMGGMLVFAFSGMAIQAVGKCAQDVVNEVRAQFSERPGIMDYKEKPDYGRCVAIVTQAALAEMTKPGAFVLLTPITVGFIFRFVGSLQGRPLLGPMVLAGLLMVSTITGILLSLFLNNAGGAWDNAKKYVETGKYGGKGSEAHKAAV

SEQ ID NO: 142664 - protein, 119 aa, Unknown
  Bacterial polypetide isolated from the Sargasso Sea
MLLPGVIAVSMPPLVGFLLGAKALGGMLAGGLLGCVLLALMMANAGGAWDNAKKYIEKGNLGGKGSDTHAAAVVGDTVGDPFKDTSGPAMNILINVMAIVSLVIAGLLPVDGLIVTLFN

SEQ ID NO: 142665 - protein, 42 aa, Unknown
  Bacterial polypetide isolated from the Sargasso Sea
EAHKAAVTGDTVGDPYKDTAGPAVNPMIKITNIVALLLLAAL

SEQ ID NO: 142666 - protein, 176 aa, Unknown
  Bacterial polypetide isolated from the Sargasso Sea
SSAGNAKMQDIASAIQIGAKAYLARQYKTIAIVGVVVLVIVSIAFSPLVGLGYLIGAALSGIAGYVGMLVSVEANVRTAEASRKGLAQGLSVAFKSGAVTGMLVAGLALLSIAVYYYILLKSNVDEREIVNALVALGFGASLISIFARLGGGIFTKGADVGADLVGKVEAGIPEDD

SEQ ID NO: 142667 - protein, 43 aa, Unknown
  Bacterial polypetide isolated from the Sargasso Sea
AHKAAVTGDTVGDPYKDTAGPAVNPMIKITNIVALLLLAVIAH

SEQ ID NO: 142668 - protein, 102 aa, Unknown
  Bacterial polypetide isolated from the Sargasso Sea
AVLAPVIVGFILGPKALGGMLGGALICCVMMALMMSNAGGAWDNAKKFVEKGNYGGKGSEVHKAAVVGDTVGDPLKDTSGPSMNILINVMAIVSLVIAPLLI

SEQ ID NO: 142669 - protein, 199 aa, Unknown
  Bacterial polypetide isolated from the Sargasso Sea
MSGTVETILLYTIGAGLLSIVYGFLTGKNILNSSAGNAKMQDIASAIQIGAKAYLARQYKTIAIVGAVVLVIVSIAFSPLVGLGYLIGAALSGIAGYVGMLVSVEANVRTAEASRKGLAQGLSVAFKSGAVTGMLVAGLALLSIAVYYYILLKSNVDEREIVNALVALGFGASLISIFARLGGGIFTKGADVGADLVWK

SEQ ID NO: 142670 - protein, 151 aa, Unknown
  Bacterial polypetide isolated from the Sargasso Sea
MSASFELIYLIIFTGILAVAYSYLLSGQILSASPGNARMQEIAEAIQIGAKAYLNRQYKTIAIVGIIVLFIVSYFFNFLVGIGYFIGAFLSGVAGYVGMLISVKANVRTAEASRKSLQAGLSIAFKSGAITGLLVAGLALLAITFYYLILL

SEQ ID NO: 142671 - protein, 124 aa, Unknown
  Bacterial polypetide isolated from the Sargasso Sea
AKCVDIATKAALNKMLLPGAIAILSPIIVGFVLGPVHLGGMLAGALLGCVLMALMMANAGGAWDNAKKFVEKGNFGGKGTETHSATVVGDTVGDPFKDTSGPAMNILINVMAIVSLVIAPLLSI

SEQ ID NO: 142672 - protein, 162 aa, Unknown
  Bacterial polypetide isolated from the Sargasso Sea
LIASITMTAVGDAAFEMINEIRRQFKEIPGLLEGNAEPDTAKCVDIATAAALKKMLLPGVIAVSAPPLVGLGIGAEALGGMLAGGLLVCVLMALFMANAGGAWDNAKKYIEKGNLGGKGTDTHSAAVVGDTVGDPFKDTSGPSMNILINVMAIVSLVIAPLL

SEQ ID NO: 142673 - protein, 139 aa, Unknown
  Bacterial polypetide isolated from the Sargasso Sea
TGEPDTDKCVEIATRAALQRMLLPGVIAVSMPPLVGFLLGAKALGGMLAGGLLGCVLLALMMANAGGAWDNAKKYIEKGNLGGKGSDTHAAAVVGDTVGDPFKDTSGPAMNILINVMAIVSLVIAGLLPVDGLIVNLFN

SEQ ID NO: 142674 - protein, 199 aa, Unknown
  Bacterial polypetide isolated from the Sargasso Sea
MEAAYEYLYLIIFTGILAVGYSFLLSKDILSSSSGNNRMKEIAEAIQIGAKAYLNRQYKTIAIVGFIVLIIVSYFFNLLVGLGYLIGATLSGVAGYVGMLISVQANVRTAEASRKNLQSGLTIAFKSGAITGLLVAGLALLAIAIYYVILINLNVDNREIINALVALGFGASLISIFARLGGGIFTKGADVGADLVGKV

SEQ ID NO: 142675 - protein, 186 aa, Unknown
  Bacterial polypetide isolated from the Sargasso Sea
NAGGIAEMAELDPKVRERTDKLDAVGNTTAAIGKGFAIASAALTALALFAAFMQTAEITAIDISKPVVMAGLLLGAMLPFVFSALSMKAVGKAAMSMIEEVRRQFKDLPKLKAALEVMRKYDSDLSKASKEDLKIFNDADGVAEYSKCVEISTQAALREMVLPGLMAISVPVIIGFAGGAEMLGGL

SEQ ID NO: 142676 - protein, 34 aa, Unknown
  Bacterial polypetide isolated from the Sargasso Sea
TVGDPYKDTAGPAVNPMIKITNIVALLLLAVIAH

SEQ ID NO: 142677 - protein, 99 aa, Unknown
  Bacterial polypetide isolated from the Sargasso Sea
VEEVRRQFKEIPCIMEGKGKPEYGTCVDILTKAAIKEMIIPSMLPVLSPIVVYFVILFIAGQTAALACLGALLLGVIVTGLFVAISMTAGGGAWDNAKK

SEQ ID NO: 142678 - protein, 120 aa, Unknown
  Bacterial polypetide isolated from the Sargasso Sea
VDIATKAALKKMILPAFIAISMPAIVGFGLGAQSLGGMLAGALLGCVLLALMMANAGGAWDNAKKYIEKGNLGGKGSEVHAAAVVGDTVGDPFKDTSGPSMNILINVMAIVSLVIAPLLV

SEQ ID NO: 142679 - protein, 84 aa, Unknown
  Bacterial polypetide isolated from the Sargasso Sea
PSLLPVLSPIVLYFFILPIGGQVAALSSVGAMLLGVIITGLFVAISMTAGGGAWDNAKKYIEDGNYGGKGSEAHKAAVTGDTVR

SEQ ID NO: 142680 - protein, 45 aa, Unknown
  Bacterial polypetide isolated from the Sargasso Sea
MKHIKQQLQVIQLGDPYKDTAGPAVNPMIKITNIVALLLLAVIAG

SEQ ID NO: 142681 - protein, 129 aa, Unknown
  Bacterial polypetide isolated from the Sargasso Sea
MTLTLACGVLGIIYGIWATNSILKASAGSKKMQEIASSIQIGAKAYLNRQYSTISIVGVIVTVLLFITLGSYVAVGFIIGAFLSGIAGYVGMNISVRANVRTTEAAKSGLVPALDIAFKSGAITGMLVV

SEQ ID NO: 142682 - protein, 101 aa, Unknown
  Bacterial polypetide isolated from the Sargasso Sea
FFPGSGAVMLGGLLAGVTASGVLMALFQSNAGGAWDNAKKMVEEGYEIAGTKHGKGSEVHKATVVGDTVGDPLKDTSGPSLNILLKLMSVVALVLAPFIKN

SEQ ID NO: 142683 - protein, 146 aa, Unknown
  Bacterial polypetide isolated from the Sargasso Sea
MINEIRRQFKEIPGLLEGNAEPDTEKCVDIATAAALKKMLLPGIIAVSAPPLVGLGIGAEALGGLLAGGLLVCVLMALFMANAGGAWDNAKKFIEKGNLGGKGTDTHSAAVVGDTVGDPFKDTSGPSMNILINVMAIVSLVIAPLL

SEQ ID NO: 142684 - protein, 184 aa, Unknown
  Bacterial polypetide isolated from the Sargasso Sea
LELLLSNPMVLIGMFIGGAIPFLIASITMTAVGDAAFEMINEIRRQFKEIPGLLEGNAEPDTAKCVDIATAAALKKMLIPGVIAVSAPPLVGFGLGAESLGGMLAGGLLACVLMALFMANAGGAWDNAKKYIEKGNLGGKGTDTHSAAVVGDTVGDPFKDTSGPSMNILINVMAIVSLVIAPLL

SEQ ID NO: 142685 - protein, 117 aa, Unknown
  Bacterial polypetide isolated from the Sargasso Sea
VTKFALKEMILPALLPVVAPILVGLILGKVALGGLLIGSIVTGIFVALSMTTGGAAWDNAKKYIEDGNIGGKGSDAHKAAVTGDTVGDPYKDTAGPAINPMIKILNVVALLMVPFLI

SEQ ID NO: 142686 - protein, 204 aa, Unknown
  Bacterial polypetide isolated from the Sargasso Sea
MLNKQTLLFIFCVFVYSLIIEKSFSSQNKIIGKKNYFHEYNSFNDDGTINVVIEIPAGDNEKWELWKKDGSIRWEFKNNSFRKINYLPYISNYGFIPQTLFSKEIGGDGDPIDVILISERIKRGSVIKSKILGVINMIDEGNNDSKIVAVNLDSFAFNASILNNLNDLRLNYPGALEIIEIWFRNYKLNSNIIINGYGDIDDAK

SEQ ID NO: 142687 - protein, 156 aa, Unknown
  Bacterial polypetide isolated from the Sargasso Sea
MYNENDDIDVVIEIPYKSNVKYEIKKNELQVDRVLSTAMFYPGNYGYIPHTLAGDGDPVDVLIINETPFYPTSHIRCKVLGMLFTTDEKGEDQKVLALPISKVDPSYSNINDISDINDSKLELIKNFYENYKKLEKNKTVTVKDYFNKADTIKFIK

SEQ ID NO: 142688 - protein, 126 aa, Unknown
  Bacterial polypetide isolated from the Sargasso Sea
DNAKCVDIATKAALSKMLLPGAIAILSPIIVGFVLGPVHLGGMLAGALLGCVLMALMMANAGGAWDNAKKFVEKGNFGGKGTETHSATVVGDTVGDPFKDTSGPSMNILINVMAIVSLVIAPLLSI

SEQ ID NO: 142689 - protein, 289 aa, Unknown
  Bacterial polypetide isolated from the Sargasso Sea
HLGAKVFMFTEYKILTPVVIALVIACGFSPLGWDTATAIAVGALSSAIAGFIGMYSATQANVRTATAAEESGQEQALSISFFGGSIMGLCVASMGLVGLGGLYFYFSGVIEDPNELAKALEGFGVGASAVALFSRVGGGIYTKSADVGADLVGKIEAGIPEDDPRNPGVIADNVGDNVGDIAGMGSDIFESYCGAMIASIAIAATMGNSDLMFLPLWLAASGLFCSLLGIGIVRTQVSRSPAVALRWGTFLSPVLFLLFAGASIYYSPAIEMNYFYSVLTGAVGGILIG

SEQ ID NO: 142690 - protein, 84 aa, Unknown
  Bacterial polypetide isolated from the Sargasso Sea
GGFLAGSLVTGFLLAIFMANSGGAWDNAKKYIEAGGGAGKGSDEHKAAVIGDTIGDPFKDTSGPAMNIVIKVMTIVSLIFASAF

SEQ ID NO: 142691 - protein, 223 aa, Unknown
  Bacterial polypetide isolated from the Sargasso Sea
MSQIQYLQIVIFAAIAAIAFGIFTTNKILSLPKGTKKMTTISSAIQEGAKAYLNRQYTTIAIVGIVIFFAFFLIPFKHIYDVPVGFLIGAVLSGLAGYIGMNVSVRANVITAQAASSSLKKGLYVAFNAGAVTGLLVVGLALAGIAGYFMILYYGFERTGRELIEPLVALGFGSSLISIFARLGGGIFTKGADVGADLVGKVEKNIPEDDPRNPAVIADNVEI

SEQ ID NO: 142692 - protein, 29 aa, Unknown
  Bacterial polypetide isolated from the Sargasso Sea
YKDTAGPAVNPMNKITNIVALLLLAVIAS

SEQ ID NO: 142693 - protein, 43 aa, Unknown
  Bacterial polypetide isolated from the Sargasso Sea
AHKAAVTGDTVGDPYKDTAGPAVNPMIKITNIVALLLLAVIAG

SEQ ID NO: 142694 - protein, 29 aa, Unknown
  Bacterial polypetide isolated from the Sargasso Sea
YKDTAGPAVNPMIKITNIVALLLLAVIAG

SEQ ID NO: 142695 - protein, 252 aa, Unknown
  Bacterial polypetide isolated from the Sargasso Sea
LFIGGGYFALDYLELDTTVIWAVAIGSLVGILIGLVTEYYTGIEPVFGIKVQAIPYIGEASKTGSATNAIAGLAVGMQSVFLPVLLMAGGIYFANDVMGGGDAGLYGIAMAAMGMLGTVGVTMTVDAYGPVADNAGGIAEMSGLGKEVREITDGLDSIGNSTAAIGKGFAIGSAALTALALFAAYKTRAEEALGVGETLDLSLTNPDVVIGLLIGGALPFLVAAMTMKSVGRAAEDMITEIRRQFREIDGLL

SEQ ID NO: 142696 - protein, 115 aa, Unknown
  Bacterial polypetide isolated from the Sargasso Sea
AALNKMLLPGAIAILSPIIVGFVLGPVHLGGMLAGALLGCVLMALMMANAGGAWDNAKKFVEKGNFGGKGTETHSATVVGDTVGDPFKDTSGPSMNILINVMAIVSLVIAPLLST

SEQ ID NO: 142697 - protein, 52 aa, Unknown
  Bacterial polypetide isolated from the Sargasso Sea
EDGHCGGKGSEAHNASITGDTVGDPYKDTAGPAINPLIKIINIVALLLIPLL

SEQ ID NO: 142698 - protein, 74 aa, Unknown
  Bacterial polypetide isolated from the Sargasso Sea
CVLMALMMANAGGAWDNAKKFVEKGNFGGKGTDTHAATVVGDTVGDPFKDTSGPSMNILINVMAIVSLVIAPLL

SEQ ID NO: 142699 - protein, 72 aa, Unknown
  Bacterial polypetide isolated from the Sargasso Sea
FVAISMTTGGGAWDNAKKYVEDGNCGGKGSDAHKAAVTGDTVGDPYKDTAGPAINPLIKIINIVALLIVPLM

SEQ ID NO: 142700 - protein, 109 aa, Unknown
  Bacterial polypetide isolated from the Sargasso Sea
GDPLDVLVVTPYPIQAGSVIRCRPVGVLNMEDEAGGDAKLVAVPHDKLTTTYHDVKEIDDLPELLRDQIKHFFENYKTLEPGKWVKVQGWDNADAARKAIVDSVNAYKG

SEQ ID NO: 142701 - protein, 36 aa, Unknown
  Bacterial polypetide isolated from the Sargasso Sea
IALAATPMLALAGMVVALDAYGPVTDNAGGIAEMSG

SEQ ID NO: 142702 - protein, 183 aa, Unknown
  Bacterial polypetide isolated from the Sargasso Sea
AVLADVMLLPLAICGVCILTSIVGTFFVKLGTNGSIMGALYRGLIVTGLLSIVGIGLATWATIGFGSIGEVAGRNITGLALFICGIVGLIVTALIVVITEYYTGTGKRPVTSIAQASVSGHGTNVIQGLAVSLEATALPALVICGGIIVTYQLAGLFGTGIAVTAMLGLAGMIVALDAFGPVT

SEQ ID NO: 142703 - protein, 111 aa, Unknown
  Bacterial polypetide isolated from the Sargasso Sea
QFHASLVGFLLGAKALGGMLAGGLLGCVLLALMMANAGGAWDNAKKYIEKGNLGGKGSDTHAAAVVGDTVGDPFKDTSGPAMNILINVMAIVSLVIAGLLPVDGLIVTLFN

SEQ ID NO: 142704 - protein, 194 aa, Unknown
  Bacterial polypetide isolated from the Sargasso Sea
MPAFIPPLLGLIGLFIALGIFRVVLSYPEGNQEVKKIGDMIHSGAMSFMKTEYMYLVVFVLVLAVLVFFALGWETATAVLVGASSSALAGFIGMYAATKANTRTAAAAQDSGTAAALSISFYGGSIMGLCVASLGLLGLGGLFYFLGEGHYLEGFGMGASVVALFSRVGGGIFTKSADVGADLVGKVEAGIPED

SEQ ID NO: 142705 - protein, 127 aa, Unknown
  Bacterial polypetide isolated from the Sargasso Sea
YAKCVDVATLASIGELWKSASIAVAAPIIVGILLGPSAVAGLLMGAVVSGIFLAYHLANTGGAWDNAKKLIEMKGEKGTEEHKVAVVGDIIGDPYKDTAGPALNTVIKLLNTIAIVFVPVFFAVIVL

SEQ ID NO: 142706 - protein, 218 aa, Unknown
  Bacterial polypetide isolated from the Sargasso Sea
KGISVTSAVLTSLALLATYATVAGITELNLLNPKILVGAIIGGLLPFVFAGLTMAAVGRAAGAMIEEVRRQFREIKGLKEGKKGVKPDVAKAVEISTNGALKEMIIPGTLAILAPIVVGILPFLGPEALGSMLAGSIISGFLLALFLNNFGGAADNAKKYIELGNHGGKGSEAHEAGVIGDTVGDPTKDTSGPALNILLKLMAMVSIVFGPLFLGISG

SEQ ID NO: 142707 - protein, 294 aa, Unknown
  Bacterial polypetide isolated from the Sargasso Sea
LGVYFLSENMFSSYSENSIGLFFAVIIGLAVGLLVGQISEWFTSDHYSIVKNIADQAKTGPATLVLSGISEGMRSAAFSVIVVVFGIGGAYTAGDWALGSGGGIYGIAIAAIGVLATLGITVAVDAYGPIADNAGGIAEMAHLPPEVREATDELDSLGNTTAAIAKGFAIGSAAVTALALFSAFVQSAGLSEIGLNITKVEVTAGLFLGGMFPFLFAAMTINAVGRAAFKMIEEVRRQFKEIPGLREGKEGVKPDYTRCVDIATSAALKEMLLPGGLAIALPLIIGFWNKEALG

SEQ ID NO: 142708 - protein, 193 aa, Unknown
  Bacterial polypetide isolated from the Sargasso Sea
MQILIIICGLAAVLYGLITSRQILSLDSGNEKMQEIASAIQEGARAYLNRQYMTIAIVGVVIFVLIWFVFDLASGIGFLIGAFFSGAAGYVGMNISVRSNVRTTQAASKSLSEGLSVSFKAGAVTGMLVAGFALLSIAVFYFILHNSGAFPGREVVAPLVSLGFGASLISIFARLGGGIFTKGADVGADLVGK

SEQ ID NO: 142709 - protein, 192 aa, Unknown
  Bacterial polypetide isolated from the Sargasso Sea
DAFTLSLGQPIVLVGMFIGICIPFLISSITMTAVGDAAFEMINEIRRQFREITGLMEGTADPDSEKCVEIATKAALKKMMLPGVIAVAMPAVVGFGLGAMALGGMLAGGLLGCVALALFMANAGGAWDNAKKYVEKGNLGGKGSDTHAAVVVGDTVGDPFKDTSGPSMNILINVMAIVSLVIAPLLTLNGML

SEQ ID NO: 142710 - protein, 377 aa, Unknown
  Bacterial polypetide isolated from the Sargasso Sea
SSTCFNRFNFIYSRNTYVKAASSLDADVALRTGTIGSAVIFIIIAFFLTQSMLGEDGLNVWLAVLTGAVGGVLIGLITEYYTGSKPVENIAKSGETGPATVMITGLAVGMQSVVIPILVLASIIWISTYLTGLYGVGIAAVGMLATVGITMAIDAYGPVADNAGGIAEMAGMGEETRKITDSLDEVGNSTAAIGKGFAIGAAALAALAIIAAFVETIAHSRGGEFVLLLSDPKVLVGMFIGISIPFLISSITMTAVGDAAFEMINEIRRQFKEIPGLLEGNAEPDTAKCVDIATSAALKRMLLPGIIAVSAPAVVGFGLGAESLGGMLGGGLIGCVSMALMMANAGGAWDNAKKYIEKGNLGGKGTETHAAAVVATL

SEQ ID NO: 142711 - protein, 363 aa, Unknown
  Bacterial polypetide isolated from the Sargasso Sea
MTPWGPFASGFIGLIFAFVLYGLIMKYPAGKDSVVKIGDQIHLGAKVFMFTEYKILAPVVLVLVIACGFSPLGWYTAMAIAVGALSSAIAGFIGMYSATQANVRTATAAENSGAESALSISFFGGSIMGLCVASMGLVGLGGLYFYFTGAMDDPDKIAKALEGFGVGASAVALFSRVGGGIYTKSADVGADLVGKIEAGIPEDDPRNPGVIADNVGDNVGDIAGMGSDIFESYCGAMIASIAIAATVGNTDLMFLPLWLAALGLFCSLIGIGIVRSQVSRSPAVALRLGTFFSPIVFLIIAAMSISKSPNIEMNIFYSVLTGAVGGILIGLITEYYTGGSTESSPVGKIAKSGETGPATVMIT

SEQ ID NO: 142712 - protein, 53 aa, Unknown
  Bacterial polypetide isolated from the Sargasso Sea
IEDGNFGGKGSEAHKAAVTGDTVGDPYKDTAGPAINPLIKIINIVALLIVPLL

SEQ ID NO: 142713 - protein, 121 aa, Unknown
  Bacterial polypetide isolated from the Sargasso Sea
VEIATKAALKKMMLPGVIAVSMPAIVGFGLGAQALGGMLAGGLLGCVSLALMMANAGGAWDNAKKYVEKGNLGGKGSDTHAAAVVGDTVGDPFKDTSGPSMNILINVMAIVSLVIAPLLSI

SEQ ID NO: 142714 - protein, 158 aa, Unknown
  Bacterial polypetide isolated from the Sargasso Sea
LTITAVGDAAYSMINEIRRQFREIPGLLEGTGKPDNQKCVEIATGAALKKMVMPGAIAVFSPVTVGFLFGPEMLGGLLGGGLVSCILLALTMSNSGGAWDNAKKFVEKGNFGGKGSDTHKAAVVGDTVGDPLKDTSGPSMNILINVMAIVSLVIAPLL

SEQ ID NO: 142715 - protein, 349 aa, Unknown
  Bacterial polypetide isolated from the Sargasso Sea
MESFIIGPMTPWGPVVTGLIGLVFAFVLYGLIMKYPAGKDSVVKIGDQIHLGAKVFMFTEYKILTPVVIALVIACGFSPLGWDTATAIAVGALSSAIAGFIGMYSATQANVRTATAAEESGQEQALSISFFGGSIMGLCVASMGLVGLGGLYFYFSGVIEDPNELAKALEGFGVGASAVALFSRVGGGIYTKSADVGADLVGKIEAGIPEDDPRNPGVIADNVGDNVGDIAGMGSDIFESYCGAMIASIAIAATMGNSDLMFLPLWLAASGLFCSLLGIGIVRTQVSRSPAVALRWGTFLSPVLFLLFAGASIYYSPAIEMNYFYSVLTGAVGGILIGLITEYYTGGDT

SEQ ID NO: 142716 - protein, 110 aa, Unknown
  Bacterial polypetide isolated from the Sargasso Sea
YGPVTHNAGGIAEMSNLDKKVKKTTDTLNAVGNTTKAVTKGYAIGSAGLSALVLFAAYTEDIKHFSKEAGSALEGIVVTFDLSNPYVVVGLLIGAYVTIFIWINGYAGRW

SEQ ID NO: 142717 - protein, 234 aa, Unknown
  Bacterial polypetide isolated from the Sargasso Sea
RTDALDSLGNTTAATGKGISVTSAVLTSLALLATYATVAGIDSLNLLNPKILVGAIIGGLLPFIFAGLTMAAVGRAAGAMIEEVRRQFREIKGLKEGKKGVKPDVAKAVEISTNGALKEMIVPGTLAILAPIAVGIIPFLGPEALGSMLAGSIISGFLLAIFLNNFGGAADNAKKYIELGNHGGKGSDAHEAGVIGDTVGDPTKDTSGPALNILLKLMAMVSIVFGPLFLGIGG

SEQ ID NO: 142718 - protein, 175 aa, Unknown
  Bacterial polypetide isolated from the Sargasso Sea
MSFNNVPAGKDLPQDFNVIIEIPAQSDPVKYEADKETGLLHVDRFISTGMRYPANYGYIPQTLSGDGDPVDVLVITPFPLLAGSVVRARALGMLQMTDESGVDAKLVAVPHDKVCPMTATLKSLDDVPAYLKDQIKHFFEQYKALEKGKWVKVEGWADIDAAHKEISEGVANYKK

SEQ ID NO: 142719 - protein, 59 aa, Unknown
  Bacterial polypetide isolated from the Sargasso Sea
AKKYIEDGNFGGKGSESHKAAVTGDTVGDPYKDTAGPAVNPMIKITNIVALLLLAVIAH

SEQ ID NO: 142720 - protein, 109 aa, Unknown
  Bacterial polypetide isolated from the Sargasso Sea
MLPGIIAVSMPTIVGFGLGAQALGGMLAGGLLGCVSLALMMANAGGAWDNAKKYVEKGNLGGKGSDTHAAAVVGDTVGDPFKDTSGPSMNILINVMAIVSLVIAPLLSI

SEQ ID NO: 142721 - protein, 54 aa, Unknown
  Bacterial polypetide isolated from the Sargasso Sea
TIDGQKLVKGSEAHKASVVGDTVGDPFKDTSGPSLNILIKLMSVVSLVIAPLIK

SEQ ID NO: 142722 - protein, 112 aa, Unknown
  Bacterial polypetide isolated from the Sargasso Sea
AVSMPPLVGFLLGAKALGGMLAGGLLGCVLLALMMANAGGAWDNAKKYIEKGNLGGKGSDTHAAAVVGDTVGDPFKDTSGPAMNILINVMAIVSLVIAGLLPVDGLIVTLFN

SEQ ID NO: 142723 - protein, 251 aa, Unknown
  Bacterial polypetide isolated from the Sargasso Sea
MSEILYGVIAAVVSLLTAGILFLRVQRINVVNEDVKNIGDLIKEGAMAFLKREYTVLSMFVIAVFVILVVFIDLDVFGIIGTSQGNINMSISYLIGAAGSALAGYFGMAAAVRGNSRTTEASQKSLNNGLRVAFSTGAVPGFAVVGIGLLGVSVLYLVFESATVIAGFGFGASSVGLFARVAGGVYTKAADVGADLVGKVEAGLPEDDPRNPATIADNVGDMVGDTAGMSADLFESYAGSLIATIALAVAA

SEQ ID NO: 142724 - protein, 222 aa, Unknown
  Bacterial polypetide isolated from the Sargasso Sea
LDSLGNTTAAIAKGFAIGSAAVTALALFSAFVQSAGIEKLDITEVEVTLGLFLGGMFPFLFAAMTINAVGRAAFKMIEEVRRQFNEIPGLREGKEGVVPDYTKCVDIATTAALKEMLLPGGLAIALPLIIGFWDKEALGGFLAGSLVTGFLLAIFMANSGGAWDNAKKYIEAGGGAGKGSDEHKAAVIGDTIGDPFKDTSGPAMNIVIKVMTIVSLIFASAF

SEQ ID NO: 142725 - protein, 198 aa, Unknown
  Bacterial polypetide isolated from the Sargasso Sea
AFSAVVGKENPEFSLALTEPIVLVGMFIGVCIPFLVSSITMTAVGDAAFEMINEIRRQFKEITGLMEGTAEPDSEKCVEIATKAALKKMMLPGIIAVSMPAIVGFGLGAQALGGMLAGGLLGCVSLALMMANAGGAWDNAKKYVEKGNLGGKGSDTHAAAVVGDTVGDPFKDTSGPSMNILINVMAIVSLVIAPLLSI

SEQ ID NO: 142726 - protein, 142 aa, Unknown
  Bacterial polypetide isolated from the Sargasso Sea
LEGTGEPDTDKCVEIATRAALQRMLLPGVIAVSMPPLVGFLLGAKALGGMLAGGLLGCVLLALMMANAGGAWDNAKKYIEKGNLGGKGSDTHAAAVVGDTVGDPFKDTSGPAMNILINVMAIVSLVIAGLLPVDGLIVTLFN

SEQ ID NO: 142727 - protein, 172 aa, Unknown
  Bacterial polypetide isolated from the Sargasso Sea
GIFIGGAIPFLIASITMTAVGDAAFEMINEIRRQFKEIPGLLEGNAEPDTAKCVDIATAAALKKMLLPGVIAVSAPPLVGLGIGAEALGGMLAGGLLVCVLMALFMANAGGAWDNAKKYIEKGNLGGKGTDTHSAAVVGDTVGDPFKDTSGPSMNILINVMAIVSLVIAPLL

SEQ ID NO: 142728 - protein, 204 aa, Unknown
  Bacterial polypetide isolated from the Sargasso Sea
GCHSFSIIFCFCSSAGLSEIGLNITKVEVTAGLFLGGMFPFLFAAMTINAVGRAAFKMIEEVRRQFKEIPGLREGKEGVKPDYTRCVDIATSAALKEMLLPGGLAIALPLIIGFWNKEALGGFLAGSLVTGFLLAIFMANSGGAWDNAKKYIEAGGGAGKGSDEHKAAVIGDTIGDPFKDTSGPAMNIVIKVMTIVSLIFASAF

SEQ ID NO: 142729 - protein, 206 aa, Unknown
  Bacterial polypetide isolated from the Sargasso Sea
MAELQEPELGQVISINKRAKQFGALDLGSNSFHLVIAKENHGRIQILDRHKETVRLAEGLTKNKKINKATEDRALACLMRFAERLQALNTDDVRAVGTSAFRRASNSKGFLKRAEKILGKPIEIVSGHEEARLIYLGVCSNYEHGESPSLVVDIGGGSTEIILGENLTPTTLDSLNIGCITLSQKFFPRGVATKKGMDRAINQALA

SEQ ID NO: 142730 - protein, 215 aa, Unknown
  Bacterial polypetide isolated from the Sargasso Sea
MHACIDLGSNSFHLLIGEWQEGRLTIIERLSEKVQLGENIGGTGNISQQAYQRGMACLHRFKLLMRQYPLEKYWALGTNTFRIAENSEDFVKAAKKIGIDISIISGVQEAILIYAGVISALPVSDSHRLVIDIGGGSTEVIVGEKHHRLLTESLPIGSVAWRDRFFQAASFSHSHLSSQMEKGVEEARSLFMSISPGVKKASWSEAYASSGTTKM

SEQ ID NO: 142731 - protein, 252 aa, Unknown
  Bacterial polypetide isolated from the Sargasso Sea
MTDIAESLVTHQQAYMAAVDLGSNSFHMVIARVIAGDIQLLHREKQKVQLAEGLNDQLVLSEEAIERGLNVLAQFADTLKPFAPQSVRVIATYTLRRARNAATFLRRAKAVFPFPIEVISGQEEARFIYQGVAHFEHFAGRRLVIDIGGGSTEFAIGEGLQPLRLSSRNMGCVSYAMQHFPQGRISEKRFNRAILQAEQELEPIVSSFKAAGWQQAVGTSGTVKTIRDIIVGLGFSSNAIERVHLFALKDHL

SEQ ID NO: 142732 - protein, 509 aa, Unknown
  Bacterial polypetide isolated from the Sargasso Sea
MAAVDLGSNSFHMVIARVVDGALQLLHREKQKVQLAEGLTEDLLLTEEAMLRGLAVLAQFADTLKPVPGQSVRVIATYTLRRAKNSAMFLRRAQTVFPYPIEVISGQEEARFIYQGVAHFEHYQGRRLVMDIGGGSTEFAIGEGFQPLKLASRNMGCVSYAQLHFPNGRISNKKFERAILQAEQELEPIVSAYRETSWQQAVGTSGTIKTIRDIIVGLGWHPVCIEYEHLQQLKNLLIAQENSLQLDLPGLADDRKLLICSGLAILIAAFNMLGISQMYYVDAALREGVLYEMSDRLHHHDIREHTIQSLIKRYSIDTAQAERVRRTALELFAQLRTSWNLTDEMADLLSWAATVYEIGLHINSSSVQRHSSYILKNANLPGFNQEQQQLLATLVRSHRRKIKSEDLSQFYLYNTSTVVSLLVLLRLAVLLNQKRRDDFLPELKAQGQNQQLCLQLPKAWLEQQPLLVADLQQEQLHLKKIAFVLDCPYLIECSLQSPGFDPASAEDDS

SEQ ID NO: 142733 - protein, 509 aa, Unknown
  Bacterial polypetide isolated from the Sargasso Sea
MAELQEPELGQVISINKRAKQFGALDLGSNSFHLVIAKENHGRIQILDRHKETVRLAEGLTKNKKITKAAEDRALACLMRFAERLQALNTEDVRAVGTSAFRRASNSKGFLKRAEKTLGKPIEIVSGHEEARLIYLGVCSNYEHGENPSLVVDIGGGSTEIIFGESLSPTALNSLNIGCITISQKFFPRGIATKKGMNRAINQALAEIEPVKHEFLKHSWSICLGASGTVNTVFAVASSLMANPIIDLETLNKIAAKLIYASSNNGNSLEGMPDDRQAVFPGGLAILIALFRALNIDKMEVSEGALREGLLQDMVGRSYDRDTRELTVSNLADRYRIDRTQSEQVRDTVMTFLSQVAITWELTETTHKNLLSWSSALHEIGMDISHAGYQKHGGYLIENLVMPGFSKSDQSDLARIVRNHRRKFTQDDFGKRKNSKLLKMTILLRLAALLHRGRNHEPIPHIQVEARKKEISLSFSKQWLEGHPLTLLDLENETNYLKSEGVELVVKTH

SEQ ID NO: 142734 - protein, 188 aa, Unknown
  Bacterial polypetide isolated from the Sargasso Sea
MEHGEHLAAIDLGSNSFHMVVARQAQGEIQILDGLSEKVQLGAGLDRENRLDEETVERALECLGRFAQRIAGIPRGSVRVVGTNTLRQARNARDFIRRAEAVLGHDIEVVAGREEARLIYLGVAHTLADDAGQRLVVDIGGGSTELIIGERFESTETESLHMGCVSFAQRFFPNGEITEKAFDRAGRR

SEQ ID NO: 142735 - protein, 443 aa, Unknown
  Bacterial polypetide isolated from the Sargasso Sea
IVTAATSAVRESPNGQDFIRRVLDETNIQIEIISGSEEARLIYLGVLSGMAFEDQSYVIIDIGGGSTELILADKKDAIALTSSRIGAVRLKNDFLNKESISSERSKFLKTFIRGSLEPSVRKIKSRSKGDKPLSMIATSGTATSLGNLISDDLGESKQKLNGYKFKRENLKNVLEKLIKLPVSEIKKIPSLSERRAEIIIPGALILNTAMEMLNFNELTISERALREGLVVDWMLRKGIIKNELNIQSNIRKTTIVHQARKFGVDNTRAEKVIDIAFQIYDQTRNIFHSDNDSKAKEFLWAASNLYNCGKYVNVGSYHKHSWYLIKNCELLGYSEAETNIIASIARYHRKTLPKKRHESWQNLTSKEDKTLVLEMSLILRLAASLDQRPDKVISSVQIKLQENILTFDLLPLNRNNDLLLEKWNLGLCRNVIKELKNLDLKVI

SEQ ID NO: 142736 - protein, 543 aa, Unknown
  Bacterial polypetide isolated from the Sargasso Sea
MLDAVSESKAPAGSQLTRSSAQTRRVAAIDIGTNSTHLLVASVDTTLGTFSIEQAEKSTTRLGERDPDSGELTSEGMQRGYETLRRFRDLAISHDVEQIVTAATSAVREAPNGREFLQSIQDGLGMDVDLVSGPEEARLIYLGVLSGMSFGDRPHLLLDIGGGSTELILADGRDARALTSTRVGAVRLQRDFVKDDPIPPQRRSFLQAFIQGSLEPAVDKVHRRIKPGEIPVLVATSGTAMAIGALAASEDDRPPLKLHGYRVSRQRLDRVVEKLVAMTPEQRRDLSPINDRRAEIIVPGALILQTTMQMLGVDELVLSERALREGLIVDWMLRHGLLEDRFSFQSSIRQRTVIHQVQRFAVNQRRAERVATHALSLYDATEGLMHQDDGQGRELLWAAAMLHACGQHINLSAYHKHSWYLIRHGELLGYSEAEHLMVAAIARYHRRSLPKKRHESWQALVTRDNRRRVSEMALLLRLAAALDRRPEPVVASLRVNTTPDVLDLVLVPERLNQNLSLEQWSLESCAEVVREASGVKLRVSVQG

SEQ ID NO: 142737 - protein, 251 aa, Unknown
  Bacterial polypetide isolated from the Sargasso Sea
MPINDKTPRPQEFAAVDLGSNSFHMVIAREVDGALQIIGRLKQRVHLADGLDERSMLSEEAMERGLNCLSLFAERLQGFSPSSVCIVGTHTLRQALNAPEFLKRAEKVIPYPIEIISGNEEARLIFMGVEHTQPEKGRKLVIDIGGGSTELVIGEDFEPRLVESRRMGCVSFAQMYFPGGTITRENFQRARMAAVQKLENLAWQYRIQGWNVALGASGTIKAAHEVLLAMGEKTGYHPRAPDAADRRSTGT

SEQ ID NO: 142738 - protein, 396 aa, Unknown
  Bacterial polypetide isolated from the Sargasso Sea
VLNHPIEIISGQEEARLIYQGVAHTQHIEGQVLVVDIGGGSTELIIGEGFDHKALTSRKMGCVSFTQSFFANGKLSEKAFNNAVLEAQHQLAPIINQYRKLGWQSCLGSSGSIRTVRDVLQGEEWTDGAITLAGLERLKQEMIRHKRVGDLKLAGLTEERQEVFAAAVAILLGLFTSLPIERMDYSDGALREGLLYEFEERLQHHDIRERTALALSTHYRIDKRQAGRVEQSVLTLFDLLSGPWEMPEEPYRAILGWAARLHEIGLAINYSGIHKHSAYILQNTDLPGFNQDDQALLAALVRFHRKGLKLSELPSLPNHDEQTVLRCIRILRLAVAAHHRRQDNLLPDWHVQAAGDQLVVTLPLDWCDENKLLMQNLEKEHRYCQEQGWPLLFQLG

SEQ ID NO: 142739 - protein, 162 aa, Unknown
  Bacterial polypetide isolated from the Sargasso Sea
NCGHKTIINKAGHQRNCLNEQCLNIHFPRTDPAVIMLIYNNDKILLGRQKVWPSGMYSTLAGFVETGETIENAVRREVFEEAGIKIKNIRYHSSQPWPFPASIMLGFYAEASSTKIKLDENEVEDVQWFSRKEVINFSNQNKFLPRKISIARRLIDDWINEV

SEQ ID NO: 142740 - protein, 168 aa, Unknown
  Bacterial polypetide isolated from the Sargasso Sea
FCAKCGAASEVTMAGWQRTCPICHSHHFPRTDPVVIMLITYGNSVLMGRSPGWPEGMFSLLAGFVEPGETLEAAVRREVFEEAGVQVGEVDYLSSQPWPFPASLMFGCRGRATSRDITLDPAEIEAAMWVTREDMMDIFAGNHPTVLPARKGAIAHFLLENWLADTLE

SEQ ID NO: 142741 - protein, 172 aa, Unknown
  Bacterial polypetide isolated from the Sargasso Sea
MGRANQLLHWLRSNKYSGYSGELNKFDMKEESLVCPTTSTMIYPSIAPCVLAMVTKGDEILLARNNLFPEGLYSVLAGFVEVSESAEETVKREVLEEVSIKVKNLKYHGSQPWPFPSQLMLGFSCEYESGEIIIDKNEIAEANWYKYDKLPYVPPTSSLSGKLINSFVEDHS

SEQ ID NO: 142742 - protein, 199 aa, Unknown
  Bacterial polypetide isolated from the Sargasso Sea
MYYDLRTLNPLLDNNDLALLTNSRGLSYWHNKNRFCGICGHKTKMTDYGHARICSNEACKNKSFPRLDPAVIMLITYQDYCLLGRQKVWPVGMHSTLAGFVEHGETIEQAVARETFEETGVKIRNIQYKYSQPWPFPSSLMLGFHAEAYDKKLHIDYSELEKADWFSKEYIKASPENEIFKLPGKISIARRLITDWINN

SEQ ID NO: 142743 - protein, 172 aa, Unknown
  Bacterial polypetide isolated from the Sargasso Sea
MGRANQLLHWIRSNKYSGYSGELNKFDTNEESLICPTTSTMIYPSIAPCVLAMVTRGDEILLARNNLFPEGLYSVLAGFVEVSESAEETVKREVLEEVNIKVKNLKYYGSQPWPFPSQLMLGFSCEYDSGEIKVDETEIVEANWYKYNDLPYVPPTTSLSGLLINSFVEDHS

SEQ ID NO: 142744 - protein, 188 aa, Unknown
  Bacterial polypetide isolated from the Sargasso Sea
MHGGQWIYLGRDESGPVIAVDIAPVVSDRDDAVRRLGGGFGDMRTRMANLSVDEAALAAQARAIFHWHQGHRFCGACGHPNMVAEAGYRLQCSNPDCGKSHFPRTDPAVIMLIHHQDHVLLARSPQFLPGMVSVLAGFVEPGETLEQAVAREVYEEVGIKIKRPRYVASQPWPFPGSLMLGFIAEAET

SEQ ID NO: 142745 - protein, 127 aa, Unknown
  Bacterial polypetide isolated from the Sargasso Sea
ISPCVLAMITKEDKILLARNTLFPEGLYSVLAGFVEVSESAEETVAREVLEEVNIKVKNINYFGSQPWPFPSQLMLGFSCEYESGEIIVDEKEIAEANWYQVDDLPFIPPTTSLSGRLIKSFVEDHS

SEQ ID NO: 142746 - protein, 164 aa, Unknown
  Bacterial polypetide isolated from the Sargasso Sea
GVCGNRTKPSKCGHQRDCTNRECDTSHFPRTDSAVIMLVHDRDRTLLGRQHFWPEGMYSLLAGFVEPGETIEHAVAREVYEESGIIVKNVKYLHSQPWPFPSSLMLGFTAEAVTEKINHNDNEIEDVQWFTRDEMLDFKSQGKFLPRELSISRRLINDWLGLNH

SEQ ID NO: 142747 - protein, 184 aa, Unknown
  Bacterial polypetide isolated from the Sargasso Sea
MRKYGPILNDIEASFLALSNGMFFWQNTHKFCGSCGFQNFSTEGGFVMKCSSDKCGKSHFPRTDPAIITLISFQDKVLLGRSPRFPDSMYSTLAGFVEPGESLEQALEREVFEEVGIKVKNIRYFNSQPWPFPASLMLGFFAEAVNDQMTIDYDEIEDANWFSINELKSLEHPSISGGFKLPRV

SEQ ID NO: 142748 - protein, 249 aa, Unknown
  Bacterial polypetide isolated from the Sargasso Sea
SGIEAAFLKAGFSEVNTYSSIRLDRAAHLRREPDWIQKKLRPGKSNCIPLWQGKNLIRGDDRQEALFPRFSTDIHADPDECIFLGMLDGEAYFAYDCSELQNPPASLEGKFEDLRSLAGLLPPEEGALLAYARGMCHWHQSSRFCPRCGQATRILDAGHQKKCINESCGFSQFPRTDPAVIMLVQDGDRVVLGRQSRWPAGMHSILAGFVEPGESLEDAVVREVMEETGIEVERPEYQSSQPWPFPASL

SEQ ID NO: 142749 - protein, 183 aa, Unknown
  Bacterial polypetide isolated from the Sargasso Sea
MAYSLAISNWHKNNMFCGKCGRVTKVTKAGHQINCQDKDCLFCIFPRTDPAVIMLVYHKNKTLLGRQKIWPKGMYSTLAGFVEPGETIENSVSREVFEESGISVKNIQYHSSQPWPFPSSLMLGFNAEAKSTKITIDKNEIEDVQWFSKKEITNFHNQEKFLPRKISIARRLIDDWMKCSIQN

SEQ ID NO: 142750 - protein, 217 aa, Unknown
  Bacterial polypetide isolated from the Sargasso Sea
MGVLDGVGAYSIDLNDSSEEADLEPVHLRKLYGRISDEEWVLAGRAEQIINYERTHQYCGRCGTPTETNPHDRGKFCPNCKHIAFPRLSPAMIVLVEREDEALLAWGRQFPSRFYSTLAGFVEPGESLEQAVAREVMEEVAVEVTDIRYFGSQPWPFPHSLMCGFHCNYVSGEIAIQEEEIVEAGWFKASDLPPCPVGGMSIAGWLIKDWLERQGIH

SEQ ID NO: 142751 - protein, 133 aa, Unknown
  Bacterial polypetide isolated from the Sargasso Sea
YPRVSPCIIVSIHNHEKILLARGVRHREANMYSTLAGFVESGESLEEAVHREVFEEVGVKVKNLRYFNSQPWPFPHSLMVGFIAEYDSGDIRCQENEIDDAQWFDTNALPNVPPKVSIAGQLIAETVSLIGDK

SEQ ID NO: 142752 - protein, 168 aa, Unknown
  Bacterial polypetide isolated from the Sargasso Sea
MGRANQLLHWIRSNKYSGYSGELNKFDTYEESLICPTTSTMIYPSIAPCVLAMVTRGDEILLARNNLFPEGLYSVLAGFVEVSESAEETVKREVLEEVNIKVKNLKYYGSQPWPFPSQLMLGFSCEYDSGEIKVDETEIVEANWYKYNDLPYVPPTTSLSGLLINSFV

SEQ ID NO: 142753 - protein, 189 aa, Unknown
  Bacterial polypetide isolated from the Sargasso Sea
SFLALAKGMTFWHMNHNFCGTCGAKTKVQEAGFVKKCQNKNCNLSHFPRTDPAIITLVSFKNEILLARSPRFPERMYSTLAGFVEPGETLEQAVEREVFEEVGVKVKNIKYFDSQPWPFPASLMLGFFAVAENKKIKIDYNEIQDAHWFSYKNLNELNHPNISSGFKLPRKDSIARRLVNNWIKNNKFN

SEQ ID NO: 142754 - protein, 261 aa, Unknown
  Bacterial polypetide isolated from the Sargasso Sea
MIQPFYASSAINRHGNYRNDEKLLNTIISEKDTKFIPFYNGKNLFSQIDDKIKPIIFNKIQLYNFLPNGIGTTIFLGVANTLKYVGIDLSSPNQKFDCWLKENNIIIDDLRKYGPILNDIEASFLALSNGMFFWHYTHKFCGSCGFQNFSTEGGFVMKCSNDKCGKSHFPRTDPAIITLISFQDKVLLGRSHRFPDSMYSTLAGFVEPGESLEQALEREVFEEVGIKVKNIEYFNSQPWPFPASLMLGFFAEAINDQMTID

SEQ ID NO: 142755 - protein, 145 aa, Unknown
  Bacterial polypetide isolated from the Sargasso Sea
MAMHCHRCQHRSYPRVSPCIIVSIHDNEKILLAKGVRHRESNMYSTLAGFVESGESLEQAVHREVFEEVGVKVKNLRYYNSQPWPFPHSLMVGFVAEYDEGEIRCQENEIDDAQWFDIDALPTIPPKVSIAGQLIAETVSLIGDK

SEQ ID NO: 142756 - protein, 302 aa, Unknown
  Bacterial polypetide isolated from the Sargasso Sea
MNSHNHYADEFLDRASHLRTDETWLTAQFEDERTLVIPVWRTRNLVVNREQPQGVMLPTTRARDLIDAARATVLLGIRNDVAHFAVDISPLEERDVCGIHDDSEFVDLRSVGPVMDRSEASILAYAKGIMYWHARHEFCGSCGHPTEIREAGHLRRCTNPECGALHFPRTDPAVIMLVAKDDRALLGRKAEWMEGMYSTLAGFVEPGESLEQAVAREVMEEAGVKITNIRYHSSQPWPFPSSLMLGFYADALNEDFHRNDDELEDLQWFTRKELADGGAGIAKRPRSDSIARRLIDEWILQG

SEQ ID NO: 142757 - protein, 130 aa, Unknown
  Bacterial polypetide isolated from the Sargasso Sea
MLVTHPTAKKCLLGRNRRFKGMRFSTLAGFVEPGETLEQAVIREVFEETGVLVSKAKYRGSQPWPFPASIMLGFRAEADSEEIKCDDDELIEARWFTKEETLALSKLEDGLPPSNFSISRWLIDVWLNEP

SEQ ID NO: 142758 - protein, 116 aa, Unknown
  Bacterial polypetide isolated from the Sargasso Sea
PEKMYSTLAGFVEPGETLEQAVSREVFEEVGVKVKNITYFGSQPWPFPASLMLGFFAEAEEKSLHIDFNEIEDAQWFSIKNIQELNHPLINGGFKLPRADSIARRLVNQWVNNFKG

SEQ ID NO: 142759 - protein, 270 aa, Unknown
  Bacterial polypetide isolated from the Sargasso Sea
MHFKRFFDIKDKNNNILIIFKNNKIIYEPNLKTFLLDENFLDINVKDHLYVGIANNGNDIFAVDISNYKNEINIGYKSLVEFDIRHLLAMSEPEEIVLMGRANQLLHWVRSNKYSGYSGELNQFNDKEQAFSCPSTSSMIYPQISPCVLAMIIKGNQILLARNNLFPEGLYSVLAGFVEVSESAEETVEREVMEEVGIKVKNIEYVGSQPWPFPSQLMLGFKCEYDSGEIVIDENEIIEAGWYTVENLPYVPPPSSLSGKLINLFVEDHS

SEQ ID NO: 142760 - protein, 154 aa, Unknown
  Bacterial polypetide isolated from the Sargasso Sea
CGSSMHLVNWELAALCHKCGHRCYPRINPCVLIAVVNDKNQLLLARSARHKSGFFSILAGFVESAETLEQAAVREVKEEVGIDICNLRYMGSQPWPFPHSLMTAFIADYKSGELICQPDEIEEAHWFDLDQLPEVPTVATLSGQVIQYIARGGR

SEQ ID NO: 142761 - protein, 143 aa, Unknown
  Bacterial polypetide isolated from the Sargasso Sea
KKCLNIHFPRTDPAVIMLIYNDDKILLGRQKVWPSGMYSTLAGFVETGETIENAVRREVFEEAGIKIKNIQYHSSQPWPFPASVMLGFYAEASSTKIKLDENEVEDVQWFSRKEVINFTHQNKFLPRKISIARRLIDDWINKV

SEQ ID NO: 142762 - protein, 200 aa, Unknown
  Bacterial polypetide isolated from the Sargasso Sea
MRKYGPILDDIEASFLALSNGMFFWQNTHKFCGSCGFQNFSTEGGFVMKCSSDKCGKSHFPRTDPAIITLISFQDKVLLGRSPRFPDSMYSTLAGFVEPGESLEQALEREVFEEVGIKVKNIRYFNSQPWPFPASLMLGFFAEAVNDQMTIDYDEIEDANWFSINELKSLEHPSISGGFKLPRVDSIARRLVDTWMNSFN

SEQ ID NO: 142763 - protein, 254 aa, Unknown
  Bacterial polypetide isolated from the Sargasso Sea
MIIFNNNKILYEPNIKTFLLEENLLNIQIKDHLYVGIANNGKDIYAVDISNNPKDVNIGYESIVEYDLRHLLAISDPNDIVLMGRANQLLHWIRSNKYSGYTGELNKFNTKEEALYCNTTSSMIYPSISPCVLAMVTRGSEILLARNNLFPEGLFSVLAGFVEVSESAEETVEREVMEEVGIKVKNISYFGSQPWPFPSQLMLGYKCEYDSGDLLIDNNEIVEANWYNVDNLPYVPPTTSLSGKLINSFVEDHS

SEQ ID NO: 142764 - protein, 160 aa, Unknown
  Bacterial polypetide isolated from the Sargasso Sea
MDAGHQKKCMNESCGFSQFPRTDPAVIMLVEDGDRVVLGRQSRWPAGLHSILAGFVEPGESLEDAVVREVREEAGIEVERPEYQSSQPWPFPASLMLGFRCSALAGQTVKVNTEELESARWFSREELEQSPEDQTFRLPRRDSIARRLLNEWLEEDSKPQ

SEQ ID NO: 142765 - protein, 284 aa, Unknown
  Bacterial polypetide isolated from the Sargasso Sea
MDFIEHQDILNLFVMYFKRFLEINDKENNKFILFKNNKIFYETEIKTFLLDSNYLDIDIDNSIVIGIAESESKIYAVDISNCENDINIGYKSLVEYDVRHLLAISEPEDIVLMGRANQLLHWIRSNKYSGYSGELNKFDTNEESLVCPTTSTMIYPSIAPCVLAMVTRGDEILLARNNLFPEGLYSVLAGFVEVSESAEETVKREVLEEVNIKVKNLKYYGSQPWPFPSQLMLGFSCEYDSGEIKVDETEIVEANWYKYNDLPYVPPTTSLSGLLINSFVEDHS

SEQ ID NO: 142766 - protein, 270 aa, Unknown
  Bacterial polypetide isolated from the Sargasso Sea
MHFKRFFDIKGTNNNILIIFKNNKILYEPNLKTFLLEESLLDINLKDHLFVGIANDGKDIYAVDASNSTNDFNIGYESLIEYDLRHLLAISQPNDIVLMGRANQLLHWVRSNKYSGFSGKLNKFNEKEQAMYCTATSSMIYPQIAPCVLAMIIKGDEILLARNNLFPEGLFSVLAGFVEVSESAEETVEREVMEEVGIKVKNIEYVGSQPWPFPSQLMLGYKCEYESGEIVIDENEIVEANWYKVDNLPYVPPTTSLSGKLINLFVEDHS

SEQ ID NO: 142767 - protein, 276 aa, Unknown
  Bacterial polypetide isolated from the Sargasso Sea
MINLSGTEISKRRAIWVIFSRGKIVVRENDPILPEAHFEELSFLASYQEDVHELPPLNDAAVTESPIYVVDVGSEHIESPGWERVSLRQLLFTQQNIAFSVLGRAWQYIHFLRTHKFCGQCGAEMERVNWEMAMQCHRCKHRTYPRISPCIIVAIHNKEKLLLAKGVRHKEANMYSTLAGFVESGESLEEAVHREVFEEVGVKVKNLRYFNSQPWPFPHSLMVGFIAEYDGGDIVCQENEIDDAQWFDVDALPNIPPKVSIAGQLIAETLSLISDK

SEQ ID NO: 142768 - protein, 259 aa, Unknown
  Bacterial polypetide isolated from the Sargasso Sea
MPLTEQARWFVLGGDHLVLLDDQGRIPQGPRACLPSHLQHAAFERFDEWDGLPCLLLDLGEAADTEALIPLRQLMVAGDETGFQLAGRAWQLATFRRTHRFCGECGTPMSPKVGEWAQGCRHGHVVYPRISPCIIVAVRKGPAILLAAHRRHYQAEDPMYTVLAGFVEAGENLEQCVAREVFEESGIRVTNVRYVASQPWPFPHSLMMGFTADYESGEIRVQDEELVAADFFEADGLPRLPPHGTIARRLIALCLGDQA

SEQ ID NO: 142769 - protein, 149 aa, Unknown
  Bacterial polypetide isolated from the Sargasso Sea
MKDVSKAILKICLHYSEMPVPSRGHASDAGIDLSAMAYEVKADHVFFIDTGVSVQLSQGYYLEVVPRSSIVKKDFIMANSVGIIDPDYRGRIFVPLRYLGEGSGQEACRWLLEQRIAQMIIRRLEPCDIEIVDELDQTVRGEGGFGSTG

SEQ ID NO: 142770 - protein, 76 aa, Unknown
  Bacterial polypetide isolated from the Sargasso Sea
GRLRLSRERRGDPVHHGEEDFVVQKGDRVAQLILERIVTPDVVECEDLEDTERGAGGFGSTGVTTKGGPNAADASA

SEQ ID NO: 142771 - protein, 145 aa, Unknown
  Bacterial polypetide isolated from the Sargasso Sea
MNLNIKPLSDDIYSMYNNHSHFHQGDAGLDLFITKDQVILPGTTARIHLGISCENMDSKPYLLMARSSISKTPLRLSNSVGLIDASYRGEIMAAVDNIKDFSFSLEKGQRLFQLVSMNGDAIHFELVDTLSKTSRGEGGFGSTGE

SEQ ID NO: 142772 - protein, 191 aa, Unknown
  Bacterial polypetide isolated from the Sargasso Sea
MEKKPGRNYKVLQLSVKIEKSELAKQLEEKFGITWNLQQQYPFDAGYDLRACEAEDIWIEPNERAIVGTGLYFQIDEPYWEIQIRPRSGLAFKNGIMIVNSPGTVDFAYRNEVKVILYNSGKETFMVAQGDRIAQACFRPVPLVSFEYVDAIETSVVLSQGNRWVQEEKMKERGITKNKKDTISLDNNSTG

SEQ ID NO: 142773 - protein, 70 aa, Unknown
  Bacterial polypetide isolated from the Sargasso Sea
MLILFGLIDGGYRGELIGMVDNIYDKDFHIKRGERYFQLVAVDSSPIDFELVEELSKSSRGEGGFGSTGK

SEQ ID NO: 142774 - protein, 46 aa, Unknown
  Bacterial polypetide isolated from the Sargasso Sea
SDDFLINNKDRIAQMVLIPVVKMDLEETDDLPNTVRGKGGFGSTGK

SEQ ID NO: 142775 - protein, 85 aa, Unknown
  Bacterial polypetide isolated from the Sargasso Sea
MAKVLIKKLDPAVELPTYKTEGASGMDLMALVKEPINLKPNSSCLVPTGLAVAFSSDFEIQIRPRSGLAAKNSISVLNTPGTIDS

SEQ ID NO: 142776 - protein, 128 aa, Unknown
  Bacterial polypetide isolated from the Sargasso Sea
YQTIGAAGLDLYAANSEKINLSTLERYAIPTGISLAIPSGYEGQIRPRSGLFLKHGITINFGTIDSDYRGEIFILVVNLSKSNFIIERGMRVAQIVFNKFERVNLISKLELDQTLRGSSGLGSTGIKE

SEQ ID NO: 142777 - protein, 159 aa, Unknown
  Bacterial polypetide isolated from the Sargasso Sea
MKRIHDRAVPLVRGTEGSAGFDLSITQNVTIPPKGKALLPTGWEMAIPDGWYGKIHARSGVSHQKHTEVVAGVIDSDYRGEVKVLMFNHSNKPVVFCTGDRVGQMTFQEMNVPEVIEVSKLGETDRGKKGFGSTDVKPEQCSVGGPGEQQGVGDMKAAT

SEQ ID NO: 142778 - protein, 107 aa, Unknown
  Bacterial polypetide isolated from the Sargasso Sea
VSIPAGATVLVSTGISIAVPKEHVALIWDRSSMGVKGVHRHAGVIDSGYRGEVKVCLHNTTKHPYHIERGDRIAQMLIQEAPNFIQHVVRELDSTDRGDGGFGSTGK

SEQ ID NO: 142779 - protein, 233 aa, Unknown
  Bacterial polypetide isolated from the Sargasso Sea
MPTRATVGSAGLDLYAPQHIECLPGKITRIPLGIHFALPRGAWGLIASRSSLAARGLSVGGGIIDNDYRGEVVVLLYNFSEKSHYFLPGERCAQLIVIFSPFVYSPLFEQEVVEVNELESTEREGGFGSTGKRATEQAVREIPCTGIPIGEQCIGSLEEARGLSMWHATTDKEATDDQLSLLAKQDFSFRTRTVHPWEEKFLSSTFDNHKVVIRQTIFSDGTSAVDKLVRGNE

SEQ ID NO: 142780 - protein, 123 aa, Unknown
  Bacterial polypetide isolated from the Sargasso Sea
RPRSGLAHKNGIMIVNSPGTVDFAYRNEVKIILYNSGNRTFTISPGDRIAQACFRPVPQVSFEYVDAIEQTVILSNAHPWVQEEKVKKRGLVKKPKRETVSLSENDTEELIINRGGFGSSGTR

SEQ ID NO: 142781 - protein, 32 aa, Unknown
  Bacterial polypetide isolated from the Sargasso Sea
MVLSPVTKIQLEEISDLPETIRGEGGFGSTGK

SEQ ID NO: 142782 - protein, 55 aa, Unknown
  Bacterial polypetide isolated from the Sargasso Sea
IKVILFNHGKNDFLINNKDRIAQMILTPVIKMDLEETDDLPETIRGEGGFGSTGK

SEQ ID NO: 142783 - protein, 39 aa, Unknown
  Bacterial polypetide isolated from the Sargasso Sea
GLRIAQMVLCPVIKATLKEVKVLESTERGSGGFGSTGIK

SEQ ID NO: 142784 - protein, 66 aa, Unknown
  Bacterial polypetide isolated from the Sargasso Sea
MLNDVKIKILDNKLTKLPDYLTKGSAGLDLRASINRTIEVKPNETKLISTGISIFIEDSKYAGLIL

SEQ ID NO: 142785 - protein, 96 aa, Unknown
  Bacterial polypetide isolated from the Sargasso Sea
MVRVLIKKLDKKVKLPEYKTTGSSGLDLTAFIEKKIVIKPGENALVPTGISIAIPEDTEVQIRPRSGLAAKNNISVLNTPGTIDSDKGGEIKVILF

SEQ ID NO: 142786 - protein, 132 aa, Unknown
  Bacterial polypetide isolated from the Sargasso Sea
MPVPSRGHTSDAGIDLTAMAYEAKADHVFFIDTGVSVQLSQGYYLEVVPRSSIVKKDFIMANSVGIIDPDYRGKIFVPLRYLGEGSGEEACRRLLEQRIAQMIVRRLEPCDIEIVDELDQTVRGEGGFGSTG

SEQ ID NO: 142787 - protein, 107 aa, Unknown
  Bacterial polypetide isolated from the Sargasso Sea
NNNLCSYRLAQRSSISKYPLQLANCEGIIDSGYRGNLIAAFHHYLKDLSVDDSGTIKINQEQLNFKVDKGMRLVQIVGPTMDPIKVKIVDELPDSTRGEGGFGSTGK

SEQ ID NO: 142788 - protein, 91 aa, Unknown
  Bacterial polypetide isolated from the Sargasso Sea
MLKIIIEKVSQSENFQLPKYHSDNSSGLDIVADIKNPVSLKQNEIFLVPTGIKLKIPRGYEGQVRPRSGLALNHGITILNSPGNIDSDYRG

SEQ ID NO: 142789 - protein, 139 aa, Unknown
  Bacterial polypetide isolated from the Sargasso Sea
ICLHYPEMPVPSRGYASDAGIDLTAMTYEAKAGHVFFIDTGVSVQLSQGYYLEVVPRSSIVKKDFIMANSVGIIDPDYRGRIFVPLRYLGEGSGEEACRRLLEQRIAQMIIRRLEPCDIEIVDELDQTVRGEGGFGSTG

SEQ ID NO: 142790 - protein, 133 aa, Unknown
  Bacterial polypetide isolated from the Sargasso Sea
MPKYQTSGSAGMDLIACNEEKLLLKPNESTVIQSGISIYIEDPEFAGIIIPRSGLGAKKGLVCGNLTGLIDSDYQGPLGISLWNRSNENIEITPGDRVAQLVVIRVNQVQLEQVEEFNLSDRGDKGFGSTGIS

SEQ ID NO: 142791 - protein, 145 aa, Unknown
  Bacterial polypetide isolated from the Sargasso Sea
MHLKIKILSNNARDLYENHGHFHQGDAGLDLFIIDELTIEPGETAMIKSHIACENNDGLPYLLMPRSSISKTPLRQCNSVGLIDAGYRGEIISAVDNIKNTPFTIKRGQRLFQLVSMDGGPISFEIVSELSDTDRGDGGFGSTGK

SEQ ID NO: 142792 - protein, 149 aa, Unknown
  Bacterial polypetide isolated from the Sargasso Sea
MKDVSKAILKICLHYPEMPVPSRGHASDAGIDLTAMAYEAKADHVFFIDTGVSVQLSQGYYLEVVPRSSIVKKDFIMANSVGIIDPDYRGRIFVPLRYLGEGSGEEACRRLLEQRIAQMIIRRLEPCDIEIVDELDQTVRGEGGFGSTG

SEQ ID NO: 142793 - protein, 58 aa, Unknown
  Bacterial polypetide isolated from the Sargasso Sea
RGELKIILFNHSKKEFIINNKDRIAQMVILPILKFDFEETDKLQDTIRGSGGFGSTGK

SEQ ID NO: 142794 - protein, 149 aa, Unknown
  Bacterial polypetide isolated from the Sargasso Sea
MKDVSKAILKICLHYPEMPVPSRGHASDAGIDLTAMAYEAKVDHVFFIDTGVSVQLSQGYYLEVVPRSSIVKKDFIMANSVGIIDPDYRGRIFVPLRYLGEGSGEEACRRLLEQRIAQIIVRRLEPCDIEIVDELDQTVRGEGGFGSTG

SEQ ID NO: 142795 - protein, 145 aa, Unknown
  Bacterial polypetide isolated from the Sargasso Sea
MHLKIKSLTQKAKDFYENHGHFHQGDAGLDLFIIDSLTIPPGETAIIKSNIACENTDEMPYLLMPRSSISKTPLRQCNSVGLIDAGYRGEIMAAVDNIKDIPYTVEPGQRLFQLVSMDGAPITFEIVSELSQTDRGDGGFGSTGK

SEQ ID NO: 142796 - protein, 98 aa, Unknown
  Bacterial polypetide isolated from the Sargasso Sea
HLQIACETDDGRPYLLMPRSSIAKTPLRLCNSIGLIDGGYRGEIMAVVDNIKKQSYTVNPGQRLFQLVAMDGSPIHFKLVDKLSESTRGEGGFGSTGE

SEQ ID NO: 142797 - protein, 298 aa, Unknown
  Bacterial polypetide isolated from the Sargasso Sea
MPLPTYATPIQRTYYYAYLFFCGVVFFFLVAPLIAIVPISFSVSPFMVFTEGMLAWPPDPEAWSLRWYRNMIGDCSADVVSSTVPCSTKWMKGTVNSFYIGIIATVIATVLGTMAALGLSRPHMPYKALIMSILISPMIVPLIITAAGMFFFYARINLVYTFTGVILAHVALATPFVVITVTATLVGFDMNMVKAAQSLGAKPMRTFFKVIMPLILPGIISGALFAFITSFDEVVIVMFMASIDQLTIPKQMWAGIRQEISPVILCMATCLVILSIVLLTTVELLRRRAERLRGIKAR

SEQ ID NO: 142798 - protein, 149 aa, Unknown
  Bacterial polypetide isolated from the Sargasso Sea
MGESPVVKVAKTDHNARMPTKGSEYAAGWDLYCLEDTVVNFRSSVKLRTGLRVAIPEGFEGQVRARSSLGSKGLILPHSIGTIDADYRGELFVLMTWIGEGESYEVKSGERIAQLVIAPIPDVQFTEVDEGDLGETKRGDGGFGSTGRF

SEQ ID NO: 142799 - protein, 145 aa, Unknown
  Bacterial polypetide isolated from the Sargasso Sea
MHLKIKPFSEDIFSMYKHHSHFHQGDAGLDLFIIENQTIKAGSSTRIHLGISCENLDSRPYLLMARSSISKTPIRLSNSVGLIDAGYRGEIMAAVDNIKDYSYNIEKGQRLFQLVSMNGEAIHFDLVETLSDSSRGKGGFGSTGK

SEQ ID NO: 142800 - protein, 145 aa, Unknown
  Bacterial polypetide isolated from the Sargasso Sea
MKLRIKAFNKRAQELYENHSHFHAGDAGLDLFVIEDQVIPAKSTHPIPLQIACENVDNKAYYLFPRSSISKTPLRLANSIGLIDGGYRGELVGMVDNIYDEDFHIKRGERYFQLVAVDSSPIEFELVTELSESSRGEGGFGSTGR

SEQ ID NO: 142801 - protein, 136 aa, Unknown
  Bacterial polypetide isolated from the Sargasso Sea
NQKAKLPSYKTVGSSGMDLMACIDEPITIKPNESKLVPTGIAIAIPEDTEVQIRPRSGLAAKSSISVLNTPGTIDSDYRGELKIILFNHGKDEFIVNDEDRVAQMVLMPILKVEIEETNELPETIRGSGGFGSTGK

SEQ ID NO: 142802 - protein, 87 aa, Unknown
  Bacterial polypetide isolated from the Sargasso Sea
ALVIPRSGLGSKHGIVMGNLVGLIDSDYQGELKVPLWNRSTKDFLVSSGDRIAQMILVPIKQAKLRVVEDFSETGRGTKGFGSSGVD

SEQ ID NO: 142803 - protein, 88 aa, Unknown
  Bacterial polypetide isolated from the Sargasso Sea
MTINIEIEWLKGNEDIKSLAKATPKSAGFDLPAAIKKSVKILPSDFHLIPLGFKLAIPEGYEGQIRPRSGLAAKSGISVLNSPGTIDS

SEQ ID NO: 142804 - protein, 78 aa, Unknown
  Bacterial polypetide isolated from the Sargasso Sea
LAAKNNISVLNTPGTIDSDYRGEIKIILFNHGGSEFIINNNDRIAQMILMPVNKMELEEVKNLPSTLRGKGGFGSTGK

SEQ ID NO: 142805 - protein, 133 aa, Unknown
  Bacterial polypetide isolated from the Sargasso Sea
MVKVLIKKLDPTVEIPTYKTEGASGMDLMAFIKKPIKLVPQSSCLVPTGLSVAFSDEYEIQIRPRSGLAAKNNISVLNTPGTIDSDYRGEIKIILFNHGNKEFIINNKDRVAQMILMPIHKMDLEEVKDLPDT

SEQ ID NO: 142806 - protein, 48 aa, Unknown
  Bacterial polypetide isolated from the Sargasso Sea
HGQETFTVKPGDRIAQMVITRIERVNLEKSEFITKTIRGSGGFGSTGI

SEQ ID NO: 142807 - protein, 68 aa, Unknown
  Bacterial polypetide isolated from the Sargasso Sea
YTLELLIVDYRGEIKVILFNHGKNDFLINNKDRIAQMILTPVIKIDFEETDDLPETIRGEGGFGSTGK

SEQ ID NO: 142808 - protein, 127 aa, Unknown
  Bacterial polypetide isolated from the Sargasso Sea
KTSGSSGMDLMACIAEPITIKPNESKLIPTGIAIAIPEDTEIQIRPRSGLAAKSSISVLNTPGTIDSDYRGELKIILFNHGKDEFTVNDEDRVAQMVLMPILKVEVEETNELPETIRGSGGFGSTGK

SEQ ID NO: 142809 - protein, 134 aa, Unknown
  Bacterial polypetide isolated from the Sargasso Sea
MVKVLFKRLNQKAKLPSYKTVGSSGMDLMACVDEPLTIKPNESKLVPTGIAIAIPEDTEVQIRPRSGLAAKSSISVLNTPGTIDSDYRGELKIILFNHGKNEFIVNDEDRVAQMVLMPILKVEIEETNELPRDN

SEQ ID NO: 142810 - protein, 74 aa, Unknown
  Bacterial polypetide isolated from the Sargasso Sea
GIVLGNLVGLIDSDYQGELMVPAWNRSENDFEIHPGDRIAQMIIVPVMQANFEIVEEFTQTARGTKGFGSSGLN

SEQ ID NO: 142811 - protein, 128 aa, Unknown
  Bacterial polypetide isolated from the Sargasso Sea
MVKVLFKRLNQKVKLPIYKTAGSSGMDLMACLDKPITIKPNESKLIPTGIAIAIPEDTEVQIRPRSGLAAKSSISVLNTPGTIDSDYRGELKIILFNHGKDEFTVNDEDRVAQMVLMPILKVEVEETN

SEQ ID NO: 142812 - protein, 73 aa, Unknown
  Bacterial polypetide isolated from the Sargasso Sea
MKKAIDLKILDPRIGTEFPLPAYATPGSAGLDLRACLDNTLVLAPGQTVLIPTGLSIFIGDANLCATILPRSG

SEQ ID NO: 142813 - protein, 142 aa, Unknown
  Bacterial polypetide isolated from the Sargasso Sea
MAPLGVKKLSYDARLPTRGSDGAVGYDLYSSEDATVPCQAGRALVGTGIALSIPDGVYGRVAPRSGLAVKHCINVGAGVIDPDYTGEVKVVLFNHGTEDFEIKKGDRIAQLILERCETPMIKEIGLLEETLRGDGGFGSTGL

SEQ ID NO: 142814 - protein, 106 aa, Unknown
  Bacterial polypetide isolated from the Sargasso Sea
PNESKLIPTGIAIAIPEDTEVQIRPRSGLAAKSSISVLNTPGTIDSDYRGELKIILFNHGKDKFTVNDEDRVAQMVLMPILKVEIEETNELPETIRGSGGFGSTGK

SEQ ID NO: 142815 - protein, 78 aa, Unknown
  Bacterial polypetide isolated from the Sargasso Sea
LAAKSNISVLNTPGTIDSDYRGELKIILFNHGKKYFIVNNNDRVAQMVLMPVLKIDFEEVNELPETIRGSGGFGSTGK

SEQ ID NO: 142816 - protein, 111 aa, Unknown
  Bacterial polypetide isolated from the Sargasso Sea
MIKVLIKKLDSKAKLPSYKTDGSSGMDLMAFTNNVIKIAPNSSALIPTGLSLAIPKDCEIQIRPRSGLAINSNISVLNTPGTIDSDYRGELKVILFNHGKKEFVVNHNDRI

SEQ ID NO: 142817 - protein, 145 aa, Unknown
  Bacterial polypetide isolated from the Sargasso Sea
MVKVLFKRLNQKAKLPSYKTAGSSGMDLMACIDGPITIKPNESKLVPTGIAIAIPEDTEVQIRPRSGLAAKSSISVLNTPGTIDSDYRGELKIILFNHGKDEFIVNDEDRVAQMVLTPILKVEIEETNELPETIRGSGGFGSTGK

SEQ ID NO: 142818 - protein, 89 aa, Unknown
  Bacterial polypetide isolated from the Sargasso Sea
MIKVLIKKLNSSVKLPSYKTNGASGMDLMAWLEKPINLEPGKSCLVPTGLSVAFPKEYEIQIRPRSGLAAKNNISILNTPGTIDSDYRG

SEQ ID NO: 142819 - protein, 124 aa, Unknown
  Bacterial polypetide isolated from the Sargasso Sea
MAKVLIKKLASSVELPAYKTDGASGMDLMAFIKEPIILKPNSSCLVPTGLSVAFSSDFEIQIRPRSGLAARNNISVLNTPGTIDSDYRGELKVILFNHGNNNFLINNKDRIAQMILTPVVKMSP

SEQ ID NO: 142820 - protein, 136 aa, Unknown
  Bacterial polypetide isolated from the Sargasso Sea
NQKAKLPSYKTIGSSGMDLMACVDEPVTIKPNESKLIPTGIAIAIPEDTEVQIRPRSGLAAKLSISVLNTPGTIDSDYRGELKIILFNHGKDEFTVNDEDRVAQMVLMPILKVEIEETNELPETIRGSGGFGSTGK

SEQ ID NO: 142821 - protein, 70 aa, Unknown
  Bacterial polypetide isolated from the Sargasso Sea
VLNTPGTIDSDYRGELKIILFNHGNKDFIVNNNDRVAQMVLLPILKMELEEVDQLPESIRGSGGFGSTGK

SEQ ID NO: 142822 - protein, 145 aa, Unknown
  Bacterial polypetide isolated from the Sargasso Sea
MVKVLVKRLDPKVNLPKYKTIGSSGMDLMAFIENPIKIKPGTSALIPTGISIAFPEEFEAQIRPRSGLAAKQSIGVLNTPGTIDSDYRGELKVIIFNHGENEFIVNCNDRVAQMVLTPVLKVEFKEVNELPETVRGSGGFGSTGK

SEQ ID NO: 142823 - protein, 128 aa, Unknown
  Bacterial polypetide isolated from the Sargasso Sea
MVRVLIKKLDPRVALPSYKTNGASGMDIMAFVKEKIVIKPQTSALIPTGLSVAFSEDYEIQIRPRSGLAAKNNISVLNTPGTIDSDYRGELKIIIFNHSNHDFVVSSNDRIAQMVLTPIAKMELEEAN

SEQ ID NO: 142824 - protein, 99 aa, Unknown
  Bacterial polypetide isolated from the Sargasso Sea
MVKVLVKKLDPNVQLPSYKTDGSSGMDLFAFIKNPVKIKPGTSELIPTGISVAIPINFEIQIRPRSGLAAKSNISVLNTPGTVDSDYRGENKIILFNPW

SEQ ID NO: 142825 - protein, 89 aa, Unknown
  Bacterial polypetide isolated from the Sargasso Sea
MAKVLIKKLASSVQLPTYKTSGASGMDLMAFISETIILKPQSSCLVPTGISVAFSEEFEIQIRPRSGLAAKNNISVLNTPGTIDSDYRG

SEQ ID NO: 142826 - protein, 112 aa, Unknown
  Bacterial polypetide isolated from the Sargasso Sea
SPIKIAPNSLELIPTGLSIAIPEDLEIQIRPRSGLAAKSNIGVLNTPGTIDSDYRGELKIILFNHGNKDFIVNNNDRVAQMVLMPILKMELEEVDQLPESIRGSGGFGSTGK

SEQ ID NO: 142827 - protein, 67 aa, Unknown
  Bacterial polypetide isolated from the Sargasso Sea
TPGTIDSDYRGEIKIILFNHSKENFLVKNGDRIAQMILMPVLKIEFDEVNELPDTIRGSGGFGSTGK

SEQ ID NO: 142828 - protein, 149 aa, Unknown
  Bacterial polypetide isolated from the Sargasso Sea
MGSDVVVRIARVDPGARMPSKGSEHAAGWDLYSLEDTVVPFRSSVKLRTGLHVAIPEGFEGQVRARSSLGSKGLILPHSIGTIDSDYRGELFVLMAWIGDGDSYMVNSGERIAQLVIAPIPEISFTEVDIEDLGATERGDGGFGSTGRF

SEQ ID NO: 142829 - protein, 127 aa, Unknown
  Bacterial polypetide isolated from the Sargasso Sea
IPTRGSQRSAGWDLYSLHDFVIPGNSKHVAKTGIAISIPDHHYGRVAPRSGLTVKYSINIGAGVIDSDYRGEIGVVMFNHGNNNCTISKGDRIAQLIIEKINTSNLVEVDNLDNTQRGCGGYGSTGT

SEQ ID NO: 142830 - protein, 89 aa, Unknown
  Bacterial polypetide isolated from the Sargasso Sea
MVKIKIKKLDPKVKIPQYKTEGSSGMDLMAFVKEPSIIKPNSSELIPTGISIAIPQDTEIQIRPRSGLAAKSKISVLNTPGTIDSDYRG

SEQ ID NO: 142831 - protein, 145 aa, Unknown
  Bacterial polypetide isolated from the Sargasso Sea
MVKVLLKKLDPEVILPSYKTKGSSGMDLMAFLKEPIRILPKTSCLIPTGISIAIPEDVEIQIRPRSGLAAKSNISVLNTPGTIDSDYRGELKIILFNHGKKDFIVNNNDRVAQMVLMPVLKIDFEEVNELPDSIRGSGGFGSTGK

SEQ ID NO: 142832 - protein, 69 aa, Unknown
  Bacterial polypetide isolated from the Sargasso Sea
KHPWKIDSDYRGEIKVVLINLSKDEFTIHPKDRIAQMVFTNAIQVKFKEVQNLDQTKRGDGGFGSTGKD

SEQ ID NO: 142833 - protein, 147 aa, Unknown
  Bacterial polypetide isolated from the Sargasso Sea
MINVGYKIHDHAIDLPKIDYQTIGAAGLDLYAANSEKINLSTLERYAIPTGISLAIPSGYEGQIRPRSGLFLKHGITINFGTIDSDYRGEIFILVVNLSKSNFIIERGMRVAQIVFNKFERVNLISKLKLDPTLRGAGGFGSTGIKE

SEQ ID NO: 142834 - protein, 145 aa, Unknown
  Bacterial polypetide isolated from the Sargasso Sea
MVKVLFKRLNQKAKLPSYKTAGSSGMDLMACIDKSITIKPKESKLVPTGIAIAIPEDTEVQIRPRSGLAAKSSISVLNTPGTIDSDYRGELKIILFNHGKDEFIVNDEDRVAQMVLMPILKVEIEETNELPETIRGSGGFGSTGK

SEQ ID NO: 142835 - protein, 106 aa, Unknown
  Bacterial polypetide isolated from the Sargasso Sea
KTEMIPIGFAMYLEDNNLSALVIPRSGLGSKYGIVLGNLVGLIDSDYQGELMVPAWNRSDSKFEIKPGDRIAQMIIVPILQAEFEIVDEFKVSSRGVKGFGSSGIN

SEQ ID NO: 142836 - protein, 129 aa, Unknown
  Bacterial polypetide isolated from the Sargasso Sea
QTKGSAGLDLIACCESSITLSPNESTIIPSGISIYIEDSDFAGIVIPRSGLGAKKGLVCGNLMGLIDSDYQGPLSISLWNRSSEPIEINPGERVAQLVVIRVDQVELDLVEEFETTERGSEGFGSTGVS

SEQ ID NO: 142837 - protein, 112 aa, Unknown
  Bacterial polypetide isolated from the Sargasso Sea
MARVLIKRLNTKVELPKYKTEGSSGLDLMAFIDKPINLPSKESVLVPTGISVAISNDLEIQIRPRSGLAAKSNISVLNTPGTIDSDYRGEIKVILFNHGKKEFIINNKDRML

SEQ ID NO: 142838 - protein, 128 aa, Unknown
  Bacterial polypetide isolated from the Sargasso Sea
MFQDTLQVRRLDGYSVTDLPAFKSEFSSGMDICANFLKRNKKKEIIIPSSGRKMISTGLAIELPNNCEGQIRSRSGLAIDYGLMVLNSPGTIDQDFRGHLKIILANFGTEDYLVKQGDRIAQLVISNV

SEQ ID NO: 142839 - protein, 106 aa, Unknown
  Bacterial polypetide isolated from the Sargasso Sea
MLKIIIEKVSRSENFQLPKYHSENSSGLDIVADVKDPVNLNQNEIFLIPTGIKLKIPKGYEGQVRPRSGLALNHGITILNSPGTIDSDYRGEVKVILINHFSKYLQ

SEQ ID NO: 142840 - protein, 96 aa, Unknown
  Bacterial polypetide isolated from the Sargasso Sea
MVKILVKRFDSKVKIPEYKTSGSSGMDLMAFVQSSIKILPNTLELIPTGLSIAIPENLEIQIRPRSGLAAKSSVSVLNTPGTIDSDYRGELKIILF

SEQ ID NO: 142841 - protein, 111 aa, Unknown
  Bacterial polypetide isolated from the Sargasso Sea
MARVLIKRLNPKVELPKYKTEGSSGLDLMAFIDKPINLPSKESVLVPTGISVAISNDLEIQIRPRSGLAAKSNISVLNTPGTIDSDYRGEIKVILFNHGKKEFIINNKDRI

SEQ ID NO: 142842 - protein, 104 aa, Unknown
  Bacterial polypetide isolated from the Sargasso Sea
MVKVLFKRLNQKAKLPSYKTSGSSGMDLMACVDEPITIKPNESKLIPTGIAIAIPEDTEVQIRPRSGLAAKSSISVLNTPGTIDSDYRGELKIILFNHGKDEFT

SEQ ID NO: 142843 - protein, 56 aa, Unknown
  Bacterial polypetide isolated from the Sargasso Sea
EIKVIIYNHGNNDFLINNGDRIAQMILMPVVKMELEETNDLPETIRGEGGFGSTGK

SEQ ID NO: 142844 - protein, 93 aa, Unknown
  Bacterial polypetide isolated from the Sargasso Sea
MVRVLVKKLNPSVQLPKYKTLGSSGMDLMAFISETIIISPNRLHIIPTGISIAIEDGYEIQIRPRSGLAAKSNITVLNTPGTIDSDYRGELKV

SEQ ID NO: 142845 - protein, 150 aa, Unknown
  Bacterial polypetide isolated from the Sargasso Sea
MKLKFRILDNRIGSIFDLPKYQTEGSAGLDLLACIDNDLVLMPNESTIIESGISIYIDDKNFAGMIIPRSGLGAKKGLVCGNLMGLIDSDYQGPLSISLWNRSKEEIIIKPGDRVAQLIVISINQVELVEVDEFSESQRGEKGFGSTGIN

SEQ ID NO: 142846 - protein, 99 aa, Unknown
  Bacterial polypetide isolated from the Sargasso Sea
MVKVLVKRLDPKVKLPKYKTSGSSGMDLMAFIENPITIKPRKSALIPTGISIAFPEEFEIQIRPRSGLAAKQSIGVLNTPGTIDSDYRGELKVIVFNHG

SEQ ID NO: 142847 - protein, 96 aa, Unknown
  Bacterial polypetide isolated from the Sargasso Sea
AIPPGFEGQIRARSSLGAKGMILPNGVGTIDADYRGEIQILATWIGENESFKVEAGERIAQLVIAPIPSVEFIEVESAKLGDTKRGTGGFGSTGRY

SEQ ID NO: 142848 - protein, 144 aa, Unknown
  Bacterial polypetide isolated from the Sargasso Sea
MVKVLIKKLDKKVKLPEYKTTGSSGLDLTAFIEKKMVIKPGENALVPTGISIAIPEDTEVQIRPRSGLAAKNNISVLNTPGTIDSDYRGEIKVILFNHGDKDFTVNNDDRIAQMILVPILKVDFETVETLPDTIRGSGGFGSTR

SEQ ID NO: 142849 - protein, 145 aa, Unknown
  Bacterial polypetide isolated from the Sargasso Sea
MVKVLIKKLNPSLKLPSYKTRGASGMDLMACIEKSINLEPGKSCLVPTGLSVAFSENYEIQIRPRSGLAAKHNISVLNTPGTIDSDYRGELKIILFNHGDQNFIINNNDRVAQMVLTPTLKMELEETNELPESIRGEEGFGSTGK

SEQ ID NO: 142850 - protein, 105 aa, Unknown
  Bacterial polypetide isolated from the Sargasso Sea
TVGSSGMDLMAFVENSIKIAPNTQELIPTGLSIAIPEDLEIQIRPRSGLAAKSNVSVLNTPGTIDSDYRGELKIILFNHGNKDFIVNNNDRVAQMVLTPCYKNGA

SEQ ID NO: 142851 - protein, 120 aa, Unknown
  Bacterial polypetide isolated from the Sargasso Sea
MVKVLIKKLNPSVQLPSYKTSGASGMDLMAFIEKPIVIKPGNSCLVPTGLSVAFSEEFEIQIRPRSGLAAKNKISVLNTPGTIDSDYRGELKIILFNHSSENFTINNNDRVAQMVLTPSC

SEQ ID NO: 142852 - protein, 73 aa, Unknown
  Bacterial polypetide isolated from the Sargasso Sea
MTVLNSPGTIDSDYRGELKIILINLGNDNFEVKNGMRVAQMVVCPVEIAEIEEVKSLEGTDRGKGGFGSTGIK

SEQ ID NO: 142853 - protein, 69 aa, Unknown
  Bacterial polypetide isolated from the Sargasso Sea
MKTPIELKILDSRIGSEFPLPAYATPGSAGMDLRAMIDTTMTIAPGETQLIPTGIAIHVADPGLAAVIY

SEQ ID NO: 142854 - protein, 90 aa, Unknown
  Bacterial polypetide isolated from the Sargasso Sea
MAKVLIKKLDPAVELPAYKTEGASGMDLMALVKEPINLKPNSSCLVPTGLAIAFSNDFEIQIRPRSGLAAKNSISVLNTPGTIDSDYRGE

SEQ ID NO: 142855 - protein, 70 aa, Unknown
  Bacterial polypetide isolated from the Sargasso Sea
LNAPGTIDADYRGEVGVILINLSNEAFTVCPGDRIAQLILTKYEQIQWVIIDDLPISERGTRGFGSTGKK

SEQ ID NO: 142856 - protein, 129 aa, Unknown
  Bacterial polypetide isolated from the Sargasso Sea
MDEILFKTLENGKGLYKLQKATLGSAGFDLVAAILDKKSIKPNETELIPCGFSLELPSSFEAQVRPRSGIALKNQVTVLNTPGTIDSDYRGEVGVILINHGKNIFDIERGMRIAQIVFQKLPEIEIMNH

SEQ ID NO: 142857 - protein, 101 aa, Unknown
  Bacterial polypetide isolated from the Sargasso Sea
MAKVLIKKLDPAVELPAYKTEGASGMDLMALVKEPINLKPNSSCLVPTGLAVAFSSDFEIQIRPRSGLAAKNNISVLNTPGTIDSDYRGEIKVILFNHGKS

SEQ ID NO: 142858 - protein, 137 aa, Unknown
  Bacterial polypetide isolated from the Sargasso Sea
MPEVAVSWTKEADQDLGLPKFETDGAAGADLRANLNTEYRSSGLSLAPLQRELIPTGLCFEIPSGFEGQLRPRSGLALKHGLTLLNSPGTIDSDYRGPIGLIMINMGEFDFKITHGMRIAQIVFAATLKVQFKVSKN

SEQ ID NO: 142859 - protein, 144 aa, Unknown
  Bacterial polypetide isolated from the Sargasso Sea
ILDPRIGAEYKAPKYQTKGSAGLDLIACCESSITLSPNESTIIPSGISIYIEDPDFAGIVIPRSGLGAKKGLVCGNLMGLIDSDYQGPLSISLWNRSSEPIEINPGERVAQLVVIRVDQVELDLVEEFETTERGSEGFGSTGVS

SEQ ID NO: 142860 - protein, 145 aa, Unknown
  Bacterial polypetide isolated from the Sargasso Sea
MVKVLVQKLNSRVKLPEYKTSGSSGMDLMAFVESPIKIKPNTVELIPTGLSIAIPEELEIQIRPRSGLAAKSSISVLNTPGTIDSDYRGELKIILFNHGNKDFIVNKNDRVAQMVLTPVIKMELEEVDQLPETIRGSGGFGSTGK

SEQ ID NO: 142861 - protein, 145 aa, Unknown
  Bacterial polypetide isolated from the Sargasso Sea
MVKVLVKRLDPKVKLPKYKTSGSSGMDLMAFIENPIKIKPGASALIPTGISIAFPEEFEVQIRPRSGLAAKQSISVLNTPGTIDSDYRGELKVIIFNHGESQFVVNCNDRIAQMILTPVLKIEFEEVNELPETIRGSGGFGSTGK

SEQ ID NO: 142862 - protein, 145 aa, Unknown
  Bacterial polypetide isolated from the Sargasso Sea
MVKVLVKKLNPKIKLPSYKTEGSSGMDLMACVDQAIFIPPKSSALIPTGLSIAIPKDCEVQIRPRSGLAAKFNISVLNTPGTIDSDYRGELKIILYNHGNKSFEVKNNDRVAQMVLMPILKINLEEAEDLPDTVRGSGGFGSTGK

SEQ ID NO: 142863 - protein, 84 aa, Unknown
  Bacterial polypetide isolated from the Sargasso Sea
IRPRSGLAAKQSIGVLNTPGTIDSDYRGELKVIIFNHGESEFVVNCDDRIAQMTLVPVLKIEFEEVNELPETIRGSGGFGSTGK

SEQ ID NO: 142864 - protein, 150 aa, Unknown
  Bacterial polypetide isolated from the Sargasso Sea
MKLKYKILDSRIGNEYDVPKYQTKGSAGLDLIACCDDSFTLSPNEATIIPSGISIYIDDPGYAGIVIPRSGLGAKKGLVCGNLMGLIDSDYQGPLSISLWNRSSEPIEINPGERVAQLVVIKVNQVELDLVEEFETSERGSEGFGSTGVN

SEQ ID NO: 142865 - protein, 101 aa, Unknown
  Bacterial polypetide isolated from the Sargasso Sea
MIPTGIAIAIPEDTEVQIRPRSGLAAKSSISVLNTPGTIDSDYRGELKIILFNHGKDDFTINDEDRVAQMVLMPILKVEIEETNELPETIRGSGGFGSTGK

SEQ ID NO: 142866 - protein, 150 aa, Unknown
  Bacterial polypetide isolated from the Sargasso Sea
MKLKYKILDPRIGTEYKAPKYQTKGSAGLDLIACCESSITLSPNESTIIPSGISIYIEDPDFAGIVIPRSGLGAKKGLVCGNLMGLIDSDYQGPLSISLWNRSSEPIEINPGERVAQLVVIRVDQVELDLVEEFETTERGSEGFGSTGVS

SEQ ID NO: 142867 - protein, 112 aa, Unknown
  Bacterial polypetide isolated from the Sargasso Sea
NSIKIAPNTLELVPTGLSVAIPEDLEIQIRPRSGLAAKSSISVLNTPGTIDSDYRGELKIILFNHGNKDFIVNNNDRIAQIVLTPVIKMELEEVDQLPETIRGSGGFGSTGK

SEQ ID NO: 142868 - protein, 145 aa, Unknown
  Bacterial polypetide isolated from the Sargasso Sea
MVKVLVKKLDSKVKLPEYKTGGSSGMDLMAFVESPVKISPNTLKLIPTGLSVAIPEDLEIQIRPRSGLAAKSNIGVLNTPGTIDSDYRGELKIILFNHGNKDFIVNNNDRVAQMVLTPIIKMELEEVDQLPESIRGSGGFGSTGK

SEQ ID NO: 142869 - protein, 145 aa, Unknown
  Bacterial polypetide isolated from the Sargasso Sea
MVKVLFKRLNQKAKLPSYKTSGSSGMDLMACVDEPITIKPKESMLIPTGIAIAIPEDTEVQIRPRSGLAAKSSISVLNTPGTIDSDYRGELKIILFNHGKDEFTINDEDRVAQMVLMPILKVEIEETNELPETIRGSGGFGSTGK

SEQ ID NO: 142870 - protein, 145 aa, Unknown
  Bacterial polypetide isolated from the Sargasso Sea
MVKVLFKRLNQKAKLPSYKTSGSSGMDLMACIDEPITIKPNESMLIPTGIAIAIPGDTEVQIRPRSGLAAKSSISVLNTPGTIDSDYRGELKIILFNHGKDEFTVNDEDRVAQMVLMPILKVEIEETNELPETIRGSGGFGSTGK

SEQ ID NO: 142871 - protein, 145 aa, Unknown
  Bacterial polypetide isolated from the Sargasso Sea
MVKVLFKRLNQKAKLPSYKTSGSSGMDLMACVDKPVTIKPNESRLIPTGIAIAIPEDTEVQIRPRSGLAAKSNITVLNTPGTIDSDYRGELKIILFNHGKDEFTVNDEDRVAQMVLMPILKIEIEETNELPETIRGSGGFGSTGK

SEQ ID NO: 142872 - protein, 94 aa, Unknown
  Bacterial polypetide isolated from the Sargasso Sea
MQFPEDTEVQIRPRSGLAAKSSISVLNTPGTIDSDYRGELKIILFNHGKDEFTVNDEDRVAQIVLMPILKVEIEETNELPETIRGSGGFGSTGK

SEQ ID NO: 142873 - protein, 135 aa, Unknown
  Bacterial polypetide isolated from the Sargasso Sea
MIKVLIKKLNSKALLPKYKTDGSSGMDLMALIENPITIKPQNSALIPTGLSIAIPDDTEVQIRPRSGLAAKSSISVLNTPGTIDSDYRGEIKIILFNHGKEEFTVNNNDRIAQMILMPVLKVEFEEVENLPTTFK

SEQ ID NO: 142874 - protein, 145 aa, Unknown
  Bacterial polypetide isolated from the Sargasso Sea
MVKVLFKRLNQKTKLPSYKTSGSSGMDLMACVDEPIIIKPNESKLIPTGIAIAIPEDTEVQIRPRSGLAAKSSISVLNTPGTIDSDYRGELKIILFNHGKDEFTVNDEDRVAQMVLMPILKVEIEETNELPETIRGSGGFGSTGK

SEQ ID NO: 142875 - protein, 143 aa, Unknown
  Bacterial polypetide isolated from the Sargasso Sea
MPNSAGLDLPQRATLESAGMDLLAAIDSSIVIDPGIHQVIPTGISIELPEGYEAQVRPRSGLAAKHGITILNSPGTIDPDYRGEIGAIIINLGNSPFEITRGMRIAQLVVSKFVNFYWDEMENLGTTKRGGGGFGSTGTGKNE

SEQ ID NO: 142876 - protein, 119 aa, Unknown
  Bacterial polypetide isolated from the Sargasso Sea
MIKVLVKKLKPSIKLPSYKTDGASGMDLMADIDKSIELKPGESCLIPTGLSVAFPKEYEIQIRPRSGLAAKNNISVLNTPGTIDSDYRGEIKVILFNHGNKSFNINNSDRIAQMILTPV

SEQ ID NO: 142877 - protein, 145 aa, Unknown
  Bacterial polypetide isolated from the Sargasso Sea
MKLPIKRLDPDLPLPKYAKAGDAGCDLLSAEDITINPGGGRALVPTGLALAIPEGYAGFVQPRSGLAVKNGVTVLNTPGLIDSGYRGELKILLINTDPSEPFDIVRGERIAQLVIQKVEQVEFDEVDSLPSSERGEGGFGSTGLN

SEQ ID NO: 142878 - protein, 55 aa, Unknown
  Bacterial polypetide isolated from the Sargasso Sea
LKVILFNHGTEKFIVNNNDRIAQMVLTPILKVNFEEVDELPDTVRGAGGFGSTGK

SEQ ID NO: 142879 - protein, 139 aa, Unknown
  Bacterial polypetide isolated from the Sargasso Sea
MKLLIKRLSEDSIVPTRASPGSVGYDLYSTSNMFIPPMERGIVNTGIAATIPMGVYGRIAPRSGLAVKHGIQTGAGVIDPDYTGELKVILFNHGSEKFEIKQGDRIAQLILEKCETPLIEEVNAIKDTERGTRGFGSSG

SEQ ID NO: 142880 - protein, 147 aa, Unknown
  Bacterial polypetide isolated from the Sargasso Sea
MINVGYKIHDHAIDLPKIDYQTIGAAGLDLYAANSEKINLSTLERYAIPTGISLAIPTGYEGQIRPRSGLFLKHGITINFGTIDSDYRGEIFILVVNLSKSNFIIERGMRVAQIVFNKFERVNLKSKLELDPTLRGASGFGSTGLKE

SEQ ID NO: 142881 - protein, 145 aa, Unknown
  Bacterial polypetide isolated from the Sargasso Sea
MVKVLVKRLNSKVKLPEYKTSGSSGMDLMASIDSPIKIAPNTLELIPTGLSIAIPDDLEIQIRPRSGLAAKSNIGVLNTPGTIDSDYRGELKIILFNHGNKDFIVNNNDRVAQIVLMPILKMELEEVDQLPESIRGSGGFGSTGK

SEQ ID NO: 142882 - protein, 131 aa, Unknown
  Bacterial polypetide isolated from the Sargasso Sea
MYNGHGHFHEGDAGIDLFIIEEQIIEPGVTARIHLGIACENLDNKPYLLMPRSSISKTPLRQCNSIGLIDAGYRGEIMAAVDNIKQESYHLKPGQRLFQLVAMDGSAVSFELTDTLTETERGEGGFGSTGK

SEQ ID NO: 142883 - protein, 185 aa, Unknown
  Bacterial polypetide isolated from the Sargasso Sea
MTFDFFEILLLSTIQGISEFIPVSSSAHLFLISDFYNFKVQSLLTDIGLHLGSLLAIITYFHSDLSNIFKNKNLLLLIIFGSLPVIIVGVIIYQTNLITYLRNIEIIAWTTLVFAILLYFADKVKVNKKLNAKLNLSTIIIIGCFQILALVPGVSRSGIVITAGRFLKFNRYDSTKISFYLSIPA

SEQ ID NO: 142884 - protein, 255 aa, Unknown
  Bacterial polypetide isolated from the Sargasso Sea
MISKYIEASILAFIQGFTEFIPVSSSAHLIIISKISNFNISSLQLDISLHLGSLLAIIFYFRKDLINITKNKSLFLLIVLGSIPLIIFGYFFYSSGLIENLRNLKVIAWTTLIFGILLFIADRSTIKNKISNNLNLKNILLIGIFQVLAIIPGVSRSGIIITASRFLNFDRVDSSKISFYLSIPALAGASVLSMKDIINTNIDMNFLFIFAVLLSFVVSYLTIKYFLIYVRNFNLNLFVYYRTFLALILFVIAYS

SEQ ID NO: 142885 - protein, 99 aa, Unknown
  Bacterial polypetide isolated from the Sargasso Sea
MENFFQIFVISIIQGITEFLPVSSSAHLNLISNFFELQKESLMLNVSAHTGSLLAVLLFFKKEIVDFGKNQKLFFRIIFASIPLFLFGYLIVKYNLVSD

SEQ ID NO: 142886 - protein, 240 aa, Unknown
  Bacterial polypetide isolated from the Sargasso Sea
ISSSAHLLFPTLIFGSNDLGLYFDISVHAGTLIAVVYYFRNQIFLMSKSLLVTNSFNEDKNLAIQLITATIPIVILGFIFRDLISQRIFSINDIAISNLIFASILLFAYLNNKGKKTLINITILGACFIGLFQCFALIPGASRSGAAITAGLLIGLSLKDASKFAFLLAIPTILGALTLLIFDLNNGNVSFDLLNISIGFFTSMIFAFFTIKLFLKLVEKIGMIPFVAYRFLLGILLLII

SEQ ID NO: 142887 - protein, 216 aa, Unknown
  Bacterial polypetide isolated from the Sargasso Sea
IPRKILLGILGVETYLERIQGGYKVMDSLYTLATGYPPRAKFFRSELINLFYLCREEDFSILDIKGSYAGAMGAAQFISSSYRNYAVDGNDDGKIDLFNNWDDILMSIGNYLKQNGWDASKQIYSRYAANEMQVSKLSSKTIKPTSTIQDLLSHGIDIDGFNDDDIAQLIQLDDQDLGSDSYIGHHNFYVITTYNRNVMYALVVIQLGEAIESYLN

SEQ ID NO: 142888 - protein, 124 aa, Unknown
  Bacterial polypetide isolated from the Sargasso Sea
LDIKAALIIGFLHIFSLIPGVSRSGIAMTAARFLKFDRVNAARISFLLSIPTLLAVSVFGIYNIYKTDSFDLIKLNFSSIILSFIFSYVTIVVFLGYIKKASLDVFVLYRIVLGVLILIFAYQG

SEQ ID NO: 142889 - protein, 136 aa, Unknown
  Bacterial polypetide isolated from the Sargasso Sea
SDKFKLEKNINTNFDYKAALIIGFFQMISLIPGVSRSGITITAARLLKFKRFDAAKISFLLSIPTLAAVSFYGLSNIIKTEDLSFSLANFVSIIFSFFFSLLTIKFFLKYIQKFNLSLIVGYRMLLGLLLLFLAYL

SEQ ID NO: 142890 - protein, 255 aa, Unknown
  Bacterial polypetide isolated from the Sargasso Sea
MISKYLEASILAFVQGFSEFIPVSSSAHLIIISKISNFSISSLQLDISLHLGSLLAIIFYFRKDLVNILRNKSLLLLIILGSFPLVVVGYFIYTSGLIGNLRSLKVIAWTTLIFGILLFIADRFSIKNKIDTNLSLKNILIIGIFQILAVIPGVSRSGIIITASRFLNFDRVDSSKISFYLSIPALAGASILSLKDVMNTNIDLNILFLYSIIFSFIVSYLTIKYFLIYVKNFNLNIFVYYRTFLALILFVIAYS

SEQ ID NO: 142891 - protein, 71 aa, Unknown
  Bacterial polypetide isolated from the Sargasso Sea
MYFFPVIALAIIQGITEFLPVSSSAHLVIASDFIEFTYENIALDVSLHLGTLLAVIVYFRSDILLIINGDH

SEQ ID NO: 142892 - protein, 214 aa, Unknown
  Bacterial polypetide isolated from the Sargasso Sea
MENIFHILLISIIQGITEFLPVSSSAHVNLLSRIFGHDDIEIIINVSAHFGSLIAVILFFRKEIFEFTKNKNLFLNIIIASIPLGLAGFFLIKHEIITSLRTFEVIGWCTIIFGLLLYVSDKFELKQNIKSNFGLKNALIIGFFQILALIPGVSRSGIIITGSRFLKFNRVDSAKISFLLSIPALGGWSLYGVYDLISRGDQLLNIGAILTVMF

SEQ ID NO: 142893 - protein, 255 aa, Unknown
  Bacterial polypetide isolated from the Sargasso Sea
MISQYIEVLILASIQGFSEFIPVSSSAHLIIVSKIYNFNVGSLQLDISFHLGSLFAIIFYFRNDLLNITKNKKLFSLILLGSLPLIVIGYIFFKTGLIDYFRNLKIIAWTTLIFGLLLFIADRSQIKQKLNTRLSYKSILIVGLFQVLAIMPGVSRSGIVITASRFLNFDRVDSTKIAFYLSIPALAGASFLGLKDSFETGVVINLILIYSIIFSFAISYLTIKYFLVYVKNFSLNFFVYYRIFLALILFVISYN

SEQ ID NO: 142894 - protein, 113 aa, Unknown
  Bacterial polypetide isolated from the Sargasso Sea
FAHHLALIPGTSRSGITISAGLLLGLDSKTASKFSFLMAIPTIGAIASYHLLSTDVEFLIQYFQINLIGLIVSFVIAYATIDFFIRFINRIGFLPFILYRIALGILLFSLILS

SEQ ID NO: 142895 - protein, 145 aa, Unknown
  Bacterial polypetide isolated from the Sargasso Sea
MGAPQFISSSYRNYAVDGNADGKVDLFNSWDDVLMSIGNYLKQNGWNTSKSIYSRYPTNELKHTNLASKTIKPTSTIQDLLDEGIRIDGFEKDDIAQLIRLDGFDERDDTYIGHHNFYVITTYNRNVMYALVVIQLGEAIDSYLD

SEQ ID NO: 142896 - protein, 116 aa, Unknown
  Bacterial polypetide isolated from the Sargasso Sea
FIGFFQVLSLIPGVSRSGITISAARLLKFKRVDSAKISFLLSIPTLGAVSIFGLKNIVSSNDLEFSVLNIISVFLSFVFSFLTIKFFLKYIKSFSLKIFVIYRLILGLFILFFSYL

SEQ ID NO: 142897 - protein, 187 aa, Unknown
  Bacterial polypetide isolated from the Sargasso Sea
FNKLNKSIFIGTIPIVFIGGIIKLFVPGFSDSFLRSNLSIALVSILMSVIMLFADISTNKSINLNNHKYLNSLYIGIAQALAIFPGVSRSGATISMALLSGWNTKDAAKFSFLLGIPSISLAAFVEFFSVVNQFSAFPFLPLSVGLITTFFSSLLAIDFLIKYFSSNGLKIFVYYRLVFGILILFNL

SEQ ID NO: 142898 - protein, 231 aa, Unknown
  Bacterial polypetide isolated from the Sargasso Sea
MSLLEALILGVIQGLTEFLPVSSSGHLELGKFLLGDNSMPRESMMFTVVLHFATALSTLLVFRKEVASILMGLLEFRNNEPFQFSLKILLSMIPAGLVGFFYSEQLERLFDKQILLVGLMLLVTGLLLFVADRSRDTDKDVSFFHAFVLGLAQAIAILPGISRSGATISTAVLLGIDRTKAASFSFLMVIPLILGKITKDLLDGALALKDDQLLILIGGVHGCFSYRHRCL

SEQ ID NO: 142899 - protein, 144 aa, Unknown
  Bacterial polypetide isolated from the Sargasso Sea
MDYIQAIILAIIEGITEFLPVSSTGHMIIASSFFGIAHDDFTKLFTIVIQLGTILSVVVLYFKRFFQTLDFYFKLFVAFIPAVVFGLLFSDKIDALLENPITVAVSLIIGGVILLKVDEWFAPKEELQATENISYLTAFKIGMF

SEQ ID NO: 142900 - protein, 247 aa, Unknown
  Bacterial polypetide isolated from the Sargasso Sea
MISKYIEASILAFVQGFSEFIPVSSSAHLIIISKISNFSISSLQLDISLHLGSLLAIIFYFRKDLVNILRNKSLLLLIILGSFPLVVVGYFIYTSGLIENLRSLKVIAWTTLIFGILLFIADRSSIKNKIDTSLSLKNILIIGIFQILAVIPGVSRSGIIITASRFLNFDRLDSSKISFYLSIPALAGASILSLKDVMNANIDLNILFLYSIIFSFIVSYLTIKYFLIYVKNFNLNIFVYYRNFSCF

SEQ ID NO: 142901 - protein, 71 aa, Unknown
  Bacterial polypetide isolated from the Sargasso Sea
MENIFEVLIISIVQGITEFLPVSSSAHLNLLSNLFGFREEELLINISAHVGSLFAVIFFFKKRNYKFWKKS

SEQ ID NO: 142902 - protein, 186 aa, Unknown
  Bacterial polypetide isolated from the Sargasso Sea
IIIATAVTGILALSAKHLGETVGRLPLVIGINLILFGLFMFGADFIASQRELKSKHENESRKEDIFQQIRVKESIFVGLFQAMAIFPGVSRSGSTLSIMRMMSISRSEAASFSFILSLPIIFIGAFLKIGELQGSINIYELFLGVGVSFIVGIITIHFFLQMIKKIGLGIFCFYRIILAIAIFYFL

SEQ ID NO: 142903 - protein, 314 aa, Unknown
  Bacterial polypetide isolated from the Sargasso Sea
FLKTKRQFIFVNTRAQSEILFQEIWKINEENFTIALHHGSLSKEQRLRVESEMSKGHLKAVIATSSLDLGIDWNSVDHVINLGAPKGVNRLIQRIGRSGHSYNRVSRASLIPTNKFELLECHAAVNLVNKEHLDKIDYSDGALEVLAQFLVGLSLSAPLDPGLTYRIVKKAFPYKNLTKKEFDETLDFVSTGGYSLSEYGKFHQIVKGIDGKYRPANKILKTLWRMNVGTIVEAVNIKVKLKGGKLLGNVEEYFAQSLSKGDTFIFSGRMLEFFKLEKNSLIVIPSNKSEPKVPSFVGGRLPISSTLAEEVRII

SEQ ID NO: 142904 - protein, 194 aa, Unknown
  Bacterial polypetide isolated from the Sargasso Sea
MIVNYSEIFILSLIQGISEFLPVSSSAHLFLVSHLHKFENESLLIDISCHFGSLIAILFYFRKEFKNIQKQKKIIQLVVIGSIPLFIVGLVLHQSGQIILFRNLNVIAWTTGIFALLLFFADKLESRRRIEKDINLKNILIIGFFQILALVPGVSRSGIIITAGRFLKFNRHESTKISFYLSIPAIAGASFLGF

SEQ ID NO: 142905 - protein, 228 aa, Unknown
  Bacterial polypetide isolated from the Sargasso Sea
MISKYIEASILAFIQGFSEFIPVSSSAHLIIISKISNFSISSLQLDISLHLGSLLAIIFYFRKDLVNILLNKSLLLLIILGSLPLVIVGYFIYESGLIENLRNLKVIAWTTLVFGILLFIADRSSIKNKFDTSLNLKNILLIGIFQILAVIPGVSRSGIIITASRFLNFDRVDSSKISFYLSIPALAGASILSLKDVVNANIDLNILFLYSIIFSFIVSYLTIKYFLI

SEQ ID NO: 142906 - protein, 227 aa, Unknown
  Bacterial polypetide isolated from the Sargasso Sea
MTDSSIFYVFYGLIQGITEFIPISSSGHLNIIAIFFQSLETRNYLYETSAHFASLLALLSYLFSNKHFSKSNIKAYWKLLIYATVPAILLGFIIRFYDINYISLKIIGYTSITGAILLYISDKGKKFKLKIKHKSTKFILAGFFQCLAFLPGFSRAGSCIIAFRLFGEDRKYSSIYSLYMGIPIICLSFFSNINDFENFIIDKNLCLIFITTFFAAYITISVLIKMI

SEQ ID NO: 142907 - protein, 186 aa, Unknown
  Bacterial polypetide isolated from the Sargasso Sea
KNKPLLSLIIIGSIPLMVIGYIFYTTGIVEDLRNLKIIAWTTLTFGILLYFADQKEIKNSISNDLSIKNILIIGLFQILAIIPGVSRSGITISASRFLNFDRVDSSKISFYLSIPALAGASALSIKDVINSNINFDIIFLYSIIFSFFVSYITIKYFLIYVKNFNLNIFIYYRIFLALILFIIAYG

SEQ ID NO: 142908 - protein, 128 aa, Unknown
  Bacterial polypetide isolated from the Sargasso Sea
FYFKSENKKNTIIKSCLIGISQAIAIIPGISRSGITISFALFLGLDARQAAKFSFLLAIPVISGAGILMATDLRDGFSIDIYTAASGLITSFFVGMVALKWLLAWLEGGKFHYFGIYCFLIGIFIVIA

SEQ ID NO: 142909 - protein, 252 aa, Unknown
  Bacterial polypetide isolated from the Sargasso Sea
SKYVETSILAFIQGFSEFIPVSSSAHLLIISNLNEFNYSSLQLDICLHLGSLIAIIFYFRNELTKISENKEILLLIILGSIPLVIVGYIFYKSGIINEFRNLKIVAWTTLIFGILLYFADNAKIKKKINNDLNIKNILIISIFQILSLIPGVSRSGIIITASRFLNFDRIDSTRIAFYLSIPALAGASFLSMRDVAKTNVEFDFIFIFGTFFSFLISYLTIKYFLIFLKKFSLKVFVFYRIILSIILFLIIY

SEQ ID NO: 142910 - protein, 106 aa, Unknown
  Bacterial polypetide isolated from the Sargasso Sea
MISDFFLALLLALIQGLTEFLPVSSSAHLLFPSLLFGTKDFGIVFDISVHAGTLAAVIYYFKKEIQGLFYAWNPLTKTRSKEDFSLGIHLIVCTLPIILAWVYSIR

SEQ ID NO: 142911 - protein, 234 aa, Unknown
  Bacterial polypetide isolated from the Sargasso Sea
LPISSSAHLILVSSLYEFKSSSLLIDISLHLGSLFAIVYYFKDELLNINKNKRLISLIVIGSIPLIIFGYVLYTTGLIYSLRNIETIAWTTLIFAIVLYISDKSRFDKKISTNLNIQSILFIGIMQILSLIPGASRAGITITAARILKFNRVDSSKISFLLSIPALTGASVLSLKDIFNQPTEFNYLVIIAIISSFIFSFLTVKYFLIFINKFSMNAFVIYRIIIALVLFSLIY

SEQ ID NO: 142912 - protein, 177 aa, Unknown
  Bacterial polypetide isolated from the Sargasso Sea
MLSSVEILILSIIQGISEFLPVSSAAHLVLISNYYEFVNQSLLIDICLHLGSLIAIILYFRNDLIHFIKNRSFLIKILIGTIPIIPAGYILYQTGLINSLRNLEVIGWMSLVFGVVLYLSDKSGFNKKIDSDFNNKSAIIIGLFQVLALIPGVSRSGITISAGRFLGFDRFESAKGF

SEQ ID NO: 142913 - protein, 183 aa, Unknown
  Bacterial polypetide isolated from the Sargasso Sea
MFLKHFFLGLIQGLTEFLPVSSSGHLEIFKKIFGDIYTPQESFLLTLSLHFATAISTIIVFRKDIALILRELFQFKKNESLSFSICIIISMLPAAFIGLFYEDFINDLFKGNLILVGSMLLITSLLLFQTDRKKINGKNISYISALLIGLVQAIAILPGLSRSGATIAVAIIIGVNREKASRF

SEQ ID NO: 142914 - protein, 218 aa, Unknown
  Bacterial polypetide isolated from the Sargasso Sea
MKNIEIFIYSIIQGITEFLPVSSSAHLYFIQDIYNWEDNALVLAIGAHLGTFLAVMVFNRKLFINFKETHLLPFALAASLPVILIGGLIGLLKYDNFKSNLYIIAFACIIGGVLLELSDNKKKNKNEIILKESIIVGLFQILALIPGMSRSGTVITAMRFLGINRKLSITFSLLTGIPILLAVSVFGIYKIADLSNLNFIKLSFIVIISFFSAIITIH

SEQ ID NO: 142915 - protein, 236 aa, Unknown
  Bacterial polypetide isolated from the Sargasso Sea
FLPISSSAHLILVSSLYEFKSSSLLIDISLHLGSLFAIIYFFRRELLDIKNNQRILGLITLGSVPLIIVGYFLYNTGIIYSLRNIKVIAWTTLIFGIILYIADKNRFDKKISANLNFQSILIIGLFQIFSLIPGVSRAGITMTAARILKFNRVDSSKISFLLSIPALSGASFLGLKDLFDQSVEFNYLVIIAIVSSFIFSFVTVKFFLEYINKFSMNAFVIYRIIIALFLFFIIYF

SEQ ID NO: 142916 - protein, 193 aa, Unknown
  Bacterial polypetide isolated from the Sargasso Sea
MFANFIEVFLLSVVQGVSEFIPVSSSAHLFLISEIYQFKSQALMLDISLHLGSLLAIIFYFHKDLSNILNDKKLFLLIVLGSLPLIVCGFVVLKTGIINNFRNIEVIAWMTFIFAILLYVADKVKVKKKLENNINIKSIIIIGLFQVLALIPGVSRSGIVITAGRFIKFDRYDATKISFYLSIPAIAGASFLG

SEQ ID NO: 142917 - protein, 176 aa, Unknown
  Bacterial polypetide isolated from the Sargasso Sea
TVPIVLFGGSIKLFTPYFFEKILRSNLSIALVSFIMAIFMYLAEISKKGSINLKNHNYSDSFLIGVSQAFAILPGVSRSGITISTALVTGWERVDAAKFSFILGIPAISIAAIVEFISSFDELYSFSFFPLLFGLFTTFLSSLFAIDFLLKYFSSNGLKLFIIYRVVFGVVILLNL

SEQ ID NO: 142918 - protein, 99 aa, Unknown
  Bacterial polypetide isolated from the Sargasso Sea
MIEVLILSLIQGITEFLPISSSSHLILVSDLINFEEQSLSIDVSLHIGSFIAVCTYFYKDLVNFTKKRILLIKILYASLPILFIGYLLTEINLIEKLRN

SEQ ID NO: 142919 - protein, 236 aa, Unknown
  Bacterial polypetide isolated from the Sargasso Sea
MDILNIIILSIIQGVTEFLPISSSSHLILLPMFTEFPDQGIMFDVALHTGSLFAILIYYRNEIKNIFQFTDNGKSYTRLIIIGSIPLPIAGLLLIDLISLNLRSIEVISVMTITFALLLLYADNHNKPSKLITNISTKIILIIGLFQILALVPGVSRSGIVITAALLLNYNRNDAIKIAFLLSIPAIFMASSYNLLQLSSMGSVSILSDHLLGMALSLIVSYLTIYFFIRTINRIS

SEQ ID NO: 142920 - protein, 111 aa, Unknown
  Bacterial polypetide isolated from the Sargasso Sea
NLSSKKFIQYLLNERLIRSILIGTLPIVFLGGSMKLFAPYFFDNVLRSNLSIAMVSLIMAFFMYLADSSKRGSINIKNHSYFDSFLIGFFQAFAIFPGVSRSGITISCALI

SEQ ID NO: 142921 - protein, 199 aa, Unknown
  Bacterial polypetide isolated from the Sargasso Sea
MFELQYFIIGIIQGFTEYLPISSSGHLVLVSELTSWEDQGLFTDVAVHFGTLLAVIIYLRNYILSLIINFFTFRFSNNKNLVNIIIATLPAVIVGYFIFNFVQIYFRDLRVIAITSIVFAALLFLADHFKIKISKWENMSYVQAFIIGIFQILAFIPGASRAGVTITAARILGFDRSSSAIFSMLLSIPIILASVVLTS

SEQ ID NO: 142922 - protein, 177 aa, Unknown
  Bacterial polypetide isolated from the Sargasso Sea
MISNYFETFILSIVQGISEFIPVSSSAHLILISELSNFSSSSLVIDVGLHLGSLLAIIVYFRKDLLNFFNNKSLALLIIIGSLPIIVIGLLLYTSGLIYYLRNIEVIAWSTLFFGILLYFADNFKITKKFNENLSIKNIFVIGLFQILALIPGVSRSGIVITAGRFLNFNRYDASKI

SEQ ID NO: 142923 - protein, 147 aa, Unknown
  Bacterial polypetide isolated from the Sargasso Sea
MSLIFGIFLYISDKTKITKKIDSNFTNKSAIAIGIFQVLALVPGVSRSGITISAGRLLGYSRYEAAKISFLLSIPTLAAASFLGIYNIYNEGSAELNFLAIIAVIFSAIFSYVSIAIFLNFIKKFTFNIFVIYRIVISLFLLGIVYL

SEQ ID NO: 142924 - protein, 147 aa, Unknown
  Bacterial polypetide isolated from the Sargasso Sea
MSLIFGIFLYISDKSKITKKISDEFTYRSALLIGLFQIAALIPGVSRSGITITSGRMLGFNRFDSAKISFFLSIPTLLAASSLGIYNLYKEGDVGLNFLAIISTFFSFVFSYITIALFLNFIKKFSLNVFVVYRIILSLLILMLVYL

SEQ ID NO: 142925 - protein, 245 aa, Unknown
  Bacterial polypetide isolated from the Sargasso Sea
LAFVQGFSEFIPVSSSAHLIIISKISNFSISSLQLDISLHLGSLLAIIFYFRKDLVNIFGNKSLLLLIILGSLPLVIVGYFIYTSGLIENLRNLKVIAWTTLVFGILLLIADRSSIKNKFDTSLNLKNILLIGIFQILAVIPGVSRSGIIITASRFLNFDRVDSSKISFYLSIPALAGASILSLKDVVNANIDLNIIFLYSIIFSFIVSYLTIKYFLIYVKDFNLNIFVYYRTFLALILFVIAYS

SEQ ID NO: 142926 - protein, 211 aa, Unknown
  Bacterial polypetide isolated from the Sargasso Sea
MIADFFLALFLSLIQGLTEFLPVSSSAHLLLPSLIFGTKDFGIVFDISVHAGTLAAVIYYFKKEIQGLIQAWKPWTNDRDQQNYLLGLNLLVATLPIIIVGLFFSDFTESRFANTNSIAWTNLIFAVLLYVVFRSSAQSKSLAELTLTAALIIGCFQALAIFPGASRSGMAITGALLIGLNLKDTSKFAFLLSIPTILGALVLMFFKGAYS

SEQ ID NO: 142927 - protein, 72 aa, Unknown
  Bacterial polypetide isolated from the Sargasso Sea
MENIFEVVVISLIQGITEFLPVSSSAHLNLLSKLFGFKEEELLINISAHIGSFLAVIFFFKKEILNFGKNKK

SEQ ID NO: 142928 - protein, 71 aa, Unknown
  Bacterial polypetide isolated from the Sargasso Sea
MISKYIETSILAFIQGVAEFIPISSSAHLIIISKVSNFNVSSLQLDISLHLGSLLAIIFYFRKDLLNITKK

SEQ ID NO: 142929 - protein, 130 aa, Unknown
  Bacterial polypetide isolated from the Sargasso Sea
KSFLIKILVGTVPIIPIGYILYQTGLIDQLRNLEVIGWMSLIFGILLYVSDRSKVIRKVETDFTNKSALIIGVFQVISLIPGVSRSGITITSGRLLGFNRYDSAKISFFLSIPTLAAASIIGIYNVSKEG

SEQ ID NO: 142930 - protein, 216 aa, Unknown
  Bacterial polypetide isolated from the Sargasso Sea
AVSLYYSKRIFSLLISLRHLVRPDIDKNATLTIQLIIATVPILLCGFFFSKYFNYDDKKLLLIIGITSIFFGIVLFIFDRFCLTVKGNQEMGFLTSLYVGIFQCLALIPGVSRSGSIIIFLRFSGYNRNFAVFFSNLLSIPVILAATIFITYQNREIFLLTNYLNFYSIGIFIFSLIFSLIFLQFLVSWVRSSSFLIFAIYRILFGSVLIYLFFGY

SEQ ID NO: 142931 - protein, 66 aa, Unknown
  Bacterial polypetide isolated from the Sargasso Sea
MYFFPVILLAIIQGITEFLPVSSSAHLIIASDFIEFNHKTLALDVSLHLGTLLAVIVYFRSDILLI

SEQ ID NO: 142932 - protein, 217 aa, Unknown
  Bacterial polypetide isolated from the Sargasso Sea
ILEVATHLGTLLSIIAVFRIDIISLINGLKNKKSQYYVICLIIGTIPAIVFGLFVKIFILDLIENIFVVSISLFITGLLLFKSKKIKIRSLHINFKIAILIGLSQAVAVFPGISRSGITIVTALYLGLSKEEATKFSFFLAIPAILGAGILTFFDQKSLILLSSQPSFFALASISSFVTGLIFLSFLLNIIRKGNFHLFSYYCFFASAISLVIFIIK

SEQ ID NO: 142933 - protein, 255 aa, Unknown
  Bacterial polypetide isolated from the Sargasso Sea
MFSNFFELTILSAIQGISEFLPVSSSAHLILANDISNLGIGSIYLDTGMHLGSLLAVIFYFRNDLKKITKNKKLLYLMIFGSLPTIFLGAILYITGLINLLRSIEIIAWTTFLFAILLWVADKFKVEKKIDSDLNIISILLIGLFQMLSLIPGVSRSGIVITASRFLNFDRFESSKISFYLSIPAIAGASFLTLKDLGSSIVDNNIIILLGVCFSFIFSYLTIKYFLAYIKKFTLFAFVIYRVILSFILFYIIYI

SEQ ID NO: 142934 - protein, 139 aa, Unknown
  Bacterial polypetide isolated from the Sargasso Sea
MDWLQVVILAIVQGITEFLPVSSSAHLILVPVLTDWPDQGLAFDVALHLGSLSAVLIYFRQDIINMLQSWTRSLHTRQLDADAKLAWAVILGTIPVGLAGLLLKDTVETVLRSPVYLSVGLIGFGLLLGWADWRFRGSR

SEQ ID NO: 142935 - protein, 144 aa, Unknown
  Bacterial polypetide isolated from the Sargasso Sea
MVFGILLGIADWLPKRQRTMDSLNWKDAVVVGIAQAMALVPGTSRSGVTITAGLFLGMTRETASRFSFLLAIPIIVLASAVKLLEVASSDVIVDWNGFLIGGVTSFLMAITAIHFFLKWLNKVGMWPYVLYRIVLAGVIYAVLM

SEQ ID NO: 142936 - protein, 185 aa, Unknown
  Bacterial polypetide isolated from the Sargasso Sea
MTIFHVFILSLIQGATEFLPVSSSAHLVLYNKFVIGLNNDLSLDIAMHIGSLLAVILLVSKPLKEHMNTVLMKIGVGKSFFFLALATFPLVFMALSLEYARLLNLSRQLEIIAFTNLIFALLLFVSDRNPSRRKFSDITARDVLVIGIWQSFAVFPGTSRSGASITGARFLNYGRKEAIIISAIL

SEQ ID NO: 142937 - protein, 238 aa, Unknown
  Bacterial polypetide isolated from the Sargasso Sea
MNIDFFEILLLSAIQGISEFIPVSSSAHLFLISDIYNFKVQSLLTDIGLHLGSLLAIITYFNSDLANIFKNKKLLLLVTFGSAPVIFVGAILYQTNLILYLRNIEIIAWTTLIFAILLYFADKVKVNKKLDKNLGLKTVIIIGCFQILSLIPGVSRSGIVITASRFLQFDRYDSTKISFYLSIPVIAGASFLGLKDLYKESVEFNSMIIFTVFFSYFFSYFTIKYFLIFVKKFDLKLF

SEQ ID NO: 142938 - protein, 235 aa, Unknown
  Bacterial polypetide isolated from the Sargasso Sea
IPVSSSAHLIIISKVSNFSISSLQLDISLHLGSLLAIIFYFRKDLVNILGNKSLLLLIILGSLPLVIVGYFIYTSGLIENLRNLKVIAWTTLIFGILLFIADRSNIKNKIDTSLSLKNILIIGIFQILAVIPGVSRSGIIITASRFLNFDRVDSSKISFYLSIPALAGASILSLKDVMNANIDLNILFLYSIIFSFIVSYLTIKYFLIYVKNFNLNIFVYYRTFLALILFVIAYS

SEQ ID NO: 142939 - protein, 198 aa, Unknown
  Bacterial polypetide isolated from the Sargasso Sea
MVEIFAAWCPGLKNNEQRFNEGLMLIVGTLPIVIIGLFFRDYFSLRPSLDGIAYANLIFAGLLLGAFLISSKNKSYAEITLLSALVIGLFQIFALFPGASRSGMAITGALFMGLSLKSGSKFAFLLSIPTILASLILLLFNELGSISITEIYLMLIGISVSAFIAFFTIKYFLKFVNHIGMVPFVIYRIVLGAAILMI

SEQ ID NO: 142940 - protein, 89 aa, Unknown
  Bacterial polypetide isolated from the Sargasso Sea
MIEILILSLVQGITEFLPISSSSHLIIISKITNFNNQNLTIDVSLHIGSFLAVVTYFYKDIYNFIENKKLFEKILIASLPVLIAGYIMI

SEQ ID NO: 142941 - protein, 264 aa, Unknown
  Bacterial polypetide isolated from the Sargasso Sea
MSLLEALILGVIQGLTEFLPVSSSGHLELGKFLLGDNSMPRESMMFTVVLHFATALSTLLVFRKEVASILMGLLEFRNNEPFQFSLKILLSMIPAGLVGFFYSEELERLFDKQILLVGLMLLVTGLLLFVADRSRDTDKDVSFFHAFVLGLAQAIAILPGISRSGATISTAVLLGIDRTKAASFSFLMVIPLILGKITKDLLDGALALKDDQLLILMGGFTAAFLTGIVACKWMISLVQKAQLKYFAYYCFVVGTLAIFADLAS

SEQ ID NO: 142942 - protein, 223 aa, Unknown
  Bacterial polypetide isolated from the Sargasso Sea
FKISNFNVSSLQLDISLHLGSLLAIIFYFKKDLLNITKNKSLFLLIVLGSIPLIIVGYFFYSSGLIENLRNLKVIAWTTLIFGILLFIADRSTIKNQINNNLNLKNILLIGIFQILAIIPGVSRSGITITASRFLNFDRVDSSKISFYLSIPALAGASVLSMRDIIKTNIDMNFLFIFAVLLSFIFSYLTIKYFLIYVRNFNLNLFVYYRTFLALILFVIAYS

SEQ ID NO: 142943 - protein, 171 aa, Unknown
  Bacterial polypetide isolated from the Sargasso Sea
MIEILILSFIQGFTEFLPVSSSSHLILISKFTNFQYQSLSIDVSLHIGSFIAVVTYFYRDIFNFIKNKDLLYKIIVSSFPIMVIGFILLQTNLIEEIRSIRVIGWTTLIFGVLLYISDKFNYNRNIKNHFTFKFAIIIGIFQILSLIPGVSRSGITITASRLLSFNRYDSA

SEQ ID NO: 142944 - protein, 229 aa, Unknown
  Bacterial polypetide isolated from the Sargasso Sea
GNELVGEEGLFLTLVLHLGTALSTTIVFRKEIQEIFNSLLEFKLNENTLFFLKIIISMIPASLVGIFLQNQIEILFSKNLILVGTMLMITAVLLFLADRASNTHKQVTFSNAFVLGLVQAIAILPGISRSGSTIAIAVLVGIDREKAAKFSFLMVLPLIFGSMVKTFIDMDVNYENSNFLAIFFGFITAFFSGIIACKWMISLVKKSKLKFFSFYCISIGLLTILYGFL

SEQ ID NO: 142945 - protein, 310 aa, Unknown
  Bacterial polypetide isolated from the Sargasso Sea
KKNLSENLMFTVVVHIATAISIIYVFRKDINEIVKGLTQFKKEQVDFVLKILISSVPVGVVGILFEKEVESFFTGNIVLVGSMLLITAALLFFTYFKKDDSKKNISFTDAMVIGLAQALAILPGISRSGSTISMALLLNVNKEKATKFSFLMVLVPIFGILILKSIKGFTEISETSNLILFDSSYIIGFISALFSGVFACKVMLKIVKESKLIYFSAYCLLVGSIGIYFGSNKSDDTFYIIPIKDISELREISKNSNPPILDSLDSHKKLVDLKKLDDEFQLDIRYASTNNFMRSKFYKNERAFFNMSAA

SEQ ID NO: 142946 - protein, 223 aa, Unknown
  Bacterial polypetide isolated from the Sargasso Sea
MISKYIEASILAFVQGFSEFIPVSSSAHLIIISKISNFGISSLQLDISLHLGSLLAIIFYFRKDLVNILRNKSLLLLIILGSFPLVVVGYFIYTSGQIENLRSLKVIAWTTLIFGILLFIADRSSIKNKIDTSLSLKNILIIGIFQILAVIPGVSRSGIIITASRFLNFDRVDSSKISFYLSIPALAGASILSLKDVMNANIDLNILFLYSIIFSFIVSYFNI

SEQ ID NO: 142947 - protein, 38 aa, Unknown
  Bacterial polypetide isolated from the Sargasso Sea
RTFVRFVSNHSYEIFAWYRIAFGLVILASWYFGWVSWS

SEQ ID NO: 142948 - protein, 165 aa, Unknown
  Bacterial polypetide isolated from the Sargasso Sea
GKFFNINLFLQDMKVVAYATIFFSIILYLSDKTPVKKKFDRNISNKNAFYIGLAQVLALIPGTSRSGITISCARYLGFSRLDSAKFSFLISIPTLFAATVFGIGETIINFDKDFIIFLLLGFFLSLIISLMTIKVFLSFVERYSLNIFVIFRLIIGFILLFYLAN

SEQ ID NO: 142949 - protein, 300 aa, Unknown
  Bacterial polypetide isolated from the Sargasso Sea
KGHLKAVIATSSLDLGIDWNSVDHIINLGAPKGVNRLIQRIGRSGHSYNRVSRASLIPTNKFELLECHAAVNLVNKEHLDKIDYSDGALEVLAQFLVGLSLSAPLDPGLTYRIVKKAFPYKNLTKKEFDETLDFVSTGGYSLSEYGKFHQIVKGIDGKYRPSNKILKTLWRMNVGTIVEAVNIKVKLKGGKLLGNVEEYFAQSLSRGDTFIFSGRMLEFFKLEKNSLIVTPCNKSEPKVPSFIGGRLPISSTLAEEVRIILENKNSWNLLGSETCFWLNKQLNESIIPQKDKLLIEILKE

SEQ ID NO: 142950 - protein, 216 aa, Unknown
  Bacterial polypetide isolated from the Sargasso Sea
AFNNQNLLIDICLHLGSLLAIVFYFRTDLFNFIKNKIFLIKVLIATVPIIPVGYIIYQADLSNQIRSLEFIGWMTLIFGILLYISDKSKITKKIDKDFTNKSAIVIGFFQVLALLPGVSRSGITITAGRILGFDRLDSAKISFFLSIPTLTAASILGIYNIYKEGSSELNFLAIIAVIFSFIFSYFTITLFFKFVRKFSLSVFVLYRIVLSLLILG

SEQ ID NO: 142951 - protein, 175 aa, Unknown
  Bacterial polypetide isolated from the Sargasso Sea
MKILIISTLPAIVLGLIIKFYDVKYISLELIAYTSIAGALLLYVSDKTKKFKLKIKNKNTKFILAGLFQCLAFLPGFSRAGSCIIAFRLLGEDRKRSSIYSLYMGIPIIFLSFFSNIKEFDNFIVDKNLSLIFITTFFAAYFTISLFIKVINKIGFTPFVIYRILIGIVLLALIN

SEQ ID NO: 142952 - protein, 94 aa, Unknown
  Bacterial polypetide isolated from the Sargasso Sea
MTSETIFYIFYSLIQGITEFIPISSSGHLNILEIFLKSIESRNFLYETSAHFASLLALLIYLLTHDHFTKSNIKDNFKSISLCNNASRFFGAHI

SEQ ID NO: 142953 - protein, 234 aa, Unknown
  Bacterial polypetide isolated from the Sargasso Sea
MISDFFLALILALIQGLTEFLPVSSSAHLLFPSFLFGAKDFGIVFDISVHAGTLSAVIYYFKKEIQGLFHAWMPWTETRSKEDFSLGLNLLVATLPIVLVGLLVSDLTESRSANINSIAWANLIFAGLLYAAFKRSTQSKSLTELTLFAALIIGCFQALAVFPGASRSGMAITGALIIGLNIKDTSRFAFLLSIPTILGALILMLVKGAYAIALSDMLIMLTGFLGSAFIAFIT

SEQ ID NO: 142954 - protein, 187 aa, Unknown
  Bacterial polypetide isolated from the Sargasso Sea
MIEILLLSIIQGVTEFLPISSSSHLILTSKYFEFENQNLSIDVSLHIGSFLAVIFYFRSEVINFIKNKDLFLKIFLSSVPVIITGYFLVKFDLIDQLRNIKTIGWMTIIFAIFLYLSDKSKGLKKIGSNFNYKAAMFIGLLQVFSLIPGVSRSGIAITAARLLKFKRVDSAKISFLLSIPTLAAVSF

SEQ ID NO: 142955 - protein, 93 aa, Unknown
  Bacterial polypetide isolated from the Sargasso Sea
MDSIEAIILGIIQGLTEFLPVSSSGHLEIGKALMGDESLPQESLLFTVVLHFATALSTILIFRKEISEIIRGLFKFNPSNKEFKFSFQIIISM

SEQ ID NO: 142956 - protein, 233 aa, Unknown
  Bacterial polypetide isolated from the Sargasso Sea
VSSSAHLIIISKISNFIISSVQLDISLHLGSLLAIIFYFRNDLLNILVNKSLLLLIILGSLPLVVVGYFIYISGQVENLRNLKVIAWTTLIFGILLFIADRSSIKNKIDNSLSLKNILIIGIFQILAVIPGVSRSGIIITASRFLNFDRVDSSKISFYLSIPALAGASILSLKDVMNANMDLNILFLYSIIFSFIVSYLTIKYFLIYVKNFNLNIFVYYRTFLALILFIIAYS

SEQ ID NO: 142957 - protein, 172 aa, Unknown
  Bacterial polypetide isolated from the Sargasso Sea
MGLEAQMERVAMEMRDSATGGLFSSLLWGMSIVSLFLAVATVWAGWDDPVPDGNSQFQHFLGLVDEVLQWIVGSVFSFLLALGVLRWKEGSFTGRSVLLIGLGVVFYTFVAATIDVALVISSGQEYSPTFNQLGDDWGLPIMSMVMYYLLRTIVQSFSEDDDLVQGSRFWGV

SEQ ID NO: 142958 - protein, 255 aa, Unknown
  Bacterial polypetide isolated from the Sargasso Sea
MITDYFQASFLAIVQGISEFIPVSSSAHLIILSQFFGFSNQSIIFDVGLHLGSLIAIVFYFRNELLNLRNNKELLKLIIIGSTPLVIIGYILFYSGIINIFRNVEVIAWTTLIFGLLLYYADKSKVSKNFKYDLNTKNILIIGTIQTLSLIPGVSRSGVVITIGRMLNFNREDSLKISFFLSIPALLGASVLSIKDIINESIHINFLLIFSIILSFLFSYLTIKYLLIYVQKFTLKIFVIYRIILSFIIFLIILN

SEQ ID NO: 142959 - protein, 264 aa, Unknown
  Bacterial polypetide isolated from the Sargasso Sea
MIADFFLALLLSLIQGLTEFLPVSSSAHLLLPSLIFGTKDFGIVFDISVHAGTLAAVIYYFKKEIQGLVRAWKPWKNNRDQQNYLLGLNILVATLPIIIVGLVFSDFTESRFANTNSIAWTNLIFAVLLYLVFRASAQTKSLTELTLTAALMIGCFQALAIFPGASRSGMAITGALLVGLNLKDTSKFAFLLSIPTILGALILMFLKGAYSLELNDLLIILTGFFGSAFVAFFTIKSFLKFVEKIGMTPFVLYRVALGAVLLLL

SEQ ID NO: 142960 - protein, 256 aa, Unknown
  Bacterial polypetide isolated from the Sargasso Sea
MDFIHIFILSIIQGVTEFLPISSQSHLILTSYLLGLKDQGLGFDIALHFGSLIAILIYYRKEIRSLLSLNDEGANYLKLIIIGSIPLPIVGLLFIDIVSQNMRSIFSIASMTILFAVILYLADVKKKEVVTKFANISIYTIVFIGLMQTLAIMPGVSRSGIVITAALLANFSREDSIKIAFLLSIPAIFMATVYQSMQLYDVGNIEILNKHMLGMFLSFIFSYITIHLFISTINKISFTPYIIYRLILGVVLIGFI

SEQ ID NO: 142961 - protein, 190 aa, Unknown
  Bacterial polypetide isolated from the Sargasso Sea
MFLIFIETIILSIVQGITEFLPVSSSAHLIIFSKLGNFQANSLTIDIGAHLGSLIAILIFFRKDLLKFSQNKSLYKLIFLGSIPLVLFGFYFYSSGIIYILRDIKVIAWTTLIFGILLFLADRSKSTNRFDQNINYRTILIIGLFQVFALIPGVSRAGITITAARFLNFNRYDATKISFLLSIPATFRSQ

SEQ ID NO: 142962 - protein, 245 aa, Unknown
  Bacterial polypetide isolated from the Sargasso Sea
MISKYIETSILALIQGVAEFIPVSSSAHLIIISKVSNFNVGSLQLDISLHLGSLLAIIFYFRKDLLNITKNKSLLLLIVLGSIPLIIIGYFFYSSGLIENLRNLKVIAWTTLIFGIFLFIADRSTIKNKINNNLNLKNILLIGIFQILAIIPGVSRSGIIITTSRFLNFDRVDSSKISFYLSIPALAGASVLSMKDIVNSNIDMNFLFIFAVLLSFVFSYLTIKYFLIYVRNFNLNLFVYYRTIS

SEQ ID NO: 142963 - protein, 255 aa, Unknown
  Bacterial polypetide isolated from the Sargasso Sea
MIYNFLEITLLSIIQGISEFLPVSSSAHLYLVSEIYQFRSQSLMTDVALHLGSLIAIIFFFRNELINIFENKNLLYLLVLGSVPLIIVGLLIFSTGLINNLRNLEVVAWTTLIFAIILFIADKFRVRKKLNTNLNIKSILFIGLFQILSIIPGVSRSGIVITAGRFLNFDRFDSTKISFYLSIPAIAGASILTLKDLTYETINFNIVILFAIIFAFIVSYLAIKYFLIFTKKFSMTIFVIYRIILSLILFYIIYY

SEQ ID NO: 142964 - protein, 255 aa, Unknown
  Bacterial polypetide isolated from the Sargasso Sea
MISKYIETSILALIQGVAEFIPVSSSAHLIIISKVSNFNVSSLQLDISLHLGSLLAIIFYFRKDLLNITKNKSLLLLIVLGSIPLIIIGYFFYSSGLIENLRNLKVIAWTTLIFGILLFIADRSTIKNKISNNLNLKNILLIGIFQILAIIPGVSRSGIIITISRFLNFDRVDSSKISFYLSIPALAGASVLSMKDIVNTNINMNFLFIFAVFLSFVFSYLTIKYFLIYVRNFNLNLFVYYRTFLALILFVIAYS

SEQ ID NO: 142965 - protein, 160 aa, Unknown
  Bacterial polypetide isolated from the Sargasso Sea
MSDILLSLLLGLIQGLTEFLPVSSSAHLILPGLIFSSNDLGLSFDIAVHAGTLMAVIYFFRSELALMTKSVFINESINDKYKQLSFNLIIATLPIIFIGFILADLLEQRVFSEKFTIAVSNLLFAGVLLIAFMKRKANKNLFEITIFGALLIGLFSCFAL

SEQ ID NO: 142966 - protein, 198 aa, Unknown
  Bacterial polypetide isolated from the Sargasso Sea
MLEILILSLVQGVTEFLPISSSSHIILFSKFMNFISEDLILNVSLHIGSFIAVLVFFRKEILSFFIYRKILILIIIASLPIILSGYLIAQSGIINDLRSLKVIGWTTVVFGVLLYFSDKSESEKNLEINFDIKSALIIGFFHIFSLIPGVSRSGIAITTARFLKFDRVNAARISFLLSIPTLLAVSVFGIYKIYIPKV

SEQ ID NO: 142967 - protein, 255 aa, Unknown
  Bacterial polypetide isolated from the Sargasso Sea
MFANFIEVFLLSVVQGVSEFIPVSSSAHLFLISEIYQFKSQALMLDISLHLGSLLAIIFYFHKDLSNILNDKKLFLLIVLGSLPLIVCGFVVLKTGIINNFRNIEVIAWMTFIFAILLYVADKVEVKKKLENNINIKSIIIIGLFQVLALIPGVSRSGIVITAGRFIKFGRYDATKISFYLSIPAIAGASFLGLKSITYENFDFNIMILFSILLSFLFSFLTIKYFLIFVKKFTLNLFIIYRIILSFILFYIVYA

SEQ ID NO: 142968 - protein, 255 aa, Unknown
  Bacterial polypetide isolated from the Sargasso Sea
MISKYIEASILAFVQGFSEFIPVSSSAHLIIISKISNFSISSLQLDISLHLGSLLAIIFYFRKDLVNILRNKSLLLLIILGSFPLVFVGYFIYTSGLIENLRSLKVIAWTTLIFGILLFIADRFSIKNKIDTSLSLKNILIIGIFQILAVIPGVSRSGIIITTSRFLNFDRVDSSKISFYLSIPALGGASILSLKDVMNANIDLNILFLYSIIFSFIVSYLTIKYFLIYVKNFNLNIFVYYRTFLALILFVIAYS

SEQ ID NO: 142969 - protein, 255 aa, Unknown
  Bacterial polypetide isolated from the Sargasso Sea
MISYYFQVVILALIQGISEFIPVSSSAHLVLISNLTQFDYKSIEIDISLHLGSLIAILTYFWRDLINILENKKILSLIFFGSIPITIIGFILFNFEIIYLLRDLRLIAWTTLIFGILMYYSDRKLGHKNIDNNLNIKNIFIIGLCQVLALIPGVSRSGIVITTCRFFKFNRVDSLKISFYLSIPALAGASILSFKNLSEKSFELNLFIFISIFLSFIFSFLTIKFLLFYLKKFSLNLFVYYRIILSILLFLVAYR

SEQ ID NO: 142970 - protein, 252 aa, Unknown
  Bacterial polypetide isolated from the Sargasso Sea
MIEIFILSIVQGITEFLPVSSSSHLIVISKYFNFSNQSLSLDVSLHIGSFFAIIFYFREEIFNFFQNKELFLKIFISSIPIMVAGYFLVKFNLIEQLRNMEVIGWTTIIFGILLYISDKFENTKKINEGFGFKSALYIGLLQVLALIPGVSRSGIAITAARTLKFERVESSKISFLLSIPTLAAVSIYGLQNVLVSKNVSFSLINLFAIFLSFITSYLTIKYFLKYVKKFNLNIFVGYRILLGALILFVAYL

SEQ ID NO: 142971 - protein, 254 aa, Unknown
  Bacterial polypetide isolated from the Sargasso Sea
MENFFQILILSVTQGVAEFLPVSSSAHLNLISKYFDIQNELLINVYAHMGSLLAVIFFFKDDIFNFGKNKKLFSKIILASIPLFGFGFLILKYDLIDTFRSLELIGWMTIIFGIVLFISDKLSLENSIKDKFTFKKAILIGFFQVLALIPGVSRSGIIMTGARFLKFNREDAAKISFLLSIPALAGSSIYGLYKMFNEGDLIVNINSIMTIGLSFIFSYLTIKYLLIYLKNFSFNIIVGYRLILGSIILATVYL

SEQ ID NO: 142972 - protein, 254 aa, Unknown
  Bacterial polypetide isolated from the Sargasso Sea
MENFFQILILSITQGVTEFLPVSSSAHLNLISKYFGIQNELLINVYAHMGSLLAVIFFFKEDIFNFGRNKKLFSKIILASIPLFGFGFLILKYNLIDTFRSLELIGWMTVIFGIVLFVSDKLSLENSIKDKFTFKKAILIGFFQVLALIPGVSRSGIIMTGARFLKFNREDAAKISFLLSIPALAGSSIYGVYKMFNGGDLVVNINSIMTIGLSFIFSYLTIKYLLIYLKNFSFNVIVGYRLILGSIILATVYL

SEQ ID NO: 142973 - protein, 255 aa, Unknown
  Bacterial polypetide isolated from the Sargasso Sea
MTFDFFEIFLLSAIQGISEFIPVSSSAHLFLVSDIYNFKIQSLLTDIGLHLGSLLAIITYFHSDLSNIFRNKNLLLLMIFGSTPVIIVGAILYQTNLISYLRNIEIIAWTTLIFAILLYFADKFKVNKKLNAKLDLKTIFVIGCFQILALIPGVSRSGIVITAGRFLKFDRYDSTKISFYLSIPVIAGASFLGFKDLYKETADFNSMILLTVFLSYFFSYFTIKYFLIFVKRFDLKLFVIYRILLSFLLFGIIYF

SEQ ID NO: 142974 - protein, 124 aa, Unknown
  Bacterial polypetide isolated from the Sargasso Sea
IGRLDTPFILGFWQMLALIPGTSRSGITITGARFLNYNRSSAIKISMLMSIPTIIAAATLEFYSLGFENISINWLEIVLAIIISALAAFGALSLMMRLLTTINFTPYVLYRILLGSFLIIWAIM

SEQ ID NO: 142975 - protein, 81 aa, Unknown
  Bacterial polypetide isolated from the Sargasso Sea
MIEILILSFVQGITEFLPISSSSHLILTNEFLNFKHSNLAIDVSMHIGSFFAVITYFYKDIFNFIKNKELFLKVFIASVPV

SEQ ID NO: 142976 - protein, 255 aa, Unknown
  Bacterial polypetide isolated from the Sargasso Sea
MLFDYYEILILSLIQGVSEFIPVSSSAHLYIISELFDFKNQSLMIDVGMHLGSLLAVLFYFRQDFINILKNKQILNLMVFGSIPLIIAGFIIYTTGLIDFVRNLKLLAWLSLIFAIVLYIADKIKVTKKIDTDLNLKTILIIGLFQIASLFPGVSRSGIVITAGRFLNFDRYDATKISFYLSVPAIAGASFLSLKDVFINDATFNSLIILSTFLSFIFSYMTIKYFLIFIKKFNFNIFIIYRIILSLFIFYIIYS

SEQ ID NO: 142977 - protein, 255 aa, Unknown
  Bacterial polypetide isolated from the Sargasso Sea
MISKYIEASILAFIQGFTEFIPVSSSAHLIIISKISNFNISSLQLDISLHLGSLLAIIFYFRKDLINITKNKSLFLLIVLGSIPLIIFGYFFYSSGLIENLRNLKVIAWTTLIFGILLFIADRSTTKNKINNNLNLKNILIIGFFQMLAIIPGVSRSGIVITASRFLNFDRVDSSKISFYLSIPALAGASVLSMKDIINTNVDMNFLFIFAVLLSFIVSYLTIKYFLIYVRSFNLNLFVYYRTFLALILFVIAYS

SEQ ID NO: 142978 - protein, 255 aa, Unknown
  Bacterial polypetide isolated from the Sargasso Sea
MISKYVETLILSIIQGISEFIPVSSSAHLLIISRLSDFNVSNLQLDISLHLGSLLAIILFFRKELINIINNKNIFLLIILGSIPLVIVGYIFYSTNLIDQFRNLKVVAWTTLIFGILLYFSDKFELKNKISSELNIKSIIIIGLFQILAIIPGVSRSGIVITASRFLKFDRVESSKIAFYLSIPALAGASVLGFKDVIDDQINFDAIFIFSTSASFLFSYFTIKYFLIYVKMFSLSFFVIYRIVLSIILFSIIYL

SEQ ID NO: 142979 - protein, 327 aa, Unknown
  Bacterial polypetide isolated from the Sargasso Sea
MIHKIKHFIILSVIAINFHSAQASTNQEAEKSLLIDELIQEHGFDEQYVLNIFENMKFLPELIESISRPAERTKTWPEYRKIFVTNKRIAAGVLFAKQHEEIINRAASEMGIPKKILLGILGVETSFGRIQGNYKVVDSLYTLATGYPPRSKFFRSELINLFYLCREEGFSILDIKGSYAGAMGAPQFISSSYRNYAVDGNADGKVDLFNSWDDVLMSIGNYLKENGWEASGSIYSRYPVNELKLSKLSSKTIRPTSTIQDLLDEGIRIDGFEKDDIAQLIRLDGFDDRDDSYIGHHNFYVITTYNRNVMYALVVIQLGEAIDSYLD

SEQ ID NO: 142980 - protein, 255 aa, Unknown
  Bacterial polypetide isolated from the Sargasso Sea
MISQYIETFFLAIIQGVFEFIPVSSSAHLILFSRINNFNFSSLQLDISLHLGSLLAIIFYFREDLFNLTKNKSLAILIIAGSIPLIIVGYIFYSTGLIDYFRNLKIIAWTTLFFGILLYFSDRSKISNKLDTKLSYKNIIIIGLLQVLAIVPGVSRSGIVITASRFLNFDRIDSSKIAFYLSIPAISGASFLGLKDIFDTGVVLNFIFFYSIILSFVISYLTIKYFLIYIKNFNLNLFIYYRILLALILFVIVYN

SEQ ID NO: 142981 - protein, 433 aa, Unknown
  Bacterial polypetide isolated from the Sargasso Sea
MLPISSTYAVDWSKELGDHSGVDLKVQSIMDPYIDAVKEISPTFTSVTGASVTVEGFGYDGLHEKQIVACSQGDSSYDVLFVDGIWIGEFVEGDCIAPVEDLWTEEGTDMSVIAWDDYISSFAGQAIWDGKKQCLPFGGYWHMLHYRTDLFEAEGLEPPKTFDDVLAAAKLFKDNPKYPELEGGYAMNMARGSAAGQQFYEWIYSAGGKPWESNYPGSPDAYADQRGLYNSAESVAFIEWMQEMINYMPPGVEQYAWDERAKAFTQGKVAMINNWSVRTPLFNDPEISKVIGKFDVALFPHAEGASSVPPVGGWIACVNKHSKNIDAAWDYLKWFASPEVHREWVLTGAPPSRHSAMNDPQINAEQPWTPVLYESSLRAWQELRPRHALTFEVIETLGIEVNKALTGEASAQEAMDAANKKIDRLLKSEGYID

SEQ ID NO: 142982 - protein, 255 aa, Unknown
  Bacterial polypetide isolated from the Sargasso Sea
MISKYIETSILAFIQGFAEFIPVSSSAHLIIISKISNLNVSSLQLDISLHLGSLLAIIFYFRKDLLNITKNKSLFLLIVLGSIPLIIVGYFFYSLGLIENFRNLKVIAWTTLIFGILLFIADRSTIKNKINNNLNLKNILLIGIFQVLAIIPGVSRSGIIITASRFLNFDRVDSSKISFYLSIPALAGASGLSMKDIINTNLDMNFLFIFAVLLSFFVSYLTIKYFLIYVRNFNLNLFVYYRTFLALILFVIAYS

SEQ ID NO: 142983 - protein, 193 aa, Unknown
  Bacterial polypetide isolated from the Sargasso Sea
GFSKQQSTDSKLAWYVIVATIPAVIIGFLMKGWIEENARTALVIAGTTIIFGLLLWYADATAKREQELEGLTLKQAIYIGLAQVLALIPGTSRSGITMTAGLMLGLKREACARFSFLLSIPVILGAGLLATLDLLNANEAVDWYALLYGAAFSFVSAYLCIYLFLSWISRIGMLPFVIYRLALGVILLWFVFA

SEQ ID NO: 142984 - protein, 48 aa, Unknown
  Bacterial polypetide isolated from the Sargasso Sea
MITYYFQIIFLALIQGVSEFIPVSSSAHLFLISNIGKFSIQSLEIDIS

SEQ ID NO: 142985 - protein, 327 aa, Unknown
  Bacterial polypetide isolated from the Sargasso Sea
MIHKIKHFIILSAIAFNFHSVQASTDQEAKKSLLIDELIQEHGFDEQYVLNIFENMKFLPELIESISRPAERTKTWPEYRKIFVTNKRIAAGVLFAKQHGEAIDRAAREMGVPKKILLGILGVETYFGRIQGNYKVVDSLYTLATGYPPRSKFFRSELINLFYLCREEGLSILDIKGSYAGAMGAPQFISSSYRNYAVDGNADGKIDLFNSWDDVLMSIGNYLKKNGWDKSGLIYSRYPRNDTKLSNLASKTIKPTSTIQDLLDEGIKIDGFEEDDIAQLIQLDGLDDKDDSYIGHHNFYVITTYNRNVMYALVVIQLGEAIDSYLY

SEQ ID NO: 142986 - protein, 327 aa, Unknown
  Bacterial polypetide isolated from the Sargasso Sea
MIYKTKYLAINLALLISLYPTLASTNQEIEKSLLIDELIQEHGFDEQYVMNIFDNTKFLPELIESISKPAERTKTWPEYRDIFITNKRIAAGVLFAKQNDDIINRAVAEMGIPRKILLGILGVETYFGRIQGGYKVMDSLYTLATGYPPRAKFFRSELINLFYLCREEDFSILDIKGSYAGAMGAAQFISSSYRNYAIDGDADGKIDLFNSWDDVLMSIGNYLKQNGWDASKQIYSRYPANEMQVSKLSSKTIKPTSTIQDLLSHDIDIDGFNNDDIAQFIQLDAQDLQDDSYIGHHNFYVITTYNRNVMYALVVIQLGEAIESYLN

SEQ ID NO: 142987 - protein, 151 aa, Unknown
  Bacterial polypetide isolated from the Sargasso Sea
MFELQYFIIGIVQGFTEFLPISSSGHLVLVSQLTSWQDQGLFTDVAVHVGTLLAVIIYLRTHITSLIKSFFSFQLTQNDNLIKIIIATIPAVIVGFFIFDFVQLYFRDIKVVAVTSVVFAALLFVADHFKIKISSWENMSYVQAFINRSIS

SEQ ID NO: 142988 - protein, 94 aa, Unknown
  Bacterial polypetide isolated from the Sargasso Sea
MLEILTGVLQGLTEFLPISSSGHLVIISSLSSELDLNTNDIAFLHIGTLFSIVFFYRKRIFEIFKDLDTFVFYFKIILAGIIPAVSHWFTDTYT

SEQ ID NO: 142989 - protein, 81 aa, Unknown
  Bacterial polypetide isolated from the Sargasso Sea
MLQDFIEILILSAVQGISEFLPISSSAHLILVSNFYDLETSSLLIDISLHLGSLIAVIFYFRKELFDLRNNNRLLSFIIIG

SEQ ID NO: 142990 - protein, 75 aa, Unknown
  Bacterial polypetide isolated from the Sargasso Sea
MTYLEGIALAVIQGLTEFLPISSSAHLILLSEFMGSNQNLFYDVSLHLGTLMAVCIYFRTDLIEIINSVIKYKSL

SEQ ID NO: 142991 - protein, 111 aa, Unknown
  Bacterial polypetide isolated from the Sargasso Sea
MNDILLSFILGLVQGLTEFLPISSSAHLLFPTLIFGSNDLGLYFDISVHAGTLIAVVYYFRNEIFLMCKSLLVTNNFNEDKNLAIQLIIATIPIVILGFIFKDLISQRIFS

SEQ ID NO: 142992 - protein, 199 aa, Unknown
  Bacterial polypetide isolated from the Sargasso Sea
MHIFPVIILAIIQGITEFLPISSSAHLLITAEMMNIRENLSLDISLHLGTLMAVLIYFRTEALNFFKFIMPFFSSNKISKTKINQNLIVASLPIIFIGGLAYMSGFAEIFRDLHFIGLSTIVFGLALYFADIRSNEESLKVDNLSYKKSLVVGFFQIFAIIPGASRAGVVYTGSRIVGLNRVEAAKFSMLLSIPVILIS

SEQ ID NO: 142993 - protein, 92 aa, Unknown
  Bacterial polypetide isolated from the Sargasso Sea
MFRDFIEILILSAIQGISEFLPISSSAHLILVSNFYDLETSSLLIDISLHLGSLIAVIFYFRKELFDPRNNNRLLGLIIIGSLPLIFFGYIL

SEQ ID NO: 142994 - protein, 195 aa, Unknown
  Bacterial polypetide isolated from the Sargasso Sea
SLNGQGLTESGKLAWLLLYASLPAATVGFLAEEFIAGTLRSSTVIATATLVFAGVLWFADKMGECKLSLKELGHRRALWIGFAQCLALIPGTSRSGITISMALLCGLNRQAASKFSFLLSIPIIAGSGLLQGIALFSGSALREFDLVMLFMSSNVALLTALLCIHTFLTLIDKIGFLPFIIYRLILGVCLYLWLV

SEQ ID NO: 142995 - protein, 263 aa, Unknown
  Bacterial polypetide isolated from the Sargasso Sea
MNDILLSLVLGLIQGLTEFLPISSSAHLLLPSLIFGTVDLGLSFDIAVHAGTLVAVIYFFKSEIINMFNSFFKNDSDLEGYKNLAILLIVATLPIILIGLASSELIEQRIFNTFTIALANLFFALLLFLAFINKKGNKKIFELTIYGALIIGIVQCFALIPGASRSGTAITAALFIGLSLKDASKFSFMLGIPTILGALIFLILKIPTADTTYNFLSLFIGFFISMFIAFFTIKYFLIFIEKIGMIPFVLYRVALGVFLLLLF

SEQ ID NO: 142996 - protein, 204 aa, Unknown
  Bacterial polypetide isolated from the Sargasso Sea
MDDLSLIQILVLSILQAVTEFLPISSSAHLLLPSQILGWPDQGLFFDIAVHCGSLLAVIIYLRKELLSLSFFKSKYFFVIICATLPIIAVAPVVASYDIRWSLSSIAVANIFFAILLLLSINLGQQNRKVTEINFKDGFIIGFWQIFSLISGASRSGTVITGALFQGFNRESAARFSIMLSIPTIAGALFYIISNEDILTTNAD

SEQ ID NO: 142997 - protein, 138 aa, Unknown
  Bacterial polypetide isolated from the Sargasso Sea
MYENIIEVIILSAIQGISEFLPISSSAHLILVSSLYEFKSNSLLIDISLHLGSLFAIIYFFRKDLLDIKHNKRLLSLIILGSIPLMVFGYILYSTNLIYNLRNIKVIAWTTLIFGIILYIADQSRFDKKISTNLNFQT

SEQ ID NO: 142998 - protein, 268 aa, Unknown
  Bacterial polypetide isolated from the Sargasso Sea
MGFLYLSFLAIIQGITEFLPVSSSGHLLLIAEMSKNKHHNLQVDIAVHFGSLLAVILYYRREMSILIRGFYKNIRLDFSHQDSNFFQLILIATIPVVLLGFFLKLSGLIDSIRSPKVVAFGMIFFGLILYFADRFGAINRKESEWTAKDAFFMGLCQALALIPGTSRSGNTITGARMLGFCRQSSINLSMIMSVPTILASTVILFWDVIGANAPVDMSYNLISAACLSFLAAYGSIKLLILFGRSRNFTPFVIYRVLLGAIIFIVLYQ

SEQ ID NO: 142999 - protein, 178 aa, Unknown
  Bacterial polypetide isolated from the Sargasso Sea
MSFLPIFILGIIQGIAEFLPISSSGHLLVAGKLLDFKQQSLLIDVSLHLGTLFAVILYFHKESKILLINTHTILQNKSDEQALFTKHIITATIPIVIIGGILFSFGFADILRNLQVIALATIFFGILLYFADVKSNDGIKGQDLTTQKSFLIGMFQILSFIPGTSRAGIVTQDQDFLI

SEQ ID NO: 143000 - protein, 236 aa, Unknown
  Bacterial polypetide isolated from the Sargasso Sea
MSFLPIFILGLIQGVTEFLPISSSGHLFVAGNFLNFKQQSLLIDVSLHLGTLGAVLLYFSKESKILLLNSHTIFSSKSDENTLFTRHVLFATIPILIVGGLLFIFGIADIVRNLQVIALATILFGIVLYFADIKSGGKLTIKDLTVQKSFLIGIFQLLSIIPGTSRAGIVYTGSRFLNLSRIEAARFSMILSIPVIILSSAIPIIQLLKTPTQENFILSIIGFIVSFIVAYFSIDL

SEQ ID NO: 143001 - protein, 39 aa, Unknown
  Bacterial polypetide isolated from the Sargasso Sea
MDWMQALFLGLVQGLTEFLPISSTAHLRVVPHWLDWGDP

SEQ ID NO: 143002 - protein, 200 aa, Unknown
  Bacterial polypetide isolated from the Sargasso Sea
MFELQYFIIGLVQGITEFLPISSSGHLVLISEVSNWKDQGLFTDIAVHGGTLIAVLIYLRKEIFKIIKNLYQCRLFQNTLFFKMILATLPAVIVGFFIYEFVGDYFRNLQVVAWASIIFGIILFLSDKKHSSSSTWEEMKAKDAFIIGFFQIFAFIPGASRAGVIITGARFLGFNRSNAAIFSMLLSIPNYICFINSYPH

SEQ ID NO: 143003 - protein, 260 aa, Unknown
  Bacterial polypetide isolated from the Sargasso Sea
ILYSFTQGVTEFLPISSSAHLFILEHLLNWSVSGRSMAIAAHLGSLLAVCIYLKKDLLKIFCSFYFLKNFKKDNNILLVRNLFLITFPILVVGLLIFKNLDKELLSFNLIAIASIIGAGLLYIVDNNKIEKRNIYSLSILDSLFIGLFQIFALIPGASRAGTIITAARILKLTRIESTKLGLYSGLPTILGAVMLEALWLINNLSNNQEIISIILILLLSFFFAYLSIIFLMKWLKNYTFLPFVIYRISLGIIILCFINI

SEQ ID NO: 143004 - protein, 229 aa, Unknown
  Bacterial polypetide isolated from the Sargasso Sea
MYIFPVIILAIIQGITEFLPISSSAHLLITAEMMNIRENLSLDISLHLGTLMAVLIYFRTEALNFFQFMMPFLTSNKISKTKMNQNLIVASLPIIFIGGLAYMSGFAEIFRDLHFIGLSTIVFGLALYFADIRSNEENLKVDDLSYKKSLVVGFFQIFAIIPGASRAGVVYTGSRIVGLNRVEAAKFSMLLSIPVILISASIPVIEIVNDTIEMNFLYLFSGFIISFIT

SEQ ID NO: 143005 - protein, 216 aa, Unknown
  Bacterial polypetide isolated from the Sargasso Sea
IEILILSAIQGISEFLPISSSAHLIIVSNLYELKSSSLLIDISLHLGSLLAIIFFFRKDLFNLRNNQKLLSLIIIGSIPLIIFGYILHSTELILLLRNIKVIAWTTLFFGIILFFADQRKIDQNIQTNLNIKSIIFIGLFQILALIPGVSRAGITITAARFLKFNRVDASKISFLLSIPALAGASFLGLKDALNQSIQVSHLIIIAIILSFLFSYV

SEQ ID NO: 143006 - protein, 175 aa, Unknown
  Bacterial polypetide isolated from the Sargasso Sea
MENIFEVLIISIVQGITEFLPVSSSAHLNLLSNLFGFREEELLINISAHVGSLFAVIFFFKKEIISFGKNQKLFLRIILASLPLFLFGYLIVNYNLVPGLRTYKIIGWTTLIFGIILYLADKFKANKNIEKNFTTKNAVIIGFFQILALIPGVSRSGIIMTGARVLNFKREEAAK

SEQ ID NO: 143007 - protein, 190 aa, Unknown
  Bacterial polypetide isolated from the Sargasso Sea
MNDILLSFILGIVQGLTEFLPISSSAHLLFPTLIFGSTDLGLYFDISVHAGTLIAVVYYFRNEIFLISKSFLATSNFNEDKNLALQLIIATIPIIILGYIFRDLISQRIFSINDIAISNLIFASILLFAFLNNKGKKTLINITILGACFIGLFQCFALIPGASRSGAAITAGLLIGLSLKDASKFAFLLA

SEQ ID NO: 143008 - protein, 254 aa, Unknown
  Bacterial polypetide isolated from the Sargasso Sea
IIGIVQGFTEFLPISSSGHLVLVSELMGWQDQGIFTDVAVHIGTLIAVIIYLRSHIIVLFYNFLSFKFAANDNLIKIIIATIPAVIVGFFIFDLVQLYFRDIKVVAVSSVVFAALLFVADHFKMKISSWENMSYLQAFIIGLFQVLAFIPGASRAGVTITGARFLGFDRSSSAIFSMLLSIPIILASLVLTSLDLVISDETNVNLYKSLFAGVVACITALLSINFMMLIIQRSTYNIFIIYRVILGFILLYFYA

SEQ ID NO: 143009 - protein, 148 aa, Unknown
  Bacterial polypetide isolated from the Sargasso Sea
MFQNIIEIIILSAIQGISEFLPISSSAHLILVSSLYEFKSNSLLIDISLHLGSLLAIIYFFRNELLDTKNNKRLLGLIILGSIPLIIVGYILYSTNFIYALRDVKVIAWTTLIFGIVLYIADKNRFDKKISTNLNLQSILFIGLFQIL

SEQ ID NO: 143010 - protein, 263 aa, Unknown
  Bacterial polypetide isolated from the Sargasso Sea
MYFFPVILLAIIQGITEFLPVSSSAHLIIASDFIEFTYENIALDVSLHLGTLLAVIVYFRSDILLIMSGIIDSQSKGRNTAIQIFIATVPIVFFGGLAFMTGIVDYFRNIQVIALSTIIFGVVLYYADIQNDKKTKTIYELKIEESFIIGLFQLLAIIPGTSRSGIVYSGGRFLNISRVEALRFAMLLSIPTILLSSFIPTYKFIESPSSEFLIIGTVGLIVSFATAYLSISLLMSWVRNFSMVPFVVYRIILGSILLVFSIV

SEQ ID NO: 143011 - protein, 252 aa, Unknown
  Bacterial polypetide isolated from the Sargasso Sea
MFQNIIEVLILSAIQGISEFLPISSSAHLILVSTLYEFKSSSLLIDISLHLGSLIAIIYFFRDELFDARKNKRLLSLIILGSIPLIIVGYILYSTNLIYQFRNIKIIAWTTLIFAIILYISDKNRFDKKISSNLNFWSIIFIGIFQIFSLVPGVSRAGITITAARILKFNRVDSSKISFLLSIPALVGASVLSLKDVLEQSIQFNYLVVIAIISSFIFSFLTVKFFLIYINKFSKNVFVIYRIIIALILFSL

SEQ ID NO: 143012 - protein, 249 aa, Unknown
  Bacterial polypetide isolated from the Sargasso Sea
TEFFPISSSGHLLFAAEIMSIPESLMLDVSLHLGSLLAVIIYFRNDIKVLVFLLLPFSIKLSKDEKNLAFCLIVGTLPVVIVGGLLFLTGYADILRNIKIVGLSTIVFGLLLYYSDSYTNANTKSIDRLTIKNALIVGLFQVLAIIPGASRAGVVYSGSRIIGLNRTEAAKLSILLSIPVILISSAIPFLKLIESPTSANISSIFFGFLISFFVAYISIDYLLKWLKKNTMKPFVIYRIIIGTLILIYL

SEQ ID NO: 143013 - protein, 201 aa, Unknown
  Bacterial polypetide isolated from the Sargasso Sea
MSDIFLSLILGLIQGLTEFLPISSSAHLLIPSLVFGANDLGLGFDIAVHSGTLCAVIYFFKNDIKVYALSIFNSSNRYQNERRVAINLLIATIPIVFAGILFNDLISQRLVTKELIAWSNIFFASLLLLSFYLSKKNKDIFHLSILMSIFIGCVQVFALIPGASRSGVVIMACLFLGLNLKDSSRFAFLLAIPTILGALIF

SEQ ID NO: 143014 - protein, 76 aa, Unknown
  Bacterial polypetide isolated from the Sargasso Sea
MDLIQALVLGIVQGLTEFLPISSTAHLRIIPHLLDWQDPGTEFSAVIQLGTLLAVVLYFWNDVVSLSRAALVSLWK

SEQ ID NO: 143015 - protein, 210 aa, Unknown
  Bacterial polypetide isolated from the Sargasso Sea
MFQNFIEILILSAVQGISEFLPISSSAHLIIVSNLYDLKSSSLLIDISLHLGSLLAIIFFFRKDLLDLRNNQKLLSLILIGSIPLIIFGYILHSTDLIHLLRNIKVVAWMTLLFGIILFFADQRKIDQDINNNLNIKTIIFIGLFQILALIPGVSRAGITMTAARFLKFNRVDSGKISFLLSIPALIGASFLGLKDVFNKSIELNYLIIV

SEQ ID NO: 143016 - protein, 212 aa, Unknown
  Bacterial polypetide isolated from the Sargasso Sea
MEIIKSFILGVVQGLTEFLPVSSSGHIEIFKEILGFSFESQNGLFFTLILHLATAISALLYFWDDVKNILKSTIKFKDDENFHFTLMIIISMIPAGLVGFFLEEKINQLFNGNLLLVGSMLIITSLLLLISDKIKSKNRKLSAKNSFLIGLAQALAILPGISRSGSTIATSIFMGINRDLAAKFSFLMVIPIIVGSSLKMILFDNLVYDGSM

SEQ ID NO: 143017 - protein, 59 aa, Unknown
  Bacterial polypetide isolated from the Sargasso Sea
MDSMQALFLGLVQGLTEFLPISSTAHLRVVPHWLGWEDPGAEFSAVIQLGTLLAVLVYF

SEQ ID NO: 143018 - protein, 131 aa, Unknown
  Bacterial polypetide isolated from the Sargasso Sea
MFEFQYFLIGIIQGVTEFLPISSSGHLVLFGKLSNWEDQGLFTDIAVHFGTLFAVIVYLRKEIYYLFLNLFQFRIFEDQIILKIILSTLPAIILGYFIYDYVSIYFRSIQLIAISSIIFAIILYFADKISM

SEQ ID NO: 143019 - protein, 36 aa, Unknown
  Bacterial polypetide isolated from the Sargasso Sea
MTVLHVVVLAVIQGVTEFLPISSSGHLVLVPSITGW

SEQ ID NO: 143020 - protein, 38 aa, Unknown
  Bacterial polypetide isolated from the Sargasso Sea
MDLIQTLILAIIQGLTEFLPISSSAHLILISKIVGWND

SEQ ID NO: 143021 - protein, 99 aa, Unknown
  Bacterial polypetide isolated from the Sargasso Sea
MPVFQAIVLGITQGLTEFLPISSSGHLEIVPWLFSWNEFVGDSRAENTFDVALHFGTLIGAAIYLRKDICFYSKAGLSALVGRRPWNAEAKIGWLLLLS

SEQ ID NO: 143022 - protein, 183 aa, Unknown
  Bacterial polypetide isolated from the Sargasso Sea
MIQDLIEILILSVVQGISEFLPISSSAHLILISNFYDFSSSSLFIDIGLHLGSLFAIIYYFKKDLLNLRNNQKLLVLILVGSIPLIIFGYIIYSIGIINLLRNTEIIAWTTLFFGLVLFLSDKRDTDQNISTNLNIKTILFIGLFQILALVPGVSRAGITLTAARFLKFNRVDSSKIAFLLSI

SEQ ID NO: 143023 - protein, 215 aa, Unknown
  Bacterial polypetide isolated from the Sargasso Sea
MFQNIIEVLILSTIQGISEFLPISSSAHLILVSTLYEFKSSSLLIDISLHLGSLMAIIYFFRDELFDARKNKRLLSLIILGSIPLIIVGYILYNTGLIYQLRNIEIIAWTTLIFAIILYISDKNRFDKKISSNLNFQSIIFIGIFQILSLVPGVSRAGITITAARILKFNRVDSSKISFLLSIPALAGASVLSLKDIFEQSIQFNYLVVIAIISS

SEQ ID NO: 143024 - protein, 255 aa, Unknown
  Bacterial polypetide isolated from the Sargasso Sea
MFQGFIEILILSAVQGISEFLPISSSAHLILVSKIYDLKTSSLLIDISLHLGSLFAIIFYFRKDLFDLKHNRKLLCLIIFGSLPLIIFGYILHSSELIYLLRNIKVIAWTTLFFGIILFFADKCKIDQNISSHLNIKSIIFIGIFQILALIPGVSRAGITITAARFLKFNRVDASKISFLLSIPALAGASFLGLKDAFNHSIEINYLLIIAIILSFLFSYITIKFFLTYINKFSLNIFVIYRIFVALVLFLIIYF

SEQ ID NO: 143025 - protein, 72 aa, Unknown
  Bacterial polypetide isolated from the Sargasso Sea
MLENFLEILILSTVQGISEFLPISSSAHLILVSSFYDFKSASLIIDISLHLGSLLAILLYFRKELFDIRNNK

SEQ ID NO: 143026 - protein, 157 aa, Unknown
  Bacterial polypetide isolated from the Sargasso Sea
MTFLPILLLGIIQGITEFLPISSSGHLLISAEIMNIPESLMLDVSLHLGSLLAVIIYFRKDIKVLIFILLPFSIKLDKDEKNLAFCLIVGTLPVVIVGGLLFLTGYADILRNVKVVGLATIVFGLLLYYSDSYSIANTKSNERLSIKNALIIGLFQY

SEQ ID NO: 143027 - protein, 86 aa, Unknown
  Bacterial polypetide isolated from the Sargasso Sea
MFELQYFFIGIIQGITEFLPISSSGHLVLFAKLTDWEDQGLFTDIAVHFGTLFAVIAYLRKEIIYLLSNIFQFKIFEDQIIFKIIL

SEQ ID NO: 143028 - protein, 47 aa, Unknown
  Bacterial polypetide isolated from the Sargasso Sea
MFELQYFIIGIVQGFTEFLPISSSGHLVLLSELTNWQDQGLFTDVAV

SEQ ID NO: 143029 - protein, 255 aa, Unknown
  Bacterial polypetide isolated from the Sargasso Sea
MFQDFIEILILSAIQGISEFLPISSSAHLIIVSSLYDLKASSLLIDVSLHLGSLLAIIFFFKKDLFDFKHNQKLFKLIIIGSIPLIIFGYILHSTELIYLLRNIKVIAWTTLFFGIILYFADQRKIDRNISSNLNLRSIMFIGLFQMLALIPGVSRAGITITAARFLKFNRTDSGKISFLLSIPALAGASFLGLKDIPNESLEINISIIIATTLSFLFSYTTVKFFLIYLNRFSLNIFVIYRIIIAFILLLIIYF

SEQ ID NO: 143030 - protein, 49 aa, Unknown
  Bacterial polypetide isolated from the Sargasso Sea
MGEQIDWLQIILLSFLQGLTEFLPISSSAHLIIPSQIGIWNDQGLAFDV

SEQ ID NO: 143031 - protein, 141 aa, Unknown
  Bacterial polypetide isolated from the Sargasso Sea
MPLLQIFILAAIQGITEFIPISSSGHLILLPEFFDWNDQGLLVDVAVHVGTLFAVIIYFWRDIFKILSSVYHKTLLGRKSTKTDKNFRLFLNLGIATLPIIPAGYIINYYSGDILRSMEVIGWATIVFAIFLLLADKVCMT

SEQ ID NO: 143032 - protein, 241 aa, Unknown
  Bacterial polypetide isolated from the Sargasso Sea
IQGISEFLPISSSAHLILVSTLYEFKSGSLLIDISLHLGSLMAIIYFFRDELFDARKNKRLLSLIILGSIPLMIVGYILYNTGLIYQLRNVEIIAWTTLIFAIILYISDKNRFDKKLSSNLNFQSIIFIGICQIFSLIPGVSRAGITITAARVLKFNRVDSSKISFLLSIPALVGASVLSLKDVFERSIEFNYLIIIAIISSFIFSFLTVKFFLIYINKFSMNAFVIYRIIIALILFYLIY

SEQ ID NO: 143033 - protein, 65 aa, Unknown
  Bacterial polypetide isolated from the Sargasso Sea
MNDIVLSLVLGLIQGLTEFLPISSSAHLLLPSLIFGTTDLGLSFDIAVHAGTLVAVIYFFKSEIV

SEQ ID NO: 143034 - protein, 158 aa, Unknown
  Bacterial polypetide isolated from the Sargasso Sea
MSDIFLSFILGVIQGFTEFLPISSSAHLLIPSLLFGANDLGLEFDIAVHAGTLCAVIYFFKNDLKVYVLSIFNSSSSYQNDRRVAINLLIATLPIVFAGIFLNDLISQRLVTKELIAWTNIFFACLLLLSFYLSKKNKDIFHLSLLMSFFIGCIQILH

SEQ ID NO: 143035 - protein, 187 aa, Unknown
  Bacterial polypetide isolated from the Sargasso Sea
RRFTLNIFLAFLPAVVIGALSYDLIKSVLFSPWVVSTMLIVGGIAIIIIEKLQRQEHYHLPEEIPPIKALAIGLFQCTAMIPGVSRSGATIMGALLVGVERRAAAEFSFLLAIPTILAATAYDLYRNYESLTTDSIMLIAVGFITAFIVAMLVVRGVLVFISRHGYVPFAIYRIIVGTIMLAILFLR

SEQ ID NO: 143036 - protein, 256 aa, Unknown
  Bacterial polypetide isolated from the Sargasso Sea
LSILLGIIQGLTEFLPISSSAHLLFPNLIFGTNDLGLSFDIAVHFGTLIAVIFYFKEDIFLMLQSLATRNSTFPREKKLFGLLVVATIPIVLVGFGVSDILEQRLFNTFTIALSNIVFAILLLLVFLQRKENLRLVDLTFKAALIIGIFQCFALIPGASRSGTAITGAILIGLTLKDSAKFAFLLSIPTILGALVFLISDINEISLNYSTMIIGFFTSMLFAFFTIKYFLAFVDKIGMIPFVVYRLILGVVLLALL

SEQ ID NO: 143037 - protein, 70 aa, Unknown
  Bacterial polypetide isolated from the Sargasso Sea
MDLIQTLILAIIQGLTEFLPISSSAHLILISKIVGWNDQGLLFDIALHFGTLLAVLIYFKDDLCRMIEDP

SEQ ID NO: 143038 - protein, 240 aa, Unknown
  Bacterial polypetide isolated from the Sargasso Sea
TEFLPISSSSHIILFSKFMDFISEDLILNVSLHIGSFLAVIVFFRKEILSFLIYRKVFMLIILASLPIVLCGYLIAQSGIINDLRSLKIIGWTTVLFGILLYFSDKMENEKSLEINLDIKAALIIGFLHIFSLIPGVSRSGIAITAARFLKFDRVNAARISFLLSIPTLLAVSVFGIYNIYITGSFDLIKLNFTSIILSFIFSYITMAAFLGYIKKASLDVFVLYRIVLGILILIFAYQG

SEQ ID NO: 143039 - protein, 114 aa, Unknown
  Bacterial polypetide isolated from the Sargasso Sea
MPLTHLTILALIQGLTEFLPISSSGHLIIFPKLLDWQDQGITIDVAVHAGSLLAVLIFLWRDIGRILLELTHLARPGGSSTPPLLYLLLIASMPLIVVGFLVSTVMQDLTRNIE

SEQ ID NO: 143040 - protein, 206 aa, Unknown
  Bacterial polypetide isolated from the Sargasso Sea
MFKDFIEILILSAIQGISEFLPISSSAHLIIVSSLYNLKASSLLIDISLHLGSLLAIIFFFRKDLFDIKNNQKLLRLIIIGSIPLIIFGYILHSTELIHLLRNIKVIAWTTLIFGIFLYFSDQKKIYKNISSNLNIKSIVFIGMFQILALIPGVSRAGITITAARLLSFNRVDSGKISFLLSIPALAGASFLGLKDIPNESIEINL

SEQ ID NO: 143041 - protein, 213 aa, Unknown
  Bacterial polypetide isolated from the Sargasso Sea
MSDSFLSILLGIIQGLTEFLPISSSAHLLFPNLIFGTNDLGLSFDIAVHFGTLIAVIFYFREDISLMLQSLATRNSTFPKEKKLFGLLVVATIPIVLVGFGVSDILQERLFNTFTIALSNIVFAILLLLIFLQRKENLKLVNLTFKAALIIGIFQCFALIPGASRSGTAITGAILIGLTLKDSAKFSFLLSIPTILGALVFLISDINEISLNY

SEQ ID NO: 143042 - protein, 186 aa, Unknown
  Bacterial polypetide isolated from the Sargasso Sea
MFELQYFIIGLIQGFTEFLPISSSGHLVLVSELTSWNDQGQFTDVAVHVGTLIAVLIYLRSHILSLMINFLTFRFKNNENLIKIIIATLPAIIVGYFMIDFIQTYFRNIRIVAISSIIFAAILFVSDHYKIKISEWKNMNYFHAFIIGLFQILAFIPGASRAGVTITGARFLGFNRSSAAIFSMLL

SEQ ID NO: 143043 - protein, 251 aa, Unknown
  Bacterial polypetide isolated from the Sargasso Sea
MTDSSIFYVFYGLIQGITEFIPISSSGHINILEIYFKSLESRNYLYETSAHFASLFALLLYLFANKHFSKSNIKAYWKLLVYGTLPAIILGFIIKFYNVNYISLKLIGYTSITGAILLYVSDKTKKFKLEIKNKSTKFILAGFFQCLAFLPGFSRAGSCIIAFRIFGEDRKYSSIYSLYMGIPIICLSFFSNVKEFENFIIDKNLSIIFIITFFSAYFTISVFIKVINKIGFTPFVIYRILLGLILLIYLT

SEQ ID NO: 143044 - protein, 130 aa, Unknown
  Bacterial polypetide isolated from the Sargasso Sea
MTFLPILLLGIIQGITEFLPISSSGHLLIAAEIMHIPESLMLDVSLHLGSLMAVIIYFRKDIKVLVFLLLPFSIKLNKSEKNLAFCLIIGTLPVVIVGGLLFLTGYADILRNIKIVGLATIVFGLLLYYS

SEQ ID NO: 143045 - protein, 246 aa, Unknown
  Bacterial polypetide isolated from the Sargasso Sea
MELLNIVFLSLIQGITEFLPVSSSAHLILFPTFSGNEDQGLLIDISVHLGSLIAVTTFFWTDVKAIIASASKFFSGNLNGLDSNLVVCLVVATIPAVVLGATLKYTGIYQYIRESTLIIGIAMVGFGILLWFSDRKEQVSVGISDWTIRHALILGFWQMLALIPGTSRSGITITGARFLNYDRSSAIKISMLMSIPIILAAATLEFYYLGFEKISINQLEIVLAITISALAAFGALSLMMRLLTTV

SEQ ID NO: 143046 - protein, 218 aa, Unknown
  Bacterial polypetide isolated from the Sargasso Sea
MFRDFIEILILSAVQGISEFLPISSSAHLIVVSNLYDLKSSSLLIDISLHLGSLLAIIFFFRRDLIDLKNNKKLLSLIIFGSIPLIVFGYLLYSTELINLLRNIKIIAWTTLFFGIILFFADQRKIDQNIHTNLNIKSIIFIGLFQILALIPGVSRAGITMTAARFLKFNRVDSSKISFLLSIPALTGASFLGLKDAFNQSIENNYLIISAIILSFLF

SEQ ID NO: 143047 - protein, 85 aa, Unknown
  Bacterial polypetide isolated from the Sargasso Sea
MLTNIIEIIILSLIQGVSEFLPISSSAHLIVVSTLYEFKSSSLLIDVSLHFGSLLAILFFFKKELFDLKNNKKLLFLNYYWVLFH

SEQ ID NO: 143048 - protein, 145 aa, Unknown
  Bacterial polypetide isolated from the Sargasso Sea
MSLEHLILLALIQGITEFLPISSSGHLSLVHELTGWADQGVLVDVAVHAGTLGAVLLYFRQDVWAMALGGLCLLRGKLTDDGRMALYIVGATIPVVIVGYFLLSTGYVDILRAAAIVAWANLFFAGVLWITDRAGAVTRRLEQMN

SEQ ID NO: 143049 - protein, 208 aa, Unknown
  Bacterial polypetide isolated from the Sargasso Sea
GLHLGSLAAIILYFKKDLIEIKKNKNLISLLFFGSLPLLFFGFILYNSGIINFFRNIEIIAWSTLLFGIFLYIADKSNINKRIDNNLNIKNIFIIGMFQCLALIPGVSRSGITITSARLIEFNRVDASKISFYLSIPALMGASFLGLKEVFNKNLDFNLVILFSFILSFIFSYITIKYFLIYVKNYSLNIFVYYRIFLALVLFVFIYG

SEQ ID NO: 143050 - protein, 241 aa, Unknown
  Bacterial polypetide isolated from the Sargasso Sea
MSDILFGIIQGVTEFLPISSSGHLVVLSELFKDNSFNTYEIAFLHLGTFFSILIYYFKDIFSIIKNRNSLIQTFKLIVIGVLPAAVFGLFLPISNLIDESSSILVITSVAYIFIASVLYFADKLEEGDKSIFDLSLKESLTIGLAQAIALFPGVSRSGITLSTALYLKLKKTEAIFFSLLLGLPTIFGAWLLTFMQATEPFDDSLWIPCIAAFLSGLVAIRVLINFTISSKLNVFFIYCFL

SEQ ID NO: 143051 - protein, 255 aa, Unknown
  Bacterial polypetide isolated from the Sargasso Sea
MYENIIEVIILSAIQGISEFLPISSSAHLILVSSLYEFKSNSLLIDISLHLGSLFAIIYFFRKDLLDIRNNKRLLILIILGSIPLMVFGYILYSTDLIYNLRNIKVIAWTTLIFGIILYIADQSRFDKKISTNLNFQTIFFISFFQILSLIPGVSRAGITITAARILKFNRVDSSKISFLLSIPALSGASFLGLKDVFKESIEFNYLIFIAIISSFIFSFITVKFFLNYINKFSMNAFVIYRIIIALIIFLIIYN

SEQ ID NO: 143052 - protein, 179 aa, Unknown
  Bacterial polypetide isolated from the Sargasso Sea
MFHDFIEILILSAVQGISEFLPISSSAHLIIVSNLYNLKASSLLIDISLHLGSLLAIIFFFRKDLFDLKNNQKLLSLIIIGSIPLIIFGYVLHTTELIHLLRNTKVIAWTTLFFGIILFFADQSKNDQNISTDLNIKSIIFIGLFQILALIPGVSRAGITMTAARFLNFNRVDSGKISF

SEQ ID NO: 143053 - protein, 104 aa, Unknown
  Bacterial polypetide isolated from the Sargasso Sea
MDIFQATFYGIIQGLTEFLPISSSGHLALLPQFLEIRDPGVAFDLTMHVGTALAVILYFRKELRVLIRDTVWTLMGKKEKLTSRSLLPLYMIASTVTTLVLVVG

SEQ ID NO: 143054 - protein, 255 aa, Unknown
  Bacterial polypetide isolated from the Sargasso Sea
MFQDFIEILILSAIQGISEFLPISSSAHLIIVSSLYNLKANSLLIDISLHLGSLLAIIFFFRKDLFDLKHNQKLLKLIIIGSIPLIIFGYILHSTELIGLLRNIKVIAWTTLFFGIILYFADQRKIDQNISSNLNIRSIMFIGLFQILALIPGVSRAGITITAARFLNFNRVDSGKISFLLSIPALAGASFLGLKDIQNESLEINILIIIAIILSFLFSYITVKFFLKYLNKFSLNIFVIYRLIIALILLSIIYF

SEQ ID NO: 143055 - protein, 244 aa, Unknown
  Bacterial polypetide isolated from the Sargasso Sea
PAIQGISEFLPISSSAHLIIVSILYNLKTSSLLIDISLHLGSLLAIIFFFKKDLFDLRNNQKLLSLIIIGSIPLIIFGYILHTTELIYLLRNIKIIAWTTLFFGIILYFADQRKINQNISTNLNIKSILFIGLFQILALIPGVSRAGITMTAARFLKFNRVDSGKISFLLSIPALLGASFLGIKDALNQSIEINYLIITAVFLSFLFSYITVKFFLIYINKFSLNIFIIYRIIISLIIFMVIYL

SEQ ID NO: 143056 - protein, 105 aa, Unknown
  Bacterial polypetide isolated from the Sargasso Sea
MFQNIIEVLILSAIQGISEFLPISSSAHLILVSSLYEFKSSSLLIDISLHLGSLFAIIYFFRKELLDIKNNQKILVLITLGSVPLIIVGYFLYTTGIIYSLRNIE

SEQ ID NO: 143057 - protein, 222 aa, Unknown
  Bacterial polypetide isolated from the Sargasso Sea
MLQDFIEILILSAVQGISEFLPISSSAHLILISNFYDFSSSSLFIDIGLHLGSLFAIIYYFKKDLLNLRNNQKLLVLILFGSIPLIIFGYIIYSTEIINLLRNIEIIAWTTLFFGLVLFLSDKRDVDQNISNNLNIKTMLFIGLFQILALVPGVSRAGITLTAARFLKFNRVDSSKIAFLLSIPALAGASFLGLKDAVQQSAEFNYLLLIAITLSFFLLIYN

SEQ ID NO: 143058 - protein, 154 aa, Unknown
  Bacterial polypetide isolated from the Sargasso Sea
RHPLVIAAATIGFAVLLWWADRYRSEARALSDLGFRGAVLIGVFQALALIPGTSRSGITITAGLMLGLSREAAARFSFLMAIPIIAAAGCFKAVSLMQSEDAVLWNLFALGVAVAFLSAWAVIALFLRFISRVGMTPFVLYRIALGSILLILFW

SEQ ID NO: 143059 - protein, 59 aa, Unknown
  Bacterial polypetide isolated from the Sargasso Sea
MSLNLILILSLIQGITEFLPISSSGHLVIIPFFMELPYQGKLFDISVHFGSLFAVIFYL

SEQ ID NO: 143060 - protein, 61 aa, Unknown
  Bacterial polypetide isolated from the Sargasso Sea
MFELQYFLIGMIQGVTEFLPISSSGHLVLFAQLTNWGDQGLFTDIAVHLGTLVAVIIYLRQ

SEQ ID NO: 143061 - protein, 256 aa, Unknown
  Bacterial polypetide isolated from the Sargasso Sea
MTIIDGIILGIIQGITEFLPISSSGHLVIAQELLGIEQPGNQFEILVHLGTLASITVIFFDDIRSLFLSINKRRTQRFISYIIIGTIPAVCLGLGLKDTLESLFENIYYVGCALIFTGVILFSSKNFTRRDEGNAYYKSLLIGIAQALAIIPGISRSGMTISCALFLGLSAKESAKYSFLLAIPVIFGAGLLMALDIDDGLQIEISVAIAGLISSFIVGVISLKWLLQLIQKGKFHYFGVYCFFVGIISFFINGPY

SEQ ID NO: 143062 - protein, 163 aa, Unknown
  Bacterial polypetide isolated from the Sargasso Sea
KDIIKTDARELWLIGAALIILAIGLYAAEKLSKQNRQIDQLKFLQIQLIGLTQALALIPGCSRSGSTIMGGLIVGLKREEAARFSFLLGIPAILGSGIFEFVEMFEEGIISSDYQNLVIGVFASFVVGYLSIEFLLRFLRIHGTLVFVIYRIVLGTGVLVFLA

SEQ ID NO: 143063 - protein, 126 aa, Unknown
  Bacterial polypetide isolated from the Sargasso Sea
NVSWSLKNSFKIGCWQALALIPGTSRSGITISAARLLGYSREEAVNISMLLSIPVIIAATAVSIMDNYLNATEIDFQVILIALIFSFSAAYLAIAVMLKFLKTLGFLPYIIYRIVLGIALIFWTVI

SEQ ID NO: 143064 - protein, 198 aa, Unknown
  Bacterial polypetide isolated from the Sargasso Sea
MFQNIIEVLILSAIQGISEFLPISSSAHLILVSTLYEFKSSSLLIDISLHLGSLIAIIYFFKDELFDIRKNKRILNLIVLGSIPLIIVGYILYSTNLIYQLRNLEVIAWTTLIFAIILYISDKNRFDKKISSNLNFQSIIFIGIFQIFSLVPGVSRAGITITAARILKFNRVDSSKISFLLSIPALAGASVLILKDVF

SEQ ID NO: 143065 - protein, 256 aa, Unknown
  Bacterial polypetide isolated from the Sargasso Sea
MSYIESLILGVLQGVTEFLPISSSGHLVIVQHFLGVVNEGLFFEVILHLGTLISILIYYYQDLQKIIINYFKGNYGAKNYVHCLIIATLPAAIIGFLFQSVIENAFVFSLVKWMFGITGLFIGLTYFIINKTNKKMIWSIAIMIGIAQVFALLPGISRSGITISCALFMGIKHEQAAKFSFYMAIPILIGATFLQLISLENYKVFFSMPLFVAFISSAVSGYLVINFLLNVITKGKFYLFSVYCFILSFILFFFNL

SEQ ID NO: 143066 - protein, 203 aa, Unknown
  Bacterial polypetide isolated from the Sargasso Sea
MLQDFIEILILSAVQGISEFLPISSSAHLILISKFYDFNSSSLFIDIGLHLGSLFAIIYYFKKDLLNLKNNQKLLVLILVGSIPLIIFGYILYSTEIINLLRNIEIIAWTTLLFGLVLFFSDKRDTNQNISTNLDLKTILFIGLFQILALVPGVSRAGITLTAARFLKFNRVDSSKIAFLLSIPALTGASFLAFKDAVQQSVE

SEQ ID NO: 143067 - protein, 122 aa, Unknown
  Bacterial polypetide isolated from the Sargasso Sea
MFQNIIEVLILSAIQGISEFLPISSSAHLILVSSLYEFKSSSLLIDISLHLGSLVAIVYYFKEEVLNINKNKRLISLIIIGSIPLIIFGYILYTTGLIYSLRNIETIAWTTLIFAIVLYISD

SEQ ID NO: 143068 - protein, 194 aa, Unknown
  Bacterial polypetide isolated from the Sargasso Sea
MELLNVVFLSLIQGITEFLPVSSSAHLILFPTFSGNKDQGLLIDISVHLGSLIAVTTFFWTDVKAITASAFKFFSGNLNDLNSNLAVCLVVATIPAVVLGATLKYSGLYQYIRESTLIIGIAMVGFGILLWFSDRKEQVNVRISDWTIRHALILGFWQMLALIPGTSRSGITITGARFLSYKRSSAVKMSMLMS

SEQ ID NO: 143069 - protein, 88 aa, Unknown
  Bacterial polypetide isolated from the Sargasso Sea
MDLIQTLILAIIQGLTEFLPISSSAHLILISKIAGWNDQGLLFDIALHFGTLLAVLIYFKDDLCRMIQDPIKNLGKNIVHSDLMILVM

SEQ ID NO: 143070 - protein, 173 aa, Unknown
  Bacterial polypetide isolated from the Sargasso Sea
MSIIEAIILGIIQGLTEFLPVSSSGHLEIGKAFMNVPAESLNFTIAVHGGTVLSTIVIFRKDILQLIKGCFSFTWNEETQYVAKIAVSMVPVAIIGLFFKDELKSLFSGGNLVFVGSMLIATAALLAFTYFAKEKEKKTTFLDAFIIGISQAIAVLPGISRSGSTIATGLLLG

SEQ ID NO: 143071 - protein, 229 aa, Unknown
  Bacterial polypetide isolated from the Sargasso Sea
MFQNIIEVLILSAIQGISEFLPISSSAHLILVSTLYEFKSSSLLIDISLHLGSLMAIIYFFRDELFDARKNKRLLSLIILGSIPLIIVGYILFNTGLIYQLRDIEIIAWTTLIFAIILYISDKNRFDKKISTNLNFQSIIFIGIFQIFSLVPGVSRAGITITAARILKFNRVDSSKISFLLSIPALAGASVLSLKDVFEQSIEFNYLIVIAIISSFIFSFLTVKFFLIY

SEQ ID NO: 143072 - protein, 232 aa, Unknown
  Bacterial polypetide isolated from the Sargasso Sea
MELWEIILYSFTQGVTEFLPISSSAHLFILEHLLNWPVSGRSMAIAAHLGSLLAVCIYLKEDLLKIFYSFYYLKNFKKDNNILLVRNLFLITFPVLVVGLLIFKNLDKELLSLNLIAIASIIGAGLLYIVDNNKTEKRSIYSLSILDSLFIGVFQIFALIPGASRAGTIITAARILKLSRIESTKLGLYSGLPTILGAVMLETLWLINNTNNNQEIISIILILLLSFFFAYL

SEQ ID NO: 143073 - protein, 203 aa, Unknown
  Bacterial polypetide isolated from the Sargasso Sea
MFQNIIEVLILSAIQGISEFLPISSSAHLILVSSLYEFKSSSLLIDISLHLGSLVAIVYYFKEELLNINKNKRLISLIIIGSIPLIIFGYILYTTGLIYSLRNIETIAWTTLIFAIVLYISDKSRFDKKISTNLNIQSILFIGIMQILSLIPGVSRAGITITAARILKFNRVDSSKISFLLSIPALAGASILSLKDIFYQTTE

SEQ ID NO: 143074 - protein, 99 aa, Unknown
  Bacterial polypetide isolated from the Sargasso Sea
MDLIQTLILAIIQGLTEFLPISSSAHLILISKIAGWNDQGLLFDISLHFGTLLAVLIYFKDDLCRMIEDPIKNRGKNIVHSDLMILVIATIPVVIAGGL

SEQ ID NO: 143075 - protein, 218 aa, Unknown
  Bacterial polypetide isolated from the Sargasso Sea
MSLIDSIFFGALQGATEFLPISSSGHLILLANFFQVDLPTIVFEVVVHLGTLISILFIFRSDIISIINKAKIKGDFQEIILISSATIPIAMTGLIFKSNIETAFRSVAIVGVCMVITGIILGSTLFTSFIRKKNISLVSALIIGIMQAFALLPGISRSGITISTALWIGISKEEAGRFSFLIAIPAIIGSLILTLPDIINVISVEGSLLILIATLVSA

SEQ ID NO: 143076 - protein, 95 aa, Unknown
  Bacterial polypetide isolated from the Sargasso Sea
MDWIQALVLGIVQGLTEFLPISSTAHLRIIPSLLDWQDPGTEFSAVIQLGTLMAVILYFKNDVVSLSRAAIVSLCNRKLFETTDSKLAWSIAAGT

SEQ ID NO: 143077 - protein, 198 aa, Unknown
  Bacterial polypetide isolated from the Sargasso Sea
MENIVQVVVISIVQGLTEFLPVSSSAHLNLLSNLFNFKEDELLINISAHIGSLFAVMLFFKKEIISFGKNQQLFFRVILGSVPLFFFGYLVVYYNLVPGLRTYKVIGWTTIIFGLLLYFADKFKTKLKIQKNFSTKNAVIIGFFQILALMPGVSRSGIVITAARILKFKREDAAKIAFLMSIPALAGTGVFGFYALMS

SEQ ID NO: 143078 - protein, 244 aa, Unknown
  Bacterial polypetide isolated from the Sargasso Sea
SIIQGITEFLPVSSSAHLNLISKYFGIQNELLINVYAHMGSLLAVIFFFKEDIFNFGKNKKLFYKIILASIPLFGFGFLILKYNLIDTFRSLELIGWMTIIFGIVLFITDKLSLENSIKDKFTFKKAILIGFFQVLALIPGVSRSGIVMTGARFLKFNREDTAKISFLLSIPALAGSSIYGLYKMFNGGGLVVNINSIMTIGLSFIFSYLTIKYLLIYLKNFSFNIIVGYRLILGSIILATVYL

SEQ ID NO: 143079 - protein, 237 aa, Unknown
  Bacterial polypetide isolated from the Sargasso Sea
MENFFQILVISIIQGVTEFLPISSSAHLNLLSTYFHIEDKLIINVSAHTGSLIAVVFFFKKEIIDFGKNKTLFLKIVLASVPLFLIGYIIIRFNLVENLRSYEVIGWTTLLFGILFYFADKFELKQNIKNNFSTKKALFIGFFQVLALVPGVSRSGIVMTGARFLKFNREDAAKISFLMAIPALLASTTYGIFSLINKDSLLLNINSILTIGLSFVFSYFTIKYLLIYLKKFILILL

SEQ ID NO: 143080 - protein, 169 aa, Unknown
  Bacterial polypetide isolated from the Sargasso Sea
MSLKNHRFNLIFNVFEIIILSLIQGITEFLPISSSSHLILFSNYINFENQSLSIDVSLHIGSFFAVLAFFYKDLINFVENKLLLLKIITSSLPTIFTGYILVKFNFIEEIRNIETIAFATIFFAFLLYFSDKCKLEKNVNKDYSFKSALIIGLLQILSLIPGVSRSGIT

SEQ ID NO: 143081 - protein, 179 aa, Unknown
  Bacterial polypetide isolated from the Sargasso Sea
MFELQYFIIGFVQGITEFLPISSSGHLILISKITNWEDQGLFTDVAVHGGTLIAVLIYLRKEINRIIKNFFQFQSFYNTKVYKLVLATLPALITGFFIYNFIENYFRNFQIVAWTSIIFGILLFFADKKQSSSKSWEAMNFKNAFIIGLFQILAFIPGASRAGVTITGARFLGFNRSNS

SEQ ID NO: 143082 - protein, 182 aa, Unknown
  Bacterial polypetide isolated from the Sargasso Sea
MFQNIIEVLILSAIQGISEFLPISSSAHLILVSTLYQFKSSSLLIDISLHLGSLIAIIYFFKDELFDIRKNKRILNLIVLGSIPLIIVGYILYSTNLIYQLRNLEVIAWTTLIFAIILYISDKNRFDKKISSNLNFQSIIFIGVFQIFSLVPGVSRAGITITAARILKFNRVDSSKISFLLS

SEQ ID NO: 143083 - protein, 254 aa, Unknown
  Bacterial polypetide isolated from the Sargasso Sea
MDFLNIIILSIIQGITEFLPISSSSHLILLPMLTEFPDQGIMFDIALHTGSLIAVLIYFRKEIKNILQFTDNGKNYIKLIIIGSIPLPIAGLLLIDLIALNLRSIEVIAVMTITFALLLLYADNHNKPYKEITKLSTKIIIIIGLFQTLALVPGVSRSGIVITAALLLNYNRNDAIKIAFLLSIPAIFMASSYNLLQLSSMGDVAILSDHFLGMVLSLLVSYLTIYFFITTINKISFSPYIIYRMILGTLLLMV

SEQ ID NO: 143084 - protein, 153 aa, Unknown
  Bacterial polypetide isolated from the Sargasso Sea
MDDLSLIQIIILSIIQAITEFLPISSSAHLLLPSKLLGWPDQGIIFDITVHFASLLAVIVYFRDQFLKFSFYLSKTFIFLIIATLPIVLIVLFIDGVGDYRWTLESIAISNIVFAALLFLTDKFCNGNLKNSEMKWWQAVIIGFSQTFSLVSG

SEQ ID NO: 143085 - protein, 107 aa, Unknown
  Bacterial polypetide isolated from the Sargasso Sea
MFELQYFLIGLIQGVTEFLPISSSGHLVLFAELAKWEDQGLFTDIAVHFGTLFAVLIYMRKEIKLLISNILAMQILEDKIVFKIIVATNPAIIVGFFIYDLVNLYFR

SEQ ID NO: 143086 - protein, 90 aa, Unknown
  Bacterial polypetide isolated from the Sargasso Sea
MFQNIIEVLILSAIQGISEFLPISSSAHLILVSTLYEFKSSSLLIDISLHLGSLIAIIYFFKEELFDIRKNKRILNLIVLGSIPLIIVGY

SEQ ID NO: 143087 - protein, 119 aa, Unknown
  Bacterial polypetide isolated from the Sargasso Sea
MEIINIIILSFIQGVTEFLPISSSAHLVLLSELSNFPDQGLGFDIALHTGSLLAILIYFKDEIRKIFVMTDDGRQYLKLMIFASIPLPIIGIIFIDYISLYMRNVQPIAIMTIIFALLL

SEQ ID NO: 143088 - protein, 79 aa, Unknown
  Bacterial polypetide isolated from the Sargasso Sea
MFQDFIEILVLSAVQGISEFLPISSSAHLIIVSSLYDLKASSLLIDISLHLGSLLAIIFFFRKDLFNLKNNHKLLKLII

SEQ ID NO: 143089 - protein, 270 aa, Unknown
  Bacterial polypetide isolated from the Sargasso Sea
LTEFLPVSSSGHLVLLPQLLDWTDQGIGIDVAAHLGSLLAVLIFFARNSKDENNSEFTLKPVKLIANFGSFARVLTSMFKSQKAYYFSVCILSLVIATFPVAVLGFLFRDFVASDMRTIKIVAYSTIFFGLILGFADRFRGGKTLNDLSLGCLIIIGIAQSLALIPGVSRSGITITAALLLGFSRKSAVSISAILAVPVIGLSAGFELSYFLQIADRRMVFDLVLVLGMSCLAAYISLLFLFKLVDKVGMTPFVIYRIFLGGVLLLLFVD

SEQ ID NO: 143090 - protein, 254 aa, Unknown
  Bacterial polypetide isolated from the Sargasso Sea
MFQNIIEILILSAIQGISEFLPISSSAHLILVSTLYEFKSSSLLIDISLHLGSLIAIIYFFKDELFDIRKNKRILNLIVLGSIPLIIVGYILYSTNLIYQLRNLEVIAWTTLIFAIILYISDKSRFDKKISSNLNFQSIIFIGVFQIFSLVPGVSRAGITITAARILKFNRVDSSKISFLLSIPALAGASVLSLKDVFEQSIQFNYLVVIAIISSFIFSFLTVKFFLIYINKFSMNAFVIYRIIIALILFSLIY

SEQ ID NO: 143091 - protein, 50 aa, Unknown
  Bacterial polypetide isolated from the Sargasso Sea
MTLFEIIILAIIQGVTEFLPISSSGHLLLPAELFGWVSQGLAFDVAVHVG

SEQ ID NO: 143092 - protein, 117 aa, Unknown
  Bacterial polypetide isolated from the Sargasso Sea
MDLIQTLILAIIQGLTEFLPISSSAHLILISKIVGWNDQGLLFDIALHFGTLLAVLIYFKDDLCRMIEDPIKNRGKNIVHSDLMILVIATIPVVIAGGFFNDWIEANLRSSNVIAST

SEQ ID NO: 143093 - protein, 206 aa, Unknown
  Bacterial polypetide isolated from the Sargasso Sea
MFQNIIEVLILSAIQGISEFLPISSSAHLILVSTLYEFKSSSLLIDISLHLGSLIAIIYFFKDELFDIRKNKRILNLIVLGSIPLIIVGYILYSTNLIYQLRNLEVIAWTTLIFAIILYISDKNRFDKKISSNLNFQSIIFIGVFQIFSLVPGVSRAGITITAARILKFNRVDSSKISFLLFIPALAGASVLSLKDVFEQSIQFNY

SEQ ID NO: 143094 - protein, 60 aa, Unknown
  Bacterial polypetide isolated from the Sargasso Sea
MFQNIIEVLILSAIQGISEFLPISSSAHLILVSSLYEFKSNSLLIDISLHLGSLLAIIYF

SEQ ID NO: 143095 - protein, 126 aa, Unknown
  Bacterial polypetide isolated from the Sargasso Sea
MDDLSLIQIIILSIIQAITEFLPISSSAHLLLPSKLLGWPDQGIIFDITVHFASLLAVIVYFRDQFLKFSFYLSKTFIFLIIATLPIVLIVLFIDGVGDYRWTLESIAISNIVFAALLFLTDKFAT

SEQ ID NO: 143096 - protein, 229 aa, Unknown
  Bacterial polypetide isolated from the Sargasso Sea
DPGSSLSAVIQLGSIFALIWYFKNDLFKFRGQYSKKLFKYLFHERLLRSILIGTIPIVLFGGTIKLLIPYFFETIFRSNLSIALVSFLMAIFMYIADKSKKGSITLRNHNYSNSFLIGFSQAFAIFPGVSRSGITISTAFISGWEKGDAAKFSFLLGIPAISLAAIVEFISSFNQFFSFNLPPLIVGLITTFLSSLLAINFLVKYLPSNGLKLFIIYRVVFGVVILLNL

SEQ ID NO: 143097 - protein, 189 aa, Unknown
  Bacterial polypetide isolated from the Sargasso Sea
MNDILLSFILGLVQGLTEFLPISSSAHLLLPTLIFGSNDLGLYFDISVHAGTLIAVVYYFRNEIFLMSKSLLVTNNLNEDKNLIIQLIVATIPIVILGFIFRDLISQRIFSINDIAISNLIFASILLFAFLNNKGKKTLINITILGAGFIGLFQCFALIPGASRSGAAITAGLLIGLSLKDASKFAFLL

SEQ ID NO: 143098 - protein, 189 aa, Unknown
  Bacterial polypetide isolated from the Sargasso Sea
MVRDFIEILILSTVQGISEFLPISSSAHLILVSNFYDLEASSLMIDISLHLGSLVAVIFYFRKDLFNLRNNGKLLSLIIIGSLPLISFGYILYTTEFIHLLRNTKVIASTTLFFGFILFFADQRKIEKNIVTDLNFKSILIIGLFQILALIPGVSRAGITITAARFLNFNRIDSSKISFLLSIPALAGA

SEQ ID NO: 143099 - protein, 155 aa, Unknown
  Bacterial polypetide isolated from the Sargasso Sea
SIAVVSIVMALLLALAERIGPRRKQLGEVSGRDGLVVGLAQVLALIPGVSRSGSTLTASLFDGWQRSDAARFSFLLGVPAITIAGLVELKDAFAATGEAGPLPLLLGIVSATIVSWLAIDWLLKFLQRHSTWIFVAYRLVFGVVLLVWWSIYGAH

SEQ ID NO: 143100 - protein, 218 aa, Unknown
  Bacterial polypetide isolated from the Sargasso Sea
MSDLFLSLILAIIQGLTEFLPISSSAHLLLPSLLFGLKDLGLSYDIAVHTGTLVAVIYFFKSEIMLMTKSLYVNNNDLNKYKTLAMCLIAATIPIVLVGFSISDLVNQRIFGIQSIALVNVIFAGILLFAFLKREEKKDLYQLSLYGALFIGIFQCFALIPGASRSGTAITAALLIGMNIKDATKFSFMLGIPTILGALVLLLIDIQKLDIAFNMTHL

SEQ ID NO: 143101 - protein, 171 aa, Unknown
  Bacterial polypetide isolated from the Sargasso Sea
MIEVLILSLIQGITEFLPISSSSHLILISELGNLNNHNLSIDVSLHIGSFFAVLTYFYKDIINFVKNKELFLKIFISSLPLIIIGFFLTQTNLINEIRNIKIISWTTIIFGIFLYLSDKCKLDKNIENNFNFKTALIIGLFQVLSLMPGVSRSGIGITIARFLNYKREDAA

SEQ ID NO: 143102 - protein, 108 aa, Unknown
  Bacterial polypetide isolated from the Sargasso Sea
MPDWLQVILLGLIEGITEFLPISSTGHLLLAEQWLGKRSEHFTVFIQSGAVLAVLAVFKDRVRELATEWKQPNTSDYLVKMGVSFVITAIGGLSLKEVGWELPDNATP

SEQ ID NO: 143103 - protein, 265 aa, Unknown
  Bacterial polypetide isolated from the Sargasso Sea
MPLTHLTILALIQGLTEFLPISSSGHLIIFPKLLDWQDQGITIDVAVHAGSLLAVLIFLWRDIGRILLELSHLARSGRSSAPPLLYLLLIASVPLLVVGFLVSTVMQDLTRSIEVIGWATLLFGVLLGFSDRMGMTLNRFQHMKYFDAFLIGLAQILALVPGASRAGVTITAARFLGYERASAARFSLLLAIPAILGASVLKGLDIFFSDNVNLGIDFLIAAGISFCAALASISIMMKWLNRAGFMPFVVYRIIMGALLLAWVYL

SEQ ID NO: 143104 - protein, 274 aa, Unknown
  Bacterial polypetide isolated from the Sargasso Sea
MVLWKAIVLGVTEGLTEFLPISSTGHLLAAKELMHLDSSEISEQAIDSYIISIQIGAILAIVVLYKNRIRQMYEGLRGQSEVGKIVLRNLVVAFVPTAIIGLLLADYVKDQLYESQLVAYAWIVGGVCILLAHEKKFLKRDGSSMESLSLQGAVVVGLVQALALWPGVSRSLVTIFALVALGLSLAAAVEFSFLLGLVTLAAATFYELSQDGGRIIDLFGYWTPLVGLVAAFLSAVASVKWMVSWLENKSFSVFGFYRVAIGILAISLLSTGVL

SEQ ID NO: 143105 - protein, 254 aa, Unknown
  Bacterial polypetide isolated from the Sargasso Sea
MDDLSLIQIIILSIIQAITEFLPISSSAHLLLPSKLLGWPDQGIIFDITVHFASLLAVIAYFRDQFLKFSFYLSKTFIFLIIATLPIVLIVLFIDGVGDYRWTLESIAISNIIFAALLFLTDKFCNGNLKNSEMKWWQAIIIGFSQTFSLISGASRSGTAITGALFLGFSKEEAARFSLMLSIPTITGALLFSFLEINTLDTNINILATFIGFLTTFIVSYFSIYFFLKLIKSIGYTPFVVYRVLLGVMILCLI

SEQ ID NO: 143106 - protein, 254 aa, Unknown
  Bacterial polypetide isolated from the Sargasso Sea
MYQNIIEVLILSAIQGISEFLPISSSAHLILVSSLYEFKSSSLLIDISLHLGSLVAIVYYFKEELFNINKNKRLISLIIIGSIPLIIFGYILYASGLIYSLRNIETIAWTTLIFAIVLYISDKSRFDKKISSNLNIQSILFIGVMQILSLIPGVSRAGVTITAARILKFNRVDSSKISFLLSIPALAGASVLSLKDIFNQPTEFNYLVIIAIISSFIFSFLTVKYFLIFINKFSMNAFVIYRIIIALILFSLIY

SEQ ID NO: 143107 - protein, 246 aa, Unknown
  Bacterial polypetide isolated from the Sargasso Sea
MDFVQILILSIIQGITEFLPISSQSHLILTSKLLGMSDQGLSFDIALHAGSLLAILIYYRKEVTKIMSISDEGIQYLKLIIIGSIPLPIIGLLFVDIVSENLRTINTIAFMTIVFALLLYFAERRNHENKNSFATLSFFTIIFIGFMQTLAIMPGVSRSGIVITAALLLNYSREDSIKIAFLLSIPAIFMATVYQSMQLYGVGDIQILNEYLLGMILSFIFSYITIHLFISTINKISFTPYIIYRL

SEQ ID NO: 143108 - protein, 213 aa, Unknown
  Bacterial polypetide isolated from the Sargasso Sea
MDLIQLIFISLVQGVTEFLPISSSAHLVLLPQLMDWNDQGLSIDVAAHLGSLFAVLFYFRNDFRKMVVNGFGPTLGVDYDREYYKLFWLVIIASIPLLIVAFLIRDEIALYFRDPLIIASATIFFGILLWLSDLIGKQYRTMNVITKKDAFIIGLSQILALIPGTSRSGVTMTTGLLLGFNRHTAVKFSFFMSVPIISLAALYEASNLIQYDN

SEQ ID NO: 143109 - protein, 262 aa, Unknown
  Bacterial polypetide isolated from the Sargasso Sea
MSDIFLSLILGLIQGLTEFLPISSSAHLLIPSLVFGANDLGLEFDIAVHAGTLCAVIYFFKNDLKVYALSIFNSSNRYQNERRVAINLLIATMPIVFAGILFNDLISQRLVTKELIAWSNIFFASLLLLSFYLSKKNKDIFHLSILMSLFIGFVQVFALIPGASRSGVVIMACLFLGLNLKDSSRFAFLLAIPTILGALIFLVGDSIAANLDIFNAQLFIGFITSALVAFFTIKYFLQFVERIGMTPFFVYRIFLGLLLIIL

SEQ ID NO: 143110 - protein, 262 aa, Unknown
  Bacterial polypetide isolated from the Sargasso Sea
MSDIFLSLILGLIQGLTEFLPISSSAHLLIPSLVFGANDLGLGFDIAVHAGTLCAVIYFFKNDLKVYALSIFNSSNRYQNERRVAINLLIATIPIVFAGILFNDLISQRLVTKELIAWSNIFFASLLLLSFYLSKKNKDIFHLSILMSLFIGFVQVFALIPGASRSGVVIMACLFLGLNLKDSSRFAFLLAIPTILGALIFLVGDSIAANLDIFNAQLFVGFITSALVAFFTIKYFLQFVERIGMTPFFIYRIFLGLLLIIL

SEQ ID NO: 143111 - protein, 261 aa, Unknown
  Bacterial polypetide isolated from the Sargasso Sea
MFELQYFILGIVQGFTEFLPISSSGHLVLVSELTDWQDQGLFTDVAVHVGTLLAVIIYLRNHIFSLFRNILTFKISNNENFINIIIATLPAVIVGYFIFDFVQNYFRDLKVVAITSIIFAALLFFADHFKIKISKWENMTYIQAFIIGLFQILAFIPGASRAGVTITGARFLGFDRSSAAIFSMLLSIPIILASLILTSIDIISNSEANINLYQSIFAAFIACVTALLSINLMMHFIQRSTFNIFIIYRVILGFILLYFYA

SEQ ID NO: 143112 - protein, 261 aa, Unknown
  Bacterial polypetide isolated from the Sargasso Sea
MFELQYFIIGIVQGFTEFLPISSSGHLVLLSELTSWQDQGLFTDVAVHVGTLLAVIIYLRSHITSLIKSFFSFHLTQNDNLIKIIIATIPAVIVGFFIFDFVQLYFRDIKVVAVTSVVFAALLFVADHFKMKLSSWENMSYVQAFIIGMFQVLAFIPGASRAGVTITGARFLGFDRSSAAIFSMLLSIPIILASLVLTSLDFISSPEININLYQSLFAAIVACITALVSINIMMRIIQSSTFNIYIIYRVLLGFILLYFYA

SEQ ID NO: 143113 - protein, 83 aa, Unknown
  Bacterial polypetide isolated from the Sargasso Sea
MSFEHIILIAFIQGITEFLPISSSGHLVLIPNLTKLPDQGRVFDVAVHFGSFCAVVIYLWRDLTNILIGFFTFGAKSENGFKL

SEQ ID NO: 143114 - protein, 164 aa, Unknown
  Bacterial polypetide isolated from the Sargasso Sea
IKLDLIDQLRNIKIIGWATILFAILLFFSDKFKKTKIIDNNLSLKSVLFIGVFQILSLIPGVSRSGITITAGRFLEFKRVEAAKISFFLSIPTLAAVSFFGINNLLETESLRFSLTNLLSIFLSFIFSLITIKYFLKYISKFSLSVFVIYRIVLGIIILIFSYL

SEQ ID NO: 143115 - protein, 254 aa, Unknown
  Bacterial polypetide isolated from the Sargasso Sea
MEIINIFILSFIQGVTEFLPISSSAHLVLLSELSNFPDQGLGFDIALHTGSLLAILIYFKDEIKKIFAMTDDGRHYLKLMIFASIPLPIIGIIFIDYVSLYMRNIQPIAIMTITFALALYFTDKNRKESKKIINCSYSLMFFIGLMQALAIMPGVSRAGVVITAALLVGFTRKDSIRISFLLSIPAIFMASTYQTVQFLSADEVIIIKDYILGFLLSFVFSYLTIRLFISTINKVTFSPYIIYRIVLGTILLII

SEQ ID NO: 143116 - protein, 255 aa, Unknown
  Bacterial polypetide isolated from the Sargasso Sea
MAFYYLEIIVLSFIQGFSEFIPVSSSAHLIIATNLANFEVGSLELDIGLHLGSLLAIIFYFRKDLVNIFHNKDLAYLIFIGSIPLIIFGYFLYFTGLINHLRNIEIIAWTTLIFSFLLYYSDKFKVEKKFEKDLKIKNIIIIGLFQVLALVPGVSRSGITITSGRFLNFSRFDSTKISFYLSIPALAGASCLGLKDIWNAEIELNNLILFSIFFSFIFSYFTIKFFLLYVKNFSLNYFVYYRIFLALILFTIIYS

SEQ ID NO: 143117 - protein, 254 aa, Unknown
  Bacterial polypetide isolated from the Sargasso Sea
MFQNIIEVLILSAIQGISEFLPISSSAHLILVSSLYEFKSSSLLIDISLHLGSLVAIVYYFKEELLDINKNKRLISLIIIGSIPLIIFGYILYTTGLIYSLRNIETIAWTTLIFAVVLYISDKSRFDRKISTNLNIQSILFIGIMQILSLIPGVSRAGITITAARILKFNRVDSSKISFLLSIPALTGASVLSLKDIFNQPTEFNYLVIIAIIFSFIFSFLTVKYFLIFINKFSMNVFVIYRIIIALVLFSLIY

SEQ ID NO: 143118 - protein, 255 aa, Unknown
  Bacterial polypetide isolated from the Sargasso Sea
MSDIFLSLILGIIQGLTEFLPISSSAHLLMPSLVFGANDLGLGFDIAVHAGTLCAVIYFFKNDLKVYALSIFNTSNSYQNERRIAINLLIATIPIVFAGILFNDLISQRLVTKELIAWSNIFFASLLLLSFYLSKKNRDIFHLSILMSLFIGCVQVFALIPGASRSGVVIMACLFLGLNLKDSSRFAFLLAIPTILGALIFLITDSIATNLDILNAQLFVGFITSALVAFFTIKYFLPFVELIGMIPFFVYRIFL

SEQ ID NO: 143119 - protein, 209 aa, Unknown
  Bacterial polypetide isolated from the Sargasso Sea
MNDIVLSLVLGLIQGLTEFLPISSSAHLLLPSLIFGTNDLGLSFDIAVHAGTLVAVIYFFKSEIANMVTSFVAYKTSLEEYKKLAILLIIATLPIILIGVLSSDLIEQRIFNTSTIALANLFFALVLLFAFIINRGNKKLYEMTIYGALIIGVVQCFALIPGASRSGMAITAALFIGLSLKDASKFSFMLSIPTILGALVFLLLEIQTA

SEQ ID NO: 143120 - protein, 263 aa, Unknown
  Bacterial polypetide isolated from the Sargasso Sea
MNDIVLSLVLGLIQGLTEFLPISSSAHLLLPSLIFGTTDLGLSFDIAVHAGTLVAVIYFFKSEIVNMVNSFVAYEPNLAEYKKLASLLIVATLPIVLAGLLSSEMIEQRIFNTSTIALANLFFALLLLLAFVYTKGNKTIYEITIYGALIIGLVQCFALIPGASRSGTAITAALFIGLNLKDASKFSFMLGIPTILGALVFLLLEIQTVDISYNFLNLIIGFLVSMFIAFFTIKYFLIFIEKIGMIPFIAYRVVLGIVLLLLF

SEQ ID NO: 143121 - protein, 199 aa, Unknown
  Bacterial polypetide isolated from the Sargasso Sea
MFQNLIEIFILSAIQGISEFLPISSSAHLILVSNVYDFKTSSLLIDISLHLGSLFAIIFYFRKDLFDLKQNQKLLILIIIGSIPLIIFGYILHSTELIHLLRNIKVIAWTTLFFGIILFFADQRKIDQQISTNLNIKSILFIGIFQILALIPGVSRTGISLTAARFLKFNRVDSSKIAFLLSIPALSGASFLGLKDAIK

SEQ ID NO: 143122 - protein, 205 aa, Unknown
  Bacterial polypetide isolated from the Sargasso Sea
MDDLSLIQIIILSIIQAITEFLPISSSAHLLLPSKLLGWPDQGIIFDITVHFASLLAVIVYFRDQFLKFSFYLSKTFIFLIIATLPIVLIVLFIDGIGDYRWTLESIAISNIVFAALLFLTDKFCNGNLKNSEMKWWQAVVIGFSQTFSLISGASRSGTAITGALFLGFSREEAARFSLMLSIPTITGALLFSFLEINTLDTNIN

SEQ ID NO: 143123 - protein, 254 aa, Unknown
  Bacterial polypetide isolated from the Sargasso Sea
MDDLSVIQIIILSIIQAITEFLPISSSAHLLLPSKLLGWPDQGIIFDITVHFASLLAVIAYFRDQFLKFSFYLSKTFIFLIIATLPIVLIVLFIDGIGDYRWTLESIAISNIIFAALLFLTDKFCNGNLKNSEMKWWQAVIIGFSQTFSLISGASRSGTAITGALFLGFSREEAARFSLMLSIPTITGALLFSFLEINTLDTNINILATFIGFLTTFVVSYFSIYFFLKLIKSIGYMPFVVYRVLLGVMILCLI

SEQ ID NO: 143124 - protein, 255 aa, Unknown
  Bacterial polypetide isolated from the Sargasso Sea
MISNFLEILILSIVQGISEFLPISSSAHLFLVSEIYKFKSQSLLVDVGLHLGSLLAIIFYFRNELKEIVNNKNLLFLMILGSLPVIILGAIIYKTGLINYFRNIEVIAWTTLIFALLLYIADKFENKKKIETDLELKSILIIGVFQILALIPGVSRSGIVITAGRFLNFSRYDSTKISFYLSIPAIAGASFLSLKSLVDKNIDLNLIVLVSILLSFIFSYLTIKYFLIFVKKFTLNTFVIYRIILSVILFLTIYT

SEQ ID NO: 143125 - protein, 251 aa, Unknown
  Bacterial polypetide isolated from the Sargasso Sea
MTDIFLGIIQGITEFLPISSSGHLVIFDKLLPVINLNTNDIAFLHIGTLFSIIIFYRARILQIFSNLIIFKFYLKIIIFGILPAVIVGLLTPIQEAIDNSSQILIYTGIAYFFLSVLLIFSERIASKNILSIEEITINQAFMIGIAQAFALMPGISRSGVTLLAAMYLGLKKADAIFYSMLIGIPTIFGAWSLTFINQSFEVNTSILIPTIVAFLTGILAIKLLVKFTTESKLQFFGFYCLILSIVSFGLN

SEQ ID NO: 143126 - protein, 147 aa, Unknown
  Bacterial polypetide isolated from the Sargasso Sea
MHYIDTLILGILQGLTEFLPISSSGHLVLGQYFLNIYMPGNAFEVVLHIGTLMSVITVFRKEIKSIICDLSNSSNKFYLYALVCGTIPAVIVGIVLKDMISLIFDDIRFVSLALIITGIILISSRFIIIRNLKLTMLVAFIIGLAQA

SEQ ID NO: 143127 - protein, 105 aa, Unknown
  Bacterial polypetide isolated from the Sargasso Sea
MTYFEGILLAVIQGLTEFLPISSSAHLILLSEFMGSNQNLFYDVSLHLGTLMAVCIYFRSDLIDMVNSIIRHKSLFNNLLLRQLFISCIPTLFLGFILVDLIDGY

SEQ ID NO: 143128 - protein, 248 aa, Unknown
  Bacterial polypetide isolated from the Sargasso Sea
MIISIVQGITEFLPVSSSAHLNLLSNLFGFREEELLINISAHVGSLFAVIFFFKKEIISFGKNQKLFLRIILASLPLFLFGYLIINYNLVPGLRTYKIIGWTTLIFGIILYLADKFKANKNIEKNFTTKNAVIIGFFQILALIPGVSRSGIIMTGARVLNFKREEAAKISFLMSIPALAGTGVFGLYALIIQDSPILNINSIITVISSFVFSYLSIKYFLIYLKNFNFNLIVGYRTVLGLAILCFAYL

SEQ ID NO: 143129 - protein, 219 aa, Unknown
  Bacterial polypetide isolated from the Sargasso Sea
MATVIFDLDGTLVDSAEVLRDVGNMVLAELGLVLMDTNEARGYIGNGAQVFVEKMLAARDALDVATFDDIFERYSDRYAAMPGDANIPFPHVDETLQHLASQGFRLGLCTNKPTAPTDALLAAHNWAGIFGSVVCGDTLAQRKPHPEPLREVARQLASPPVIYVGDSEVDAQAAAAAEFSFFLYTEGFRLEPVNSLVFAESFQDFQELPAKVETFFAAL

SEQ ID NO: 143130 - protein, 262 aa, Unknown
  Bacterial polypetide isolated from the Sargasso Sea
MSDIFLSLILGLIQGLTEFLPISSSAHLLIPSLVFGTNDLGLGFDIAVHAGTLCAVIYFFKNDLKVYAFSIINSSNRHQNERRVAINLLIATIPIVFAGILFNDLISQRSVTKELIAWSNILFASLLLLSFYLSKKNKDIFHLSILMSLFIGCVQVFALIPGASRSGVVIMACLFLGLNLKDSSRFAFLLAIPTILGALIFLVGDSITANLDIFNAQLFVGFITSALVAFFTIKYFLQFVERIGMTPFFVYRIFLGLLLIIL

SEQ ID NO: 143131 - protein, 145 aa, Unknown
  Bacterial polypetide isolated from the Sargasso Sea
MTYFEGILLAVIQGLTEFLPISSSAHLILLSEFMGSNQNLFYDVSLHLGTLMAVCIYFRADLIEMINSVLDHKSLFKNLLLRQLFISCIPTLSFGFILVDLIDGYLRTSIVIATSTIFFGLILFLATYSKSHKTRIEENTLIDAF

SEQ ID NO: 143132 - protein, 261 aa, Unknown
  Bacterial polypetide isolated from the Sargasso Sea
MNDILLSFILGLVQGLTEFLPISSSAHLLLPTLIFGSNDLGLYFDISVHAGTLIAVVYYFRNEIFLMSKSLLVTNNLNEDKNLIIQLIIATIPIVILGFIFRDLISQRIFSINDIAISNLIFASILLFAFLNNKGKKTLINLTIIGAGFIGLFQCFALIPGASRSGAAITAGLLIGLSLKDASKFAFLLAIPTILGALTLLIFDLNNENASFDLLNMSIGFFTSMIFAFFTIKLFLKLVEKIGMIPFVAYRFLLGILSLII

SEQ ID NO: 143133 - protein, 254 aa, Unknown
  Bacterial polypetide isolated from the Sargasso Sea
MFQNIIEVLILSAIQGISEFLPISSSAHLILVSTLYEFKSSSLLIDISLHLGSLMAIIYFFRNELLDSRKNKRLISLIILGSIPLIIVGYLLYNTGLIYQLRNIEIIAWTTLIFAIILYISDKNRFDKKISSNLNFQSIIFVGIFQIFSLVPGVSRAGITITAARILKFNRVDSSKISFLLSIPALAGASVLSLKDVFEQSIEFNYLIVIAIVSSFIFSFLTVKFFLIYINKFSMNAFVIYRIVIALILFNLIY

SEQ ID NO: 143134 - protein, 261 aa, Unknown
  Bacterial polypetide isolated from the Sargasso Sea
MNDILLSFILGLVQGLTEFLPISSSAHLLLPTQIFGSNDLGLYFDISVHAGTLIAVVYYFRNEIFLMSKSLLVTNNLNEDKNLIIQLIVATIPIVILGFIFRDLISQRIFSINDIAISNLIFASILLFAFLNNKGKKTLININILGACFIGLFQCFALIPGASRSGAAITAGLLIGLSLKDASKFAFLLAIPTILGALTLLIFDLNNENSSFDLLNMSIGFFTSMIFAFFTIKLFLKLVEKIGMIPFVAYRFLLGILLLII

SEQ ID NO: 143135 - protein, 203 aa, Unknown
  Bacterial polypetide isolated from the Sargasso Sea
MSDIFLSLILGLIQGLTEFLPISSSAHLLIPSLIFGANDLGLGFDIAVHSGTLCAVIYFFKNDIKVYALSIFNSTNRYQNERRVAINLLIATIPIVFAGILFNDLISQRLVTKELIAWSNIFFASLLLLSFYLSKKNKDIFHLSILMSIFIGCVQVFALIPGASRSGVVIMACLFLGLNLKDSSRFAFLLAIPTILGALIFLV

SEQ ID NO: 143136 - protein, 262 aa, Unknown
  Bacterial polypetide isolated from the Sargasso Sea
MSDFLLSFILGLIQGLTEFLPISSSAHLLLPSLLFGTNDLGLYFDISVHAGTLAAVVYYFKSDIFLMTQSVLTKNIELQKYKNLTFQLLIATIPVVLVGYIFKELIEQRIFSIESIAISNLIFAAILLLAFLRNKSGKGIYEITLFTALFIGAFQCFALIPGASRSGTAITAALLIGLNLKDASKFAFMLGIPTILGALVLLVIDMQNNDIQFDFLILITGFLTSMIFAFFTIKLFLSFVEKIGMVPFVLYRVLLGVILLLM

SEQ ID NO: 143137 - protein, 255 aa, Unknown
  Bacterial polypetide isolated from the Sargasso Sea
MLQDFIEILILSAVQGISEFLPISSSAHLILVSNFYDLEISSLLIDISLHLGSLIAVIFYFRKELFDLRNNNRLLSLIIIGSLPLIFFGYILYSTEFIHLLRNTKVIASTTLFFAFILFFADQRKINRNISTDLNIKSVLLIGLFQILALIPGVSRAGITITVARFLNFNRTDASKISFLLSIPALAGASFLGLREAFEQSIEINFLLLIATFLSFMFSFFTIKYFLKLISKISFNVFVIYRIILGLILFYIIYI

SEQ ID NO: 143138 - protein, 264 aa, Unknown
  Bacterial polypetide isolated from the Sargasso Sea
MEIIKSFILGIVQGLTEFLPVSSSGHIEIFKEILNFSFDSNNGLFFTLILHLATAMSTIIYFWDDVKKILSSLLKFKKDENFNFSLMIIISMIPAGLVGFFYEDKINQLFNGNLILVGSMLIVTSFLLFISDKMNDLNKKISTKNAIIIGIAQAFAILPGISRSGSTIATSLFLGVNRDLAAKFSFLMVIPIIVGSSMKMIIYDNLIFEETILINYIVGFISALISGYYACKWMIFLVKKSKLIYFSIYCLLVGIISISYSLIQ

SEQ ID NO: 143139 - protein, 168 aa, Unknown
  Bacterial polypetide isolated from the Sargasso Sea
MENFIQILILSITQGITEFLPVSSSAHLNLISKYFGIQNELLVNVYAHMGSLLAVIFFFKEDIFNFGKNKKLFYKIILASIPLFGFGFLILKYNLIDTFRSLELIGWMTIIFGIVLFISDKLSLENSIKDKFTFKKAILIGFFQVLALIPGVSRSGIIMTGARFLKFN

SEQ ID NO: 143140 - protein, 123 aa, Unknown
  Bacterial polypetide isolated from the Sargasso Sea
MIDTYQLLILSMVQGITEFLPISSSAHLIIIPEILSWQLQPMYFDVFMHFGSLLAILVYIFSNKEIKKIESFEINNFENIKKIIVAVIPVLLIGYSFHEIIESYLRNLNVIIASTIIIAVLII

SEQ ID NO: 143141 - protein, 111 aa, Unknown
  Bacterial polypetide isolated from the Sargasso Sea
MNTFQIIVLGIIQGLTEFLPISSSGHLILVPKIFGYTDQGIVFDIAVHLGSLFAVALYFRGDLCTMLSSVFSFQKNNSNRDLKLFLYLIIATIPAVFVGYFLSDLIDGQLR

SEQ ID NO: 143142 - protein, 111 aa, Unknown
  Bacterial polypetide isolated from the Sargasso Sea
MSDTLSRLAEVLESRKGAAADSSYVASLYHKGLNKILEKVGEESVETILAAKDAAASGDCKDLIYETADLWFHSLVMLAALGQHPQAVLDELDRRFGLSGHAEKAARPQSE

SEQ ID NO: 143143 - protein, 111 aa, Unknown; identical to SEQ ID NO: 143142
  Bacterial polypetide isolated from the Sargasso Sea

SEQ ID NO: 143144 - protein, 110 aa, Unknown
  Bacterial polypetide isolated from the Sargasso Sea
MSDTLNRVAQVLEDRKGADADSSYVASLYHKGLNKILEKLGEESVETIIAAKDAQISGDYSDVIYETADLWFHSLVMLAQLGQHPQAVLDELDRRFGLSGHAEKASRPSA

SEQ ID NO: 143145 - protein, 187 aa, Unknown
  Bacterial polypetide isolated from the Sargasso Sea
MLGDWGSGSIEQKNIAEKSAVTCDQLGCDLVLMMGDNFIQHGVENLDDPQFQEKFEKVYTQKIPFYPVLGNHDLQGNWRAQVEYTNHSDRWTMPDSSYDFLGGPVQFMGINTSCTVCSLWKLLSPRTTPWRVVFGHRPIQSQGRHRGMNWLEKHFLRSSSAQLYCCGHNHILEHYNMGNMDQITSGG

SEQ ID NO: 143146 - protein, 187 aa, Unknown
  Bacterial polypetide isolated from the Sargasso Sea
MPSYVIGDVQGCFDELMLLLDKINFDPKNDELIFAGDLINRGPKSLEVLEFCLENKKSIEVVLGNHDIYLLYLIHQNKKNYQLAPILESKNKKKFFSWLIEKPLMLERKNNKNEKFIISHAGIPHIWDLGDARRLNEEYLKAMKKNPGGVFRNMWGDHPDIWSESLRGFSRIRVIINYFTRMRLITQ

SEQ ID NO: 143147 - protein, 68 aa, Unknown
  Bacterial polypetide isolated from the Sargasso Sea
MPDFNPWYTHKRLDQVKVFFGHWAAIDGETGIGWATALDTGCVWGRKLSAYNLDKNCFINVKARSEKK

SEQ ID NO: 143148 - protein, 86 aa, Unknown
  Bacterial polypetide isolated from the Sargasso Sea
MLLGDWGSGSIEQKNIAEKSAVTCDQLGCDLVLMMGDNFIQHGVENLKDPQFQEKFEKIYTQKVPFYPVLGNHDLQGNWRAQVEYT

SEQ ID NO: 143149 - protein, 138 aa, Unknown
  Bacterial polypetide isolated from the Sargasso Sea
MLGDWGSGSIEQKNIAEKSAVTCDQLGCDLVLMMGDNFIQHGVENLDDPQFQEKFEKVYTQKVPFYPVLGNHDLQGSWRAQVEYTNHSYRWTMPDSSYDFLGGPVQFMGINTSCTVCSLWKLLSPRTTPWRVVFGHRP

SEQ ID NO: 143150 - protein, 138 aa, Unknown
  Bacterial polypetide isolated from the Sargasso Sea
MSTYVVGDIQGCFEPFQCLLERVKFNPDKDRLWSVGDLINRGPDNIEVLRWFYAHRDNVTMVLGNHDLHLMAVSCGARKPSRKDNLDDILDAPDREQLIEWLHFQPLAYCENGITMVHAGIPTIWTVQDTLKRAWEVE

SEQ ID NO: 143151 - protein, 223 aa, Unknown
  Bacterial polypetide isolated from the Sargasso Sea
MPSYVIGDVQGCFDELMLLLDKINFDPKNDELIFAGDLINRGPKSLEVLEFCLENKKSIEVVLGNHDIYLLYLIHQNKKNYQLAPILESKNKKKFFSWLIEKPLMLERKNNKNEKFIISHAGIPHIWDLGDARRLNEEYLKAMKKNPGGVFRNMWGDHPDIWSESLRGFSRIRVIINYFTRMRLITQKGQLDLKTKVSSRNSKYKAWFKFTKNEKDSYQLFGH

SEQ ID NO: 143152 - protein, 49 aa, Unknown
  Bacterial polypetide isolated from the Sargasso Sea
MAHYVIGDVQGCYDELKLLCKKINFNPNKDLLIFAGDLVNRGPKSLEVL

SEQ ID NO: 143153 - protein, 155 aa, Unknown
  Bacterial polypetide isolated from the Sargasso Sea
MSHAGLPPHWSLKKASLISEELSLNLKENTEFYLSNIYGNLPSGDNEAISEEDKLKVNTNYLTRMRFCNDKAELNLQEKGGLDTKIKGFKPWFCYKRKFEEKNTQIIFGHWASLRGETGNQKFIATDTGCVWGYELTAIELETGKRFAVRKKENE

SEQ ID NO: 143154 - protein, 240 aa, Unknown
  Bacterial polypetide isolated from the Sargasso Sea
MLGDWGSGSIEQKNIAEKSAVTCDQLGCDLVLMMGDNFIQHGVENLDDPQFQEKFEKVYTQKVPFYPVLGNHDLQGNWRAQVEYSNHSERWTMPDSSYDFLGGPVQFMGINTSCTVCSLWKLLSPRTSPWRVVFGHRPIQSQGRHRGMNWLEKQFLRSASAQLYCCGHNHILEHYNMGNMDQITSGGGGSPLENEKVKSSPEAEFLHPNHGYVWVHFNQEKLSARFFDQNGGEIYQFFRN

SEQ ID NO: 143155 - protein, 160 aa, Unknown
  Bacterial polypetide isolated from the Sargasso Sea
LERKNNKNEKFIISHAGIPHIWDLGDARRLNEEYLKAMKKNPGGVFRNMWGDHPDIWSESLRGFSRIRVIINYFTRMRLITQEGQVDLKTKVSSRNSKYKAWFKFIKNEKDSYQLFGHWAALKGKTNKRNVIGLDAGCVWGGHLKAIRINDRKIFKIKSL

SEQ ID NO: 143156 - protein, 146 aa, Unknown
  Bacterial polypetide isolated from the Sargasso Sea
MTNYAIGDVQGCFDTLRTLLDTIGYRKSQDRLIFVGDLVNRGAHSLRMAKWVLAQGSSAVAVLGNHDLHYLARFEGGSNEGAEETLDELLQSSVAEPFRDWLLAQCLVRRQFGWVFVHAGVFPKWRCEDALDKSDELMTVLRSEQR

SEQ ID NO: 143157 - protein, 220 aa, Unknown
  Bacterial polypetide isolated from the Sargasso Sea
MSESQTLLIGDIQGCFGGLMALLEKAGFDEQRDTLLAVGDVLARGEDSHATVKYLMDLGDRFCTVLGNHDLHFLAVSQGIKKAKKSDRIDPLLKSKKLGDYVDWFRQFPLAMAVSENTTMVHAGLYPGWSPAQLLAYSDEISTVLKGSGWKTLLENMYGNGPFEWKDTLKGVQRQRFIINACTRMRFIQDQKYLDFACKHHPDDAPANLTPWFSIPNPAL

SEQ ID NO: 143158 - protein, 222 aa, Unknown
  Bacterial polypetide isolated from the Sargasso Sea
MLGDWGSGSIEQKNIAEKSAITCDQLGCDLVLMMGDNFIQHGVANLDDPQFQEKFEKVYTQKVPFYPVLGNHDLQGNWRAQVEYTNHSDRWTMPDSSYDFLGGPVQFMGINTSCTVCSLWKLLKPRTTPWRVVFGHRPIQSQGRHRGMNWLEKKFLRSSSAQLYCCGHNHILEHYNMGNMDQITSGGGGSPLENEKVKSSPEAEFLHSNHGYVWVHFNQEKL

SEQ ID NO: 143159 - protein, 169 aa, Unknown
  Bacterial polypetide isolated from the Sargasso Sea
SWLIEKPLMLERKNNKNEKFIISHAGIPHIWDLGDARRLNEEYLKAIKKNPGGVFRNMWGDHPDIWSESLRGFSRIRVIINYFTRMRLITQEGKVDLKTKVSSRNSKYKAWFKFIKKEKDSYQLFGHWAALKGKTNKRNVIGLDAGCVWGGHLKAVRINDRKIFKIKSL

SEQ ID NO: 143160 - protein, 155 aa, Unknown
  Bacterial polypetide isolated from the Sargasso Sea
MATYAIGDIQGCFDELLVLLDEIKFQADRDKLWICGDMINRGPKSLESLDFIYSIRENCNVTLGNHDLHFLAVAEGAKDISDSDTFQNLLNNKNLDVYVNWIKELPFHHIEDIKSDGAVKTYVMTHAGVPPHWSKKDLETYSSELNETLNGPRSI

SEQ ID NO: 143161 - protein, 151 aa, Unknown
  Bacterial polypetide isolated from the Sargasso Sea
LIAHAGIPEIWSPEKTKELASEVTSLLQKNPLKVLQSMWGDNPNQWNEELVYDERCRIIINYLTRMRFVDKNCKLDLKNNTVKASAGFKPWFKYSSKVHEEKKQYYVFGHWAALNGQTDDPHFIGLDTGCVWKGKLTALRLNDLEKISVDF

SEQ ID NO: 143162 - protein, 104 aa, Unknown
  Bacterial polypetide isolated from the Sargasso Sea
WSESLRGFSRIRVIINYFTRMRLITQKGQLDLKTKVSARNSKYKAWFKFIKNEKGSYQLFGHWAALKGKTNRRNVIGLDAGCVWGGHLKAIRINDRKIFKIKSL

SEQ ID NO: 143163 - protein, 245 aa, Unknown
  Bacterial polypetide isolated from the Sargasso Sea
LVRWGLVIEARSHFKHFCFIKSLGASAKIVLGNHDLHLIAASKNIRPISNKDTIKEILTADDADELINWLKSRPLLLTDTDLGFTMVHAGIAPQWTLDAAKNFAKECESILQNEKIDDFLMHMYGDTPNIWSDSIEGYARQRFIINCFTRIRFCTINGTLDLDVKVAPGSQKKSLIPWYALPNRKTIDNKIIFGHWSTIHLGAENNFKKYNVYPIDTGCLWGGQLTAMRLDDEKIFSVTSKQSKL

SEQ ID NO: 143164 - protein, 101 aa, Unknown
  Bacterial polypetide isolated from the Sargasso Sea
MLGDWGSGSIEQKNIAEKSAITCDQLGCDLVLMMGDNFIQHGVENLDDPQFQEKFEKVYTQKVPFYPVLGNHDLQGNWRAQVEYTNHSERWTMPDSSYDFL

SEQ ID NO: 143165 - protein, 82 aa, Unknown
  Bacterial polypetide isolated from the Sargasso Sea
MPSYVIGDVQGCFDELMLLLEKINFNSKNDELIFAGDLINRGPKSLEVLEFCLKNKKSIEVVLGNHDIYLLYLIHQNKKIFS

SEQ ID NO: 143166 - protein, 203 aa, Unknown
  Bacterial polypetide isolated from the Sargasso Sea
LGNHDIYLLYLIHQNKKNFQLAPILKSKNKKKFFNWLIEKPLMIERKNNKNEKFVISHAGIPHIWDIEDARRLNEEYLKAIKNNPGGVFRNMWGDHPDLWSENLKGFSRIRVIINYFTRMRLITQKGKVDLKTKISSRSSKYKPWFEFVKNEKDKYQLFGHWAALKGKTKKKNIIGLDAGCVWGGHLKAIRINDRKIFKIKSL

SEQ ID NO: 143167 - protein, 172 aa, Unknown
  Bacterial polypetide isolated from the Sargasso Sea
KFFSWLIEKPLMLERKNNKNEKFIISHAGIPHIWDLGDARRLNEEYLKAMKKNPGGVFRNMWGDHPDIWSESLRGFSRIRVIINYFTRMRLITQEGQVDLKTKVSSRNSKYKAWFKFIKNEKDSYQLFGHWAALKGKTNKRNVIGLDAGCVWGGHLKAIRINDRKIFKIKSL

SEQ ID NO: 143168 - protein, 53 aa, Unknown
  Bacterial polypetide isolated from the Sargasso Sea
NEKDSYQLFGHWAALKGKTNKRNVIGLDAGCVWGGHLKAIRINDRKIFKIKSL

SEQ ID NO: 143169 - protein, 240 aa, Unknown
  Bacterial polypetide isolated from the Sargasso Sea
SFNPSKDSIVFTGDLVNRGNQSLEVLEFCMKEKSIDTVLGNHDVFLIKSLLGKKSPERLKNICVHKNKKKFLQWLVKKPFLISKKLNGKEFIIVHAGIPPSWSIKDTKVFAKRLSKNLKNNPEQFVQHAWGNKPNTWNDKLNDEELDRVTLNYLTRMRFCNASGKMDLKSNGLFSKMKFKKWFQHWDLDENKRVIFGHWAALNGKTLNRQFIGLDTACVWGGKLTAFRLDDETFFQVKKI

SEQ ID NO: 143170 - protein, 265 aa, Unknown
  Bacterial polypetide isolated from the Sargasso Sea
MPSYVIGDVQGCFDELMLLLDKINFDPKNDELIFAGDLINRGPKSLEVLEFCLENKKSIEVVLGNHDIYLLYLIHQNKKNYQLAPILESKNKKKFFSWLIEKPLMLERKNNKNEKFIISHAGIPHIWDLGDARRLNEEYLKAIKKNPGGVFRNMWGDHPDIWSESLRGFSRIRVIINYFTRMRLITQEGQVDLKTKVSSRNSKYKAWFKFIKNEKDSYQLFGHWAALKGKTNKRNVIGLDAGCVWGGHLKAIRINDRKIFKIKSL

SEQ ID NO: 143171 - protein, 203 aa, Unknown
  Bacterial polypetide isolated from the Sargasso Sea
GNHDFYLLYLIEHKKNNRSLKTILNADNISKIHKWLKKLPLLLKVKINGHNFWISHAGIPHIWNFKTAKKLSIEVQVALKEDSYNLLKNMWGDTPSKWNSKLVKYKRYRVIINYFTRMRFLDNKGALKLKKKNLKSEKNHIPWFKQTTHNLKEDESIIFGHWAALEGKTNLDNIIGLDTGCVWGNKLTAIRLEDKKLYQVRRK

SEQ ID NO: 143172 - protein, 265 aa, Unknown
  Bacterial polypetide isolated from the Sargasso Sea
MPSYVIGDVQGCFDELMLLLDKINFDPRNDELIFAGDLINRGPKSLEVLEFCLENKKSIEVVLGNHDIYLLYLIHQNKKNYQLAPILESKNKKKFFSWLIEKPLMLERRNNKNEKFIISHAGIPHIWDLGDARRLNEEYLKAMKKNPGGVFRNMWGDHPDIWSESLRGFSRIRVIINYFTRMRLITQEGQVDLKTKVSSRNSKYKAWFKFIKNEKDSYQLFGHWAALKGKTNKRNVIGLDAGCVWGGHLKAIRINDRKIFKIKSL

SEQ ID NO: 143173 - protein, 106 aa, Unknown
  Bacterial polypetide isolated from the Sargasso Sea
VAFNAFTRVRFCTPDGVMEFKANGGPDSAPPGYLPWFDVPGRRTEDVTVVFGHWAALGLMVRDNVVALDSGCVWGNQLSAVRLTADPARRTVTQVQCEACRTPGGE

SEQ ID NO: 143174 - protein, 59 aa, Unknown
  Bacterial polypetide isolated from the Sargasso Sea
KQTANNLKNNEIIVFGHWAALNGKTKINNIIGLDTGCVWGNKLTAIRLEDRKLFQVKKK

SEQ ID NO: 143175 - protein, 120 aa, Unknown
  Bacterial polypetide isolated from the Sargasso Sea
GTFFTHMYGNTPAGWDEKLSAPDRWRVITNHFTRMRFVDQAAELDLTSKGEPDLPPAGFIPWFQHPGRIVTDTRILFGHWAALQGHSGVDKVDALDTGCVWGGSLTALRLDDLVRIQCHC

SEQ ID NO: 143176 - protein, 240 aa, Unknown
  Bacterial polypetide isolated from the Sargasso Sea
MIFLGDLISRGPKSLEVLEFLYSMDHCVLNTLGNHDLHLLALAIGNRPYRQKDYSIKPILDSKNKINLIEWLRFQPIMHEEPSFNSIMVHAGIHPSWSIPQARSMAREIESLIQSNNASKVLSEMYSDDSWSDDLKGTKKINSIINCFTRLRFIDQNGVCNFAEKNSPKNTDAAFMPWFMSPEMKIRDMNILFGHWSTLGDFQYENISCLDAGCVWGGKMVAIDLNQPQKRIKVQSSISR

SEQ ID NO: 143177 - protein, 64 aa, Unknown
  Bacterial polypetide isolated from the Sargasso Sea
APCFSHPQRKMRGEKIIFGHWAALEGNCREPGLHALDTGCVWGGAMTLLDVDSGELHRCTCPKA

SEQ ID NO: 143178 - protein, 219 aa, Unknown
  Bacterial polypetide isolated from the Sargasso Sea
MNYCMADKNVTSVLGNHDLYLLYLMNINQGKGELKTVVEAENNMQIFEWLITRPLLIEISDQSNQNKFIITHAGIPEIWSIEKAQELAEEVSSALIENASKILQAMWGDDPNIWNESLEGNDRYRIVINYLTRMRFLGNAASLDLKNTSTKATEGFKPWFDYDSEAYQKMNQYYVFGHWASLNGQTNNPHFIGLDTGCVWKGNLTALRVDDLEKISVKY

SEQ ID NO: 143179 - protein, 87 aa, Unknown
  Bacterial polypetide isolated from the Sargasso Sea
MSHYVIGDIQGCYDELVALCTKVKFDPHKDKLIFAGDLVNRGPKSLEVLNFCIENRKSVKAVLGNHDFYLLYLIEHQKRNKSLKQIL

SEQ ID NO: 143180 - protein, 65 aa, Unknown
  Bacterial polypetide isolated from the Sargasso Sea
MKPWFEWNLKILQDPIHLLFGHWAALEGVTGKKNITALDTGCVWGKKLSALRLEDNRIFSCNKIN

SEQ ID NO: 143181 - protein, 275 aa, Unknown
  Bacterial polypetide isolated from the Sargasso Sea
MSQGNTYVIGDIQGCYDGLRRALDKVKFDEENDTLLAVGDLVARGEDSLSTLRFLKSLGSQFSSVLGNHDLHLLAVVNGIRKAKKSDKLEPLLNASDLTELIDWLRQFPLAMKLDEQSVMVHAGLYPKWSIDECVSLSDEVSNILKSDNYAAFLSEMYGNKPNNWSDKLKGDERLRFIVNACTRMRFVHTDGTLDFDNKSHPSAVSHSTSSTLKPWFEVENKKLGDDQRVVFGHWAALSGQTNSHQFIGLDTGYVWGQSMTLLNLNSASLVSVSA

SEQ ID NO: 143182 - protein, 194 aa, Unknown
  Bacterial polypetide isolated from the Sargasso Sea
LKKKDKLQELMEAPDRDELLEWLRHRPLLAEHPDLPIMMVHAGISPAWDARTARNCAREVESLLRGDQYQWLLHNMYGDQPDGWQDDLVGIERYRYIINTFTRMRFCYFDGRLDFKCKKGPKESTPGLRPWFEQREHHVDDPILVFGHWAALMGNTGKQDIKALDTGCVWGNSLTLWRYEDDALIATPCPTYAK

SEQ ID NO: 143183 - protein, 83 aa, Unknown
  Bacterial polypetide isolated from the Sargasso Sea
LDKKGVLKLKKKNLKSEKNHIPWFKQTTHNLKKDESIIFGHWAALEGKTNLDNIIGLDTGCVWGNKLTAIRLEDKKLYQVRRK

SEQ ID NO: 143184 - protein, 159 aa, Unknown
  Bacterial polypetide isolated from the Sargasso Sea
IKINGHNFWISHAGIPYIWDFKTAKKLAKEVQVALKEDSYNLLKNIWGDTPSKWNTKLVKYKRYRVIINYFTRMRFLDNKGALKLKKKNLKSEKNHIPWFKQTTHNLKEDESIVFGHWAALEGKTNLDNIIGLDTGCVWGNKLTAIRLEDKKLYQVRRK

SEQ ID NO: 143185 - protein, 103 aa, Unknown
  Bacterial polypetide isolated from the Sargasso Sea
MKDKLTFFINAVTRIRICDKEGKIMFAFKKGLKDLPYNFIPWFKLKISALTRDDRLIFGHWAALNGKTNKQNIIGLDTGCVWGNKLTFVRLEDSKKYFIKKIK

SEQ ID NO: 143186 - protein, 119 aa, Unknown
  Bacterial polypetide isolated from the Sargasso Sea
DGMYGNEPAKWNKELHGVTRLRVITNYFTRMRFCTADGMLDLKSKEGVGSAPPGFAPWFSHPQRKMRGEKIIFGHWAALEGNCTEPGLYALDTGCVWGGAMTLLDVDSGALHRCTCPKE

SEQ ID NO: 143187 - protein, 106 aa, Unknown
  Bacterial polypetide isolated from the Sargasso Sea
MAHYVIGDVQGCYDELISLCKKIKFNKKKDKLIFAGDLVNRGPKSLEVINFCLENRKSIKAVLGNHDFYLLYLIEHKKRNKSLKRILHADNLNTIHKWLKKASGYY

SEQ ID NO: 143188 - protein, 268 aa, Unknown
  Bacterial polypetide isolated from the Sargasso Sea
MANYVVGDVQGCFKELMLLLKKIKFNKAKDKLIFAGDLVNRGNESLEVLNFCLKNKKCVRAVLGNHDFYLLYLIEFNKKDKSLEKVLSSKKINKINSWLKSLPLLIKINIKETNETFWVSHAGIPFFWDFKTAKKLSEEVTSSLKNDATKLLKNMWGDKPSIWESKLKGYKRLRVIINYFTRMRFLSKNGALKLKTKDAKKKKGHVPWFNETYKRLKDNEFIVFGHWAALEGKTNLNNIIGVDTGCVWGKKLTAVRLEDKKKFHVKKK

SEQ ID NO: 143189 - protein, 268 aa, Unknown
  Bacterial polypetide isolated from the Sargasso Sea
MSKYVIGDVQGCYDELTLLLQKIKFNPVNDSLYFLGDLINRGPKSLEVLNFCLQHRESVTTILGNHDIYLLYLISNRKQNYDLQDVLDAPNLDAIYQWLITKPLLLKVSCDQGKNFYLTHAGVPHIWSLEDAMHYNAEFMMAATHDAEKMFRNMWGDLPSKWNPKLKGYSRLRTIINYFTRMRLVDDEGNMDLKTKTFNPESSYKPWFTFNSQILQNSDTKILFGHWAALKGATNLQNIIGLDTGCVWGGTLSAMRLEDHKIFQVESL

SEQ ID NO: 143190 - protein, 273 aa, Unknown
  Bacterial polypetide isolated from the Sargasso Sea
MSTYVVGDIQGCYKPLKKLLKKINFLKSKDQLWCVGDLINRGPDSLDTLRFLQDMDQSVRIVLGNHDLHFLAIHEGCAPPRTKDTLSKLLKAKDCDLLSDWLRKKSLAHYESLETKNGVENFLMVHAGVAPMWSLQKTLSLAAEVELSLQSETYKIFLKNMYGDRPIRWHDKLQGYERLRTITNYLTRIRFCDDAGSLRLDVKEGLNAAPEGCKPWYEFENISKVATILFGHWAALDGETGKPKVHALDTGYVWGRKMTLMCLEDYQRYSITN

SEQ ID NO: 143191 - protein, 277 aa, Unknown
  Bacterial polypetide isolated from the Sargasso Sea
MSNYAIGDLQGCYEELQQLLTQIDFDKKKDVLWFCGDLVNRGSNSLNCLLYLHSIKDNCRIVLGNHDLHLIAVSDSIREINEKDTFQDVLESPKRKILIEWLKSQPLHSIEKINTNKGEKEYVMTHAGIPPHWSKDDLIRNSNKLGQSLQNENSSYFLNYVFGNEPNHPDKCVTTEEKMRLNLNYLTRMRFYNSDGSIDLKYKGKIETAPSNLKPWFEYKLKILNENTHLLFGHWAALDGFTGKENITALDTGCAWGNKLTAMRLEDLSMFSCDKLN

SEQ ID NO: 143192 - protein, 260 aa, Unknown
  Bacterial polypetide isolated from the Sargasso Sea
DVHGCFEQFVSLLDKINYNSQEDKIILTGDLVNRGPESLAVLNYCMADRNITSVLGNHDLYLLYLMNINQGKGDLKTVVEAENNMQIFEWLITRPLLIEIPDQSNQNKFIITHAGVPEIWSIEKARELAEEVSKALIKNASKVLKSMWGDDPNIWNESLEGNDRYRIIINYLTRMRFLGNASSLDLKNTSTKAAQGFKPWFDYDSESYQKMNQYYVFGHWASLNGQTNNPHFIGLDTGCVWEGNLTALRVDDLEKISVQY

SEQ ID NO: 143193 - protein, 206 aa, Unknown
  Bacterial polypetide isolated from the Sargasso Sea
MATYAIGDIQGCFDELVVLLDEIKFQADKDKLWICGDMINRGPKSLESLDFIYSIRENCNITLGNHDLHFLAVAEGAKDISDSDTFQNLLNNKNLDVYVNWIKELPFHHIEDIKSDGAVKTYVMTHAGVPPHWSKKDLETYSSELNENLNGPRSINLLKNMYGNMPNHPSMCTSETEKLRLNINYLTRMRFCSSDSSLDLENKGKA

SEQ ID NO: 143194 - protein, 103 aa, Unknown
  Bacterial polypetide isolated from the Sargasso Sea
MNNKSKFVIGDIQGCYKEFKNLLKLIDPNKENKFFCVGDLVNRGPESEKVVDYVLENKVKSVLGNHDLHLMAILAGVRKHNDKKDAMTKIISKNKSVEILDYF

SEQ ID NO: 143195 - protein, 127 aa, Unknown
  Bacterial polypetide isolated from the Sargasso Sea
LRADPEKFLLTMYGNRRKAISKSTNKKNRRRYLVNVFTRMRFITSKNKLDLQTKVKKTSKEQYQPWFAYKHKSLKELDNIVFGHWAALNGVTNHNKIKGVDLGCVWGGSLAAINVNDKSIITVDSSK

SEQ ID NO: 143196 - protein, 269 aa, Unknown
  Bacterial polypetide isolated from the Sargasso Sea
MTSYYVGDLHGCFKQFKNLIRIIKFNPKTDHLYLTGDLVNKGTQSLELMNYLYSIDKNVTTVLGNHDFNLLAAYFDVNPWSKIPHTMQKLLNDKNIEKYITWIRKKSLLHINYSEKIILTHSGMYPGWTLKDAIKMSDQVSKKLKSNQIKNFIKTLWSNEPSSWKENFTPKEKMIFAVNAFTRMRFLNKNLSLNLDVSSDAFHNDDIKPWFKYNSRFKNNFKIIFGHWAALGFYKNKNYICLDSGCAWGNKLTAIKVNKHYLTKYQVKC

SEQ ID NO: 143197 - protein, 154 aa, Unknown
  Bacterial polypetide isolated from the Sargasso Sea
MTHAGIPPHWTIEDLNKYSLELHKALQGPEALNLLRNMYGNEPNHPSRCVTEMERLRLNINYLTRMRFCSRDGSLDLKHKGKATDAPSGMKPWFEWNLKILQDPIHLLFGHWAALEGVTGKQNITALDTGCVWGKKLSALRLEDNRIFSCNKIN

SEQ ID NO: 143198 - protein, 139 aa, Unknown
  Bacterial polypetide isolated from the Sargasso Sea
MADYAIGDLQGCFKEFSTLLQRVDFNPSKDHLYLVGDIVARGPDSLACLDFIYQHQDSMTITLGNHDLHMIACYFLNKPTNPKDKLAPIFKSSLLKRYISFLQTQPLALYLKTHNCFISHAGLNPDWSIEDALQHAKFA

SEQ ID NO: 143199 - protein, 271 aa, Unknown
  Bacterial polypetide isolated from the Sargasso Sea
MSHYVIGDVQGCFDELIALCKKIKFNPNKDLLIFAGDLVNRGPKSLDVIDFCLKNKKSVKSVMGNHDFYLLYLLEHKKNNKSLKDILNAKNNKNIYKWLKKLPLLLKVKIQKTKETYWISHAGIPFIWSLKKAKKLSDEMRIAIKNDSSNILMNMWGDKPGIWKDELKGYSRYRIIINYFTRMRYLDKRGALKLKKKDLKLEKNHIPWFKQTHKNLKENENIIFGHWAALEGKTKLNNIIGLDTGCVWGKKLTAIRLEDKKIFQVKKNENL

SEQ ID NO: 143200 - protein, 157 aa, Unknown
  Bacterial polypetide isolated from the Sargasso Sea
MSTYVIGDIHGCFDQFVDLLNKINYKKNEDKIILVGDLVNRGPDSLSVLNYCMADSNIITVLGNHDLYLLYLLSIDKARGSLKEVVEADNKKQIFKWLLKMPLMMEIDDELSGNSFLISHAGIPEIWSPKKTKELASEVTSLLQKNPLKVLQSMWGD

SEQ ID NO: 143201 - protein, 242 aa, Unknown
  Bacterial polypetide isolated from the Sargasso Sea
PNDLQNATHVRALATAGMRLLTAAQQAPIWASIEAAIVESPFAYVAGDSQTISGGYEGAFLQIAMMAILHASGTSPNDAHHGTLDLGGGSTQITFPPADGVILNDVLRIMHNNTDLRVYAHSFMRGGVEQAKLRYAQRISDADGTKAAYAVLGSPCDNVGLDTNYTVACGSASGTCLRLLKGTGDFAACEVVATALLNRANECLLPPCSANGIYQPSPAGVTFHAVSAYFYTAYGVGLLGWS

SEQ ID NO: 143202 - protein, 113 aa, Unknown
  Bacterial polypetide isolated from the Sargasso Sea
IKLKQNILSGGQKRKFFLALALLSEPKVLLLDEPFAALDVLTIKMLQEIIVNLQQENRITVIICDHQARDLLACVDTAMILSNGKIVAQNSPANIVNDINAKNAYFGDEFKIN

SEQ ID NO: 143203 - protein, 234 aa, Unknown
  Bacterial polypetide isolated from the Sargasso Sea
MILKAHEISKSYKGKKVVNKVSVKVSQGEIVGLLGPNGAGKTTSFYMIVGIIKPEEGEIYLDNEKISTYPMYKRAQSGIGYLAQEASVFRKLSVEENILSILEFSNLSKSKQKERTESLMEEFGLTHIRHSRGDLLSGGERRRTEIARALATDPKFLLLDEPFAGVDPIAVEDIQSIISILKKKNIGILITDHNVQETLAITDKTYLMFEGKILQEGIPEKLAEDEMVRKVYLG

SEQ ID NO: 143204 - protein, 146 aa, Unknown
  Bacterial polypetide isolated from the Sargasso Sea
IYGRLNGVKNLSLRVNELAEDLNLKDFLNKKTGELSSGQKNRVSLAKSLINKPEILLLDEPTASLDPDIGDYVRSYVQSYKSKNKVTILLASHNMAEVERLCDSVIMMKNGKIIDQGTSKEIISRHGRANLEETFLKIVRSKDEMA

SEQ ID NO: 143205 - protein, 149 aa, Unknown
  Bacterial polypetide isolated from the Sargasso Sea
NLIVYGKLYNVINIKNRIEYLVEKLRLSDLLNRVTGELSSGQKNRASLAKALINNPSVLLLDEPTASLDPEIGDFVRTFLENYKKEEKISILLASHNMNEVTRLCKSILMMKDGIIIDKGNPEELIKKHGRQNLEEVFLKLSRNKNELN

SEQ ID NO: 143206 - protein, 211 aa, Unknown
  Bacterial polypetide isolated from the Sargasso Sea
MLNVINGFYKPTSGTINFAGTDRSEMEPELAAKSGIARTFQNIALFKGMSTLDNLMTGRLLKQKKNFLMQALYFGPVAKEEEEHREKVERVIDFLDLQSIRRTPVGSLPYGLQKRVELGRALAMEPEILLLDEPMAGMNVEEKQDMSRFVLTVNNELKTTIVLIEHDMGVVMDISDRIVVLDYGKKIGSGLPKEIRNDKAVIDAYLGVSDD

SEQ ID NO: 143207 - protein, 303 aa, Unknown
  Bacterial polypetide isolated from the Sargasso Sea
VPRFDMIPGERLIPIREIEPATGHLLTPDQANNSSNELGGAILCVKNISKQFNVRNKGMFGGGTSIIRAVDDVSFEIERGKTLGLVGESGCGKTTLSRIIMRALAADSGEIIFNDEGSEVNLEKLRGKDLSPYRTKYQYIFQDPFGALNPRMTVFDIVSEPLIIHNIGDNNYRREMVTELMELVGLDPRFLNRYPHSFSGGQRQRISIARSLALKPRLLLCDEPVSALDVSVQAQILNLLKDLQWKLGLSYLFISHNLAVVDYISDDIAVMCAGRIVERASKKEIFSNPVHPYTQNLLNAVPS

SEQ ID NO: 143208 - protein, 229 aa, Unknown
  Bacterial polypetide isolated from the Sargasso Sea
MSVSNLFAGYGETEILHGINLNVNDGEIVCVIGPNGAGKSTVLKAILGQINIRDGSINLADQDIVNTPTTDIIKKGISYVPQTNNVFVSLTVEENLEMGAWVNPEYTQKKLTEMYELFPDLSEKRKQPAGALSGGQRQMVAMAKALMVNAKILLLDEPTAGLSPKYRSEIFSTIKTINNNGVPILMVEQNAKQALGVSDRGYILVDGANRHAGSGIDLINDKEVARMFL

SEQ ID NO: 143209 - protein, 171 aa, Unknown
  Bacterial polypetide isolated from the Sargasso Sea
MGGLDWPTAGAILFGGEPLRVQTPAQSAEFRGSHVGFVFQAYHLLPDLDALENVQLPAQVLRRPQAESEQRARELLDIVGLSDRMDHRPSELSGGEQQRVAIARALMNKPEIVLADEPTGNLDTGTESEIIDLLKRMHAERQLTLLVATHDETVARAAQRVVHLKDGRVCE

SEQ ID NO: 143210 - protein, 271 aa, Unknown
  Bacterial polypetide isolated from the Sargasso Sea
EPTSGKILINNQDVMQFDKDNLQELRNKKIGMVFQNFALMPHRSVLDNIAMPLEIRGVSKNDRLDAANNILNIVELQGWGNKYAHELSGGMQQRVGLARALAADPEFLLMDEPFSALDPLIRRQLQTEFIKLSKQMKKTTVFITHDLDEAVRVGHRIAIMRDGAVVQIGTPEEIVVNPADEYVADFVKGISRLKVVQAKTIMKSIKDFENKFGSLDNDNEIVNENEVLSKLIETSISKDKPIVVTDKNNQKIGVINQSDLLKSVVEGNEDD

SEQ ID NO: 143211 - protein, 238 aa, Unknown
  Bacterial polypetide isolated from the Sargasso Sea
MIKPIIEVNGLASGYVKGLNILQGVDLVLKEKEVVSIIGPNGAGKSTLLKAIMGLIPIFGGKIFFNGNELKEIKSFELIQKGIAYVPQVSNVFPSLTIEENLEMGLWTTKDKQNKFFEEIYSMFEILFQKRKERAGNLSGGQRQLLALGRALISKPEVLLLDEPSAGLSPKAIDEVFGYIENINQSGVSILLVEQNAKRALRFCNRGYVLDQGRNAYTGLGKDLLNDEKVIDLYLGKL

SEQ ID NO: 143212 - protein, 230 aa, Unknown
  Bacterial polypetide isolated from the Sargasso Sea
NHKKMTEKLISINNLSKEFLVNKNKTCILKNINFSILKGDIISISGPSGSGKSTFLNILGLLDSVFDGTYDFLDFNVNILKNNEKNIIRNKSIGFVHQFFYLIPELTVLENVSLPNLILNNQMRKSNDLAKEIIVNCGLENRMYSKPTYLSGGEQQRVAIARALINNPELIIADEMTGNLDEKTADSVFEFFLDKISSNNQTLIYVTHNQKYAKKANTAFEISNNQIHKI

SEQ ID NO: 143213 - protein, 328 aa, Unknown
  Bacterial polypetide isolated from the Sargasso Sea
LHGLGFSDEQLSSPVRSFSGGWRMRLNLAQALLCRSDLLLLDEPTNHLDLDAVIWLEKWLKAYQGTLVLISHDRDFLDSVISRIIHIENGKLNEYTGGYSDFELQRAEHLAQQQSMYEKQQREMSHMQAYVDRFRYKASKARQAQSRLKAMERMEKILPAHADSEFSFEFREPSALPTPLIAMENLSAGYGDKVILEKIKLNLVPGSRIGLLGRNGAGKSTFIKMLSGSNPPLSGKLEVSAGVSIGYFAQHQLETLRLDDSPLDHLVRLAPDKTEQELRNYLGSFGFHGDKALDKVAPFSGGEKARLVLALITWQKPNLLLLDEPTNH

SEQ ID NO: 143214 - protein, 275 aa, Unknown
  Bacterial polypetide isolated from the Sargasso Sea
HPLGMAVVRAAQHRGIMIPAVSDFNAPSGKGVSGDVEGQRVVIGNELAMQENSIVIDNQKAVADTLRMEGATVIYVATDGYLAGLIAISDPVKATTPDALKALRQAGIRIVMLTGDNQLTAEAVARKLGIDEVEAGVLPDGKKAVITRLKASGHVVAMAGDGVNDAPALAAADVGIAMGTGTDVAIESAGVTLLKGDLMILNRARHLSEITMKNIRQNLFFAFIYNALGVPVAAGLLYPVYGILLSPVIAAAAMALSSVSVIVNALRLKSVRLGK

SEQ ID NO: 143215 - protein, 195 aa, Unknown
  Bacterial polypetide isolated from the Sargasso Sea
MNQPRRPPKQPMPLLDVSNLRVRLQTHRGPADAVRGVSFALECGETLGLIGESGCGKSLTAMALMGLLPESAEVSGSIRFDGQELVGASDAQMCRLRGHRIGMVFQEPMTALNPVHTIGRQVAEPLRLHLGLDKATARQRAIALLDRVGIPQAAQRFDAYPHQFSGGQRQRITIAMALACGPDLLIADEPTTALD

SEQ ID NO: 143216 - protein, 154 aa, Unknown
  Bacterial polypetide isolated from the Sargasso Sea
KPKIGELLFIPQKPYMLLGTLREQLCYPTEVKKFSDEHLTSVLHEVNLKTLVDRYPNLDIKQDWPRILSLGEQQRLAFARLLLNSPRFAVLDEATSALDINTEKKLYSLLKERELSLISVGHRPSLKDFHENILELNGQGDWKLLTSDKYNFKD

SEQ ID NO: 143217 - protein, 94 aa, Unknown
  Bacterial polypetide isolated from the Sargasso Sea
MNNSFIQINNISKHFADVKAVDDVSFEIKEGEFFSLLGPSGCGKTTLLRLLAGFEYPTSGNLLIDGIDITELSPDKRPTNMVFQNYAIFPHLNV

SEQ ID NO: 143218 - protein, 279 aa, Unknown
  Bacterial polypetide isolated from the Sargasso Sea
VYREIRRALTDLENMLGLLNKKPQVTNAPNANTLNVKNGEIAFNNVSFSYNANRPILNNISFKVKAGSKVAIVGASGAGKSSLARLLYRFYDVTSGSITIDNQAINSVTLDSLRKAIAIVPQDTVLFNTTIRENIAYGRPSASDSDIDKAIEMAHLKDFINTLADGDKTRVGERGLKVSGGEKQRIAIARAILKQSPILIFDEATSALDSQAEQAILKAMHEVASEHTSIVIAHRLSTITDAHTIIVLKSGQIVEQGQHNELLTLGGEYAHMWALQQQD

SEQ ID NO: 143219 - protein, 227 aa, Unknown
  Bacterial polypetide isolated from the Sargasso Sea
GNKQVVRNINISIKRREVVGLLGPNGAGKTTTFHIIVGLVKPDSGSIILDKLDISNLPIYLRGKYGISYLPQEPSIFRGMSVEDNLLSIVEINEKDKNKQNIILQNLLNEFDINHVRKSKSVVLSGGERRRLEIARTLATNPKYLLLDEPLTGIDPVSIEEIKTIIKKLKDRNIGILITDHNVRETLKIVDKVYIVNEGAIFYEGDPESAVNDEKIKKFYLGSNFKL

SEQ ID NO: 143220 - protein, 305 aa, Unknown
  Bacterial polypetide isolated from the Sargasso Sea
MSETVIKCESVYKIFGQNAKKMLEESNGNVDAKTFQERGCIVGVNNASFEVAKGEMLVVMGLSGSGKSTLLRCISRLTDATGGKIFIEGQDLLELNNKELIELRRNKMGMVFQSFALLPHKTVVENIAFPLQIKGTNTEESISRAMEMVKLVGLDGRENYFPRELSGGQQQRVGIARSLAVEPDIWFLDEPFSALDPLIRKEMQDEFLRLQEKLQKTIMFITHDFDEALKLADRIAIMKDGIIEQLDTPANIVLNPATEYVRKFTEEVPREKVLIIEDVMDASSKDNLGDLKVSKDEIIENVQKK

SEQ ID NO: 143221 - protein, 216 aa, Unknown
  Bacterial polypetide isolated from the Sargasso Sea
MAYFEGAKMTAGYGDGPDIISSCSITANRGEIVAILGPNGAGKSTAMKAMLGLLKLKSGSVILNGEDISKINPQDRVKKGISFVPQTRNVFAELTVRENLEIGGFLTEGSLENKIESIYSLFPILSEKKSQVVGQLSGGQRQQVALGRALMSDPSVLMLDEPTAGVSPIVMDELFEHIIKVKKTNVAVIMVEQNAKQALSISDRGYVLVTGQNKLR

SEQ ID NO: 143222 - protein, 51 aa, Unknown
  Bacterial polypetide isolated from the Sargasso Sea
EQAARMVAMENATSNSEEMIKDLTLKFNKARQAAITTEMLEIVGGAEALKG

SEQ ID NO: 143223 - protein, 44 aa, Unknown
  Bacterial polypetide isolated from the Sargasso Sea
MVSIRPDEISSILKQQITDYDQSVSVSNVGTVLQIGDGIARIYG

SEQ ID NO: 143224 - protein, 348 aa, Unknown
  Bacterial polypetide isolated from the Sargasso Sea
HDLGVVANVADEVVVMYHGRVLEHGTLDHIFRDPQHDYLKALLRAVPRFHMEDGERLVPLREIDHTTGHLLAEREEEPVKLDEPLLDVRGLTKTYALRKGGIFSGSETQRILAVDDVSFFVRQGECLGLVGESGCGKTTLSKMIMRALTPDSGEVLYNDRGHKVDLTGLSERELLPYRRKIQFMFQDPFSSLNPRMTVFDIISEPLAIHEIGDAAYRAEMVQELMALVGLDPRFLNRYPHSFSGGQRQRIGIARALALKPGLLLCDEPVSALDVSVQAQILNLLKDLQQELGLTYLFISHNLAVVDYIADRIAVMCAGRLVETAPRDVLFRSPIHPYTRALLSAVPEP

SEQ ID NO: 143225 - protein, 287 aa, Unknown
  Bacterial polypetide isolated from the Sargasso Sea
TFQEAGCIVGVNNASFGVNKGEMMVVMGLSGSGKSTLLRCISRLTDATAGKIFIDGEDLLSMNSKQLIELRRNKMGMVFQSFALLPHKTVIENIAFPLQVKGTNTKESMAKALEMVELVGLKGRENYFPRELSGGQQQRVGIARSLAVEPDIWFLDEPFSALDPLIRKEMQDEFLRLQAVLNKTIMFVTHDFDEALRLADRIAIMKDGIIEQLDTPDNIVLNPATEYVKKFTEDVPREKVLKIESIMDAYDSNNSSSTKVSKDAIIETLAESILNSKEILTVVDSNN

SEQ ID NO: 143226 - protein, 303 aa, Unknown
  Bacterial polypetide isolated from the Sargasso Sea
LQRRFSSFFAAILMLIDPISHVSTNFNDYKQAEASIKRLKNINQEPVEDDKENLRRISNCEGKISFKKVNFAYKKDNQVLKNINLEIKRGEVTAFVGASGAGKSTMLALILKFITPNNGDIFIDDKNLKILNTKDIRKNIALVQQQPFLFSGTIIDVIRMGRNFTKEEVIESARKANAHNFIQKLPEKYETEITERGSNFSGGQIQRIAIARAILGNPSILLLDEATSALDAESESEVQKGLNRAMKDRTVIVIAHRLATTQEANKIVVFDKGEIIEVGKHIDLINKPGIYKELCEKQLIKKT

SEQ ID NO: 143227 - protein, 195 aa, Unknown
  Bacterial polypetide isolated from the Sargasso Sea
MTEAVLELKDVCFRWPNQDRATIDLPELKIDQGERIFLQGPSGSGKSTLLSLVGGILVAESGSLRVLGEELKSLSRARRDAFRVTHLGFIFQLFNLLPYLSLEENVLLPLRFSKKRAQRAGRNQAERLKEAQRLLTALGLSEPLKEGRPVVELSVGQQQRVAAARALIGRPELVIADEPTSALDADLREVFLNLL

SEQ ID NO: 143228 - protein, 151 aa, Unknown
  Bacterial polypetide isolated from the Sargasso Sea
MPINEQFVRFDKVDKSYDGKVLVVKDLNLDIAEGEFITMLGPSGSGKTTCLMMLAGFETPTNGEIYLDKNPISNIPPHKRGIGMVFQNYALFPHMTVYENLAFPLRVRKVSKEDTDKKIDKALSMVSLTGFENRMPGQLSGDNNKGLPCKS

SEQ ID NO: 143229 - protein, 199 aa, Unknown
  Bacterial polypetide isolated from the Sargasso Sea
MSKHVDQPVVIEAGNVEKIYKSSSVTVHALKGVDISISKGEMVAIMGPSGCGKTTLLNCLSGLDSIDGGDITIQGKKLQDLSDDKLSEFRASNMGFVFQLYNLLPVLTSVENVELPLLVSGYSAKEARKRSEEKLDDVGLLEWKHHLPGELSGGQRQRVTLARSLVNEPAIVWADEPTGNLDSTNEIEIIDLLCDLNKK

SEQ ID NO: 143230 - protein, 226 aa, Unknown
  Bacterial polypetide isolated from the Sargasso Sea
GTKEAVKNISFEIKENEIIGLLGPNGSGKTTTIGMILGLLKPTSGEVLINGLKIEKNPIEILQKINFISPYIELPKKLTVKQNLIVYGKLYSVKNLNKKIDYLVNKLRLENLLSRVTGELSSGQKNRISLAKAIINDPCVLLLDEPTASLDPEIGDFVRTFLENYKKEKKVSILLASHNMDEVTRLCSSIMMMKNGLIIDQGRPNDLITKHGRKNLEEVFLKLVRN

SEQ ID NO: 143231 - protein, 119 aa, Unknown
  Bacterial polypetide isolated from the Sargasso Sea
LPKKFNTIVGESGIKLSGGQKQRISIARAFLKNAPIILLDEATSALDSESEKKIQQALDKLIKGKTTIIVAHRLSTIVEADQIITIHEGKIIEKGTHDSLINKGGMYSKLYNENIIKNT

SEQ ID NO: 143232 - protein, 268 aa, Unknown
  Bacterial polypetide isolated from the Sargasso Sea
ATQPVIAAPAEPRRIPEPSRGEVVFSNVTFRYPAQDALSALTGFDLSVSSGERVALVGPSGAGKTTVFQLLLRFYDPSSGRVLLDGVDLRKTDPVGVRRHIGLVSQEPTIFSASAMENIRYGRIEASDAEIRAAAEAAAATAFIERLPEGFDTHLGEKGVRLSGGERQRIAIARAILRDPAVLLLDEATSALDSESEHLVQAALEKVMAERTSVVIAHRLSTIRSADRIIVLDGGAIVAQGTHDALIAEGGLYARLAERQFNLSADPA

SEQ ID NO: 143233 - protein, 67 aa, Unknown
  Bacterial polypetide isolated from the Sargasso Sea
RHLNIQIWKYLLESYASEQAARMFAMDNATTNAGDMIKNLTLEFNKARQAAITTEMLEIVSGAEALK

SEQ ID NO: 143234 - protein, 315 aa, Unknown
  Bacterial polypetide isolated from the Sargasso Sea
NNAYIQEGNINLIDKKNNQVNILKLTDDKHNLIRGNDISMVFQEPMTCLNPTMTIGDQIVEVILNHKKISKTKAVKEMIDLLGLVEIPDPTQRAREYPHQLSGGMRQRVMISIALACTPKLIIADEPTSALDVTIQAQLLQLLMKLKNSIVSKTSILFITHDLGIVRELADRVIVMYHGEIVEEGQVKEVFDNPKHSYTRNLIQSLPEFKLEERKLNKKDDNKPTKVDDNEIILKIENLFKEFPVEKGFFKESNETVKAVQNISLNVKKNEVLGLVGESGSGKSTLGKSIIKLLQPSRGQIYFNNENISEYSNKQ

SEQ ID NO: 143235 - protein, 102 aa, Unknown
  Bacterial polypetide isolated from the Sargasso Sea
MLELDDLCLAYDTPHGRRTVVDGLSLALPRGDIGCLLGASGCGKTTVLRAIAGFEPVRMGRIVLDGVPVAAPSLDVPPERRRIGMMFQDYALFPHLSAADNV

SEQ ID NO: 143236 - protein, 243 aa, Unknown
  Bacterial polypetide isolated from the Sargasso Sea
MSEPVIKCEAVYKIFGENAKKMLQDSNGNVDAKTFQENGCIVGVNNASFEVSKGEMLVVMGLSGSGKSTLLRCISRLTDATGGKIFIEGQDLLQLNNKELIELRRNKMGMVFQSFALLPHKTVVENIAFPLQIKGIKTEDSISKAMDMVKLVGLDGRENYFPRELSGGQQQRVGIARSLAVEPDIWFLDEPFSALDPLIRKEMQDEFLRLQDKLQKTIMFITHDFDEALKLADRIAIMKDGII

SEQ ID NO: 143237 - protein, 97 aa, Unknown
  Bacterial polypetide isolated from the Sargasso Sea
MKSSSLNISIKDVTKTYGNFYALKNINLEVTSGEFLTLLGPSGSGKTTLLMVLAGFTSPDYGSVKFGEEEVVLKPPHLRDIGMVFQNYALFPHMNVE

SEQ ID NO: 143238 - protein, 238 aa, Unknown
  Bacterial polypetide isolated from the Sargasso Sea
MSPPRLAIDNLSVRIGDTNAVRDVSLSIAPGQIFGVAGESGSGKSMTALAVMGLLPDGALRGGAARLDGEDLFALDEAAMCGIRGRRIGMIFQEPMTALNPVRTIGAQVAETLVVHARTSLSEAREIAAAKLDRVGLPAARYGLDRYPHELSGGQRQRVMIAHAIALQPALLIADEPTTALDVTTQASILDLMGGLVEDGDMSLMLITHDLAVLAELSSRIAVMQQGLVVETADTETL

SEQ ID NO: 143239 - protein, 261 aa, Unknown
  Bacterial polypetide isolated from the Sargasso Sea
KILSGVIIPEEGKIYLNENNLKLNSPLDAKKNDIGMVFQHFNLFETLSVFENLIIDSDEKREGLREKIDTIMKKYNFSIDLDIPVLNLSAGQKQKVEIIRCLIRNPKVLIMDEPTSVLTEQETSELFLSLKQFSEEGILIIYITHKLKEVMRLCDEVAVMRRGKLVSISQVKDENIESLANKMVGQNLKTIKKIKEKTSSEQLIKITNLNFISEDPFETNLSDINFSVNRGECLGIAGISGNGQSELFQVLAVKLYLIRIL

SEQ ID NO: 143240 - protein, 299 aa, Unknown
  Bacterial polypetide isolated from the Sargasso Sea
NLEGEPSKIITVAGESGSGKTTLASIMLGLIQPSTGSVRYMGMDIQNLNSSEYKEFRKNVQAVFQDPFAVFNPFYPVDHLLEVPIRKFNKRLTKTKRKSMMEEALEAVGLQPREILGRYPHQLSGGQRQRINVARAIVIKPQILIADEPVSMVDASLRANILEALVSLKVNYKVNILYITHDLTTAYHVSDSIIVLYRGSVMEAGSIIPVIETPQHPYTQLLINSIPWPDLSRKWDNKTYENPNIEEIGEKGCSFYSRCPERIDSCLKAPKLISLKQGHLASCHLYQNKGSESHLTNHI

SEQ ID NO: 143241 - protein, 101 aa, Unknown
  Bacterial polypetide isolated from the Sargasso Sea
MSKNKEFVKFEKVDKSYDGKVLVVKDLNLDISEGEFITMLGPSGSGKTTCLMMLAGFETPTNGEIYLDKNPISNIPPHKRGIGMVFQNYALFPHMTVYENL

SEQ ID NO: 143242 - protein, 287 aa, Unknown
  Bacterial polypetide isolated from the Sargasso Sea
FLFGKNVAMVYQQFINYPHLNVRDNVAFPLKQRKMDENLIEKEVQEAMEKVGLIGFESRKIQELSGGQQQRVALARSLAKKAKILLLDEPLVNLDYKLREGLREEFKKLFNVSDESNSILIYASTDPLEAMQLNGDIIVIDEGKILQTGTAKDVFENPATAKVAEITNDPAMNINNCLIQDNSLIMNDSVQIQIPDELKSVPNGKYLVGIRATDIYLDDQGFAFDVEISEISGSETFLHLRNKNLKCVATIEEVKTYNTNEVVKINFDKSKIYLFEESGDLRHSPYQ

SEQ ID NO: 143243 - protein, 225 aa, Unknown
  Bacterial polypetide isolated from the Sargasso Sea
MNKFQLLDDGLVINKISKSYGNKKVVRDISLTINRGEIVGLLGPNGAGKTTTFYMIVGLVKPDTGSILLDKIEISKLPIYTRGLQGISYLPQEPSVFRGMNVEDNLLSIIEIVEKDKNKHDIILQSLLNEFDISHVRKSKSIVLSGGERRRLEIARTLASSPKYLLLDEPLTGIDPVSIEEIKIIIRKLKQKNIGVLITDHNVRETLKIVDRVYIVNEGMIYFSG

SEQ ID NO: 143244 - protein, 60 aa, Unknown
  Bacterial polypetide isolated from the Sargasso Sea
WKYLLESYASEQAARMLAMENATTNAGDMIKNLTLEFNKARQAAITTEMLEIVSGAEALK

SEQ ID NO: 143245 - protein, 180 aa, Unknown
  Bacterial polypetide isolated from the Sargasso Sea
MNLNIYNVSLSIKGRLIVDDVSITVNPGEVVGLMGPNGAGKTTTFNLAVGNIKPDKGKILMNGKNITNLPLPIRSRLGLGYLTQEASIFRDLTVKDNIDLALQNSSYSSAAIRNRREQLINEFNLNNFVDNYGYQLSGGERRRCEIARALTVGRKGPKYLLLDEPFAGIDPLAVNDLKKL

SEQ ID NO: 143246 - protein, 262 aa, Unknown
  Bacterial polypetide isolated from the Sargasso Sea
MENSLNEKPLNAPHNLLVDIREKKYENKNNSSHNSAIKGMQFDVPQGQFCCLVGPSGCGKTTLLNLLSGLDENLNGSIKYQDNSIPKDWPIGYMFQEPRLMPWLTVRQNVTIVTQQTPEENKLSESLINEMGLNKYMNSFPSELSGGMQRRVAIARAFVNKPKILLLDEPFISLDETVGNLLRQMLLKLWENQKTTVIFVTHDLREAIYMSDRILFLSKGPSKVIHDFKINVSRPRELSDKKLDILRTELISNHPDILSGKI

SEQ ID NO: 143247 - protein, 95 aa, Unknown
  Bacterial polypetide isolated from the Sargasso Sea
AIAEHYAWEPKIMLFDEPTSALDPEMIKEVLDAMVNLAKAGMTMIVVTHEMGFAKEVADEVIFMDEGMIVERAETKEFFANPKSDRTKLFLSQIL

SEQ ID NO: 143248 - protein, 121 aa, Unknown
  Bacterial polypetide isolated from the Sargasso Sea
MASKKDFVKFDKVDKSYDGKVLVVKDLQLDIAEGEFITMLGPSGSGKTTCLMMLAGFETPTNGEIYLDGKAISSIPPHKRGIGMVFQNYALFPHMTVYENLAFPLRVRKIPKDEADKKMTK

SEQ ID NO: 143249 - protein, 154 aa, Unknown
  Bacterial polypetide isolated from the Sargasso Sea
ELPKKLTVKQNLIVYGKLYSVKNLNSRIDYLVEELRLQNLLDRATGELSSGQKNRISLAKAIINNPSVLLLDEPTASLDPETGDFVRTFLENYKKEKKVSILLASHNMDEVTRLCSSIMMMKNGLIIDQGKPNDLVKKHGRQNLEEVFLKLVRN

SEQ ID NO: 143250 - protein, 215 aa, Unknown
  Bacterial polypetide isolated from the Sargasso Sea
RGEVTAFVGASGAGKSTMLALILKFINPNNGDIFIDDKNLKILNTKDIRKNIALVQQQPFLFSGTIIDVIKMGRNFTNEEVIESARKANAHNFIQKLPDKYETEITERGSNFSGGQIQRIAIARAILGNPSILLLDEATSALDAESESEVQKGLNRAMKDRTVIVIAHRLATTQEANKIVVFDKGEIIEVGKHIDLINKPGIYKELCEKQLIKIL

SEQ ID NO: 143251 - protein, 178 aa, Unknown
  Bacterial polypetide isolated from the Sargasso Sea
MHNSIKVINLKKTYGTKEAVKNISFEIKENEIIGLLGPNGSGKTTTIGMILGLLKPTSGDVLINGLKIEENQIKILQKINFISPYIELPKKLTVKQNLIVYGKLYSVKNLNEKIDYLVSKLRLENLLSRVTGELSSGQKNRISLAKAIINDPNVLLLDEPTASLDPEIGDFVRTFLEN

SEQ ID NO: 143252 - protein, 223 aa, Unknown
  Bacterial polypetide isolated from the Sargasso Sea
MIAVEVKDLTHSINNKKILNNINFNLNKDSISCILGPSGSGKTTLLKLIAGLEKVQSGKIIINGEEVSSTAKHLPTEKRKIGFLFQDYALFPHLTVKENLRFPTNAKNSTNNVDEIIELIKLPNSLDKYPHELSGGEQQRVALARSIISQPDLLLLDEPFSSLDLSLREEVRDDTLHLLQKSNVSVIIVTHDPFEAMFISNHINIFDKSGSIVQSGTPNDLYN

SEQ ID NO: 143253 - protein, 310 aa, Unknown
  Bacterial polypetide isolated from the Sargasso Sea
SLTGILTVKSFNREGRETERITKSSEEVKAANYHAIKLSAAFIPIIRIAILFGFTATLLIGGFMALDGQIKVAMYSVLLFITQRLLWPLTELGDTFDLYQRAMASFKRITTLKDTRPTITNGNSELKNFENSIVFNDVNFSYVEGFSVLNNVSVEINKGQTVAIVGSTGSGKSTMIKLILRLYDVTEGDIKFDNINIKDLDLTSLRSNIALVSQDIFLFEGSVFENIAYGNLDASEDEIWEAARLSESDDFINQLPNKEHTIVGERGQKLSGGQRQRISIARAILKNPEILILDEATSAVDKKQKLQSSV

SEQ ID NO: 143254 - protein, 139 aa, Unknown
  Bacterial polypetide isolated from the Sargasso Sea
MATLVAENLTFAYAKKSKPVLNKVSVEIKPGTLTALVGPNGAGKSTLLRILQGQNTPDKGEIKIDGENLYRSRALVALMPQRSSMNWKFPITVEKLVSLGQIKYSKSRSNNPFQIKTLLAYPNSWINKCCELEATMQRV

SEQ ID NO: 143255 - protein, 165 aa, Unknown
  Bacterial polypetide isolated from the Sargasso Sea
MATLELKQVRKNYGNLEVIHGIDLFINNGEFCVLVGPSGCGKSTLLRMIAGLEQITKGDILIDEQVVNNISAAKRGLAMVFQSYALYPHMSVRQNLAFGLENLKMEVDEIDKRILEAARLLRMEEYLQRKPGQLSGGQKQRVAIGRAIVREPSIYLFDEPLSNLD

SEQ ID NO: 143256 - protein, 74 aa, Unknown
  Bacterial polypetide isolated from the Sargasso Sea
MATLVAENLTFAYTKKSKPALNKVSVEIKPGTLTALVGPNGAGKSTLLRILQGQNTPDKGEIKIDGENLYRSRA

SEQ ID NO: 143257 - protein, 143 aa, Unknown
  Bacterial polypetide isolated from the Sargasso Sea
MAFLKFEDIDKSFGENNVISKFNLEVEKGKFIVLLGPSGCGKSTLLRMIAGLEKIDNGKILLEDNLLNDLLPSKRQIAMVFQSYALYPHMSVYENISFGLKSEKVSKSEIKDKVIEAAKILKIEELLDKKPKELSGGQRQRVQ

SEQ ID NO: 143258 - protein, 285 aa, Unknown
  Bacterial polypetide isolated from the Sargasso Sea
LQEWLARTLPFVHSAREQRIAERVQQVATMLDLAHLLDRLPKELSGGQKQRVALGRAIAREPAVFLMDEPLSNLDAKLRGDTRRQIVELQRQLGITTLYVTHDQVEAMTMGHRIAVLNEGRLQQLGTPMELYAHPANLFVAQFIGSPPMNLLPVEVVSAEQVLLAGKRVVADAALAPVLQGYIGEQLTLGLRPERLRLAPATNRNLPAEVVQVEALGHELLVSCRLQDLDQLVQLRGGADLSLQPYQRCHLELEPQGWTLFGADGEALKPAEPAQAAPHLPVLPA

SEQ ID NO: 143259 - protein, 226 aa, Unknown
  Bacterial polypetide isolated from the Sargasso Sea
LQKGARHALIGPNGAGKTTLINLLTGVLEPTEGSITLEGQDITRLAPHQRVQRGMVRTFQINQLFDTLTPLETLALTVSQHQGLGGKWWQPLGARKAVNERCEQLLEQFHLTSVMAEETRVLAYGKRRLLEIAIALACEPRVLLLDEPVAGVPAGEREELLQTVAALPADVSVLLIEHDMDLVFSFANRMTVLVNGTVLTEGDPDTIANDPQVKAVYLGHGEDAHV

SEQ ID NO: 143260 - protein, 294 aa, Unknown
  Bacterial polypetide isolated from the Sargasso Sea
KKNELINVKDNVKKTDPPILEVENLTTRFYIKSGFGFKKGKVHAVEGVGLSLQEGETLGIVGESGCGKSTLGKSIVRLVEPTSGKIKIRGKEIISLSKNEMFSIRKDVQIVFQDPYSSLNPRLTAGKIVSEGMRLHKVCKEEELQERLIKIFERVGLSEFQINNYPHEFSGGQRQRIGIARALSLSPKIIIADEAVSALDVSIQAQVVNLMMELQEEYGLSYLFISHDMAVIERVCHRVAVMYLGEIVELGSRGQVFENPQHPYTKKLMKAVPVADPNLRKRELNIMTDEIPSA

SEQ ID NO: 143261 - protein, 134 aa, Unknown
  Bacterial polypetide isolated from the Sargasso Sea
MFASRKGEIKERAENLLEFVGLYSKRNLISGDLSFGQQKLLEFAMALMNDPKVLLLDEPTAGINPTLINGLIDRLRKANEELGITLCVIEHNMRVIMNLASHIYCLANGKVLANGSPSELQKDQRVIDAYLGGH

SEQ ID NO: 143262 - protein, 160 aa, Unknown
  Bacterial polypetide isolated from the Sargasso Sea
MAVGKEIRNQIGSIKSTQKITSAMEMVAASKMRKAQERMQATRPYAEKMRQVIGHIAKSNKDYRHPFMQEREVKRVGYIVVSSDRGLCGGLNTNAFKLLVREMREWKQQGIETDICAIGQKGASFFRNYGGNVVAAVTHLGDSPSADQLIGSVKVMLDSF

SEQ ID NO: 143263 - protein, 200 aa, Unknown
  Bacterial polypetide isolated from the Sargasso Sea
RNLKIFLFDEPLSNLDAALRSEMRVEISKLHNQIKTNMIYVTHDQVEAMTLADRIVILNLGNIEQVGTPDEIYNNPANIFVAQFIGTPKMNILPLNNENIVSDNKINFLGNEIIFEKIKFDKKKYFFGIRPEHFNLSNRSQFKIKPKIDLVENLGNEKIVYMSNDNLELSAKISSQEDFQNEINFDSKDIFIFDEDGNRI

SEQ ID NO: 143264 - protein, 202 aa, Unknown
  Bacterial polypetide isolated from the Sargasso Sea
MEAAIQIQNVWKIFGNTSQDALDAIQNKKISKQEALEKYNSVIGVSDVSFDVKKGEIFCVMGLSGSGKSTLVRHINRLLEPTSGKILINNQDVMQFDKDNLQELRNKKIGMVFQNFALMPHRSVLDNIAMPLEIRGVSKNDRLDAANNILNIVELQGWGNKYAHELSGGMQQRVGLARALAADPEFLLMDEPFSALDPLIRR

SEQ ID NO: 143265 - protein, 230 aa, Unknown
  Bacterial polypetide isolated from the Sargasso Sea
MSQIKIVNLQKSFGDFTAVKNSNLIINDKEFFVLLGPSGCGKTTTLRMIAGLELPTSGEIYLGEEEVGMLRASERDIAFVFQLFALYPHMNVRNNLSFPLKMQGYKKSDIKTRVEEAAKLLRIDHILNSNISSLSGGDRQRVALGRALVRRPKAFLMDEPLGTLDAEFRELMCLELKKLHIDIGATTVYVTHDQLEAMSLADRIAVMDNGQILQADEPDVIYNKPKTKFV

SEQ ID NO: 143266 - protein, 193 aa, Unknown
  Bacterial polypetide isolated from the Sargasso Sea
LILRLYDATSGAICLDGVDIREFDPVELRNLFALVSQQPAIFTGNVSENIRYGNPHACEQSVKKAAISAFADNFIEELPEKYETFLGESGVRLSGGQKQRIAISRAVLKDPKILLLDEATSALDAESERQVQIALDELMKNRTALIIAHRLATVKNVDRIIVMDKGTVVAQGTHDQLIKSNQLYSNLARLQFS

SEQ ID NO: 143267 - protein, 172 aa, Unknown
  Bacterial polypetide isolated from the Sargasso Sea
MKSLLEIKNLSITFEFNDQTVNAVRDSSFKINKGECLAIVGESGSGKSVTALSIMRLIRSNSQLKITGSATYEKKNLLNSDELNLQNIRGKKISMIFQEPMTSLNPLHNIEKQITECFELNQKSNKSKCIELLKEVGIENPEQRLTHFPHQLSGGQRQRIMIAMAIANNPDC

SEQ ID NO: 143268 - protein, 240 aa, Unknown
  Bacterial polypetide isolated from the Sargasso Sea
MQNSIKVINLKKSYGTKEAVKNISFEIKENEIIGLLGPNGSGKTTTIGMILGLLKPTSGEVLINGIKIEKNPIEILQNINFISPYIELPKKLTVKQNLVVYGKLYSVKNLNEKIDYLVSKLRLENLLNRVTGELSSGQKNRISLAKAIINDPSVLLLDEPTASLDPEIGDFVRTFLENYKKEKKVSILLASHNMDEVTRLCSSIMMMKNGLIIDQGKPDDLIKKHGRKNLEEVFLKLVRS

SEQ ID NO: 143269 - protein, 126 aa, Unknown
  Bacterial polypetide isolated from the Sargasso Sea
MQPQSRFIGVTGPSGAGKSSLFRALAGVEKSADVQTPWTSQKVGIVFQQPMLFPHTDVRGNLALAQRHTSPNAMSIDVCLRGCYCEHLIDKPVQALSGGEAQRVAIARALVNGPDVLLLDESLSAI

SEQ ID NO: 143270 - protein, 140 aa, Unknown
  Bacterial polypetide isolated from the Sargasso Sea
MISIKNLSKTFNKNIHAVQNVDLEIAEGEVVVIVGPSGSGKSTVLRCINRLEIPTEGSIAIDGVELTDPECDIDTIRAEVGMVFQQFNLFPHLTVMENICLAQRKVRGRSKSEANEMTMKQLLRVGIPDKADSYPRQLSG

SEQ ID NO: 143271 - protein, 183 aa, Unknown
  Bacterial polypetide isolated from the Sargasso Sea
MKNLLEIKSLNTYYGESHILRDVDLNVQSGEMVCLIGRNGVGKTTLLRSIIGLLRQKKGDIYLIGENINRKAPHQRARKGMAYVPQGREIIPYLSVEENLMLGMESLPGGLSKNKKIDPYIYDLFPILKDFLQRKGGDLSGGQQQQLAIARALLGKPKLLLLDEPTEGIQPKYSFSHRKCNQS

SEQ ID NO: 143272 - protein, 310 aa, Unknown
  Bacterial polypetide isolated from the Sargasso Sea
KLALARAILMKADILLLDEPTNHLDVKNVAWLEEYLCSQTQVSSMIVSHDSGFLDRVCTHIIHYENRKLVTYRGNLTEFIKQCPAAKKYTELSNDELKFIFPVPGFLEGVKNKDKAIVKATRCWFKYPNTTRQIIQDATIQLSLSSRVACLGPNGAGKSTFIKLLTGEAEPDQGTVWRHPNMRYAYVAQHAFHHVEQHLDKTPNEYIRWRFSTGEDKENLTKVTAQYTEEEERLMKEKIPVPQEDGSILKLVVEKIISRRQKKSKYEYEIQWKGLSMDSNSWMEREKLEKFGFTKYLNRVDEREAARAGL

SEQ ID NO: 143273 - protein, 239 aa, Unknown
  Bacterial polypetide isolated from the Sargasso Sea
MLEVEGLATSYGLIKALRNVSLQAEKGKLTCILGPNGAGKSTLLFTIAGILKSDKGTIKFLNKEISKIKTSEIVKEGLVLVPENRLVFPHLSVSENLLAGAYSRFGKKNEVEEDLEAMYKRFPILKERYLQEAGTLSGGEQQMLAVARALMARPKLLLMDEPSVGLAPKIVNTIFEIIKTLSEEGISIVLVEQNAVKASAIADHIYLLDQGEITFSGTRDQIEDNDIIKRAYLGDISES

SEQ ID NO: 143274 - protein, 134 aa, Unknown
  Bacterial polypetide isolated from the Sargasso Sea
MDNNFLVIENISKSFGDNKVLENINLNISKSEFFGLLGSSGSGKTTLLRILGGFEKPDTGRVILDGTDITNLEPFERPLNYMFQSYALFPHLNVFNNLAFGIKENFTRKEIEITVRNIAELLSIEHLLNRRIKQ

SEQ ID NO: 143275 - protein, 210 aa, Unknown
  Bacterial polypetide isolated from the Sargasso Sea
RDPAVFILDEVMSHLDAHLKFQMLFELKKIHQTLKKTMIYVTHDQMEALALSDRVAVMANAVLQQFGDRNDLYHRPKNLFVADFIGEPATNFMKAQYSQNSTMNISGDLQFSLTNEISSEMERKQMSEAVLGIRPQNLSLDPIEGEDYIQGELVINEFLGERSILEIKSGETSFKVLTDPQKNIKKGDSLKIYYKKENVMIFHPETEDII

SEQ ID NO: 143276 - protein, 210 aa, Unknown
  Bacterial polypetide isolated from the Sargasso Sea
MLLGPNGAGKSTLFALITGLQKLTQGSITFDGATLSQSRTSIMAKMGVVFQQSTLDIDLSVKQNLSYFASLHGITTTCALSHIHGLLDELDLTSKLNTKIRNLNGGHRRRVELARCLIHKPSLLLLDEPTVGLDIESRHLILRVVQALAHSQNVSVLWATHLFEEVKHNNNLIVLSKGRVLAHDQCEALLAKYNQQDIEHLWQHLMQEDS

SEQ ID NO: 143277 - protein, 360 aa, Unknown
  Bacterial polypetide isolated from the Sargasso Sea
KQDLLSLRGNIISMVFQEPMTSLNPYHKVGNQITESVLLHSKVSKKEAKDEALNLMKLVEIDDVERRFNSYPHELSGGQRQRIMIAMALVNKPKLLIADEPTTALDVTIQAQILDLMSKLKEELGMSILFITHDLGLVREFSDQVCVMQNGHIVEKGNTDDVFKNPEHSYTQKLLNAEPQPKLDINTEEIPLIKIENVDVFYDMPSINFFNKNRFHAVKNASLNIYKNTTIGVVGESGSGKSTLGKAIANLIKYEGDILYDGKNIRHSSKEIKKHIQIVFQDPYGSLSPRMTVGEIVGEGLGVHFNLTKLETQKRIDKVLDDVGIEIDAKNKYPHEFSGGQRQRIAIARSLIMNPAFMIL

SEQ ID NO: 143278 - protein, 240 aa, Unknown
  Bacterial polypetide isolated from the Sargasso Sea
MNLIGKNITYKPDDQFHLNDVSFNFKKGNLYTILGRTLSGKTTFLKTIAGLLNPDSGNLSFEDKDFSKIPVWERNVAMVYQQFINYPHLNVYENIVFPLKQRKLSEEKIKTDADEAIKTVGLVGFENRKIQELSGGQQQRVALARSLAKNAKILLLDEPLVNLDYKLREQLREEFKRIFTKGFSQETILIYSTTDPQEVMELNGEVIVLDEGKVLQKGPAKEIFENPRNLKVAEISNDPP

SEQ ID NO: 143279 - protein, 173 aa, Unknown
  Bacterial polypetide isolated from the Sargasso Sea
MSNRFFEIKGGYFVASEKNKVNNVNLKIEKKGEIVSLLGPSGVGKTTLLRTIAGLQKLSAGEIYLKDKLISSDEVHVEPENRNIALSFQDNSLFPNYKVIDNINFGKKRSNGNGFSYEAEDLIKLLHIEPILEKFPHQISAGEAQRVSLARSLMSKPDLLLLDEPFSNIDQNL

SEQ ID NO: 143280 - protein, 291 aa, Unknown
  Bacterial polypetide isolated from the Sargasso Sea
TCIFFAQSGGLGSSITLLGVLALTSQRLLPLVNQSYFSYTSIRGEQVSLEDVIDLLSQPQIIFEKVNDSFKFEKNIILENINFCYDSKKNVLSNINLEITKGTKVGIIGTSASGKSTLADIIACLLMPDSGSIKIDNKLLDKGSYNQWQNKVSYVSQSIFLNDNTIAENIAFGEIKSDINIERVKMCAQKSQLATTIDKLPDKYNTVIGEKGTKLSGGQKQRLAIARALYRESSFLILDEATSALDHETEKLVMDSIMGLEKDITMLIIAHRTTTLAGCDTIAELKNGEIT

SEQ ID NO: 143281 - protein, 233 aa, Unknown
  Bacterial polypetide isolated from the Sargasso Sea
MDDMLALVKLEGLAKRYPHECSGGQQQRVSIARALAYEPQLLLLDEPFSNIDAQVRHSMMAEIRSILKQRNVSAVFVTHSKDEAFVFADTLAIFNQGVIVQHGRAEDLYAAPNSRYVADFLGSGNYLPAEVIDGHSVATPIGELRSLTPLSQSHAFNGQVFLRPQQLALSADDAGVGTITERRFLGAFCHYWVKVEAASHAHYVEVRSQIMQLNVGQRVGLSTEPHSLVLFES

SEQ ID NO: 143282 - protein, 193 aa, Unknown
  Bacterial polypetide isolated from the Sargasso Sea
MSEIIQKVKNLSIGFKSKKGDEISILRSVSTNIKKGETVGIVGESGSGKSTLALAMMGYVKQGLYTIKGQCLFDSSNLLEMKNRDLEKIRGRKIAMIPQNAGQSLTPNLKIGYQIDEALKLHTNLNKIERDNKISELLNKVRLPSPETMAFRYPHELSGGQQQRVAVAMALAGKPDLLLLDEPTTGLDVTTQA

SEQ ID NO: 143283 - protein, 224 aa, Unknown
  Bacterial polypetide isolated from the Sargasso Sea
MKNYYLELQGLYKSYFDGSGDHHILKGADLKLEKGETVAILGSSGSGKSTLLNLIAGIDLPDQGEVRIDGKSLGKMSEKDRTLLRRRTMGFIFQSFNLIPTLNVHENLMLPLELNQISKNSGIISQMLETLGLKGREESHPDRLSGGEQQRVAIARALMHQPSLLLADEPTGNLDAETSQQTLKLINHLVHRSRTTMIMATHSQEVIKWVDRVLGIEDGKLLET

SEQ ID NO: 143284 - protein, 203 aa, Unknown
  Bacterial polypetide isolated from the Sargasso Sea
MTNEKPIISVDMLSKSFDAPDSDKKTEIFGKVCFDIYPGEFVTLIGHSGCGKTTLLNILAGLSTPSAGGVLVNNQEINGTSLDRAVIFQSHALLPWMTVMQNIDFAVKSRWPEMTSEKRKSHCNEFIKLVSLEGSENKQPSQLSGGMKQRVGIARALAIEPKIMLMDEPFSALDALTRGSLQQELLTICAKSKQTSFMITHEY

SEQ ID NO: 143285 - protein, 142 aa, Unknown
  Bacterial polypetide isolated from the Sargasso Sea
MSKKIIELKNVNKWFDKFQALKDVNLEVNQQEKIVICGPSGSGKSTLIRCINRLEEHQDGQIVVDGKEISENTKDIEKIRAEVGMVFQQFNLFPHLSILDNCTLAPIWVKKMPKKQAEEVAMKNLERVQIADQAKKFPGQLS

SEQ ID NO: 143286 - protein, 199 aa, Unknown
  Bacterial polypetide isolated from the Sargasso Sea
MLAVEVQDLNYSINNKKILNNINFNLKKDTISCILGPSGSGKTSLLKLIAGLEKVHSGKIIINGEEVSSAKKHLPTEKRKIGFLFQDYALFPHLTVKKNLEYPINYKNSDYKIEDIINLIKLPNSLNKFPHELSGGEQQRVALARSIISQPDLLLLDEPFSSLDLNLREEIRDETLHLLQKSNISVIIVTHDPFEAYVY

SEQ ID NO: 143287 - protein, 236 aa, Unknown
  Bacterial polypetide isolated from the Sargasso Sea
QDNGFFSGENMTGGYGGADIISSCTIRVNRGEIVAILGPNGAGKSTAMKAMLGLLNLKSGKVTIDGKDISKLSPQDRVKEGISFVPQTRNVFAGLSVKENLEMGAYLREERIEEIINEIYELFPVLKEKKSQIVGELSGGQRQQVALGRALMTKPSVLMLDEPTAGVSPIVMDELFDHILKVKKTNVAIVMVEQNAKQALSIADRGYVLVTGENKFSGTGKELLNDPEVRRSFLGG

SEQ ID NO: 143288 - protein, 297 aa, Unknown
  Bacterial polypetide isolated from the Sargasso Sea
INPDNGEVFLNEKNLKLSSPLDAKKNKIGMVFQHFNLFETLSVFENLSIDATEDNKSLRVRINEIFKKYNFSIDLDVPVLNLSAGQKQKVEIIRCLLRNPKVLIMDEPTSVLTEQETEELFISLKKFCDEGILIIYITHKLKEVLSLCDEVAVMRKGKVVSVSQTQNEKVETLANKMVGQKLAKIKKKINISKNKDEIFKVKHLNFYSDDPFETNLVNLNFSVKKGECLGIAGISGNGQNELFQILSGEIITPNTSIIFRNKEIAKLNPKQRREYLMAFSPEDRISQAAVPEIKIYE

SEQ ID NO: 143289 - protein, 79 aa, Unknown
  Bacterial polypetide isolated from the Sargasso Sea
MTNLSTTYLSVNDLCKHFGAFQALKNISIEINEGEFACFLGPSGCGKTTLLRCIAGLETQSSGSISQKRIEISSLPPSA

SEQ ID NO: 143290 - protein, 253 aa, Unknown
  Bacterial polypetide isolated from the Sargasso Sea
MNIIEVKDLKKAYLLPGDKSKTFNAVDHISLGIKKGEVYGILGPNGAGKTTTLEMLEGLKEIDDGFAIIDGIDVSKDPYAVKKVIGVQLQSNEYFDKLDLSELLTLFSKLYSTSIDHSKLLHQVNLLDKANAKTQHLSGGQRQRFSIACALVNNPKILFLDEPTTGLDPQAKRNLWNLVKDLNSSGMTIVLTTHNMEEAEYLCDRIAIMDKGKLIAEDTPKALIEKYAPEPSDIPLTGNIEDVFLNLTGHSLR

SEQ ID NO: 143291 - protein, 292 aa, Unknown
  Bacterial polypetide isolated from the Sargasso Sea
KQFGNIYAVNNQNLIVNKGEFLILLGPSGCGKTTTLNCIAGLEMPSSGKILFNDIDVTYSPPHSRNIAMVFQSALLYPHLNCKQNILMSLQKANIEENEKEKRILDAVEILNIKDLLNKKPHELSGGERQRVATAKAIVRQPDAFLLDEPMAALDAALRQTLRSELVNLQKKLNTTTIFVTHDQVEAMTMGDRIAVMNNGKVEQIGTPIEIYNNPKTQFVAGFVGSPPMNFLKGNLINENGKSFFNLDKLDFKIKLSTTLLKENVKNLAFRPQHIYVTNDNDCDLELKVFGI

SEQ ID NO: 143292 - protein, 247 aa, Unknown
  Bacterial polypetide isolated from the Sargasso Sea
MNKIIQVRDVNKSFGGVIANRNISIDVEEGQITGLIGPNGSGKTTLFNSIVGYHPIDSGTIHFENHEISKLRVQKIARLGVLRTFQQTRIYSKMNCVKNMLISAAHHNTKWIDMFSYYPKELTERAEKLLEFVGLYGKRYLISGDLSFGQQKLLEFAMALMNEPKVLLLDEPTAGINPTLINGLIDRLKRANHEFGITLFVIEHNMRVVMNLADSIYCLAHGEMLAHGTPTGIKQDQKVIDAYLGAH

SEQ ID NO: 143293 - protein, 304 aa, Unknown
  Bacterial polypetide isolated from the Sargasso Sea
LLKFMSEPVIKCEAVYKIFGENAKKMLKDSNGNVDAKTFQENGCIVGVNNASFEVSKGEMLVVMGLSGSGKSTLLRCISRLTDATGGKIFIEGQDLLQLNNKELIELRRNKMGMVFQSFALLPHKTVVENIAFPLQIKGIKTEDSISKAMDMVKLVGLDGRENYFPRELSGGQQQRVGIARSLAVEPDIWFLDEPFSALDPLIRKEMQDEFLRLQDKLQKTIMFITHDFDEALKLADRIAIMKDGIIEQLDTPANIVLNPATEYVRKFTEEVPREKVLLIKDVMDPSTTDNLGDLKVLKDEIIE

SEQ ID NO: 143294 - protein, 165 aa, Unknown
  Bacterial polypetide isolated from the Sargasso Sea
LLLMDEPTNHLDMDMRQALTVALQGFGGAILLISHDRHLLANTVDEFLIISNGILDNFKGDLEDYRKSVLKNSSPKNEKKHKKEKGLPQIDRKQIKNEIIAVEKILKRLNRKLKEVEKSLNDPKSYEKDEDLDFHALLRDQVSLTNEIELSEEQWLDLNQKLEEG

SEQ ID NO: 143295 - protein, 117 aa, Unknown
  Bacterial polypetide isolated from the Sargasso Sea
RADELSGGERQRVGVVRALMQDPEILLADEPTASLDPKTSEQIMGLLRDLAGELKLPVLINIHNVTEAKIYTDRIVGMRYGRIIFDDTPDKLDQEAMDQIYSGSPHADRSEDLKEAS

SEQ ID NO: 143296 - protein, 214 aa, Unknown
  Bacterial polypetide isolated from the Sargasso Sea
SCSIKVNKGEIVAILGPNGAGKSTAMKAMLGLLKLKSGNISIDGEDISSLSPQERVKKGISFVPQTRNVFAELTVRENLEIGAFLRTDDIYKVIDEIYDLFPILKEKKDQIVGQLSGGQRQQVALGRALMIKPSVLMLDEPTAGVSPIVMDELFEHILRVKETKVGIIMVEQNAKQALSISDRGYVLVTGENKFEGSGNELLNDPEVRRSFLGA

SEQ ID NO: 143297 - protein, 262 aa, Unknown
  Bacterial polypetide isolated from the Sargasso Sea
MTDAVIKCESVYKIFGANAKKLLQEANGNVDAKAFQKMGCIVGVNNASFEVSKGEMLVVMGLSGSGKSTLLRCISRLTDATDGKIYIEGQDLLSLKNKELIELRRNKMGMVFQSFALLPHKTVLENIAFPLQIKGIKTEDSINKAVDMVKLVGLEGRENYFPRELSGGQQQRVGIARSLAVEPDIWFLDEPFSALDPLIRKEMQDEFLRLQEKLKKTIMFITHDFDEALKLADRIAIMKDGIIEQLDTPAKIVLNPATEYVK

SEQ ID NO: 143298 - protein, 312 aa, Unknown
  Bacterial polypetide isolated from the Sargasso Sea
PCALGLATPTVITVASGEAAKRGWLFKGGDVIEMASKINQIIFDKTGTLTIGRPLVVGFWEYKDTERNVMLKLAASIEKDSRHPLAQAIIQEAHKKEIKLEKVSTSTTHAGKGLAGKINNLEGLIRVGTPEWIKSEGIEWNEVIEYNFKISKTKAQSIVAVALDNKLLGFFLIDDQVRKDAFLSINKLRSKGFSLSLFSGDRDSAVLSLGEKLGFNTKQIECQMLPSDKLNKLNLLKNNGLVAMIGDGINDAPALAASDLGVAIGTGTQIAQDSADLVLLGENLEALPNALELSKHAMLKIKQNLAWAFGYN

SEQ ID NO: 143299 - protein, 192 aa, Unknown
  Bacterial polypetide isolated from the Sargasso Sea
KLSEGEIIIDNKNLESFKRDEILTRINFCSPYIELPKKLTVRQNLEVYGRLYGVKNLNKRILEISEDLDIKNFFKRKTGELSSGQKNRVSLAKSLINKPEILLLDEPTASLDPDIGDFVRSYIQEYRSKNQVTVLLASHNMNEVERLCDSIIMMKKGKIIDRGTCKEIIKKHGRNNLEETFLKLARSRDELQ

SEQ ID NO: 143300 - protein, 206 aa, Unknown
  Bacterial polypetide isolated from the Sargasso Sea
MKINNLSSFYKKKKILNDISINVKEGEIVGLLGPNGAGKTTCFQCIAGLQNISHGNIKLNDFNITNLPIYKRAKLGLNYLPQETSIFRGLSVEQNILSIIQLNNSNNDKQNNEFLNELLNEFSLDHIRNASALTLSGGERRRVEIARALASKPKFLLLDEPLAGIDPIALIEIKNIIFKLKEKNIGILITDHNVRETLNTVNRSYI

SEQ ID NO: 143301 - protein, 257 aa, Unknown
  Bacterial polypetide isolated from the Sargasso Sea
MAIIKKFRIKSFKKVHPAVKIEKISLSYGKRQILDDISFNINQGEILGLLGPNGAGKSTIFNLITGLIKPDYGKIIFEKTDATNFPIYTRTEKFKIGYVPQHGGYFHDLTLLENLSAIGEILIKDANSRNSKISDLISRFELESLTNVKARFLSGGQKKKLIIALALLGNPKLLLLDEPFAALDILTIKTLQQIIVDLQTENNIAIVLCDHQARDLLSCVDVAIVLSNCKIVAKGSPSNLVKDADAKSAYFGDKFNY

SEQ ID NO: 143302 - protein, 219 aa, Unknown
  Bacterial polypetide isolated from the Sargasso Sea
MQLLPYPIAFHSKDSSINFQGIELINLPKKELENIRGKRISMIFQEPMTSLNPFIKVGKQIMESIQVHNKSSNKEAKEKAIDLLRKVEMPNPEQKFSSFPHQLSGGQRQRVMIAMALSNNPEILIADEPTTALDVTVEKELLILLNKLKEEENLSIIFITHDLNVVKRFADKVLVMNQGNVIERGTTAEIFSNPKDSYTKRLIESIPEPKEINNVSDSK

SEQ ID NO: 143303 - protein, 275 aa, Unknown
  Bacterial polypetide isolated from the Sargasso Sea
TYALNPFSMTWENGKRYAILGPSGCGKTTMLNIVSGLVRPSKGEILFDETPVTDLKTEDRNIAQVFQFPVIYNTMTVYDNLAFPLRCREFTKEKIEERVKAVSDTLNLSSFLNSPARKLTADQKQLISLGRGLVREDVAAVLMDEPLTVIDPDLKFRLRRNLKEINEQYKTTLVYVTHDQNEAMTFAENIIVMDQGEIVQVGLPKDLFEKPKTTFVGYFIGSPAMNIFHSTVSSDHEVKINDTTIKTNSNLGNLKDKNVKLGIRSEFIELAEKEK

SEQ ID NO: 143304 - protein, 194 aa, Unknown
  Bacterial polypetide isolated from the Sargasso Sea
MEIKNFSKTKLVKDNNYLRVNNLSSFYKKKKTLNDISINVKEGEVVGLLGPNGAGKTTCFQCIAGLQNVSHGNITLNDLNITNLPIYKRAKLGLNYLPQETSIFRGLSVEQNILSIMQLNKSKNDLQNSEFLNELLNEFSLDHIRNASALTLSGGERRRVEIARALASKPKFLLLDEPLAGIDPIALIEIKNII

SEQ ID NO: 143305 - protein, 253 aa, Unknown
  Bacterial polypetide isolated from the Sargasso Sea
NLSYKPDDQYHLNEVSFNFKEGNLYTILGRTLSGKTTLLKTIAGLLTPDSGEIEFDGKNFLKIPVWERNVAMVYQQFINYPHLNVFENIAFPLKQRKMDQSIINEKVMDALKSVGLLGYENRKIQELSGGQQQRVSLARSLVKNAKILLLDEPLVNLDYKLREQLREEFKNLFSKGLADETILIYSTTDPRETMELNGEVIVLDEGKVLQVGPAKEIFENPNSLKVAEISNDPPMNIIEAKISDNNIQFEGID

SEQ ID NO: 143306 - protein, 234 aa, Unknown
  Bacterial polypetide isolated from the Sargasso Sea
AFFEGNKMTGGYGDGPDIINSCTINVNKGEIVAILGPNGAGKSTAMKAMLGLLNLKSGNVLIEGEDISKLSPQERVKKGISFVPQTKNVFAELTVRENLEVGAFLREDDVLKVIEEIYDLFPILRDKKDQIVGQLSGGQRQQVALGRALMIRPSVLMLDEPTAGVSPIVMDELFEHIIKVKKTDVAIIMVEQNAKQALSISDRGYVLVTGENKFEGSGKELLNDPEVRRSFLGA

SEQ ID NO: 143307 - protein, 204 aa, Unknown
  Bacterial polypetide isolated from the Sargasso Sea
MTDTVIKCDSVYKIFGTNAKKMLEEANGNVDAKQFQENGCIVGVNNASFEVSKGEMLVVMGLSGSGKSTLLRCISRLTDATDGKIFIEGQDLLSLNNKELIELRRNKMGMVFQSFALLPHKTVLENIAFPLQIKGVKTQDSINKAMDMVKLVGLDGRENYFPRELSGGQQQRVGIARSLAVEPDIWFLDEPFSALDPLIRKEMQ

SEQ ID NO: 143308 - protein, 235 aa, Unknown
  Bacterial polypetide isolated from the Sargasso Sea
NLILGIDEAMSYSNLEKKLENISSQYNLPLDLDAPITSLSAGEKQRVEIVRILLQDPQILIMDEPTSVLTPQEVESLFVTLNALVKEGRTILYITHKLEEVISICDTVTIMRNGEVIDTSSTSNFTAKTLATKMLGQKLDDLKTNYDHIKEEYNFEVNNISCEFNDPFLTDLKNISFKVRVGEIYGIAGVAGNGQSELMDVLTGENIKISSGEIIFNKNKIQSLGPQKRRDLSIA

SEQ ID NO: 143309 - protein, 294 aa, Unknown
  Bacterial polypetide isolated from the Sargasso Sea
DMKIHAFLPNRIDAQITLQPASRFIGVTGPSGAGKSSLFRALAGVEKRAKVAKSWSFEKIGIVFQQPMLFPHTNVRGNLALAQRHASPNALSVEASVKGCYCEHLLEKPIDSLSGGEAQRVAIARALVNGPSVLLLDESLSAIDIFTRRKIYQFLNTLCVSGQLTCFVISHDLDDLALFSDELVYVEQGKVSLCGATTDVLSQVFEKEGVAIPSAVLEGQKCSESVTQVENMHGIARVMVAGHEVFVTEEAISYTENIKSAYRAHSITEVSNPEQDNGPAPVRFAVKACDVSVD

SEQ ID NO: 143310 - protein, 64 aa, Unknown
  Bacterial polypetide isolated from the Sargasso Sea
LVGSGEDKVHLCIVLTSDRGLCGGFNSNIIKKAKLFFQKILNENKTLKIITVGLKGYDQLKSRV

SEQ ID NO: 143311 - protein, 178 aa, Unknown
  Bacterial polypetide isolated from the Sargasso Sea
MDLVANNLSYKPDDQYHLNEVSFNFKEGNLYTILGRTLSGKTTLLKTIAGLLTPDSGEIEFEGKNFLKIPVWERNVAMVYQQFINYPHLNVFENIAFPLKQRKIDQSIINEKVMDALKSVGLLGYENRKIQELSGGQQQRVSLARSLVKNAKILLLDEPLVNLDYKLREQLREEFKNL

SEQ ID NO: 143312 - protein, 250 aa, Unknown
  Bacterial polypetide isolated from the Sargasso Sea
FEGQDLTQLDSSELSPLRQKIQVIFQDPYSSLNPRLKIGDTISEPMKVHNIQPDPKLRNKRVAELLNICGLPSVMADRYPHEMSGGQRQRVGIARALSLNPEFIICDEAVSALDVSIQAQVINLLEDLREEFNLTYLFIAHDLSVVRHLCQKVAVMYLGKIVEMADCDELYDNPQHPYTKALLNAVPVPDPEVEKNREHNIMTGEVPSPINPPSGCVFHPRCSLAVESCTSDIPVLEDKHAGHFVACTQV

SEQ ID NO: 143313 - protein, 249 aa, Unknown
  Bacterial polypetide isolated from the Sargasso Sea
FQENGCIVGVNNASFEVSKGEMLVVMGLSGSGKSTLLRCISRLTDATGGKIFIEGQDLLNLNNKELIDLRRNKMGMVFQSFALLPHKTVLENIAFPLQIKGIKTEDSINKAMDMVKLVGLDGRENYFPRELSGGQQQRVGIARSLAVEPDIWFLDEPFSALDPLIRKEMQDEFLRLQEKLQKTIMFITHDFDEALKLADRIAIMKDGIIEQLDTPANIVLNPATEYVRKFTEEVPREKVLLIKDVMDEI

SEQ ID NO: 143314 - protein, 257 aa, Unknown
  Bacterial polypetide isolated from the Sargasso Sea
PDEGQIFWQGQPVHISGPLQARQLGIGMVFQHFSLFESLSVAENIQLALPAGENLAALSDQIRSMSDAYGLAVDPDAYIHNLSVGQQQRVEVMRCLLQNPSLLIMDEPTSVLTPQETEQLFSVLRQFADNGMAVLFISHKLDEIRALTSRATVLRRGYNVGTVDTKQNSNRKLAELMVGHKVFDVKRQSAPDLTKAVCVIKNLQKPKPTAFAVKLQDISITANAGEILAIAGIAGNGQDEIMAALSGEWRPASADVI

SEQ ID NO: 143315 - protein, 144 aa, Unknown
  Bacterial polypetide isolated from the Sargasso Sea
SQALWIGKAEQEEFLNREKVEHIIDFLEIQQIRKTAVGRLPYGLQKRVELGRALAAEPKLLLLDEPMAGMNVEEKEDMSRFILDVNEEFGTTVVLIEHDMGVVMDIADRVVVMDYGKKIGDGSPDEVRSSQVVIDAYLGVSHDT

SEQ ID NO: 143316 - protein, 214 aa, Unknown
  Bacterial polypetide isolated from the Sargasso Sea
MPSLKDIKTQINSVGSTKKITSAMKMVAASKLRRSQEKAEAARPYSSRLEEMLSSLATSASSGEGIIKLLTGTGEDQNYIVVPVSADRGLCGGFNSSINRETFKLVKKLESENKKVQLLPIGKKSRDFFLRTLKENITDSFVDTNVSSAGYNIALEISAKLQSLYFEGKFDKCILVYNKFKSAISQEVTQQQLIPLDISNKNKEDKSNETESSN

SEQ ID NO: 143317 - protein, 227 aa, Unknown
  Bacterial polypetide isolated from the Sargasso Sea
MEDLLKVSNLNTEFKSDYGSKPALNNISFNIKEGEVLALVGESGSGKTVTSLSIMGLLPNNASVENGEITLLSKKNKEINILNLSDEKHNEIRGNDISMVFQEPMTCLNPTMTVGEQILEVIIRHKKISKINAKKEMIGLLELVEIPDPIQRSIEYPHQLSGGMRQRIMIAIALACSPKLIIADEPTSALDVTIQAQLLELLKKLKSSIVTKTSILFITHDLGIVKN

SEQ ID NO: 143318 - protein, 180 aa, Unknown
  Bacterial polypetide isolated from the Sargasso Sea
DAALKDMLRWDIRNALKEAGVPAIWVTHDQEEALSVGDRVGVLKGGKIQQIDTPEQCFSTPNNRFVARFLGEASFIKGTLNNGQALTDIGNVPANGVDCDTGEVEVLLRPDDVLLVQSSIGNNGEVIWVRFEGGSRLCAVKLACETVVTSRVSHEVVVHPGDKVHVSLSTSHPLAAFKSV

SEQ ID NO: 143319 - protein, 250 aa, Unknown
  Bacterial polypetide isolated from the Sargasso Sea
IKNISLSFGGVKAIQNFSFDIKQGEIRAIIGPNGAGKSSMLNVINGFYHPQEGEIWYNGKLRKSLKPYQIAYQGIARTFQNIALFKGMTTLDNIMTGRITHMKTGLLSQAIWWGMAEKEEIENREIVEKIIDFLEIQAIRKTPVGRLPYGLQKRVELGRALAAQPTLLLLDEPMAGMNVEEKEDMSRFVLDVNDEFGTTIALIEHDMSVVMDLADRIVVMDYGKKIGDGTPKEIRGNQKVIDAYLGVSHD

SEQ ID NO: 143320 - protein, 190 aa, Unknown
  Bacterial polypetide isolated from the Sargasso Sea
MEEKKYIKPKLVQVSNCLAIENLSKFIKSKKILQDVNLNVKPGEIVGLLGPNGAGKTTCFQAIAGLITPDHGKIILNHSEITFYPIHKRARLGLNYLPQETSIFRGLTVEQNIRAIIQTSNVNSMNHDQYLNELLTEFGLEHIRRASSLTLSGGERRRVEIARCIASKPKFLLLDEPLAGIDPIALNEIK

SEQ ID NO: 143321 - protein, 271 aa, Unknown
  Bacterial polypetide isolated from the Sargasso Sea
VLCFLGPSGCGKTTTLTMIAGLELPTSGEIYLGDEEVGMLRASERDIAFVFQLFALYPHMNVKNNLSFPLKMQGYSRDEIKTRVQEAAKLLRIDHILNSNISSLSGGDRQRVALGRALVRRPKAFLMDEPLGTLDAEFRELMCLELKKLHLDIGATTVYVTHDQLEAMSLADRIAVMDGGEILQADEPAVIYNKPTTKFVASFIGSPGMNFINIDQGISNEQSTLNIEGTNFNIPKQHEISKGKKILLVFVQKSFSNNEGGLKGSVFGVEY

SEQ ID NO: 143322 - protein, 261 aa, Unknown
  Bacterial polypetide isolated from the Sargasso Sea
KIKDKTNAPELQLQQGRIEFKQVHFSYQPGRPILNGLSFVVEPGQKLAIVGASGAGKSTIARLLYRFYDIQSGSICIDGQDLRDVTQSSLRQSIAIVPQDTVLFNTSIRENIRYGNPEASEAEVDQVIKLAHLDSFIQSLPQGDQTLVGERGLKVSGGEKQRIAIARVLLKGSPILIFDEATSALDSHSEAAILKALRELAKHHTSVVIAHRLSTITDADKILVLQQGEVAEAGTHQQLLAQQGLYAQLWAKQQEAKPKAE

SEQ ID NO: 143323 - protein, 230 aa, Unknown
  Bacterial polypetide isolated from the Sargasso Sea
MLRTENITSFYGEIQALNGLTLEAQKGEVTCVLGPNGAGKTTTMFTIAGILKSRTGSIFLEDEELTRESAQSIVKKGVALVPENRLVFPQMSVEENLYAGTFTRSSNDPSIENDILKMYQRFPPLEGRRDQLAGTLSGGEQQMLAIARAMMAKPKILLMDEPSLGLAPLVVKEIFNIIRQLNEEGVTILLVEQNARMALKIAHKVYLLEKGKVSFSGSPEGIHQDEVIKR

SEQ ID NO: 143324 - protein, 215 aa, Unknown
  Bacterial polypetide isolated from the Sargasso Sea
MKNSIEVINLSKKYKDKEAVANINFKINENEMVGLLGPNGCGKTTTIGMILGLLKPSSGEVLINGENIEKNKISLLHKMNFISPYIELPKKLKVKQNLIVYGKLYNIQNLNDRIDHLANKLRLKDLLNKITGELSSGQKNRVSLAKALINDPTVLLLDEPTASLDPETGDFVRSFLEEYKKEKKISVLLASHNMEEVKRLCSSVLMMKDGLIVDR

SEQ ID NO: 143325 - protein, 138 aa, Unknown
  Bacterial polypetide isolated from the Sargasso Sea
MAKSAKKSKIVIRIEDMHKWYGQFHALKAIDLEVTQGERIVICGPSGSGKSTLIRCINRLEVHQTGTISINGTELSGDLKNLETIRSDVGMVFQSFNLFPHLTVLENCTLAPIWVRKLPKKEAEELAVEYLTRVKIPE

SEQ ID NO: 143326 - protein, 220 aa, Unknown
  Bacterial polypetide isolated from the Sargasso Sea
MVRNPVGFLMDEPLSNLDAALRVHMRSELSELHKALGSTFVYVTHDQAEALTMSNRLAVMMDGNILQLGKPREIYEKPSDIRVAEFIGSPKINIFSCNVIKSNQVEICGFKIQGNFQHFMDKKISIGIRPEHLSLTNDRNCIKGIIKHRENLGSDFFMHVESPNIEKRIILRVSPEEALNLQVDAKVNFNFSQKYALFFNSAGKRVEVFDPNNITNKKIA

SEQ ID NO: 143327 - protein, 149 aa, Unknown
  Bacterial polypetide isolated from the Sargasso Sea
MPNLKDLKVRINSVQSTQKITSAMKMVAAAKLRRAQEQAEEARPYSQRMDRMIAALAGKMSNVGGPALLAGTGSEEKFLLVVMTADRGLCGGFNSSIVRATRKRIAELQENGKSVKLLCVGKKGADQLRRDASDLITDALEGISKGAIE

SEQ ID NO: 143328 - protein, 100 aa, Unknown
  Bacterial polypetide isolated from the Sargasso Sea
SSGEQQRVALARAMAPNPKILLMDEPFGALDKELKVRLRSETNKILRDNLTTTIIVSHDTEDALAMSDRVLIMKDGNFIQNGKPEDVISISSTASQKNLI

SEQ ID NO: 143329 - protein, 242 aa, Unknown
  Bacterial polypetide isolated from the Sargasso Sea
MKNSIEVINLSKKYKSKNAVSNINFKIGENEIVGLLGPNGCGKTTTIGMILGLLKPTEGEVLINGKNIEINKIPILHKMNFISPYIELPKKLKVKQNLIVYGKLYNVHDLENRINYLSDKLRLTDLLDKITGELSSGQKNRVSLAKALINDPTVLLLDEPTASLDPETGDFVRTFLENYKKEKKISVLLASHNMDEVKRLCGSVLMMKDGIIVDRGTPKDLILKHGRKNLEEVFLEIARNKR

SEQ ID NO: 143330 - protein, 313 aa, Unknown
  Bacterial polypetide isolated from the Sargasso Sea
RIYSLPEMSEEESLKVSDLEIEFSELGGYTSEADANKLLIGLGIPIESHDKLMSSLEPGLKLKVLLAQTLFGNPDILLLDEPTNNLDLNSIKWLEEILKKSNSTMIIISHDRQFLNNICSNIADLDYGEIRLYPGNYDDFMFASTQARQQLINENKKKTEKIEELKAFARRFSANASKAKQATSRLNQIDKIKLVDIAKSSRVYPFIRFEQNTKLYSNVLDVKNLSKKYDDLEVLKKINFSVEVGDRIAILGANGIGKSTLLNCLMDDTFKDSGDTNWAINAEIGYFAQDSDEKVDSELSLIEWMKTYADPVM

SEQ ID NO: 143331 - protein, 174 aa, Unknown
  Bacterial polypetide isolated from the Sargasso Sea
NRINLLKKMNFISPYIELPKKLTVKENLMVYGKLYSVYGINNRIDYLTETLRLSEFINKKTGELSSGQKNRVSLAKALVNDPDILLLDEPTASLDPETGDFVRTFIEKISSEKKMSILLASHNMNEVKRLCKSILMMKDGKIIDRGTPSEIINKHGKKNLEEVFLKLNRTKNEL

SEQ ID NO: 143332 - protein, 172 aa, Unknown
  Bacterial polypetide isolated from the Sargasso Sea
MSSIIEVKNVSKSFGGVKANVDITLNVKKGSITGIIGPNGCGKTTLFNSIVGSHPIDSGSIRFDDKEISHLLVGDIARLGMLRTFQQTRIYQKMNCVDNMQISVSHRKDSKNGIFASRKGEIQDRADDLLEFVGLYSKRNLISGDLSFGQQKLLEFAMALIKDPKVLLLDEP

SEQ ID NO: 143333 - protein, 196 aa, Unknown
  Bacterial polypetide isolated from the Sargasso Sea
MNKFKVLDDGLVINKISKSFGNKQVVRDVSININKGEIVGLLGPNGAGKTTTFYIIVGLLKPDAGSIILDKSDVSNLPIYLRGQKGISYLPQEPSIFRGMNVEDNLMSIIEIIEKDKSRHQIILENLLNEFDINHVRKSKSIVLSGGERRRLEIARTLASKPNYLLLDEPLTGIDPVSIEEIKLIIKKLKNKNIGV

SEQ ID NO: 143334 - protein, 104 aa, Unknown
  Bacterial polypetide isolated from the Sargasso Sea
RVSLAKSLINKPEILLLDEPTASLDPDIGDFIRSYIQEYKLRNKITILLASHNMNEVERLCDNVIMMKRGKIIDHGTCKELINKHGRNNLEETFLKLARSKDEF

SEQ ID NO: 143335 - protein, 185 aa, Unknown
  Bacterial polypetide isolated from the Sargasso Sea
LSGPSGSGKTTFLNVFGLIEDIQGGDIEFEGKRFRNLSEEDKNYIRRNQVGFIFQHFNLFPVLSAEENIEFFLVRQGVEKKERKELVHKALKDVGLWDHRDKRPLEMSGGQRQRVAVARALTKRPLVIIGDEPTASLDQKTGKEIVNLLKNLSDEYGASIILSSHDTMVHEFAEELVILKDGRLT

SEQ ID NO: 143336 - protein, 248 aa, Unknown
  Bacterial polypetide isolated from the Sargasso Sea
MNIEIENLSLTIRNSNILSGINALVPSGSVTAVLGANGSGKSSFLKCLAGLIAYDGEIKTRFEKFGKISYVPQRPAVPVGMTLAEFVLLGRSEYTKWYVSETSSDREKCKDAISSLSLSQLADRFVETLSGGELQRAVLARAVAQEATLLILDEPTSALDIVNQVEVMSYLVTLQKKHKLTIIVALHDLNLALNYSDRTLLLKDGGMIGFGKTKSVMSAQKLSEVYKSPIEIRSHEDGNQTIFVKYSL

SEQ ID NO: 143337 - protein, 204 aa, Unknown
  Bacterial polypetide isolated from the Sargasso Sea
QNYINRNDAWINKANYRRYIIQDKNINTFQRNTLLSIMNFASPYVELPKKLSVKQNLQIYGRLYGVKDLSLRIDELAEDLNLKDFLNKKTGELSSGQKNRVSLAKSLINKPEILLLDEPTASLDPDIGDYVRSYVQSYKSKNKVTILLASHNMAEVERLCDSVIMMKKGKIIDQGTSKEIINRHGRTNLEETFLKIVRSKDEVA

SEQ ID NO: 143338 - protein, 109 aa, Unknown
  Bacterial polypetide isolated from the Sargasso Sea
MNDTSQSFVKFEKIDKSYDGEVLVVKNLNLDIAKGEFVTMLGPSGSGKTTTLMMLAGFETPTNGEIFLDTKPISKIPPYEREIGMVFQNYALFPHMTVAENLSFPLEVR

SEQ ID NO: 143339 - protein, 209 aa, Unknown
  Bacterial polypetide isolated from the Sargasso Sea
MSEPVIKCQSVYKIFGANAERMLKEANGNVDAKTFQENGCIVGVNNASFEVSKGEMLVVMGLSGSGKSTLLRCISRLTDATGGKIFIEGQDLLNLNNKELIELRRNKMGMVFQSFALLPHKTVLENIAFPLQIKGIKTENSINKAMDMVKLVGLDGRENYFPRELSGGQQQRVGIARSLAVEPDIWFLDEPFSALDPLIRKEMQDEFLR

SEQ ID NO: 143340 - protein, 221 aa, Unknown
  Bacterial polypetide isolated from the Sargasso Sea
EKGRPYSDKMNNIILNLSNSITDKENAPKLLVGSSENKTHLCIVMTSDRGLCGGFNTNIIKKAKSYFQKILDQGKTLKIITVGSKGYDQLKRAYKDNIIEKISFKESKHVNYFDADKVGKIIIDKFEKKEFDVCTIFYNQFKNVITQIPQEQQIIPLKTSHSEGSSSEDNYEFEPEEDEILSNLLPKNISTQIFKAMLENSASEQGSRMSAMDNATRNAGE

SEQ ID NO: 143341 - protein, 233 aa, Unknown
  Bacterial polypetide isolated from the Sargasso Sea
WENGNRYAILGPSGCGKTTMLNIVSGLVRPSAGRILFDDKDVTDLKTEDRNIAQVFQFPVIYNTMTVYENLAFPLKCRDFSKSKTDERVNSVAETLNLKSFLNSPARKLTADQKQLISLGRGLVREDVAAVLMDEPLTVIDPDLKFRLRRNLKEINEQYKTTLVYVTHDQNEAMTFADNIIVMSEGEVVQTGSPKELFERPNTTFVGYFIGSPAMNLFESEASKNDSVKINNT

SEQ ID NO: 143342 - protein, 279 aa, Unknown
  Bacterial polypetide isolated from the Sargasso Sea
ALSGGWKMKLALARAILMKADILLLDEPTNHLDVKNVAWLEDYLISQTTVSSMIVSHDSGFLDRVCTHIIHYETRKLVTYKGNLTEFIRQCPAAKKYTELSNDELKFIFPVPGFLEGVKNKDKAIVKANNCHFTYPNTDRQIISGASIQLSLSSRVACLGPNGAGKSTFIKLLTGEAEPDIGTVWRHPNMRYAYVAQHAFHHVEQHLEKTPNEYIRWRFQTGEDKENLTKVTAQYTEEEERLMKEKIPVPQEDGSILKLVVEKILSRRQKKSKYEYEVQ

SEQ ID NO: 143343 - protein, 116 aa, Unknown
  Bacterial polypetide isolated from the Sargasso Sea
KYETKITERGSNFSGGQVQRIAIARAILGNPSILLLDEATSALDAESESEVQEGLNRAMKNRTVIVIAHRLATTQEADKIVVFDKGEIIDVGKHIDLINKKGVYKELCENQLIKKL

SEQ ID NO: 143344 - protein, 219 aa, Unknown
  Bacterial polypetide isolated from the Sargasso Sea
TAILGPSGCGKTTLLKVIAGLIKPSEGLVKVKGKEIAGPGTDRALVFQDFALLPWANVLQNVGFGLRARGIPKKEREETALHYIKEVGLLGFEDKYPHQLSGGMRQRTGLARALTVNSDILLMDEPFSAVDEQMRRKLQEDLLTLLKIERKTVIFVTHSIEEAVYLADQVVILSGRPGSIADIVHPEIDRLGEIELIRRQPRYMELVDEIWSSLKRYVE

SEQ ID NO: 143345 - protein, 237 aa, Unknown
  Bacterial polypetide isolated from the Sargasso Sea
MAAKSISKSFDKRVILRKIDIHLNKGEMLGLLGSNGAGKSTFMNIVLGLLKCDFGDIFLGNTKLTNLAIHERSKLGIAYLPQQTSIFRGLTVYENLLGIAQIVKKKTSDQRDIVEKLMAEFSITHLRDVKATALSGGERRRTEIARCLINNPKVLLLDEPFAGVDLLSIQDIKGLLMKLQSRGCAVLVTDHNASQLLSVVDRAYVIANGTIVANGTPRQIVNTSEAKKLYFGEDFTF

SEQ ID NO: 143346 - protein, 274 aa, Unknown
  Bacterial polypetide isolated from the Sargasso Sea
MLSKPSLLLLDEPTTALDVTVEAGIINLVKNLSKEIGTSMLFVSHNLGLILETCNRITVMYSGETVETGEITEVFRNMRHPYTQGLLRSIPLPGKNKYDAPLEAITGQLPLPHERPNGCNFGPRCPHFEENICSSNMIQMELINNNNDHYSRCAKINKINWNIKNKSSKKSPVGSSGGTLLKIQNLSKDYDVAANVVFGGKKKGTIKANVDLNFDAKVAETLAIVGESGCGKSTFAKVLLGLEEASSGKVEFENIDISNTTVEQRENLQFHQFK

SEQ ID NO: 143347 - protein, 183 aa, Unknown
  Bacterial polypetide isolated from the Sargasso Sea
MTTLISTSSISYDLTSCRLFDGLSFTIKKGDRIGLIGSNGCGKSTLLRLLNKDLPDYVGSVSFASYAEVALIEQHLPKRLLTMSMLDSVVDNLPTEIQLSEQWRAQIILSNLGFDESYWEQPIGTLSGGQYARVLVARALIVEPDVLLLDEPSNHLDLPTLLWLEQFLMDWKGTFVMVSHDQR

SEQ ID NO: 143348 - protein, 120 aa, Unknown
  Bacterial polypetide isolated from the Sargasso Sea
YLEGLVCTYRELTGSRFPFDEEKFREKAQEGIDHGHNPFPGHGAAVSSSPHRKDRLKDINLPTLVIHGTEDAILPFDHGQALADGIPNSELMTLEGVGHEIPEQLNDEIVTKLIEHFNKA

SEQ ID NO: 143349 - protein, 212 aa, Unknown
  Bacterial polypetide isolated from the Sargasso Sea
ILEIKDLNHSYGKSDLTIKDLNLNISIGERVSILGPSGCGKSTLLRLIAGLEKPNNGEIIKKAEVMTSDKIFIPPEKRNVGLVVQEKALFPHLSVYENICFGIQKNKDKNKTVSDLLELLKIDSLQNKYPHEISGGEQQRVALARSLAPNPDLLMLDEPFSALDEELRKSLYEEVSNVFSDRNSSILLVTHDAYEAEVMTDKQLRMEKGNLI

SEQ ID NO: 143350 - protein, 74 aa, Unknown
  Bacterial polypetide isolated from the Sargasso Sea
QQRVAIARALAVRPKLLLADEPTGNLDESTASAVLTAMLDLVGRTGAALMVVTHSAALAGKMDRRVRLKGGVLL

SEQ ID NO: 143351 - protein, 213 aa, Unknown
  Bacterial polypetide isolated from the Sargasso Sea
FSYDKSSKQSLQNINFSISHGSKIGLIGSTGTGKSTLVDLILGLLEPTSGEISVDDVNIKKNIKGWQGNIGYVPQSIFLIDDTILNNIAFGIQEKDIDLNRFDKSIKDAKLYDFVYSLPEGFNTKVGERGVRLSGGQLQRIGIARALYNNPKFLVLDEATSALDVNTEKEIMDAIYKNIKDKTIFIITHRLSTLNQCDFIYKIINGKLVSEKI

SEQ ID NO: 143352 - protein, 75 aa, Unknown
  Bacterial polypetide isolated from the Sargasso Sea
VQQRVAFTRAWILKPKVLLLDEPFANMDFESREKACDSLKHMKSDGMSIVITSHHNNIIDGLIDSHFFLSNGKLC

SEQ ID NO: 143353 - protein, 235 aa, Unknown
  Bacterial polypetide isolated from the Sargasso Sea
MKKYYLELQGLYKSYFDGSGDHHILKGADLKIQRGETVAILGSSGSGKSTLLNLIAGIDLPDQGEVRIDGKSLGQMSEKNRTLLRRRTMGFVFQSFNLIPTLNVYENLMLPLELNQISKNSGIISQMLEALGLEGREESYPDRLSGGEQQRVAIARALMHQPSLLLADEPTGNLDAETSQETLKLINNLVHRSRTTMIMATHSQEVIEWVDRVLGIEDGKLIELKTSEAIQKLAS

SEQ ID NO: 143354 - protein, 86 aa, Unknown
  Bacterial polypetide isolated from the Sargasso Sea
RALYHDPQILILDEATSALDNFTEKAVMDAVDNLSKKITIIMVAHRLNTVKKCDKIFLLENGKLKNQGTFEELIKIDDNFRVTANS

SEQ ID NO: 143355 - protein, 205 aa, Unknown
  Bacterial polypetide isolated from the Sargasso Sea
CGKTTTIGMLLGLVTPTSGEITIEKKNINLFKRDDILKRFNFASPYVELPKKLTVKQNLEIYGRLYGIKNLNDRINEISNDLDIKNFFERKTGELSSGQKNRVSLAKSLINNPEILLLDEPTASLDPDIGDFVRSYIQDYKSKNKVTILLASHNMAEVERLCDGVVMMRKGRVVDNGTCKELITKHGRNNLEETFLKLARSKDEF

SEQ ID NO: 143356 - protein, 207 aa, Unknown
  Bacterial polypetide isolated from the Sargasso Sea
FAVRGGECLVLHGQSGAGKSTLLRTLYGNYLAAGGSIRIRHQGSPVELVGAEPRQVLAVRRQSLGYVSQFLRVIPRVSTLDVVMEPALSRGWARGDAEARAKALLGRLNIPEALWQLAPGTFSGGEQQRVNIARGFMVEWPVLLLDEPTASLDDANRQVVLELILEAKAAGSALIGIFHDRIAREAVADRYLDMSAAAAQPEYVYVV

SEQ ID NO: 143357 - protein, 274 aa, Unknown
  Bacterial polypetide isolated from the Sargasso Sea
YPHLNVYENIIFPLKQRKLSEEQIKMDVEDALKTVGLVGFENRKIQELSGGQQQRVALARSLAKKAKILLLDEPLVNLDYKLREQLREEFKRIFSAGLSQDTILIYSTTDPQEVMELNGEVIVLHEGKVLQKGDAKEIFENPKNLRVAEISNDPPMNILTGIKSSDKLTFENISINLPAYLKDLKSQNYYFGIRASEIKLDKEGEEFEIELAEISGSETLLHLKKGNSKVIALIEEVMNFKIHEKVKVKFNENKFYVFNNNEELVSSPYGVNNG

SEQ ID NO: 143358 - protein, 163 aa, Unknown
  Bacterial polypetide isolated from the Sargasso Sea
LVNEFLIEEEMENWHSKVFFTPQDIYLIDDTLENNIALGQEDKNIDLSKLKNSIKFAELGSLIEGREENYRMHIGDKGLKISGGQKQRIAIARLFYFDSEFVILDEATSALDEETEKLIYKKIFDFLSNKTAIIISHNENNLKNCSKIYELKNGKLVIEKHDS

SEQ ID NO: 143359 - protein, 280 aa, Unknown
  Bacterial polypetide isolated from the Sargasso Sea
VRLTLARTLMQPSDLLLLDEPTNHLDLDAIVWLADWIKSFKGALILISHDREFLDECVNTIAHIYRQSIELYTGNYSQFEEVKALRLAEQAATFKKQQREIAHMQDFVRRFKAKATKARQAQSRVKALERMEVIAPAHVDSPFHFNIPQSDKISDPLLTLDGATLGYSSAVLENINLSLHPGDRIGLLGPNGAGKSTLMKSLVASIPLLDGHRFEGGNLKLGYFSQHQVDDLDLSKTAYQCIQQLDPEKTEQQVRTYLGGYDFKNDKVKDPIKLFSGGEK

SEQ ID NO: 143360 - protein, 297 aa, Unknown
  Bacterial polypetide isolated from the Sargasso Sea
DTYIGLIFKKLGYIDENELFRYISLQMKIPFINLRYYEIDTSVIDLIPEKIARNHKILPLFRLKNSLNIAIIDPLDSTSINAARDTTGLDIESVIALESEVENAIDLHYGISNYVNENSADGNSTDIAELFDETRIVELVDSIISQSHRYQSSDVHIEPRENDIRIRFRIDGRLQDFQVLPKDIQTAFLSRLKIMSNMDIAETRRPQDGRILFKSESGRLDLRISTYPTLYGEKAVLRLLNLAEALFSLNDLGFEKDIARKFNNMLIGGEGIILVSGPTGSGKTTTLYSTLNRLEKP

SEQ ID NO: 143361 - protein, 96 aa, Unknown
  Bacterial polypetide isolated from the Sargasso Sea
MIKKQSVLSCKNLSKSFNSTLAVNDVSLDLFEGETLGVLGSSGCGKTTLLRLIAGLETPDQGEIKISNSIVQNPQTNIPTHKRNLGMVFQDYALFP

SEQ ID NO: 143362 - protein, 77 aa, Unknown
  Bacterial polypetide isolated from the Sargasso Sea
MNDVIDLQEAVVTLGQFPALTGVTLKVAKGEIVTIKGPNGAGKSTLLRLCAGLLPVREGSAYVLGENLNANRRAIRQ

SEQ ID NO: 143363 - protein, 309 aa, Unknown
  Bacterial polypetide isolated from the Sargasso Sea
GECITTHAYIPNADLKDKVIALLKDVKLDDPERRINHYPHQLSGGQRQRVMIAMALSNKPKLLIADEPTTALDVTIQKEILDLLHSLRASYNLSILFITHNLKIVKNLADRLYIMKEGEIIESGKTEDVFKKPTHAYTKDLIEPKIKIIKSRLNTSKILLSAENLSVKYKGPRSLFRSSSKDFCALNKVFLNIKLGETLGVVGESGSGKTSLALSILKLVDYQGVIKLHLPEPRLRKKERLKNYRRNVQIVFQDPFSSLSPRLSIRDIIGEGIISHRIFSKEQVEEKILLALSRVDLDKDTLGKYPHEF

SEQ ID NO: 143364 - protein, 217 aa, Unknown
  Bacterial polypetide isolated from the Sargasso Sea
SCERPRIFLFDEPLSNLDAKLRVEMRREIKKLHQQLKTTVVYVTHDQTEAMSLGTNIAIMNHGVIQQNDTPENIYNKPSNTFVADFIGSPSMNLIKGNLKESSNKISFIANGSNIEIPINGYNFNEKSNLNNKEVFFGIRPEHIFFKKSNESDFEIPLKADLSEYIGHEQIMTFDYENQEVLAKFPSTIKIELSKNTNLFFDLTQISLFDAKTEERI

SEQ ID NO: 143365 - protein, 261 aa, Unknown
  Bacterial polypetide isolated from the Sargasso Sea
MKKNVIEVKNLEKYFEVNSGFLNRNKSIVKAVDNISFDIPLGESLGLVGQSGCGKTTTARSLCLLDPKTNGEVKFYNTETKEMDDIDNLDDTDLKKFRRNIQMIFQDPYESLNPRWTIKDIILEPLNIHNIGSLNDREEAVKEILTTVGLTPPENYMPRYPHELSGGQRQRVSIARTLVMKPKFVVCDEPTSMLDVSIRISIMDLMLNLAKDLEVSYLYITHDLAVARYMCNRIAVMFNGKIVEIAETEELLKNPSTSLYQ

SEQ ID NO: 143366 - protein, 255 aa, Unknown
  Bacterial polypetide isolated from the Sargasso Sea
MSVAFRSVEAVRGVSFTIDRGETLALVGESGSGKSVSALSILQLLPYPVASHPTGSIEVAGVQTIGAEESSLREIRGSRVSMIFQEPMTSLNPLHRIEKQIGEILLIHRGIKLADARPRILELLQLVGLQEAELKMKSYPHELSGGQRQRVMIAMALANEPDLLIADEPTTALDVTIQAQILALLTDLQQRLGMAMLLITHDLGVVRKMADNVCVMTDGEIVERGECQRVFNDPQHDYTKHLIAAEPKGKPLPAD

SEQ ID NO: 143367 - protein, 149 aa, Unknown
  Bacterial polypetide isolated from the Sargasso Sea
MRSSDLVHASLSLTNVTLFRTDKLIFRDLNLSLSSGEICILNGPNGAGKTSLLRIIAGYLPLNHGIMSLGGHIFEPLKSNLPIWYIGNPFGFHPNLSAAKNLFQIAMMRKLQMIEEDKFNINEFIKQPIRTLSTGQLQRLALSQLLLRS

SEQ ID NO: 143368 - protein, 231 aa, Unknown
  Bacterial polypetide isolated from the Sargasso Sea
MLIVDSLVKSFGGLLAIDDLSFQVKEGEIHAVIGPNGAGKTTLISQLSGEIKPDSGTVLFDGINISGMDVHLRSSLGLARSFQITNIFLDLTAHDNVSLAVQAHAGHSFKFWKDARKDHELRQPALEFLKQVGLENRAEVVAGQLSHGEHRQLEIAMALATRPKLLLLDEPMAGMGQKESLAMVKIIRELKGKLTILLIEHDMDVVFTLADKITVLLNGRDIATDSPENIR

SEQ ID NO: 143369 - protein, 146 aa, Unknown
  Bacterial polypetide isolated from the Sargasso Sea
FNWVYGKLYNIQNLNDRIDHLADKLRLKDLLDKITGELSSGQKNRVSLAKALINDPTVLLLDEPTASLDPETGDFIRTFLEDYKKEKKISVLLASHNMEEVKRLCSSVMMMRDGLIVDRGTPEDLITKYGRRNLEEVFLEIVRKEK

SEQ ID NO: 143370 - protein, 203 aa, Unknown
  Bacterial polypetide isolated from the Sargasso Sea
TLFNSIVGYHPIDNGSIIFDNNEISKLLVGDIARLGMLRTFQQTRIYSKMNCVDNMQISISHRKDSKDSMFASRKGEIKERAENLLEFVGLYSKRNLISGDLSFGQQKLLEFAMALMNDPKVLLLDEPTAGINPTLINGLIDRLRKANEELGITLCVIEHNMRVIMNLASHIYCLANGKVLANGSPSELQKDQRVIDAYLGGH

SEQ ID NO: 143371 - protein, 247 aa, Unknown
  Bacterial polypetide isolated from the Sargasso Sea
MRRPWPPLQEASVLKIDHLTKTFGGLAAVNDVSTTIEPGKINAIIGPNGAGKTTFFNLISGVHRPSSGTITLQGRDVTALRTDEVARLGVARTFQTTALFDMATVLDNLIVGHRLRTRSGLLDVLCNSRRLREEERICREKARDALDFVGLSHLSHRMAGDISQEERKRVAFALALSTGPSLLLLDEPAGGVNPDETEGLANLIRKMVASGLTVCLIEHKMNMIMSLADKIMVLNYGEKIAEGTPAE

SEQ ID NO: 143372 - protein, 86 aa, Unknown
  Bacterial polypetide isolated from the Sargasso Sea
SPILVFDEATSALDSAAEQAILQAMREVARNHTSLVIAHRLSTITDADNIIVLKNGELAEQGTHDELLAANAEYARMWQLQQKQQH

SEQ ID NO: 143373 - protein, 153 aa, Unknown
  Bacterial polypetide isolated from the Sargasso Sea
MSKKVASLENISKTYGKEDLTVKALDSINLEIYKGDYLAVMGASGSGKSTAMNIIGCLDRPSEGIYKLNGIPVENLSDDELAEIRNQKLGFVFQQFHLLSDATALENVTLPMIYAGIEPEQRLERGKSALKKVGLSERMNNRPNQLSGGQQQR

SEQ ID NO: 143374 - protein, 291 aa, Unknown
  Bacterial polypetide isolated from the Sargasso Sea
LSVAVGLTPEMLPMIVTSTLARGAVKLSKQKVIVKHLDAIQNFGAMDILCTDKTGTLTQDKIVLENHTDISGKVSERVLHCAWLNSHYQTGLKNLLDKAVLEGVDLDAARQLSERWQKVDEIPFDFERRRMSVVVSEQDGVHQLICKGALQEILNVSTQVRHNGEIVPLDDTMLRRIKRVTDTLNRQGLRVVAVATKYLPAREGDYQRIDESDLILEGYIAFLDPPKETTAPALKALKASGITVKILTGDSELVAAKVCHEVGLDAGEVVTGSQIEGMSDDELAALAKRTT

SEQ ID NO: 143375 - protein, 96 aa, Unknown
  Bacterial polypetide isolated from the Sargasso Sea
VKQDWPRILSLGEQQRLAFGRLLLNAPRFAVLDEATSALDVATEDHLYALLRQRELAVISIGHRPTLKDYHDTVLELSGDGGWRLLPATSYDFGRS

SEQ ID NO: 143376 - protein, 316 aa, Unknown
  Bacterial polypetide isolated from the Sargasso Sea
FITHDMGVVQKVADRVVVMLNGKKVEEGTAKEIFLKPKHPYTKALLSAVPKLGSMKGRRLPAKFANIDVKRAEGDEVKDIKDGHQLQDIKDQVNYKSPPLLKVEGLTTRFEIKQGMGGKKGIVHAVQNIDFSMQPGETFGLVGESGCGKSTTGRSILRLTEPTRGNVIFDGVDLSSLTIKELRTYRKQMQMIFQDPFASLNPRMMVGETIAEPIYVHGLAKGKEVTDRVEKLLDRVGLTPDYAVRYPHELSGGQRQRIGIARALALEPKLIIADEAVSALDVSIQAQVVNLMMELQEDLGLSYLFISHDMAVIERS

SEQ ID NO: 143377 - protein, 103 aa, Unknown
  Bacterial polypetide isolated from the Sargasso Sea
MSDTIIKIKDVNKWFGDFQVLKNINLEVSAKQKIVVCGPSGSGKSTLIRCINRLEEHQEGNIVVDGTELSEDTKNIETIRAEVGMVFQQFNLFPHLSILDNCT

SEQ ID NO: 143378 - protein, 172 aa, Unknown
  Bacterial polypetide isolated from the Sargasso Sea
MKPIFTVKDLNISFLQDGARFEAVNSVSFQVNKGETVALVGESGSGKSVTALSTAALLGNAASVDGEINIDGNSVDPKDERALQKLRGSQVSFIFQEPMTSLNPLHTIERQLSETISLHQQLNKEKLRENCINLLEKVGIRDIEFKLNAYPHQLSGGQRQRVMIAMAIANRP

SEQ ID NO: 143379 - protein, 311 aa, Unknown
  Bacterial polypetide isolated from the Sargasso Sea
DLDAPITSLSAGEKQRVEIVRILLQDPQILIMDEPTSVLTPQEVESLFVTLNALVKEGRTILYITHKLEEVISICDTVTIMRNGEVIDTSSTSNFTAKSLATKMLGQKLDDLKTNYEHVKDEFNFEVKDISCEFNDPFLTDLKNISFKVRVGEIYGIAGVAGNGQSELMDILTGENINISSGEIIFNKNKIQNFGPQKRRDLSISFVPENRLGHSAVPELSLSENILLSQFPKNNFLKNGIILKNNIDDYANNVIKNFNVVTPGNDVKASSLSGGNLQKYVIGREISSNPKLLIISHPTWGIDAGAEHAIR

SEQ ID NO: 143380 - protein, 112 aa, Unknown
  Bacterial polypetide isolated from the Sargasso Sea
KITGELSSGQKNRVSLAKALINDPTVLLLDEPTASLDPETGDFVRSFLEDYKNEKKISVLLASHNMEEVKRLCSSVLMMKDGLIVDRGTPEELITKYGRRNLEEVFLEIARK

SEQ ID NO: 143381 - protein, 274 aa, Unknown
  Bacterial polypetide isolated from the Sargasso Sea
SINSKKILNNINFNLNKDSISCILGPSGSGKTTLLKLIAGLDRVQSGKIIINGEEVSSITKHLPTEKRKIGFLFQDYALFPHLTVKQNLEYPINYKNSDYKIEDIIDLIKLPNSLNKFPHELSGGEQQRVALARSIISQPDLLLLDEPFSSLDLNLREEVRDDTLHLLQKSNISVVIVTHDPFEAMFISNKINIMDTSGYIIQSGSPAELYKNPKNSYVTEFFGETNRFSGIVNNSYVNTPIGKIKAPSNLENKNVEIHIRPARCKIKTTTYPS

SEQ ID NO: 143382 - protein, 198 aa, Unknown
  Bacterial polypetide isolated from the Sargasso Sea
MIHFENVGKRYASGREALSGVSFNLEKGDMAFITGPSGAGKSTLLKLIALIERPTRGTVLVDNQNTSRIPRRRIPYFRRRIGIIFQDHKLLADRSIFDNVALPLLISSLRHREVSRRVRAALDQVGLLEHEKFSPLSLSTGEQQRVGIARAIASRPALVIADEPTGNLDPDLSLEIMRLFERFNQVGVTLLIATHDIE

SEQ ID NO: 143383 - protein, 90 aa, Unknown
  Bacterial polypetide isolated from the Sargasso Sea
MQNRLMHYPQQLSGGEQQRVAIARAFACEADVLFCDEPTGNLDSSNSELIANLIFDTFLESSSALIIVTHDISLANRCDQQIEIIDGKVL

SEQ ID NO: 143384 - protein, 296 aa, Unknown
  Bacterial polypetide isolated from the Sargasso Sea
ILGLYAASAFRLIPSMNKITNSLQSVRYAFASIQVLYDDLKDQKTKFNKKNIKIKSINEINKWDSIYFQNVSYKYPNATKNVVKNINIQIKRGSVVGIIGETGSGKSTIVNLISLLLKPSTGEIKIDDFLINSNDFKNQNVKDTWQSRIGYVPQQVYLNDDSIANNIAFGNSEENISLKRVNEVLRQCQLDDLIKDLPNGINTKVGERGIRVSGGQLQRIGIARALYHDPDVLILDEATSALDTETEKKFIESLYSIRMNKTLLIISHKLSILDDCDVVFKLKNQSLYKVDLKNEE

SEQ ID NO: 143385 - protein, 192 aa, Unknown
  Bacterial polypetide isolated from the Sargasso Sea
MNELVLQLEGLEKSFGALRATRDVWLDVEHGEIHALIGPNGAGKTTLVRQIYGSETSDAGVVKLRGEVMNGLTVPQRVARGIGRSFQISNVLMDFTVLQNAILAEQARLGESFRFFRPAFDDQALIDGASVMLDRVGLGDRAATPVADLAHGERRLLELALALAAEPALLLLDEPMAGCGSEETKHMIEILA

SEQ ID NO: 143386 - protein, 81 aa, Unknown
  Bacterial polypetide isolated from the Sargasso Sea
ALINTPDILIVDEPTSALDAKARDSFMDVLKKLAKNSALVFVSHDPYLKKYFSRHMSMHQFTPNHQKVADVSDASRDASPC

SEQ ID NO: 143387 - protein, 115 aa, Unknown
  Bacterial polypetide isolated from the Sargasso Sea
MLIKLKNFQDSYPGGQQQRSALARALCMEPKIMLFDEPTSALDPEMIKEVLDAMVDLAKAGMTMIVVTHEMGFAKEVADNMIFMDEGKIVEKAKTKEFFENPKSERTKLFLSQIL

SEQ ID NO: 143388 - protein, 240 aa, Unknown
  Bacterial polypetide isolated from the Sargasso Sea
IKLLPAFQQIYSSIAIIKANIPAFESIQQDLHDSLHKESKSQQFEQNHLNPKHSISLENITFTYPNKEEPALNKLDMLIPSNSVIGIVGPSGSGKSTLIDILLCLIEPDNGNLKIDDEIINRQNRRSWQNTIGFVAQTIFLSEGTIAENVAFGIPEKQINLSQVQKVLKLAHLSDFISTLDQGIYTKVGERGVQLSGGQRQRIGIARALYHNAEVLVFDEATSSLDGITEKMIMEAIHNF

SEQ ID NO: 143389 - protein, 257 aa, Unknown
  Bacterial polypetide isolated from the Sargasso Sea
MAGSQVPENARPRLVSHTEGLLASGIGKSFNKKRVVRNVSMQLRRGEAVGLLGPNGAGKTTTFHILVGLLPADEGNVQLDGNDITGLPVFQRARLGLGYLPQESSIFRGLTVEQNIRAVLETTDGTKSDHDAILEDLMAEFSISHLRNTSSVNLSGGERRRLEIARALAMRPTFLLLDEPLAGIDPIALTDIRNLIGQLKMHGLGVLITDHNVRETLDIVDRTYIIHDGTVLMEGTPDEVIGHHGVREVYLGDRFTI

SEQ ID NO: 143390 - protein, 211 aa, Unknown
  Bacterial polypetide isolated from the Sargasso Sea
GGLILDGREVAGPGPERAMVFQNHALLPWLSVQQNVALAVGQVEPNRRAVAERVDYYLSLVQMEHASQKMPHELSGGMKQRVGIARALSLSPKVLLMDEPFGALDALTRAHLQDALMAIQAELGNTVIMITHDVDEAVLLSDRIVMMTNGPAATVGEILTVDLPRPRDRVALADDGHYHKLRQQVLRFLYEKQRKVTPLKVAEPVRSQRRA

SEQ ID NO: 143391 - protein, 246 aa, Unknown
  Bacterial polypetide isolated from the Sargasso Sea
DLRIYQNETLGLIGESGSGKSTLGKTMLGLNTYGGNINIFNETLNIEDKKLINNIRKDIGVVFQEPFQSLNPRMKIKNILSEPLVIHNKSITKDEIEIKTQKAMESVLLEKDQLEKYPSQLSGGQQQRIGIARAIINNPKLVILDEPTSSLDLSVRNDVLRLLKNIQSEFGLTYLFISHDIHTIKNISDKIAVMYLGSIMEYGNTNKVISEPKHPYTRALLSSVLSANPDEKREQIKLVGEIPKIT

SEQ ID NO: 143392 - protein, 77 aa, Unknown
  Bacterial polypetide isolated from the Sargasso Sea
QRVAIARALVNNPSILFADEPTGNLDSKTGADVMNLFKELNNQGQTIILITHEDNIAAQSNRIITIKDGLIKSDNIN

SEQ ID NO: 143393 - protein, 193 aa, Unknown
  Bacterial polypetide isolated from the Sargasso Sea
MQDVLICRNINKTYQDGSNATPVLHDVSLSIKAGEHVAILGSSGSGKSTLLHILGGLDKPSSGEVEFNGKSLGQLSGNALAKLRNDHMGFIYQFHHLLGEFTAIENVAMPLRIRGVSSNAALSKAREMLEEVGLSHRIDHLPSAMSGGERQRVAIARALVTEPSVVLADEPTGNLDDSTGEQIYKFATSLSEK

SEQ ID NO: 143394 - protein, 219 aa, Unknown
  Bacterial polypetide isolated from the Sargasso Sea
NIDIQAGERLALVGASGAGKTTLFQLLMRFYDPSSGQILFNGMPINKMPVDVLRRHIAIVTQEPVVFADTVLENIRYGSPNASDDDVINAAKQAFAHEFIDNLDERYNTQLGERGVKLSGGQKQRIAIARAILADRPILLLDEATSALDAMSERMVQQAIDRLMVGKTSIVIAHRLATVQHADRILVMDKGQVVGSGDHASLMKSDTLYREYAELQLLS

SEQ ID NO: 143395 - protein, 217 aa, Unknown
  Bacterial polypetide isolated from the Sargasso Sea
MSETVIKCESVYKIFGQNAKKMLEESNGNVDAKTFQEKGCIVGVNNASFEVAKGEMLVVMGLSGSGKSTLLRCISRLTDATGGKIFIEGQDLLELNNKELIELRRSKMGMVFQSFALLPHKTVVENIAFPLQIKGTKTEDSINRAMEMVKLVGLDGRENYFPRELSGGQQQRVGIARSLAVEPDIWFLDEPFSALDPLIRKEMQDEFLRLQEKLQKT

SEQ ID NO: 143396 - protein, 161 aa, Unknown
  Bacterial polypetide isolated from the Sargasso Sea
MIDFQNVSYTHQKGRGVTNLSFSIDNGEFVFLIGPTGSGKTTLMRLIYFDLFCDSGKINVGDFKSDKMSKNRVPLLRRDIGMVFQDYHLLNDRNVFHNVALPLHVIGCDASEIAYRVEDALDMVGFEGKRTHYPYELSGGEKQRVTLARAIVKEPSIILAD

SEQ ID NO: 143397 - protein, 105 aa, Unknown
  Bacterial polypetide isolated from the Sargasso Sea
MNLADNQIHVNLHYSARENQHRNFRLDVELELPGQGITAVFGESGSGKTTLLRCLAGLEKSAQGIVKMKTEIWQNEEAFLPTNLRHVGYVFQEPSLFPHLTIEKI

SEQ ID NO: 143398 - protein, 255 aa, Unknown
  Bacterial polypetide isolated from the Sargasso Sea
MATIELQNLTKAFGDLIAVDNVSLKVDENEVLCLLGPSGCGKTTTLRMVAGLEVATSGDIFIGNKNVNNLDTRDRNLAMAFQFYALYPSLTVAENLANPLHAENLTGEEIRKKIFEVADILQLRDIVNRKPHQLAEGEKQRVAVGRAIIRDPECFLFDEPLSRLDVQLREQMRGQIKEVLSDLKKATVIVTHDQLEALTMATKIAVMRDGLIEQVSSPHDIFAKPNNTFVAGFIGTPQMNILDCNISEINSSIIK

SEQ ID NO: 143399 - protein, 156 aa, Unknown
  Bacterial polypetide isolated from the Sargasso Sea
KNINGNYKTLSNLVGYLPQDVFLIDDTISKNIALGQKDSEIDVGKILKCIEQVKLGNFISELHQGIETSVGQRGIQISGGQRQRISLARALYHDRPVLIMDESTNSLDQETENEILSQIYSLKGLKTVIMISHKIESLNSCNKIYQIKDGKILFIE

SEQ ID NO: 143400 - protein, 123 aa, Unknown
  Bacterial polypetide isolated from the Sargasso Sea
GGEQQRVQLARLLVQLWEPVPRPKWLFLDEPTSALDIHHQQHLFRLLRRLVRERQFSVCCVLHDLNLAARYADRVVLMERGRIVDNGYPQDVLKQRALNALYGADLTVINEPEHRTPLIVLNQ

SEQ ID NO: 143401 - protein, 121 aa, Unknown
  Bacterial polypetide isolated from the Sargasso Sea
MKQRVGIARALAMEPSVLLMDEPFGALDALTRAHLQDSVMEIQADLNNTVIMVTHDVDEAVLLSDKIVMMTNGPAATVGEVLEVDLARPRDRLALASDERYNYFRSQVLSFLYERQRRPAE

SEQ ID NO: 143402 - protein, 278 aa, Unknown
  Bacterial polypetide isolated from the Sargasso Sea
MVYQQFINYPHLNVYENIIFPLKQRKLSEEQIKMDVEDALKTVGLVGFENRKIQELSGGQQQRVALARSLAKKAKILLLDEPLVNLDYKLREQLREEFKRIFSEGLSQDTILIYSTTDPQEVMELNGEVIVLHEGKVLQKGDAKEIFENPKNLKVAEISNDPPMNILTGNKSSDKLTFENISINLPEYLKELKSQNYYFGIRASEIKLDKEGEEFEIELAEISGSETLLHLKKGNSKVIALIEEVMNFKIHEKVKVKFNENKFYVFNNNEELVSSPYG

SEQ ID NO: 143403 - protein, 201 aa, Unknown
  Bacterial polypetide isolated from the Sargasso Sea
IYNLSLKFYPKQIVSIIGKNGSGKSTLIKILFGIIRINIGSIFVYGNDISKIDIRKWRSYIHYCQQNPVLFNRTVDENLFYSNELNRVKSQKIIKELGIKDIIENIQKTKGPLGVSGRRLSGGQRQIIALLRVILKPKPIILLDEPTSALDYKIKEKLYNMIKYMKKQGSSVIIISHDKSLIDMSDRTIELEDGKIIKDDM

SEQ ID NO: 143404 - protein, 214 aa, Unknown
  Bacterial polypetide isolated from the Sargasso Sea
RALVFEPRLVLMDEPLGALDKKLREQMQYEIKHIHERIGITVVYVTHDQSEALTMSNRIAVFNDGKIQQISTPDVLYEKPDNSFVAQFIGENNQIKGKVKSVNGKNCVIETDNGDEINSLKVNINSVGDTSMLSLRPERVWVNVNEKDYENNFEAKVEELIYLGDHVRTRVKVCGNDQFIVKIPNSSDHSDLKEGATVKLSWKSADTRALDFKA

SEQ ID NO: 143405 - protein, 82 aa, Unknown
  Bacterial polypetide isolated from the Sargasso Sea
MITIESMHKWFGDFHVLKDINLEVKRGAKIVICGPSGSGKSTLIRCINRLEEHQQGSIVVDGTELTSDLKNIEIVRSEVGMV

SEQ ID NO: 143406 - protein, 242 aa, Unknown
  Bacterial polypetide isolated from the Sargasso Sea
DETLIIHKNLTKTDARQRTIELLKKVKIPEPEIKVDSYPHQLSGGQRQRIMIAMALANEPDLLIADEPTTALDVTVEKALLDLLSDLQEEFGMSILFITHDLNIVKKFSDNVCVMKDGEIVESGKVSALFQNPQHPYTMKLLDSIPGKKESMNSESDVLLDAKEVDINYPITKNLLGQVTEYLNAVKKVNIQIYSGSTTGLVGESGSGKSSLARALLGIEKSEGVIQFDGLDINNLSSNETR

SEQ ID NO: 143407 - protein, 184 aa, Unknown
  Bacterial polypetide isolated from the Sargasso Sea
MSEPVIKCENVYKIFGANAQKMLKDSNGSVDAKTFQENGCIVGVNNASFEVSKGEMLVVMGLSGSGKSTLLRCISRLTNATGGKIFIEGQDLLQLNNKDLIDLRRNKMGMVFQSFALLPHKTVVENIAFPLQIKGVKTEDSISKAMDMVKLVGLDGRENYFPRELSGGQQQRVRIARSLAVEPD

SEQ ID NO: 143408 - protein, 150 aa, Unknown
  Bacterial polypetide isolated from the Sargasso Sea
PKEDLQYVLSVMDDLDLENVAERYVTELSGGERQRVIIARALVQQPQILLLDEPTTALDLGHQQEVLELVDKQRQSLGLAVISAFHDLTLASQYGTSMALLVDGMVTKSGKPSEVITEESLKEIYGANVSINRDGNTLSVVPKRQEDSSN

SEQ ID NO: 143409 - protein, 252 aa, Unknown
  Bacterial polypetide isolated from the Sargasso Sea
SIKGDLSIKNENYNQVKGHITFKDSISLDNISFRFNENEPYIFKDLNLKIFKGDIIGIIGETGSGKTTLINFIMGLLLPDLGIIKIDGKKLENLNLSSWQKKISHVPQSIFISDSTLAENIAFGIPKREIDLAKVKTVCEIVCLSDVVENWKNKYQTIVGENGMRTSGGQKQRIGIARALYRGCEVLILDEATSALDQKTEDLILENINKSLNKITLIMIAHRLKSLKKCSRIIEVKNQHISEIFDHKILLK

SEQ ID NO: 143410 - protein, 218 aa, Unknown
  Bacterial polypetide isolated from the Sargasso Sea
MEIKNFNKTKLVKDINCLSVNNLSSFYKKKKTLNNISINVKEGEIVGLLGPNGAGKTTCFQCIVGLQNISHGNIKLNDINITNLPIYKRAKFGLNYLPQETSIFRGLTVEQNILSIMQLNNSKNDKQNNEFLNELLNEFSLDHIRNASALTLSGGERRRVEIARALASQPKFLLLDEPLAGIDPIALIEIKNIIYKLKNKNIGTLITDHNVRETLNTV

SEQ ID NO: 143411 - protein, 198 aa, Unknown
  Bacterial polypetide isolated from the Sargasso Sea
MAYFEGAKMTAGYGDGPDIISSCSITANRGEIVAILGPNGAGKSTAMKAMLGLLKLKSGSITLNGEDISKINPQDRVKKGISFVPQTRNVFAELTVRENLEIGGFLTEGSLENKIESIYSLFPILSKKKSQVVGQLSGGQRQQVALGRALMSDPSVLMLDEPTAGVSPIVMDELFEHIIKVKKTNVAVIMVEQNAKQA

SEQ ID NO: 143412 - protein, 85 aa, Unknown
  Bacterial polypetide isolated from the Sargasso Sea
LLILDEATSALDSASERLVQEAIQQVEGHCTVLVIAHRLSTIVNADQILVLERGRIIQCGSHHQLLQAPGMYQQLWQQQSKAAAL

SEQ ID NO: 143413 - protein, 176 aa, Unknown
  Bacterial polypetide isolated from the Sargasso Sea
TKRVDLLNTLNFISPYIELPKKLTVKQNLEVYGRLYDVKNLSSKIDYLADKLRLNEIIYKITGELSSGQKNRVSLAKSIINDPTVLLLDEPTASLDPETGDFVRSFLENYQKEKGASILLASHNMAEVERLCSSVLMMKNGVIIDQDSPETLIKKHGRKNLEEVFLKLTREEHESK

SEQ ID NO: 143414 - protein, 127 aa, Unknown
  Bacterial polypetide isolated from the Sargasso Sea
LTAVEQVELPLIYQNVYNRKEKALKALDMVGLIDRVDFKPSQLSGGQQQRVSIARSLVVEPKVVLADEPTGALDNATGSEVMGTLKNLVKNEGITVIIVTHESEIAGYTERTISINDGKIIKDKKNK

SEQ ID NO: 143415 - protein, 157 aa, Unknown
  Bacterial polypetide isolated from the Sargasso Sea
MTGRLLKQKQNFLMLALYFGPAEKEEEEHREKVERVIDFLDLQSIRRTPVGSLPYGLQKRVELGRALAMEPEILLLDEPMAGMNVEEKQDMSRFVLTVNNELKTTIVLIEHDMGVVMDISDRIVVLDYGKKIGSGLPNEIRSNKAVIDAYLGVADDE

SEQ ID NO: 143416 - protein, 66 aa, Unknown
  Bacterial polypetide isolated from the Sargasso Sea
HLNIQMWKYLLESYASEQAARMLSMENATSNAQDMIKDLTLQFNKARQAAITTEMLEIVGGAEALG

SEQ ID NO: 143417 - protein, 172 aa, Unknown
  Bacterial polypetide isolated from the Sargasso Sea
SIGFNSQKGKQISILRNVSTNIKKGETVGIVGESGSGKSTLALAMMGYIKQGLFPLKGECLFKSDDLLKMSSRQLEKIRGRKIAMIPQNAGQALTPNLKIGYQIDEALRLHTDLNKTERDKKISKLLNKVRLPSPETMAFRYPHELSGGQQQRVAVAMALAGKPDLLLLDEP

SEQ ID NO: 143418 - protein, 173 aa, Unknown
  Bacterial polypetide isolated from the Sargasso Sea
MTDPILEIKNLSVSFMTRSAEIPAVMDFSMDIYEGDAMGLVGESGCGKSTVALAIMKYLGGNGKIVGGSIKYRGRDMSSFTERELENLRGSEIAMIYQEPMASLNPAMRVSSQLIEVPMLHEKIAREDAWKRSIEMLEKVNLPDPDRIMNAFPHQLSGGQQQRIVIAMALLSK

SEQ ID NO: 143419 - protein, 246 aa, Unknown
  Bacterial polypetide isolated from the Sargasso Sea
GVTIQFGGITALDNLTFTVDSTQICGLIGPNGAGKTTLFNVMSRIYDPTQGRIIFNGVDLLSLSPHEISQTGIARTFQNLALWPRMTVAENVMAGAHIKGKQNFFSAMARIGLQTEERDLRQKAYETMEMLNLLEHAEKPCDGLPFGTMKRIELARALVSNPKLLLLDEPATGLTHSEVGELSEVIISIRKNFNLTILLVEHHMGMVMSMSEKVVVLDFGEKIAEGTPTEIQNNPLVVSAYLGAPK

SEQ ID NO: 143420 - protein, 295 aa, Unknown
  Bacterial polypetide isolated from the Sargasso Sea
SLNPLHVIEKQISETLALHSGLTGPEARRKCIELLELVGLQKPETRLQSYPHQLSGGQRQRVMIAAALANKPDLLIADEPTTALDVTVQAQILDLLKDLKKELGMALLLITHDLGVVKKIADEVCVMSEGQIVESKPIDKLFANPEHPYTRKLIGSEPSGAPNPISDSAKKILEVDDLKVWFPIQKGILKRTIGHIKAVDGISFSIRSGETLGVVGESGSGKTTLGLAALRLQASRGKIVFIGNPINGLKNKNLRPFRSPMQIVFQDPFGSLSPRMSMAEIIGEGLRVHSYKQTG

SEQ ID NO: 143421 - protein, 143 aa, Unknown
  Bacterial polypetide isolated from the Sargasso Sea
NLLGIAQIIKKDAREQKDIVEKLMAEFSITHLRDVKATALSGGERRITEIARSLINNPKVLLLDEPFAGVDLLSIQDIKQLLLKLQARGCAVLVTDHNASQLLSVVDRAYVIANGSIVANGTPRQIVNTSEAKKLYFGEDFNF

SEQ ID NO: 143422 - protein, 243 aa, Unknown
  Bacterial polypetide isolated from the Sargasso Sea
MFIEIKNLSKTYDKYLAVDKINFQIEKNKTIGLLGPNGCGKTTTIGMMLGLVTPTNGEINIENKNLNSFRRDEILKRFNFASPYVELPKKLTVKQNLEIYGRLYGIKELGERINEISSDLNIKKFFSRKTGELSSGQKNRVSLAKSLINKPEILLLDEPTASLDPDIGDFIRSYIQDYKSKNKVTILLASHNMSEVERLCDSIIMMRKGKIVDKGTCLELIKKHGRNNLEETFLKLARSKDEF

SEQ ID NO: 143423 - protein, 227 aa, Unknown
  Bacterial polypetide isolated from the Sargasso Sea
MIEIEDTLQNGVPNVTFKNVGFSWPGKNDHVINNCNFSINKTGLWMIVGKNGSGKSTLLKLINGLLKPSNGVINKLANIGMVFQNPDHQILMPNCRSELLLNINQNLSRKDISNKIDIALNKVGLAGFDKRSIHTLSGGQKQRLTIASSLISDKNFILMDEPTALLDSSSQLAVLEIIKGLTKNKRNPFTALWITHRLEELSYADAVAEMKNGNLSDWQKPFNFQYN

SEQ ID NO: 143424 - protein, 138 aa, Unknown
  Bacterial polypetide isolated from the Sargasso Sea
MNGINDNLTVGQNLKFWFDIYGDSKAKVLKTLKIDNIINKKVSDCSVGQKRLVGLVRVFSSQKKILLMDEPTTSLDEQNKELVFEQINEHKKSGGSSIIISHDEFPSEKLIKLKYDPTTQSSTLDTRVISSVKARMKS

SEQ ID NO: 143425 - protein, 158 aa, Unknown
  Bacterial polypetide isolated from the Sargasso Sea
MLELRDVTVPGRERPRLRGLSLSLNPGERVALVGASGAGKSTLLGVANGLIQPSSGSVQWFGEPRLRRRLRSRIGTLWQDLRLIEGLSVQHNLNTGRLAAWSWWQVLLNLLQPLEQRPCAEALAQVELDASLLPLPLSSLSGGQRQRVAFGAVAAPKR

SEQ ID NO: 143426 - protein, 168 aa, Unknown
  Bacterial polypetide isolated from the Sargasso Sea
MNKNYLEINNVDFQVGGKVKVKNLSLKIQNKGQIICLLGPSGIGKTTILRSIAGLEKIDKGSIKLKNTILSSKSEHVEPENRNISLSFQENALFPHYTVEKNIYFGTDRNKLNGKKKIEPKKIIKILNIEKILDKYPHQISAGEAQRVSLTRALVSNPDLLLLDEPLS

SEQ ID NO: 143427 - protein, 221 aa, Unknown
  Bacterial polypetide isolated from the Sargasso Sea
MRKNYSFKINRGVRISLQREVSLNDKEISNRKKILSPEKRNIGMVFQDYALFPHLTVLENVIFGLKNKKERSRVDYLLNVVGLDSFVERYPHELSGGQKQRLAIARALAPGTNFILLDEPFCSLDMHVKLKLRSELPNILKGCNASGLMVTHDPEEAMSICDKVAVMNDGKIHQIDTPINLLNNPKTIFVSSFILGNNIINLKKNGNSYISCLGEINCSEF

SEQ ID NO: 143428 - protein, 36 aa, Unknown
  Bacterial polypetide isolated from the Sargasso Sea
MKNGELLGLLGPSGCGKTTLLRLIAGFEYPSKGRSL

SEQ ID NO: 143429 - protein, 193 aa, Unknown
  Bacterial polypetide isolated from the Sargasso Sea
SSGSGKSTLLNLIAGIDLPDQGEVRIDGKSLGQMSEKNRTLLRRRTMGFVFQSFNLIPTLNVYENLMLPLELNQISKNSGIISQMLEALGLKEREESHPDRLSGGEQQRVAIARALMHQPSLLLADEPTGNLDAETSQETLKLINHLVHRSRTTMIMATHSQEVIEWVDRVLGIEDGKLIELKTSEAIQKLAS

SEQ ID NO: 143430 - protein, 215 aa, Unknown
  Bacterial polypetide isolated from the Sargasso Sea
VAIGRALVRDAKVFLFDEPLSNLDAKLRAELRYEIKKLHRDLSNTMIYVTHDQIEAMTLADRISVMKDGLIQQLDTPKQIYNKPANLFVAGFIGSPSMNFLNAKFEKSNQNIIVGKKQIDISKYENINNLMNEQEVVFGIRPENINIEKNENSIQCKVELVEPMGADTLVWTSVEDNPISIRLEGSSNFNLNDEINISFDINKSSIFDSKSEERI

SEQ ID NO: 143431 - protein, 256 aa, Unknown
  Bacterial polypetide isolated from the Sargasso Sea
LSGSGKSTLVRHINRLLEPTSGKILINNQDVMQFNKENLQELRNKKIGMVFQNFALMPHRSVLDNIAMPLEIRGVSKNDRLDAANNILNIVELQGWGNKYAHELSGGMQQRVGLARALAADPEFLLMDEPFSALDPLIRRQLQTEFIKLSKQMKKTTVFITHDLDEAVRVGHRIAIMRDGRVVQIGTPEEIVVNPSDEYVADFVKGISRLKVVQAKTIMQPLEQYKKNFGENLSNNKKVNENDILSKLIETSVSKD

SEQ ID NO: 143432 - protein, 146 aa, Unknown
  Bacterial polypetide isolated from the Sargasso Sea
MYLLHGKNITCGYDTVDILSECTVGVKKGQIASIVGPNGAGKSTAMKSIFGLLKIKIGEIFLDNEDITNLLPQERVLKGMGYVPQTNNIFPTLSVQENLEMGAFIQNEDFSDILDFVYDLFPVLKEKRNQQAGQLSGGQRQQVAVG

SEQ ID NO: 143433 - protein, 133 aa, Unknown
  Bacterial polypetide isolated from the Sargasso Sea
NVQLPLRFSKKRAQRAGRNQAERLEEAQRLLTALGLSEPLKEGRPVVELSVGQQQRVAAARALIGRPELVIADEPTSALDADLREVFLNLLYAECDKAGSALLFVSHDSELSRFFGRSLSLPQINRVSSLEAA

SEQ ID NO: 143434 - protein, 202 aa, Unknown
  Bacterial polypetide isolated from the Sargasso Sea
DLVKLPRAFAERMPRQLSGGQKQRVGIARAFAGGARIVVADEPVSALDVSVQAAVTDLLMEIQRNEKTTLLFISHDLSIVRYLSDRVMVMYLGHVVELGTTDQVFSPPYHPYTEALLSAVPIADTSVEKEHIVLEGDIPSAMDPPSGCPFQTRCRWKKDVPGNLCETEIPPQRNLSIGHQVKCHLSENKLSEMAPVIKLAAV

SEQ ID NO: 143435 - protein, 168 aa, Unknown
  Bacterial polypetide isolated from the Sargasso Sea
MSDQAVVEMEGVALDFPVKSSGYLLLKELLTRRTKDKIHSKYYRALDDITLSINKGDVVGIVGPNGAGKSTLLRVIAGIYCPDEGKTRTKGRLALLAGLGAGFQRNLTGRENIYLSGSVYGMSKQELYDLIPSIVVYSGIGSFIDQPLRTYSSGMKAKLAFSIASHLS

SEQ ID NO: 143436 - protein, 222 aa, Unknown
  Bacterial polypetide isolated from the Sargasso Sea
MSEPVIKCENVYKIFGANAQKMLQDSNGNVDAKTFQENGCIVGVNNASFEVSKGEMLVVMGLSGSGKSTLLRCISRLTDATGGKIFIEGQDLLKLNNKDLIELRRNKMGMVFQSFALLPHKTVVENIAFPLQIKGVKTEDSISKAMDMVKLVGLDGRENYFPRELSGGQQQRVGIARSLAVEPDIWFLDEPFSALDPLIRKEMQDEFLRLQEKLQKTIMFIT

SEQ ID NO: 143437 - protein, 290 aa, Unknown
  Bacterial polypetide isolated from the Sargasso Sea
AADLDILPAGDQTIIGERGVTLSGGQKQRVAIARALYAESDVYVFDDPLSALDNHVGSAIFEKVITGELKNKTVILVTNALQYLPKANQVVVLGDGKMQEIGTYTSLMAKKGAFCKLMKTHGIDREDAPEKTSKKENDIAMKISPTIKSAGKDNDASKEEERAFGNVGARVYLKLFQATGTQWNFLFVIFFFGCEYGTKAFLDYWLTWWATNKFGWTSNEYLLMYFGIFVVNGVFIFVRSLTLYFFLCRACRWMHDNLLTRVLRMPMSFFDTTPSGRIINRFSRDTETID

SEQ ID NO: 143438 - protein, 124 aa, Unknown
  Bacterial polypetide isolated from the Sargasso Sea
INKNRLDYALESSQSKEFIYDLPNKLNTLVGERGIQLSGGQRQRIGIARALYNQSEILILDEATNSLDIDTEQKLISSLLLIKNRPLIIMIAHRLRTLKKCNKVYELKKGMIINKTSGKEFINS

SEQ ID NO: 143439 - protein, 116 aa, Unknown
  Bacterial polypetide isolated from the Sargasso Sea
MSEESIISLKNVNKWFGDFHVLQDVNLEVKKKERIVVCGPSGSGKSTMIRCINRLEEHQEGSIVVDGIELTGNLKNIDNVRKEVGMVFQQFNLFPASICKRKYNTSSNLGEKNAQS

SEQ ID NO: 143440 - protein, 126 aa, Unknown
  Bacterial polypetide isolated from the Sargasso Sea
MEVKKFSDEHLTSVLHEVNLKTLVDRYPNLDIKQDWPRILSLGEQQRLAFARLLLNSPRFAVLDEATSALDIDTEKKLYSLLKERELSLISVGHRPSLKDFHENILELNGQGDWKLLTSDKYNFND

SEQ ID NO: 143441 - protein, 156 aa, Unknown
  Bacterial polypetide isolated from the Sargasso Sea
NIARFAQNDSELIVAAALLAGVHEMILRLPQGYDTLLGAGGYQLSGGQRQRIGLARAVYNNPAFIVLDEPNANLDDAGEFALVKAINALRTQGQTTVIISHRPTLLGVVNKVLLLNDGVIQEFGTRDQVFAHLRQANVLKPVATPSPSTTEQQREA

SEQ ID NO: 143442 - protein, 292 aa, Unknown
  Bacterial polypetide isolated from the Sargasso Sea
KLLPAFQQIYSSIAIIKANIPAFESIQKDLYDSLHIESRSLKLEQNYLNPKNSISIENITFTYPNKEEPALNKLNMLIPSNSVIGIVGPSGSGKSTLIDILLCLIKPDNGHLKIDDEIINYKNRRSWQNTIGFVAQTIFLSEGTIAENVAFGIPEKQINLNQVQKVLELAHLKDFISTLDQGIHTKVGERGVQLSGGQRQRIGIARALYQNAEVLVFDEATSSLDGITEKMIMESIHNFSGKKSIILIAHRLKTVKKCDKIFFINKGKVTDQGTYQELIERNKHFKDMATHA

SEQ ID NO: 143443 - protein, 227 aa, Unknown
  Bacterial polypetide isolated from the Sargasso Sea
MSNNILEIKNLRKSFGGLKAVDITSLNFERNKIISLIGPNGAGKTTFFDLITGFTKQDSGTTTFDGKNISNLESYKISRLGMVRTFQLTKVFDRMTVNENILFSASSLKNDRFINSLFKSTMKSKIEQELNEKKNEVLNMVNLYHMKDSYARELSGGQKKLLELARVIIQKPKILLLDEPLAGVNPKLSEEILSLINTFAKEGISILMVEHNISAVMKVSDHIVVLA

SEQ ID NO: 143444 - protein, 80 aa, Unknown
  Bacterial polypetide isolated from the Sargasso Sea
MAFFEGNQMTAGYDEGADIISSCTINVNKGEIVAILGPNGAGKSTAMKAMLGLLNLRSGDVTIDGKNISDLNPQDRVKRG

SEQ ID NO: 143445 - protein, 242 aa, Unknown
  Bacterial polypetide isolated from the Sargasso Sea
VICIALWQSRGTGAAAANVQDVTVGSFAAFITAMLMLIAPIRRLADVANPITRGVAALERGLHLLEGSGDETGGTQVPGKARGEIELRDVSVQFGEDKAPALSHVDLRVRPGEVVALVGPSGAGKTTLVNLLPRFLQPTGGQLLLDGTPLPEWDLAALRQQFAMVSQDVVMFNDTIAANVALGGVEDEAQLWAALDAANLGSHVRGLSNGLQTVVGHNASQLSGGQRQRLAICTALYRMRPS

SEQ ID NO: 143446 - protein, 215 aa, Unknown
  Bacterial polypetide isolated from the Sargasso Sea
LIKSYNGKVVLDVPLLIIEQSQIVSICGPSGAGKTTLLSILGTLMKADNLKERSLKIMNEDINKMSLNYLAKFRNNHLGFIFQFHELLDEFNVIENIIIPGLIANKDKKLLLKKATEILKILNIFHLKLNNPKNISGGEKQRVAVARSLINNPSIIFADEPSGNLDARNADELHKLFFRLRDEFGQTFVIVTHNEKLSKISDKILILVDGKIQAK

SEQ ID NO: 143447 - protein, 279 aa, Unknown
  Bacterial polypetide isolated from the Sargasso Sea
MAKITLNNLSHSYVPDYTDADLVLRDINIDWKDGGAYALLGPSGCGKTTLLNIISGLIKPSKGDILFDDKNVTSLNPVERDIAQIFQFPVIYDTMTVYDNLAFPLKNRNLSDTEIDSKVREIAEMLELTSTLNNRASGLTADGKQKISLGRGLVRSDVNVIMFDEPLTVIDPHLKWILRSKLKELHQKINRTMIYVTHDQTEALTFADQVVVMHEGQIVQTGTPVELFEKPKHTFVGHFIGSPGMNILPCQIKNGQINFAGQEIQSNFNIKKNNFKQHN

SEQ ID NO: 143448 - protein, 235 aa, Unknown
  Bacterial polypetide isolated from the Sargasso Sea
TLVRHINRLLEPTSGKILINGQDVMGLDRENLQELRNKKIGMVFQNFALMPHRSVVDNIAMPLEIRGVSKNDRLDAANKILEIVELQGWGNKFAHELSGGMQQRVGLARALAADPEFLLMDEPFSALDPLIRRQLQAEFIKLSKQMKKTTVFITHDLDEAVRVGHRIAIMRDGKVIQIGTPEEIVVSPADEYVADFVKGISRLKVVQAKTIMQSIENYESANGKLNENSQSVGEK

SEQ ID NO: 143449 - protein, 146 aa, Unknown
  Bacterial polypetide isolated from the Sargasso Sea
LHFSSFMLVQSLTALENVMLPAEIAGLDNPKALALDILEQVGLKHRAHHFPNQLSGGEQQRVAIARAFITSPKILFADEPTGNLDAKNSEKIEALLFEMNREKGTTLVLVTHDNELAEHCDRQLTMNAGELIETTGANTMNKKEAV

SEQ ID NO: 143450 - protein, 151 aa, Unknown
  Bacterial polypetide isolated from the Sargasso Sea
MPSLKDIKTQINSVGSTKKITSAMKMVAASKLRRSQEKAEAARPYSSRLEEMLSSLASSAASGEGIIKLLTGTGNDQNYVVVPVSADRGLCGGFNSSINRETFKLVKSLEGNGKKVQLMPVGKKSRDFFNRVMKDQIIESFVDLNVSSTGY

SEQ ID NO: 143451 - protein, 73 aa, Unknown
  Bacterial polypetide isolated from the Sargasso Sea
MSESIIQMKDVNKWFGDFQVLKDINLEVKEKQKIVVCGPSGSGKSTLIRCINRLEEHQKGQIIVDGNELSEKN

SEQ ID NO: 143452 - protein, 148 aa, Unknown
  Bacterial polypetide isolated from the Sargasso Sea
MAFFEGSKMTAGYGNGPDIISSCSINANRGEIVAILGPNGAGKSTAMKAMLGLLNLKAGSVLMDGKDISNLSPQNRVKAGISFVPQTRNVFADLTVRENLEVGAFLREDDINKVIEEIYDLFPILNEKRLQKVGQLSGGQRQQVALGR

SEQ ID NO: 143453 - protein, 196 aa, Unknown
  Bacterial polypetide isolated from the Sargasso Sea
MFKFEKLVFGDLGWGDEFLFALLMTILVSICSMGLGVFIAIFAAWSKLTYNKILNFIASFYTTVIRGIPELLVIYLIFFGGSAAIMNVAKTFGYNGYIELNAFTISVIAIGIISATYSTEVLRAAYLSINKGQIEAAKSLGLSKFHIFLKILTPQILRHAIPGLGNVWQVTLKDTSLISVTGLVEIMRQTRIASKC

SEQ ID NO: 143454 - protein, 290 aa, Unknown
  Bacterial polypetide isolated from the Sargasso Sea
MSQNILEVRNLVKHFEVSKSVFSRNKKIVKAVDGISFDIKAGETLGLVGQSGCGKTTTARSLCLLDPKTSGSVSFYNPDTKSMESIDKIDEDGIRVFRRNMQMIFQDPYESLNPRWTIKDIIKEPLDIHNIGSFSEREDAVVEILRTVGLTPPENYMSRYPHEISGGQRQRVSIARTLVMKPKFVVCDEPTSMLDVSIRISIMDLMLNLAKELDVSYLYITHDLAVARYMCNRIAVMFNGKIVEIAETEELLNNPIHPYTKRLISSIPIPDPSYKREQYDMNFDELDNIF

SEQ ID NO: 143455 - protein, 266 aa, Unknown
  Bacterial polypetide isolated from the Sargasso Sea
MSYIKIEGVEKTFTKPKSNEVVVALDGVDAEIDSGEFVSIVGPSGCGKSTLLRTIAGLDAIDQGAVTIESKEVDGADPDRGLLFQDYALFPWKTVEENIEFGLKVRGVKKNERKNISKEFIELVNLKGFEQKYPHELSGGMRQRCALARLLANNPKILLMDEPLAAIDAQTRKILQEEVLEIWDKEKKAGREKTIIWVTHSIEEAVFLSDRVLIMSRRPATIKESVKIDLKRPRTDKTESDPRFAKLCAQLWSSMKEEAATAILES

SEQ ID NO: 143456 - protein, 231 aa, Unknown
  Bacterial polypetide isolated from the Sargasso Sea
MHALSIKDLSKKYKSGVEALKSVSFDVQEGDFFALLGPNGAGKTTAIGIITSLVNKSSGSIEVFGHDLDKELAMAKSCIGVVPQEVNLNLFDYNFNILVNQAGFYGISRSEGKKRAEQYLKQMQLWEKRKTNARSLSGGMKRRLMVARALVNQPKLLLLDEPTAGVDIETRRMMWDFLRDLNAKGTTIILTTHYLEEAEQLCNKVAIIDEGKIIENRLDAKCFKKAQDRSI

SEQ ID NO: 143457 - protein, 302 aa, Unknown
  Bacterial polypetide isolated from the Sargasso Sea
KENLILGIDEKMSYSDLENKLENISSRYNLFLDLDAPITALSAGEKQRVEIVRILLQDPQILIMDEPTSVLTPQEVESLFVTLNALVKEGRTILYITHKLEEVISICDTVTIMRSGEIIDTSSTSNQTAKTLATKMLGQKLDDLKTNYGHIKDEVNFEVKNISCDFNDPFLTDLKNISFQVRVGEIYGIAGVAGNGQSELMDILTGENINIKSGSITFDNKKIEKYGPQKRRDLSISFVPENRLGHSAVPELSLSENILLSQFPKNNFIKNGIILKNNVDDFANNVINEFKVITPGNDAKAS

SEQ ID NO: 143458 - protein, 74 aa, Unknown
  Bacterial polypetide isolated from the Sargasso Sea
MEDHYSDKMDVIIQNLSKAINDPSNAPKLLVGTGEDKSHLCVIMTADRGLCGGFNTNIVKLSKNYFNKILKESK

SEQ ID NO: 143459 - protein, 261 aa, Unknown
  Bacterial polypetide isolated from the Sargasso Sea
MFRKVFGNTSPEALDAIQNKGISKTEALEEYNSVIGVSDVSFDVNQGEIFCVMGLSGSGKSTLVRHINRLLEPTSGKILINDQDVMQLDRDHLQELRNKKIGMVFQNFALMPHRSVVDNIAMPLEIRGVSKNDRLDAANKILEIVELQGWGNKFAHELSGGMQQRVGLARALAADPEFLLMDEPFSALDPLIRRQLQSEFIKLSKQMKKTTVFITHDLDEAVRVGHRIAIMRDGKVIQIGTPEQIVVSPADEYVADFVKGI

SEQ ID NO: 143460 - protein, 179 aa, Unknown
  Bacterial polypetide isolated from the Sargasso Sea
MTNQLIKITDLNKEYIINEDKICILNKVNFSLREEEIISITGPSGSGKSTFLNILGLLDSSYKGNYIFLNKDVSNLGINEKNNIRNKSIGFVHQFFHLIPELNVLENVSLPNLIMKNKYKISFQEAKNIIIKFGLKNRLYSKPSELSGGEQQRVAIARALINKPAIIIADEMTGNLDEK

SEQ ID NO: 143461 - protein, 258 aa, Unknown
  Bacterial polypetide isolated from the Sargasso Sea
MAIIKKFRIKSFKNINSIIKFENVSIAYGNRTVLDNINFSINEKTIHGLLGPNGAGKSTLYHLMTGLIEPKQGKILIENKDVTNFPVYLRTRQYGIGYVPQYGGAFADLTLHDNLKAISEIVIENKNLRSERINYLISKLELENLKDIKAKYLSGGEKKKLVIALSLLSKPKILLLDEPFSALDVLTIKMLQELIVSLQQDNNITICICDHIATSLLQIVDTAMILSNGKIIAQDTPSNLIKDIDAKNAYFGDNFKIN

SEQ ID NO: 143462 - protein, 265 aa, Unknown
  Bacterial polypetide isolated from the Sargasso Sea
MQPDEGLFTRQMPGDRFRNQTDPVLQLEKINVNFDGFQALTDLTLNIGVGELRCIIGPNGAGKTTLMDVITGKTRPQSGRAIYDQSTDLTTLDPIAIARQGIGRKFQKPTVFEALTLEENLELALKNDKSVWGSLRARLSGEQRDRIDEVLALLRLGNERARRAGLLSHGQKQFLEIGMLLVQEPHLLLLDEPAAGMTDAETEYTAELFRQLTGKHSLMVVEHDMGFVETIADRVTVLHQGQVLAQGSLREVQANEQVIEVYLGR

SEQ ID NO: 143463 - protein, 273 aa, Unknown
  Bacterial polypetide isolated from the Sargasso Sea
FIWKAEVLPEFPRSLIEPFGITLIFAIGLFPYITGQNNSILIEIVPFLATIAVAALKLTPPLQDSFRALTCMRASIPDLEEILKLIELPSIRLTKSSKGVPTKKGIEPRNSIKLEKLSYKYPNSDEYTLKDINLTIPIGSRIAFIGETGSGKTTTANQLLCLLRPTDGKLLLDGIELNDKEVPAWQDCCSYVPQAITLLNSNIIENIAYGLDKELIDKTRVWDALKAAQLAELVSEMPKGLNTSVGDNGIRLSGGQRQRLDIARAFYRQSKLL

SEQ ID NO: 143464 - protein, 132 aa, Unknown
  Bacterial polypetide isolated from the Sargasso Sea
MTSSKSFVKFDKVDKSYDGKVLVVKDLNLDINEGEFITMLGPSGSGKTTCLMMLAGFETPTNGEIYLDSKPISRIPPHKRGIGMVFQNYALFPHLTVYENLAFPLKVRKLSKDDIDKKVDKALSMVSLSGLK

SEQ ID NO: 143465 - protein, 172 aa, Unknown
  Bacterial polypetide isolated from the Sargasso Sea
MASLKDIRKRIDSVKKTQKTTSAMNMVSAAKLKRAENNIRSAIPYSDKLKEVVSSLRSRLSDEENPLFQEKDGEKTAVILITSDRGLCGGFNTNLCKRVLEQFGDIPTDLLTMTMIGRKGFDYFKRRSYEIQGNFQETRPEDQINVVREVISQCIRRYENGELDKVYLAYNH

SEQ ID NO: 143466 - protein, 98 aa, Unknown
  Bacterial polypetide isolated from the Sargasso Sea
QRCAIARALCMQPKIMLFDEPTSALDPEMIKEVLDAMVSLAKGGMTMIVVTHEMGFAKEVADEVIFMDEGMIIEKAETKEFFANPKSDRTKLFLSQIL

SEQ ID NO: 143467 - protein, 94 aa, Unknown
  Bacterial polypetide isolated from the Sargasso Sea
MSKNSEFVKFDKVDKSYDGKVLVVKDLNLDIAEGEFITMLGPSGSGKTTCLMMLAGFETPTNGEIYLDKNPISNIPPHKRGIGMVFQNYALFPH

SEQ ID NO: 143468 - protein, 144 aa, Unknown
  Bacterial polypetide isolated from the Sargasso Sea
FNLLPYFSLEENVLLPLRFSKKRAQRAGSNQAERLKEAQRLLTALGLSEPLMEGRPVVELSVGQQQRVAAARALIGRPELVIADEPTSALDADLREVFLNLLFAECDKAGSAMLFVSHDLQLSRFFGRSLSLPQINRASSLEAA

SEQ ID NO: 143469 - protein, 135 aa, Unknown
  Bacterial polypetide isolated from the Sargasso Sea
MTGKEDSFVVFDKVQKSYDGLSLVVKDLNLHIRKGEFLTMLGPSGSGKTTCLLMLAGFETATHGEILFDGKPINNIPPHKRGIGMVFQNYALFPHMTVGENLSFPLEVRKIDKNERETKVVNALEMVQMSEFINR

SEQ ID NO: 143470 - protein, 295 aa, Unknown
  Bacterial polypetide isolated from the Sargasso Sea
PAVMLLSVITFAIWMIIGPEPSFGFAFVAAVSVLLIACPCAMGLATPTAIMVGTGRGAENGILIRNGSALESLAQIDTVMFDKTGTLTQGMPELSDILDPVSGESLIKDENVLVLIAAAEAQSEHPVSRAIVEAAIQKGLVLPAASEFSVCPGLGIEALVEGKHIQIGSAQLMAQEKVEIGLALDLAASLAKKGKIVVMAAIDSKLVAVLGITDSVKPEVPQTLSEIETIGLQVGLITGDGKLTADFVASELGISQITPETLPDDKASEVVRLQKEGRKIAFVGDGINDAPALAV

SEQ ID NO: 143471 - protein, 82 aa, Unknown
  Bacterial polypetide isolated from the Sargasso Sea
LLLLDEATSALDTKSERLVQNALDNLMKNRTVLVIAHRLSTIKNADRIIVLDKGAIVESGTHKELYDKNGIYYNLYNIQFES

SEQ ID NO: 143472 - protein, 166 aa, Unknown
  Bacterial polypetide isolated from the Sargasso Sea
GNLYLDEKDLTSFTRNQAAKFRNESIGFIFQFHQLLNDFNALENVMIPGLIHGGSTGIVKKNAINLLENVGLAERAFHKPSQLSGGEQQRVAIARALINKPRIVLADEPTGNLDEETGEQVMDILLRLNREHKTTFIMITHNPSLASRMQFQYRMENGQLHLIANK

SEQ ID NO: 143473 - protein, 203 aa, Unknown
  Bacterial polypetide isolated from the Sargasso Sea
MSTLLDIKNLSTHFNTSAGTIKAVNDVSFKLREGETLGLVGESGCGKSVTALSIMRLVPSPPGRIVSGDVIFQGKNLLEISEEEMQNVRGRDIGMIFQEPMTSLNPVLSIGRQLREPLELHLGMTKQQSLKRSSELLELVGIPDPATRLKTFPHQTSGGQRQRIMIAMALSCEPKLLIADEATTALDVTIQAQILEIIKELTD

SEQ ID NO: 143474 - protein, 243 aa, Unknown
  Bacterial polypetide isolated from the Sargasso Sea
MENIIQTVKNLSIGFKSKKGDEISILRNITTNIKKGETVGIVGESGSGKSTLALAMMGYVKQGLYTIEGECLFKSNNLLAMKNRDLEKIRGRKIAMIPQNAGQSLTPNLKIGYQIDEALLLHTNLNKVARDKKISELLNKVRLPSPDTMAFRYPHELSGGQQQRVAVAMALAGNPDLLLLDEPTTGLDVTTQAHVLELLKFIAKDTGTSMVYVSHDLGAIAQVSDRIIVMYAGEIVLEGPARK

SEQ ID NO: 143475 - protein, 81 aa, Unknown
  Bacterial polypetide isolated from the Sargasso Sea
MKNSFIQINNISKHFADVKAVDDVSFEIKEGEFFSLLGPSGCGKTTLLRLLAGFEYPTSGNLLIDGTDITALPPDKRPTNM

SEQ ID NO: 143476 - protein, 298 aa, Unknown
  Bacterial polypetide isolated from the Sargasso Sea
MKKNVIEVKNLEKYFEVSGGFFSRKKATVKAVDDITFEIPFGESLGLVGQSGCGKTTTARALCLLDPKTGGEVSFYNNEKSEMESIDELEGEELKKFRRNIQMIFQDPYESLNPRWTIKDIILEPLNIHNIGDLDEREEAVAEILQTVGLTPPENYMPRYPHELSGGQRQRVSIARTLIMKPKFVVCDEPTSMLDVSIRISIMDLMLNLAKDLEVSYLYITHDLAVARYMCNRIAVMFNGKIVEIAETEELLNNPVHPYTKRLISSIPVPDPTYDRKVYDINFDELDSLIEKHGSDSP

SEQ ID NO: 143477 - protein, 162 aa, Unknown
  Bacterial polypetide isolated from the Sargasso Sea
MTGIHLSGKTKLGAEEFEFSFETGTHKRIAIIGPNGSGKTTLLRLIAGHECLTSGSLQIGKAIYDEPVSECFVPPHLRDLVLQHQGGSVFPHLTVEDNVAFPYRAKGYSKRNARSLARETLEDFGLSKLKHKYPEQLSGGQTARVSLARSLTRRPKLLLLDD

SEQ ID NO: 143478 - protein, 290 aa, Unknown
  Bacterial polypetide isolated from the Sargasso Sea
LSTAALLGNAASVDGEITIDGNPIDPKDERALQRLRGAQVSFIFQEPMTSLNPLHTIERQLSETISLHQNLNKQRLRENCIALLEKVGIRDVEFRLNAYPHQLSGGQRQRVMIAMAIANRPKILIADEPTTALDVTIQAQILNLLANLKKEFGMSMLFITHDLNIVRQIADRVCVMNAGKIVEQGVTDSVFEKPKHEYTKKLLKAVSASGPKLISAQSKVILRSQNTKVWFPVYKGLLKRTVGHIKALNSATFDVRMGETLGIVGESGSGKSTIALALMRLIDFDGKINF

SEQ ID NO: 143479 - protein, 206 aa, Unknown
  Bacterial polypetide isolated from the Sargasso Sea
MDQKNKISIRNLYKIFGAEPEAALQHVQKGIGKADLLEQHLHVLGLQDINIDIGEGEITVIMGLSGSGKSTLIRHLNRLIEPTAGEIEVDGEDVLAFDEERLRRLRRETMSMVFQKFALFPHKTVADNAATLLRVRGADRQDSGTEANKWLDRVGLYGYGDHYPHQLSGGMQQRVGIARALASNSPIMLMDEAFSALDPLIRTEYA

SEQ ID NO: 143480 - protein, 135 aa, Unknown
  Bacterial polypetide isolated from the Sargasso Sea
MVKNKNKSSKPVIEIKEMHKWFGTFHVLKNISLGVNQGERIVICGPSGSGKSTLIRCINRLEVHQKGDIIVNDVELTGDLKNLESIRSDVGMVFQSFNLFPHLTVLENCTLAPIWVKGLPKKEANELAMELLTTC

SEQ ID NO: 143481 - protein, 311 aa, Unknown
  Bacterial polypetide isolated from the Sargasso Sea
QLSDHERILNSYPIMLSGGMRQRVLIGMSLLNNPKLLIADEPGTALDVTTQKEILDLLNSLVKDEGLSLLFITHNLGVVREMADRIYVMQNGKIVETNSRENIFKKPKHQYTIKLMESVPPLFGDKVIDVKNTNSEVDEIISVSNLNKSFPIRTGFFNRITSQNHAVKSVNLTINSGDIYGIAGESGSGKTTIAKILLGLYGKTSGTIKIDKLNLDEQVALKSYRKLIQIVYQNPGSSLNRKRTVSQILSVPLKFSGYSNKMIKDRVNELLQMVGLPASYSSMYPHELSGGQKQRVAIARALSLEPKIIVL

SEQ ID NO: 143482 - protein, 284 aa, Unknown
  Bacterial polypetide isolated from the Sargasso Sea
GYTAFERARAERLAQQQQAFEKQQAQRAHMESYIARFKAQATKARQAQSRIKALERMEELSAAHVDSPFDFVFRESVKISSPLLDLSDARLGYGDKTILEKVKLQLTPGARIGLLGPNGAGKSTLIKNLSGELEPLAGRLTRGENTVVGYFAQHQLDSLDAKASPLLHLQRLAPTEREQTLRDFLGGFDFRGARIDEPVLNFSGGEKARLALALIAWDRPNLLLLDEPTNHLDLEMRLALTMALQEFSGAVLVVSHDRHLLKSTTDNFLLVADGKVEEFDGDLD

SEQ ID NO: 143483 - protein, 245 aa, Unknown
  Bacterial polypetide isolated from the Sargasso Sea
MSELTLAGITIRFGGHVALNNVHLAVESNSITGLIGPNGAGKTTLFNVTSGLLKPNEGTIRLNDQVMTDLSPYRRAKLGLGRTFQRLELFPSLSVEENIQVAAEIRGEWFRSSNGASSVSASVQQVMKLTGLDSIASKSVAEIPTGKARLVELARSVVQWPSMLLLDEPASGQNENETEEFAQILKILNSEGVTIFLVEHDMSLVMDVCDKVFVLDFGTLIADGSTEEIQNNPVVIDAYLGGING

SEQ ID NO: 143484 - protein, 214 aa, Unknown
  Bacterial polypetide isolated from the Sargasso Sea
DDITFEIPFGESLGLVGQSGCGKTTTARALCLLDPKTGGEVNFYNNDVSSMQSIDELEGEELKKFRRNIQMIFQDPYESLNPRWTIKDIILEPLNIHNIGDLDEREEAVSEILQTVGLTPPENYMPRYPHELSGGQRQRVSIARTLIMKPKFVVCDEPTSMLDVSIRISIMDLMLNLAKDLEVSYLYITHDLAVARYMCNRIAVMFNGKIVEIA

SEQ ID NO: 143485 - protein, 150 aa, Unknown
  Bacterial polypetide isolated from the Sargasso Sea
KNLIVYEKLYNVLNINNTIEYLVEKLRLSDCLNRITGELSSGQKNRVSLAKALINNPSVLLLDEPTASLDPEIGDFVRTFLENYKKEKKISILLASHNMNEVTRLCKKILMMKDGVIIDKGNPEELIKKHGRKNLEEVFLKLSRNKNELY

SEQ ID NO: 143486 - protein, 71 aa, Unknown
  Bacterial polypetide isolated from the Sargasso Sea
MNNSFIQINNISKHFVDVKAVDDVSFEIKEGEFFSLLGPSGCGKTTLLRLLAGFEYPTSGNLLIDGIDITA

SEQ ID NO: 143487 - protein, 223 aa, Unknown
  Bacterial polypetide isolated from the Sargasso Sea
LSGGQQQRVAVARALVFDPAVVLMDEPLGALDKNLRESMQYEIKHIHESIGVTVVYVTHDQSEALTMSNRIAVFNDGKVQQLSSPDKLYEEPENSFVAEFIGENNRFDGEVLDVSNGVCKVKIGQSEILANPISVKSKGEKTKVSIRPERALINPKNKMDNNQKGKIEEVIYHGDHTRVRINLLGNSDFILKVPNSSQNLDIKLGNEISIGWNSQDARALDPK

SEQ ID NO: 143488 - protein, 235 aa, Unknown
  Bacterial polypetide isolated from the Sargasso Sea
MKKYYIELQGLYKSYFDGSGDHHILRGANLKIEIGETVAILGSSGSGKSTLLNLIAGIDLPDQGEVRIDGKSLGQMSEKNRTLLRRRTMGFVFQSFNLIPTLNVYENLMLPLELNQISENSGIISQMLEALGLKGREESHPDRLSGGEQQRVAIARALMHQPSLLLADEPTGNLDAETSQETLKLINHLVHRSRTTMIMATHSQEVIEWVDRVLGIEDGKLIELKTSEAIQKLAS

SEQ ID NO: 143489 - protein, 221 aa, Unknown
  Bacterial polypetide isolated from the Sargasso Sea
MPKNSVTISCKNVWKLYGSNPLKYLASKNFSPSIAELKESQYIPAVFDASIDVFEGEILVIMGLSGSGKSSLVRCMTRLIEPTSGEIYFEGSDLLKATEKELIEIRRHKMGMVFQNFALMPHRNVLDNIAFPLEVQGVNRDQREKRALEIIDLVGLSGREKYYPRELSGGQQQRVGLARSLAVEPNIWFLDEPFSALDPLIRKEMQNEFIRLQNLLNKTIV

SEQ ID NO: 143490 - protein, 200 aa, Unknown
  Bacterial polypetide isolated from the Sargasso Sea
MPSLKDIKTQINSVVSTKKITTAMKMVAASKLRRSQEKAVAARPYSSRLEEMLSSLASSAASGEGIIKLLTGTGNDQNYIVVPVSADRGLCGGFNSSINRETFKLVKSLENDGKNVQLIPVGKKSRDFFNRVMKEQIVESFIDLNVSNNGYDSALNVSNKLQDLYFEGKFDKCILVFNKFKSAISQEVTQQQLIPLDVSE

SEQ ID NO: 143491 - protein, 110 aa, Unknown
  Bacterial polypetide isolated from the Sargasso Sea
MLRRGTSTNAEKEGETRLGSDEWSELAAGLDAVGDWSSILSLGEQQRLAFARVLLARPPVALLDEATSALDAVNEARMYSLLRDLDDVAYVSVGHRGSLLGFHERVLRLE

SEQ ID NO: 143492 - protein, 124 aa, Unknown
  Bacterial polypetide isolated from the Sargasso Sea
QMPLGLNTIVGQSGVKISGGERQRISIARAILKNSPILLLDEATSALDNKSETKVQLALNTLSKGRTTIVVAHRLSTIADSDKIILINEGKIEESGKHSELLNQETMYAKLYKKSQSETSNIKN

SEQ ID NO: 143493 - protein, 230 aa, Unknown
  Bacterial polypetide isolated from the Sargasso Sea
MQSSIKVINLKKFYGAKEAVKNISFEIKENEIIGLLGPNGSGKTTTIGMILGLLKPTSGEVIINGLKIDRNPIEILKKINFISPYIELPKKLTVKQNLIVYGKLYSVKNLNQKIDYLVSKLRLENLLNRVTGELSSGQKNRISLAKAIINDPSVLLLDEPTASLDPEIGDFVRTFLENYSKEKKVSILLASHNMDEVTRLCSSIMMMKNGIIIDQGKPNDLIKKHGRKNL

SEQ ID NO: 143494 - protein, 262 aa, Unknown
  Bacterial polypetide isolated from the Sargasso Sea
FCYESKTVLREISLRIRRGERTAVLGPNGSGKTTLLGLFGGLLKPKNGRITLSGIDLADMSPTQIARRVAIVPQETKLTFDYSVLQMTLMGRYPHLKRFEHEGLDDFKIAREALAATGISQLEDRSYKTLSGGEKQRVVIASALTQLWQLKDSQKPSPNEGLLLLDEPTASLDIGYQLDIIKALLILNANHKTTLVISTHDLGLAARLSDEIIMIRHGRLLATGPTENTLTRETIRDLYDIEAEVHRNQETGHLMVVPLARK

SEQ ID NO: 143495 - protein, 193 aa, Unknown
  Bacterial polypetide isolated from the Sargasso Sea
MTDKKPVLSVENLTVKLPDHADRLNAIEEVSFDVRTNEILCVVGESGSGKSVTAHTVMGLLPPKQLKPTAGRILLQDENLFEKSELELREMRGAKMSMIFQEPMTALNPVVTVGDQIEEVLRIHRPSNPKERARLCNEVMAAVNLPEPEKLRKSYPHQLSGGQRQRIMIAAALILEPFLLIADEPTTALDVTT

SEQ ID NO: 143496 - protein, 179 aa, Unknown
  Bacterial polypetide isolated from the Sargasso Sea
MDTSDNGTYDLDKIRIANMNEKKAANYRNKFLGFVFQSFNLINYKNALENVALPLYYQGISRKDRQKTALNYLDKVGLKDWAEHLPSELSGGQKQRVAIARALASNPKVLLADEPTGALDSTTSMEVMALIQKINNEGKTILVVTHEHDIAKMCKRVVHLRDGVIVEDKKIKQNIIKNV

SEQ ID NO: 143497 - protein, 227 aa, Unknown
  Bacterial polypetide isolated from the Sargasso Sea
QDPCLFGIIGPNGAGKSTLLKASLDLVQRAGGTVRFWGQRLAEVRSKIAYVPQRETVDWDFPVSVMDVVRMGATSRLGWFRRGGKRERELALASLDHVGLADFAKRQIGKLSGGQQQRVFLARALAREAEIYLLDEPMAGVDAGSQEQIFSILAELRDQGKLVVAVHHDIRTAAQWFDAIALVDMRLVAAGPTAEVLTPENLTMTYSGRLGILDEIGEAVERRGRTS

SEQ ID NO: 143498 - protein, 245 aa, Unknown
  Bacterial polypetide isolated from the Sargasso Sea
MQHPTILMQSITKIFATDEMETHALRGIDLQISSGDFVSICGPSGCGKSTLLSLLGLLDMPSGGSYQIEGKEVSGLSLSEAAFIRNEKIGFIFQSFNLIDELTVFDNIALPLRYRRQSVAKSEIEDRVMACLKTVDMTHRAGHRPNQLSGGQQQRIAIARALVGSPALLLVDEPTGNLDSRNGDAVMDMLCELNNNGTTLCMVTHDPRYADMASRKLHLLDGRILDSDGTPIQQQTPVLRQVAAQ

SEQ ID NO: 143499 - protein, 38 aa, Unknown
  Bacterial polypetide isolated from the Sargasso Sea
KSIKFLQVDACIERSPSQLSGGQRQRVQIGRALVREPR

SEQ ID NO: 143500 - protein, 127 aa, Unknown
  Bacterial polypetide isolated from the Sargasso Sea
PLRIRGLSTKLAHGKAREMLDEVGLSHRVDHLPSTMSGGERQRVAIARALVTEPSVVLADEPTGNLDDSTGEQIYKLLTSLSDKKGTAFVVVTHDITLAGKMDRVLKIKDGRLASDTLFKESQDARL

SEQ ID NO: 143501 - protein, 294 aa, Unknown
  Bacterial polypetide isolated from the Sargasso Sea
PSIRAKDSPHQFSGGQRQRVMIAMALALEPDIIIADEPTTALDVTIQAKILELLGELRDERNMGLILITHDLAIASEISDNVIVLNKGKIVEKGITRDVFVNPNHTYTRQLMDSIPGKIIKQKKKILKKLSDPILEIKNISKFYDTFACDDVSFNLFPNEVLGIVGESGSGKTTISNLILRLVSPSNGKILYHGKNILNFNKKDLFNFRRRVQVVFQDPYASLNPTMNIYDIISEPWVIHSDFLDKKFHKSKVSDLLKSVGLHPDDAIKFPHQFSGGQRQRIAIARAWLSIQKL

SEQ ID NO: 143502 - protein, 212 aa, Unknown
  Bacterial polypetide isolated from the Sargasso Sea
MHTKHLELEQVGIDFPTPKGPFTALQDVNLKISKGEFVSLIGHSGCGKSTVLNIVAGLHQATTGGVILDGAEVKQPGPERAVVFQNHSLLPWLTVYKNVELAVKSTMRGKSKNEMRDWIMHNLELVHMTHALDKLPSEISGGMKQRVGIARALAMEPKVLLMDEPFGALDALTRAHLQDSLMEIHADLGNTVIMITHDVDEAVLLSDRIVMI

SEQ ID NO: 143503 - protein, 207 aa, Unknown
  Bacterial polypetide isolated from the Sargasso Sea
MTDAVIKCESVYKIFGANAKKMLQEANGNVDAKTFQKMGCIVGVNNASFEVSKGEMLVVMGLSGSGKSTLLRCISRLTDATDGKIYIEGQDLLSLKNKELIELRRNKMGMVFQSFALLPHKTVLENIAFPLQIKGIKTEDSINKAVDMVKLVGLEGRENYFPRELSGGQQQRVGIARSLAVEPDIWFLDEPFSALDPLIRKEMQDEF

SEQ ID NO: 143504 - protein, 247 aa, Unknown
  Bacterial polypetide isolated from the Sargasso Sea
MGLDPEQPLRALSGGWRRRAALARSLAPRPDLLLLDEPTNHLDFEAISWLESRLAAFSGAVLFITHDRAFLQRLATRIVEIDRGKLRSWPGDYADFLRRRAEAIAAERQANSEFDRKLAEEEIWIRQGIKARRTRNEGRVRALEAMREVRAQRVNPDARARVHIEEADQSGRKVLDARSLRFGYGDSMLIQDFSLRIRRGDRIGLVGNNGVGKSTLLRLLLGEIEPKAGSIKWGVNIQLGYFDQHRR

SEQ ID NO: 143505 - protein, 127 aa, Unknown
  Bacterial polypetide isolated from the Sargasso Sea
NVVLPLYYQGIKRKEREKIALEYLDNVGLKNWASHLPSELSGGQKQRVAIARAMVSKPKVLLADEPTGALDSKTSSEVMSLIQEINNSGKTILVVTHEQDIAKMCKRIVRLKDGVIVEDKKINQKVL

SEQ ID NO: 143506 - protein, 180 aa, Unknown
  Bacterial polypetide isolated from the Sargasso Sea
MESVIEIKNFSLSFKHHHGLVPAVSDINLTLKKGQTLGLVGESGSGKSVTSLAIMGLLPFPEAKVISGEVLYQGKDLLKINQREFSNIRGSKITMVFQEPMTSLNPVFNIGNQLMEPLKLHQGLKKKEAFKKAISLLEEVGLPDPERKVQDFPHQLSGGQRQRVMIAMALACEPDFMICD

SEQ ID NO: 143507 - protein, 304 aa, Unknown
  Bacterial polypetide isolated from the Sargasso Sea
TTLLRLIAGFEYPSKGRISLNDREISSRKKILSPEKRNIGMVFQDYALFPHLTVFENVIFGLKNKKDRSRVDYLLNVVGLDSFIGRYPHELSGGQKQRLAIARALAPGTNFILLDEPFCSLDMHVKLKLRSELPNILKGCNASGLMVTHDPEEAMSICDKVAVMNDGKIHQIDTPINLLNNPKTIFVSSFILGNNIINLKKNGNSYISCLGEINSSEYLKNTGIKSMSISPKFISIRRSESGDAIVISKEFLGEYLIYKVSINGDILRIRTDINNLLNNGDKCSLSINKNSHVFLYPGAYKEYI

SEQ ID NO: 143508 - protein, 227 aa, Unknown
  Bacterial polypetide isolated from the Sargasso Sea
MTNKLITIQNLSKEFIINKNKTCILQDINFKVYKGDVISISGPSGSGKSTFLNILGLLDSTFTGSYEFLNHNVNSLKYNEKNNIRNKSIGFVHQFFYLIPELTVLENVSLPNLILNNSMKKTINIAREILINCGLENQMYSKPIYLSGGEQQRVAIARALINNPDLIIADEMTGNLDEKTADTIFDFFMEKISSNNQTLIYVTHNLKYARKANKAFEISNNKINHIL

SEQ ID NO: 143509 - protein, 206 aa, Unknown
  Bacterial polypetide isolated from the Sargasso Sea
MSEPVIKCENVYKIFGANAEKMLQDSNGNVDAKTFQENGCIVGVNNASFEVSKGEMLVVMGLSGSGKSTLLRCISRLTDATGGKIFIEGQDLLQLNNKDLIDLRRNKMGMVFQSFALLPHKTVVENIAFPLQIKGVKTEESINKAMDMVKLVGLDGRENYFPRELSGGQQQRVGIARSLAVEPDIWFLDEPFSALDPLIRKEMQDE

SEQ ID NO: 143510 - protein, 274 aa, Unknown
  Bacterial polypetide isolated from the Sargasso Sea
PTEKRKIGFLFQDYALFPHLTVKENLRFPTNAKNSTNNVDEIIELIKLPNSLDKYPHELSGGEQQRVALARSIISQPDLLLLDEPFSSLDLSLREEVRDDTLHLLQKSNVSVIIVTHDPFEAMFISNHINIFDKSGSIVQSGTPNDLYNNPKNSYVTGFFGETNKFEGVVKESHIHTPVGKIKTPGNLEGEKVVVHIRPQGIKLNKQPTPVNGIKGTVMASKLMGSFSFIHLSVLDNNNEVVHVHSHMPADFNPKQSSAVEIEIDNEQAYIFKN

SEQ ID NO: 143511 - protein, 178 aa, Unknown
  Bacterial polypetide isolated from the Sargasso Sea
MNFPLELIRLSKTYGNNNEAVKNVSFKIKKNEIIGILGPNGCGKTTTIGMILGLLKPSSGKVLINGVEVEVKRVDLLNNLNFISPYIELPKKLTVRQNLEVYGRLYDVKNLETKINYLTEKLRLKKIIDRITGELSSGQKNRVSLAKSIINDPVVLLLDEPTASLDPETGDFVRSFLE

SEQ ID NO: 143512 - protein, 286 aa, Unknown
  Bacterial polypetide isolated from the Sargasso Sea
MFGSFRGLGKTSILKAIAGLIKPSNGSITFLKNVLSSNNVLIPTGERKIGLMFQEDVLFPHYTVNENIEFGILNKDKNKRKKIVSKLLDVFKLNDVAELYPDKLSGGEKQRVALARILITKPKVLLMDEPFSSLDYHLGKEISEFTIKLLKDNQISVIFVTHDIKSAFRVSDKMLIIKNGKIIQNDTPENIYNKPSDRFIAEFVGETNKIEAKINKFGEILTPFGKVNCLECKNSKQECNSKKHFFLIRPEDVSFGKNGVKCKVLDKFFLGDIWEYKVSIKKTFPV

SEQ ID NO: 143513 - protein, 276 aa, Unknown
  Bacterial polypetide isolated from the Sargasso Sea
NPKEFLKIHNNNPDQKTIQTAGYIQAIRNASLEVYENEILVIMGLSGSGKSTLVRCMSRLVDPTIGEIFFENIDMGKLSKNELIEIRRHKMGMVFQHFALFPHRTVIENIAFPLEVQGINRKEREKSALEIIDLVGLQGRENYFPKELSGGQQQRVGIGRSLAVKPELWFLDEPFSALDPLIRKEMQNEFLKIQSTLKKTIIFITHDFDEAIKLADRIIIMNEGRIVQIGSPEDLIMKPADDYVKEFTEDLPRERLLSVKSIMNNKKEPVNSTKVY

SEQ ID NO: 143514 - protein, 255 aa, Unknown
  Bacterial polypetide isolated from the Sargasso Sea
MELIVAKIDLSNISHTYNPNDVNPTYALNPFSMTWENGNRYAILGPSGCGKTTMLNIVSGLVRPSDGKILFDDVDVTDLKTERRNIAQVFQFPVIYNTMTVYDNLAFPLKCRDFSKEKIKERVQSVSVTLNLSSFLNIPARKLTADQKQLISLGRGLVREDVAAVLMDEPLTVIDPDLKFKLRRSLKEINEQYKTTLVYVTHDQNEAMTFADNIIVMDQGEIVQVGLPKELFEKPKTTFVGYFIGSPAMNLFNSE

SEQ ID NO: 143515 - protein, 267 aa, Unknown
  Bacterial polypetide isolated from the Sargasso Sea
MSETVIKCENVYKIFGANAKKMLKDSNGNVDAKTFQDNGCIVGVNNASFEVSKGEMLVVMGLSGSGKSTLLRCISRLTDATGGKIFIEGQDLLQLNNKDLIDLRRNKMGMVFQSFALLPHKTVVENIAFPLQIKGVKTEESISKAMDMVKLVGLDGRENYFPRELSGGQQQRVGIARSLAVEPYIWFLDEPFSALDPLIRKEMQDEFLRLQEKLQKTIMFITHDFDEALKLADRIAIMRDGIIEQLDTPANIVLNPATEYVRQFTEE

SEQ ID NO: 143516 - protein, 275 aa, Unknown
  Bacterial polypetide isolated from the Sargasso Sea
ALGTAVILWYGARLVVTGEVTGAQFVGFLGLSLKLYAPVKNVAKFPAVAQPGLVAAERVFEFLDTNAKITDSPDARVIKGFDREIVYDRVSFSYHQGTSVLRDLSFRVPRGTVLALVGPSGAGKSTVVDLLSRFFEVSSGSISIDGVDVRDVRVSDLRSLMAVVAQEAVLFHDTVARNIAYGRPGATADEVMAASHAANAHEFIVGLPDGYDTVVGERGMELSGGERQRIAIARAILRDAPILIFDEATSALDTESERLIQDALARLVEGRTVLV

SEQ ID NO: 143517 - protein, 302 aa, Unknown
  Bacterial polypetide isolated from the Sargasso Sea
NAKKMLQEANGNVDAKTFQENGCIVGVNNASFEVAKGEMLVVMGLSGSGKSTLLRCISRLTDATGGKIYIEGQDLLSLKEKELIELRRNKMGMVFQSFALLPHKTVLENIAFPLQIKGIETEKSINKAMDMVKLVGLDGRENYFPRELSGGQQQRVGIARSLAVEPDIWFLDEPFSALDPLIRKEMQDEFLRLQEKLKKTIMFITHDFDEALKLADRIAIMKDGIIEQLDTPAKIVLNPATEYVKKFTEEVPREKVLIIEDVMDAPTSDNLSNLKVSKDEIIENVAEKILSQEKSVGVIDKK

SEQ ID NO: 143518 - protein, 277 aa, Unknown
  Bacterial polypetide isolated from the Sargasso Sea
FINYPHLNVFENIAFPLKQRKIDQSVINEKVMDALKSVGLLGYENRKIQELSGGQQQRVSLARSLVKNAKILLLDEPLVNLDYKLREQLREEFKNLFSKGLADETILIYSTTDPRETMELNGEVIVLDEGKVLQVGPAKEIFENPNSLKVAEISNDPPMNIIEAKISDNLIKFEGIDVEAPQHLSKLTEDGLKIGLRSSDIELNENGHEFEVELAEISGSETLLHLKRGNTKIIVSIEEVLNFKIHDKIKINFKIDKAYAFHADGKLASSPFGGLNG

SEQ ID NO: 143519 - protein, 209 aa, Unknown
  Bacterial polypetide isolated from the Sargasso Sea
MNIIEVKDLKKAYLLPGDKSKTFNAVDHISLGIKKGEVYGILGPNGAGKTTTLEMLEGLKEIDDGFAIIDGIDVSKDPYAVKKVIGVQLQSNEYFDKLDLSELLTLFSKLYSTTIDHSKLLDQVNLLDKANAKTQHLSGGQRQRFSIACALVNNPKILFLDEPTTGLDPQAKRNLWTLVKDLNASGMTIVLTTHNMEEAEYLCDRIAIM

SEQ ID NO: 143520 - protein, 207 aa, Unknown
  Bacterial polypetide isolated from the Sargasso Sea
HILKGLNFHVISGSTVAIIGASGTGKSTFLHALGTLENIDQGQLFLDGKDLAGFTRNQAAQFRNESIGFIFQFHQLLNDFNALENVMIPRLIHGGATELVKKNAIDLLEKVGLAERAFHKPSQLSGGEQQRVAIARALINKPRIVLADEPTGNLDEETGVQVMDILLRLNKEHQTTFIMITHNPSLAPKMQFQYRMENGQLHLIAKK

SEQ ID NO: 143521 - protein, 274 aa, Unknown
  Bacterial polypetide isolated from the Sargasso Sea
IKIAIFAAAAFRLMPSINRIVYCYQGIVFSEATLNKIIDFNTLNKNLKQNIKNFNQNFEELELKKINFKYKDKEIFKDLSIKIKKGEFIGVYGESGSGKTTFVNIISGLLEPENGEYCLNSKNIKVSNENWKNIFGYVPQFVNLIDDTLIQNITMCDPKEINYNLFNDICNKMKIQELIDKYGKEKIGERGIKISGGQFQRINLARALYHKPSVLIMDEATSALDNETERKILDTVLELNSKENLTVILISHKLENLKSCNRKFLLDNKNLIEQ

SEQ ID NO: 143522 - protein, 105 aa, Unknown
  Bacterial polypetide isolated from the Sargasso Sea
RVSLAKALINEPSVLLLDEPTASLDPETGDFVRKFIENISKEKKMSILLASHNMDEVKRLCKNVLMMNNGVIIDKGTPNDLISKHGKKNLEEVFLKLNRKENELQ

SEQ ID NO: 143523 - protein, 174 aa, Unknown
  Bacterial polypetide isolated from the Sargasso Sea
MSWRRRPSPAPDAFAQLDAAPELVLHDLRVAVDGRVLVERLSMTATAGQLWCVVGPNGAGKSTWLSVLAGLRSPDGGSVALDGVPLTDWPPLAMARRRAFLPQALHDTFPITVYDAVMTGRHPHLARWEWEGDADARAVDAAVSALQLQSLAERDVRTLSGGERQRVAMAAVVA

SEQ ID NO: 143524 - protein, 276 aa, Unknown
  Bacterial polypetide isolated from the Sargasso Sea
LKGLTKNFAGMEKPAVAPLDCIVHAGYVTGLVGPDGAGKTTLMRMLAGLLKPDAGSAAVIGFDPIKDDSALHAVLGYMPQKFGLYEDLTVMENLNLYADLRSVTGEAREKTFARLLEFTSLGPFTGRLAGKLSGGMKQKLGLACTLVGEPKVLLLDEPGVGVDPISRRELWQMVHELAGDGMLILWSTSYLDEAEQCRDVLLMNEGELLYQGDPTQLTQTMAGRSFLMSSPQENNRRLLQRALKLPLVSDGMIQGKSVRLILKKEATAQQIQNADG

SEQ ID NO: 143525 - protein, 103 aa, Unknown
  Bacterial polypetide isolated from the Sargasso Sea
QQRVAIARALAMRPKVMLLDEITSALDPEVVGEVLNVIRSLNKEHNLTMIMVTHQMGFAREISDRVCFFNDGKIFEQGPPEKLFGDPKNERTKQFLHAVLDAN

SEQ ID NO: 143526 - protein, 37 aa, Unknown
  Bacterial polypetide isolated from the Sargasso Sea
FLYSFLPYGIQKRIELARALAMKPKVLLLDEPAAGSS

SEQ ID NO: 143527 - protein, 218 aa, Unknown
  Bacterial polypetide isolated from the Sargasso Sea
MSDSIKISCKNIWKLYGDHPEKFLKDYNNNPSTEDIKKNKFIPAVRDANIDVITGEILVIMGLSGSGKSTLLRCMSKLIEPTIGQVFFEGKDLLKTSEKELIEIRRHKMGMVFQHFALLPHRNVLQNVAFPLEVQGQDINKREERAKEVVKLVGLEGREKYYPRELSGGQQQRVGLARSLAVEPDVWFLDEPFSALDPLIRKEMQNEFLRLQSILKKL

SEQ ID NO: 143528 - protein, 104 aa, Unknown
  Bacterial polypetide isolated from the Sargasso Sea
FSGGQIQRIAIARAILGNPSILLLDEATSALDAESESEVQKGLNRAMKDRTVIVIAHRLATTQEANKIVVFDKGEIIEVGKHIDLISKPGIYKELCEKQLIKKL

SEQ ID NO: 143529 - protein, 115 aa, Unknown
  Bacterial polypetide isolated from the Sargasso Sea
ELAGSRDEDRARNLLALVGLEDEVDRFPAEISGGQQQRVAIARSLAKRPRLLLGDELTGNLDSWTSSVVMEVLVKACDSEGITCVFVTHDESLVQYATRVIRIDSGKIISDDIVG

SEQ ID NO: 143530 - protein, 123 aa, Unknown
  Bacterial polypetide isolated from the Sargasso Sea
MKDKMGKIIELKKVNKWFDKFQVLKDIDLDVAPQEKIVICGPSGSGKSTLIRCINRLEEHQEGNIVVDGTELSESTKNIEKIRAEVGMVFQQFNLFPHLSILDNCTLAPIWVKKLPKKDAEEI

SEQ ID NO: 143531 - protein, 220 aa, Unknown
  Bacterial polypetide isolated from the Sargasso Sea
QRQRVALARAMAPSPRVLLFDEPYANLDAPLRRALREDARRIIRDTGTVGLFVTHDPAEVLMMADNVAVLDQGAIMESGTPQALYDRPQSRFAAELFGEPQVFGGTIYEDRIVTPLGDWERRALVDQATSNGDASLVVDADRLELQPDDNGMQVTDIQSFGRLTRVSFDGTEGELTVILNWPKNAGTAIGVGSRVRVVPKSGAVFASPCNVEFNNDSHYH

SEQ ID NO: 143532 - protein, 176 aa, Unknown
  Bacterial polypetide isolated from the Sargasso Sea
KSTLLSIIGTLDNADSGELLINGISIQENTNIDKLRNKSIGFVFQFHNLISELTLEENVSLPKMIAKEQWDKDELIDLFEYFDLRDRMNSFPNDLSGGEKQRVAVMRAVINNPSIIIADEPTGNLDKENALKMMSLFEKLNTEKKLTIIIATHDEDVFNIGHKKYQLVDGCLDLVH

SEQ ID NO: 143533 - protein, 276 aa, Unknown
  Bacterial polypetide isolated from the Sargasso Sea
PKARQAKSKARINAYEKMLADENDRQIDTTKIHIPAGPRLGDVVINANGLGKGFGERLLIEDLSFRLPPGGIVGVIGPNGAGKTTLFRMITGGEAPDAGAFTVGDTVKLGYVDQSRDDLENDKTVWEVISDGLDEIELGKRTMPSRAYVGQFNFKGGDQQKRVGQLSGGERNRVHLARMLKSGANLLLLDEPTNDLDVDTLRALEEALEEFAGCAVVVSHDRWFLDRIATHILAFEGDSHVEWFEGNYEAYEADRKRRLGAEADRPTRIKYKPISR

SEQ ID NO: 143534 - protein, 128 aa, Unknown
  Bacterial polypetide isolated from the Sargasso Sea
ARAIAAGPDLIIADEPTSALDVSIQAQILDLLADLKQEKGLTMLFISHDLAVVRQVADRVAVMRQGRILELGPVDDVWSAPRHPYTKALIEAAPVPDPLRKRGLRTPMPGRFATGKLTEAAPGHWVAL

SEQ ID NO: 143535 - protein, 171 aa, Unknown
  Bacterial polypetide isolated from the Sargasso Sea
LGVTTIMVTHDQEEAQTMADRIFVMNEGEIIQSGTPSEIYTKANSPFIASFIGSMNFIPATINSSKKVKCNNIEINCDLGSFKENDSVQLAVRPEEIYFKQENQDDNIITASVKEIEFLGSFQRVYFEAKSFTNNLIIVDVPSANARKIKLVINEEMNLYFSKQDARIYSI

SEQ ID NO: 143536 - protein, 251 aa, Unknown
  Bacterial polypetide isolated from the Sargasso Sea
MSKITLENLSHSYLDKQNSDSDWALRNIDLDWKDGGAYALLGPSGCGKTTLLNIISGLLNPTKGKILFDGKDITSLSPVERNIAQIFQFPVIYDTMTVYDNLAFPLKNRGMSDGEIDSRVKEIAEMLELTSTLNNRASGLTADGKQKISLGRGLVRANVNVIMFDEPLTVIDPHLKWILRSKLKELHQKINRTMIYVTHDQTEALTFADQVVVMHEGQVVQTGTPVELFEKPKHTFVGHFIGSPRHEYYSV

SEQ ID NO: 143537 - protein, 171 aa, Unknown
  Bacterial polypetide isolated from the Sargasso Sea
MKNRFLKLENIYYQVGSKKILENISFILKKGEILSIIGPSGSGKSTILKVIAGLIKPTVGKVVLSNEILTSNNILIPTGKRNIGLMFQEDVLFPHYNVYKNIEFGIQDIPKHTRQKLMIKLLNEFKLTNLAKLYPEKLSGGEKQRVALARILITKPKILLMDEPFSSLDTI

SEQ ID NO: 143538 - protein, 89 aa, Unknown
  Bacterial polypetide isolated from the Sargasso Sea
AIVSKPSLLILDEATSALDSQSEAIIQSSIQALKGSFTIIVIAHRLSTIQMADSIVVLNNGTIVETGTHLELLKNKSAYHQMAVKQNLH

SEQ ID NO: 143539 - protein, 163 aa, Unknown
  Bacterial polypetide isolated from the Sargasso Sea
ALVQQQPFLFSGKIIDVIRMGRNFTKEEVIESARIANAHNFIQKLPEKYETMITERGSNFSGGQIQRIAIARAILGNPSILLLDEATSALDAESESEVQEGLNRAMKDRTVIVIAHRLATTQEANKIVVFDKGEILEVGKHIDLIKKPGIYKELCEKQLIKKL

SEQ ID NO: 143540 - protein, 309 aa, Unknown
  Bacterial polypetide isolated from the Sargasso Sea
IGSESILNNISFILGQGRILAITGESGSGKSMTALSIIQLQPKYAKLKGKIFFKDQDITKKDEFELCKIRGAKIGMIFQEPMTALNPVKTVGDQISETIVLHSEKNKKSADTETLNILERVGLSPATEVIKRYPHELSGGQRQRVVIGIAIALKPSIVIADEPTTALDVTTQAQILALLKRLVKEDNISLILITHDLAVVSDMADEIAIMQNGIIVEIDETQNLFRNMKHPYTRSLFAASGHSVDLPSAKRSADLLLTIQNVTCRYRLARTKIFSKSDYFTAVSNVSFDIKNGERVGTGWRVWLRQINP

SEQ ID NO: 143541 - protein, 205 aa, Unknown
  Bacterial polypetide isolated from the Sargasso Sea
INGQLRPDAGRVRVLGADVTGNAPHRIWRYGVGRTFQITANFASMTVRENVQLALASANGAATGLGRRLERRYCGQAEMLVAMVGLEARANDATVKLPYGDLKRLELAVAMANTPSLLLMDEPTAGMANDARVGMMELVDAMVAERGVSVLFTEHDMDVVFGHADRVIVLDGGRVIAAGSPEAIRADASVRAVYLGTFEGTGDKP

SEQ ID NO: 143542 - protein, 274 aa, Unknown
  Bacterial polypetide isolated from the Sargasso Sea
QEALEKYNSVIGVSDVSFDVNKGEIFCVMGLSGSGKSTLVRHINRLLEPTSGKILINNQDVMQFNKENLQELRNKKIGMVFQNFALMPHRSVLDNIAMPLEIRGVSKNDRLDAANNILNIVELQGWGNKYAHELSGGMQQRVGLARALAADPEFLLMDEPFSALDPLIRRQLQTEFIKLSKQMKKTTVFITHDLDEAVRVGHRIAIMRDGRVVQIGTPEEIVVNPSDDYVADFVKGISRLKVVQAKTIMQPLEQYKKNFGENLSNNEKVNENDI

SEQ ID NO: 143543 - protein, 76 aa, Unknown
  Bacterial polypetide isolated from the Sargasso Sea
GEQQRVAIARAFACEAKVLFCDEPTGNLDSTNSKMISDLLFDVFNESSTALIIVTHDEDLADRCDQKIRLIDGKIQ

SEQ ID NO: 143544 - protein, 279 aa, Unknown
  Bacterial polypetide isolated from the Sargasso Sea
RANPKGRQAKSKARIARFNDLVDQEFQSRSETNEIYIPPGPRLGDKVIEIKNLRKAFGDKLLIDDLSFSLPPGGIVGIIGPNGAGKTTLFKMLTGVEAPDSGEINRGDTVDIAYVDQSRDTLDDSKTVWEEIADGLDMLEVGKYQTSSRAYVGRFNFKGPDQQKHIGSLSGGERNRVHLAKVLRQGGNVLLLDEPTNDLDVETLRALEVALTDFPGCAVVISHDRWFLDRIATHILAFEGDSQVTWFSGNFAEYEADRKRRLGDDADQPHRIKYKPIQR

SEQ ID NO: 143545 - protein, 175 aa, Unknown
  Bacterial polypetide isolated from the Sargasso Sea
MNRDEILSRINFASPYIELPKKLTVRQNLEIYGRLYGIKNLKERIDEVSEDLNIKDFFKRKTGELSSGQKNRVSLAKSLINKPEILLLDEPTASLDPDIGDFIRGYIQKYKSKNQVTILLASHNMSEVERLCDSIIMMKNGKIIDRGTCKEIIEKHGRSNLEETFLKLARSENEF

SEQ ID NO: 143546 - protein, 191 aa, Unknown
  Bacterial polypetide isolated from the Sargasso Sea
MSKDLLEITGMHKSFGGLKVIDDVSFNVRSGSRTALIGPNGAGKTTIFNLLTGVYPIDSGIIKIDGEDITNVPPEDRVTVGMSRSFQNIRLMPHLSTVENVMLGQHARARSLGNLLFPLGMFPQNKWRKLAEEALENAGIGTYPGEVVANLPYGIQKRIEVVRAMVSDPKLLLLDEPAAGLNISETGKLQS

SEQ ID NO: 143547 - protein, 55 aa, Unknown
  Bacterial polypetide isolated from the Sargasso Sea
MRGGILLTLEDLSVAFGSNKALSKINLKVSKGEMLFVTGVSGAGKTTLLRCIAGK

SEQ ID NO: 143548 - protein, 217 aa, Unknown
  Bacterial polypetide isolated from the Sargasso Sea
MSKITLKDLSHSYLYSQSKKEDWALRDVNIDWKDGGAYALLGPSGCGKTTLLNIVSGLITPTKGQILFNDDDVTLNNPVERNIAQIFQFPVIYDTMSVYDNLAFPLKNRGISKEEIDSKVLEIAEMLELKSTLYNRASGLTADGKQKISLGRGLVRSDVNVIMFDEPLTVIDPHLKWVLRSKLKELHQKINRTMIYVTHDQTEALTFADQVVVMHEG

SEQ ID NO: 143549 - protein, 174 aa, Unknown
  Bacterial polypetide isolated from the Sargasso Sea
MTDAVIKCESVYKIFGANAKKMLQEANGNVDAKTFQEKGCIVGVNNASFEVLKGEMLVVMGLSGSGKSTLLRCISRLTDATDGKIYIEGQDLLSLNNKELIELRRNKMGMVFQSFALLPHKTVLENIAFPLQIKGVEIEDSVNKAMDMVKLVGLDGRENYFPRELSGGQQQRVG

SEQ ID NO: 143550 - protein, 280 aa, Unknown
  Bacterial polypetide isolated from the Sargasso Sea
TSRDALDAIQNQGISKTKALEEYNSVIGVSDVSFDVKKGEIFCVMGLSGSGKSTLVRHINRLLEPTSGKILINGKDVMELNREHLQELRNKKIGMVFQNFALMPHRSVVDNIAMPLEIRGISKNDRLDVANKILEIVELQGWGNKFAHELSGGMQQRVGLARALAADPEFLLMDEPFSALDPLIRRQLQSEFIKLSKKMKKTTVFITHDLDEAVRVGHRIAIMRDGKVIQIGTPEQIVISPADEYVADFVKGISRLKVVQAKSIMQKSEEYESRNSKLPD

SEQ ID NO: 143551 - protein, 210 aa, Unknown
  Bacterial polypetide isolated from the Sargasso Sea
VRQPKVLLLDEPLGALDKKLRDEMQLELRTLQKNIGITFVFVTHDQQEAISMSDRVAVMSDGKIQQLSAPNELYKNPKNIFVSDFIGETNFLKAETKSSDGEFINVSIEELGEFKIKNNLNITANSSEVVCSVRPESMMISKVKSDWDICLDANIIQTSYLGEMTRFYVEVKGINKTITVSSQHFDNQSFENNECFISISLEDISLLNKK

SEQ ID NO: 143552 - protein, 265 aa, Unknown
  Bacterial polypetide isolated from the Sargasso Sea
EIFIDGENINNLNQTELREIRSSKIGMVFQNMALLPHKNVRENVAFALELRGIDKKSRDKVANETLETVELSGWGDRYPDELSGGMQQRVGLARAIAANPQILLMDEPFSALDPLIRRQLQDQFIELSQIMHKTTIFITHDLDEAIRIGQRIAIMKDGMLVQIGEPEDIVTDPVDDYVAKFVSGISNLHLVTAGKIMQSIAEYEASAGPVKEESLLKAKLDDDLDCLIDLSIKTDEPILIESESKIVGIVTKKTLLAGIQGHWNT

SEQ ID NO: 143553 - protein, 191 aa, Unknown
  Bacterial polypetide isolated from the Sargasso Sea
MSNAIISAEKLNLVFETADDDVIALKDVSLDINKGEFVSFIGPSGCGKTTFLRAIASLEQPTSGNLTVNGMSPEEARKSRSYGYVFQAAGLYPWRNIYKNVSLPLEIMGYKKNEIPGIVEKVLKLVDLKGFEKKFPWQLSGGMQQRASIARALSFDADILLMDEPFGALDEIVRDHLNEQLLKLGKLQTKQ

SEQ ID NO: 143554 - protein, 115 aa, Unknown
  Bacterial polypetide isolated from the Sargasso Sea
LINKNEKKSYEISKKLLLEFGLDERINYKPLKLSGGEQQRVAIARALVNNPDLILADEMTGNLDEDTANNIFKFFINYIEQTKKTLVYVTHNKTYSLLADETYYFKNKNIHLTNE

SEQ ID NO: 143555 - protein, 237 aa, Unknown
  Bacterial polypetide isolated from the Sargasso Sea
NNSPLLLKKKINLKNITFKYSEKSFPVIQNLNLTILKGEKIGIVGKTGAGKSTLVDIIMGLVEPSEGSICIDGINLFNDKSEDLLKSWQDSLMHVPQNIFLADSSIAENIALGVNKKDIDYDRVNYVAKQTQLIDFIDENKDGFDTFVGERGIRLSGGQKQRIGIARALYKGAKIILLDEATSALDNITEEKIVESLNYLGSDITIIIIAHRLNTLRFCDKVFELRQGNLTQKNLFS

SEQ ID NO: 143556 - protein, 221 aa, Unknown
  Bacterial polypetide isolated from the Sargasso Sea
MRIEVYARGYNTNIIKKVEIRYAELVKQGYQPNLILVGKKAIGYFQNRKDRYVIKSTFKELEQVPTVKDSEGVTNEILAEFLSENSDRVEIIYTKFITLVSCAPVVQTLLPLDPQGIAEENDEIFRLTTKDSKLLVEKSNIEKSDSEKLPSDIVFEQSPDQLLDSLLPLYLQNQVLRALQESAASELACRMTAMNNASDNAKELASTLNLTYNTARQAAIT

SEQ ID NO: 143557 - protein, 51 aa, Unknown
  Bacterial polypetide isolated from the Sargasso Sea
KKVGLSERMNNRPNQLSGGQQQRVAMARAIINNPAILLAEEPTGALDSKTT

SEQ ID NO: 143558 - protein, 255 aa, Unknown
  Bacterial polypetide isolated from the Sargasso Sea
MGNKKFISLNNSISFKNISFQYDNEKNVLKNLNFEINKNQITALVGESGSGKSTIADLIIGLISPQKGKIMIDDNDILDLEIGTFRKNIGYVSQDIFLFNDTIQRNLTWMADYDIKEDDIWNALKQANADEFVKKMPEKLDTIVGERGVQLSGGQRQRLSLARVFLKKPKVLILDEATSSLDSLTEIEIQNTIEIMSSTNEITFLIIAHRLSTIKNADKIIVLDSGNIVQSGDYTELVSLKDGKFNIMLNSQIIK

SEQ ID NO: 143559 - protein, 306 aa, Unknown
  Bacterial polypetide isolated from the Sargasso Sea
ILVMVIYSWLLTLIALSVLPIQIGLTVLGAPLFRRQFRAAAEENAKTQSHLVEVLTGIQTVKAQNVEMVSRWRWQEFYSQYIARTFEKTITGTALNQTSQVLQKISQLMVLWIGASMVLNGDLSLGQLIAFRIISGYVTQPLLRLSTIWQNIQELRVSFERLADVIDTPQESDEVDKSKVMLPPLQGEVRFEDLSFRFRPGQPEVLKDINLEIKAGTFVGIVGQSGSGKSTLMKLLPRLYEPGEGRILIDGYDIAKVELYSLRRQIGIVPQDPLLFSGTVSENIALTNPEASSEEIVRAARLANAH

SEQ ID NO: 143560 - protein, 234 aa, Unknown
  Bacterial polypetide isolated from the Sargasso Sea
LDDEPTDALLLSVKDPAVELSTGPAIGVELQQLCFGHTPGKPPLLNSIDLTAVPGEWVAITGPSGSGKSTLLNLIAGLLQPDSGQVLLNGQPLLSLSHKQRSHAIAMVRQEDALLDVSLRENLTLWDPSISDFALHSICHDLGLDAVLQQLPQGLDTVLQPGQFNLSGGQRQLLNLGRVLLQSPQLLLLDEATSALDSSSETKVYELLRRRHCTVVMAAHRSGSIKRADRVFEL

SEQ ID NO: 143561 - protein, 131 aa, Unknown
  Bacterial polypetide isolated from the Sargasso Sea
MPVTPPSETPAAHGIEFRDVSKRYGSSPDAPLVVDHISFSVPRGTLTTILGPSGCGKTTTLRLIAGLESPTSGRIFIDGQDVTPLGPAQRNVSLVFQNYALFPHMNVIDNVVYGLHLSGLGKQQVRDKARA

SEQ ID NO: 143562 - protein, 217 aa, Unknown
  Bacterial polypetide isolated from the Sargasso Sea
MDSLSSAIKIENVWKVFGNTSPEALDAIQNKGISKTEALEEYNSVIGVSDVSFDVKQGEIFCVMGLSGSGKSTLVRHINRLLEPTSGKILINGQDVMTLDREHLQELRNKKIGMVFQNFALMPHRSVVDNIAMPLEIRGVSKNDRLDAANKILEIVELQGWGNKFAHELSGGMQQRVGLARALAADPEFLLMDEPFSALDPLIRRQLSSEFIKLSKR

SEQ ID NO: 143563 - protein, 153 aa, Unknown
  Bacterial polypetide isolated from the Sargasso Sea
YVQNTTIRSLRSAIGLVSQDVLLLNGTIFDNLTYGLANPEADEVYKAASQAGLDNIIMRLPNGYDTQVGEGGIKLSGGQRQRIALARALLLKPRILLLDEPTSMLDEQARLSFKEEFHGLFARFTVIMISHDPTLSNVADVVYKLENGELNRQ

SEQ ID NO: 143564 - protein, 260 aa, Unknown
  Bacterial polypetide isolated from the Sargasso Sea
MQPQSRFIGVTGPSGAGKSSLFRALAGVEKSASVQMPWTSQKVGIVFQQPMLFPHTDVRGNLALAQRHASPNAMSIDACLRGCYCEHLIDKPVQALSGGEAQRVAIARALVNGPDVLLLDESLSAIDIFTRRKIYQFLNNLCVLGKLTCLVISHDLDDLALFSDELVFIDQGRTELCGKTRDVLTQVFEKEGFATPSSVLEGFKVTAQSDAHDSNQSQNAVVSYKHGSQTQTDQNALTLQGNEQCQSENGIERVEVAGQE

SEQ ID NO: 143565 - protein, 208 aa, Unknown
  Bacterial polypetide isolated from the Sargasso Sea
MIFRLIGHINQQSLAVDNIGGTSTSKTFNYAKNSNKFEISNASVTYDLSKEVSENNFVLKNINLQFNKGQKIMLIGENGSGKSSALILSRGLFSRTIGQHRGTINLFGNNTKDLSLGELSQMARIVFPSAAHGLVGIRINDELELSLLRSKIDKSKWKEQKLKILKLVGLDESFLKRKTLSLSGGQQQRVAIASALIAEPELLLFDEV

SEQ ID NO: 143566 - protein, 272 aa, Unknown
  Bacterial polypetide isolated from the Sargasso Sea
MLEESNGKVDAKTFQRNGCIVGVNNASFEVSKGEMLVVMGLSGSGKSTLLRCISRLTDATGGKIFIEGLDLLQLKNKELIDLRRNKMGMVFQSFALLPHKTVVENIAFPLQVKGVNTEDSISKAMDMLKLVGLDGRENYFPRELSGGQQQRVGIARSLAVEPDIWFLDEPFSALDPLIRKEMQDEFLRLQEKLQKTIMFITHDFDEALKLADRIAIMKDGIIEQLDTPANIVLNPATEYVRKFTEEVPREKVLIIEDVMDAPITENLGELKV

SEQ ID NO: 143567 - protein, 154 aa, Unknown
  Bacterial polypetide isolated from the Sargasso Sea
KLTVRQNLEIYGRLYGISNLDERINEISEDLDIKNFFGRKTGELSSGQKNRVSLAKSLINKPEILLLDEPTASLDPDIGDFIRSYIQEYKIKNKVTILLASHNMSEVERLCDSVIMMRKGKIIDKGTCEELIKKHGRDNLEETFLKLARSKDEF

SEQ ID NO: 143568 - protein, 181 aa, Unknown
  Bacterial polypetide isolated from the Sargasso Sea
SGKSTLINLIIGFYNPDSGKIKADHIDILDNISNWQNLIGYVPQKIFLTDDTLEKNIAFGVEEDEIKIEKLNYAINHSQLNEFISDRELGLKTKIGERGKQISAGQAQRIGIARALYKNPKILIFDEATSALDKKTEKRIIEDVLNLKNKGITVILVSHEPSVLAYCDKFYDLDENKYIKN

SEQ ID NO: 143569 - protein, 177 aa, Unknown
  Bacterial polypetide isolated from the Sargasso Sea
MSNSSNKEVVLSSKDLVAGYLPGVDILTGCNFELHKGELVGIIGPNGAGKSTLVKSMFGLVEVRSGVVELMGEEITNLPAHQLVEKGVGFVPQTENVFPSLTVSENLEMGAYQLPKNQVEERIKEIADLFPRLGERIRQRAGLLSGGERQMLAMGRALMMQPTVLLLDEPSAGLSPA

SEQ ID NO: 143570 - protein, 290 aa, Unknown
  Bacterial polypetide isolated from the Sargasso Sea
MPDGYNTLVGDDGALLSGGQKQRIAIARAILKNSPILILDEATSALDSESEIKIQEAMSNLTKDRTTLVIAHRLSTIEDADKIVVLDNGKIVEEGSHEELLSLDAHYAKLHANQFKDDTPSKVEEAEISFPMVPSAVNPIDHTSFIEKSWYRKSMLSWMLWPLSKLTSYVSERRYRNYLTSKPEVDELNVPLVVVGNIVAGGTGKTPIVIWLLEKLIEKGYKPSIVSRGFGGQSNRYPLIIDAQTDSSESGDEPKMIFLNTGVPVCVSPDRVKGIKELVTKTDTNIIISD

SEQ ID NO: 143571 - protein, 254 aa, Unknown
  Bacterial polypetide isolated from the Sargasso Sea
MKKRLSTLAENASPAININNVSFSYPSSKALFTDLNLNIRAGEKLALVGPSGAGKTTLFQLLMRFYEPSSGSVVFNETNINNLPLAQLRDQIAVVTQEPVVFARSVMDNIRYGKPEATDEDVVKAAKLAFAHEFIDSLDNRYDTQLGERGIKLSGGQKQRIAIARAILADRPILLLDEATSALDAMSERMVQQAINRLMEGKTSIVIAHRLATVQHADRIVVMDKGSIVATGDHASLMKSDTLYREYAELQLLS

SEQ ID NO: 143572 - protein, 226 aa, Unknown
  Bacterial polypetide isolated from the Sargasso Sea
MQNLVEVKNLKKNYGSKEAVKDISFAIKKDEILGLLGPNGSGKTTTIGMLLGLLKPTDGEILIDGKKIEGNRIDILKKINFISPYIELPKKLTVKQNLIVYGKLYNVLNINSTIEYLVEKLRLSELLNRITGELSSGQKNRVSLAKALINNPSVLLLDEPTASLDPEIGDFVRTFLENYKKEKKISILLASHNMNEVTRLCKKILMMKDGVIIDKGNPEELIKKPW

SEQ ID NO: 143573 - protein, 263 aa, Unknown
  Bacterial polypetide isolated from the Sargasso Sea
SSVPEAIGCSNDGDPIIQVRNIRKWYQVNKGLPIIGSHDWLKAVDDVSFDVPSGQTIGLVGESGCGKTTTAKMVLGLEDPSTDGGVPVGSIYFEGQDVTTLSSAGKREMRRSVQAVFQDPWSSLNPRMRVNTIIGEPLEINTTMTKKERNTRAGDLLAEVGLNPYQGNLYPHEFSGGQRQRIGIARALALNPKLIVLDEPVSALDVSIRAQIMNILVDLQKEHNLAYILIAHNLATVRYMCHRTAVMYLGVVQEYGDTEAIFA

SEQ ID NO: 143574 - protein, 304 aa, Unknown
  Bacterial polypetide isolated from the Sargasso Sea
QRYAILGPSGCGKTTMLNIVSGLVRPSKGEILFDETPVTDLKTEDRNIAQVFQFPVIYNTMTVYDNLAFPLRCREFTKEKIEERVKAVSDTLNLSSFLNSPARKLTADQKQLISLGRGLVREDVAAVLMDEPLTVIDPDLKFRLRRNLKEINEQYKTTLVYVTHDQNEAMTFAENIIVMDQGEIVQVGLPKDLFEKPKTTFVGYFIGSPAMNIFHSTVSSDHEVKINDTTIKTNSNLGNLKDKNVKLGIRSEFIELAEKEKSNTVKIKLTRVEDFGNFKLLTGKMGDLVIKSKVEREKPIPDGE

SEQ ID NO: 143575 - protein, 245 aa, Unknown
  Bacterial polypetide isolated from the Sargasso Sea
MLTARKEAEVPADEEILRVEGLRMHFPVRGGVLYRQTGSVKAVDGVDLTIRKGETLGLVGESGCGKSTLGKCIVRLLNPTGGRVVFKGTELTHMSQSALRPYRQDFQMVFQDPAESLDARMSVGELISEPMVIQGIGTRPERVRRVEELLELVGLPKTASQKFSFEFSGGQRQRIGIARALAVNPDLLVLDEPVSALDVSVQSQVLNLLMELQRELGLSYLFISHDLAVVKHVSDRIAVMYLGKI

SEQ ID NO: 143576 - protein, 205 aa, Unknown
  Bacterial polypetide isolated from the Sargasso Sea
GKTTTISMLLGLLIPTAGELQVLGVDMLRDRYSALADVNFSSPYVDLPKRLTARENLMVYAKLYGVSDPVARLRELAGDLDIKKLLDRPFGELSSGQKTRVSLAKSLLNEPKLLLLDEPTASLDPDTADWVRTYLMTFQKNRGATILLASHNMSEVERMSSHVLMMKEGNIVDRDSPSGLLSKYGRQNLEDVFLDIARDRSNTAA

SEQ ID NO: 143577 - protein, 90 aa, Unknown
  Bacterial polypetide isolated from the Sargasso Sea
VCDEPTSALDVSIQAQILNLLKDLQDQLNLTILFISHDLPVVRQMCDRIAVLKNGRLCEVSMTEELFKNPSHEYTKELLTLMPKIESIYS

SEQ ID NO: 143578 - protein, 185 aa, Unknown
  Bacterial polypetide isolated from the Sargasso Sea
MSIEIINLSKKFNDIYAVNKINFTIGTNKTVGLLGPNGCGKTTSIGMMLGLIKPTSGEVKIQNKNIDTIDRNKLLNIMNFASPYVELPKKLSVKQNLEIYGRLYGVENLSSRISELTNDLDLKDFLNKKTGELSSGQKNRVSLAKSLINKPEILLLDEPTASLDPDTGDYVRSYIQSYKSKNQVT

SEQ ID NO: 143579 - protein, 99 aa, Unknown
  Bacterial polypetide isolated from the Sargasso Sea
MSDNIIQINNMNKWFGDFQVLKGINLEVKPKQKIVVCGPSGSGKSTLIRCINRLEEHQEGEIIVDGTELTEDTKNIEQIRAEVGMVFQQFNLFPPFINS

SEQ ID NO: 143580 - protein, 175 aa, Unknown
  Bacterial polypetide isolated from the Sargasso Sea
METCVALISAQNLKKTFGDIEAVSNVSLTLSTGEVVGFLGPNGAGKSTTMKMLTGFLEPDDGSIIINSSDLQKEPLKAKSHIGYLPEGAPSYSDMNVFSFLKFVGLMRGLRGKKLNDRLNIMSQSINLSSVWFQPIETLSKGFKRRVGIAQALIHDPKILILDEPTDGLDPNQKY

SEQ ID NO: 143581 - protein, 194 aa, Unknown
  Bacterial polypetide isolated from the Sargasso Sea
FAGQERSQMEPELAAKSGIARTFQNIALFKGMSTLDNLMTGRLLKQKQNLFMQALYFGPAEKEETFHREKVEMVIDFLDLQSIRRTPVGSLPYGLQKRVELGRALAMEPEILLLDEPMAGMNVEEKQDMSRFVLTANYELKTTIVLIEHDMSVVMDISDRIVVLDYGKKIGSGKPEEIRKNKAVIDAYLGLSDD

SEQ ID NO: 143582 - protein, 207 aa, Unknown
  Bacterial polypetide isolated from the Sargasso Sea
LGPNGCGKTTTIGMILGLLKPTKGKVLINGIEIEKQRVDLLNKLNFISPYIELPKKLTVRQNLEVYGRLYDVKKLENKIDYLSEKLRLNEFINKITGELSSGQKNRVSLAKSIINDPSVLLLDEPTASLDPETGDFVRGFLEEYQKEKETSILLASHNMAEVERLCSSVFMMNKGSIIDQGAPDKLIQKHGRRNMEEVFLKLTRDLI

SEQ ID NO: 143583 - protein, 166 aa, Unknown
  Bacterial polypetide isolated from the Sargasso Sea
VDMGICQVPEGRRIFSRLTVEENLRLGAHANEKGKYFENDIKEVYDLFPVLSDRKTQRGGTLSGGEQQMLAIGRALMSKPKVLLLDEPSLGIAPKLVNQIFVSIKNINKEKNVTIFLVEQNAKKALELADRAYVLVNGKVTIKGSGQELLKNKDIQAAYLEGGAKN

SEQ ID NO: 143584 - protein, 195 aa, Unknown
  Bacterial polypetide isolated from the Sargasso Sea
MSGVVAPDTGNVSFDGKETKISTRKQSEEVAGIETIYQNSALCDDMTIIRNIFMGREITNLFGFMDHKKMEDLSLEVLESGVHISGIDSPLKEIGALSGGQKQAVAIARAVYFKRKILLLDEPTSALSVRETERVLKYVTELKSENVSSVIVTHNLYHAFQVCDRFVVMSHGKVIFEKNKSDTNLDEVTEQVIKV

SEQ ID NO: 143585 - protein, 238 aa, Unknown
  Bacterial polypetide isolated from the Sargasso Sea
MSEPVIKCESVYKIFGENAETMLKEANGNVDAKTFQENGCIVGVNNASFEVSKGEMLVVMGLSGSGKSTLLRCISRLTDATGGKIFIEGQDLLNLNNKELIDLRRNKMGMVFQSFALLPHKTVVENIAFPLQIKGINTEDSINKAMDMVKLVGLDGRENYFPRELSGGQQQRVGIARSLAVEPDIWFLDEPFSALDPLIRKEMQDEFLRLQEKLQKTIMFITHDFDEALKLADRIAIM

SEQ ID NO: 143586 - protein, 265 aa, Unknown
  Bacterial polypetide isolated from the Sargasso Sea
MSQIKIVNLQKSFGDFTAVKNSNLTINDKEFFVLLGPSGCGKTTTLRMIAGLELPTSGEIYLGDEEVGMLRASERDIAFVFQLFALYPHMNVKNNLSFPLKMQGYSRNEIKTRVEEAAKLLRIDHILNSNISSLSGGDRQRVALGRALVRRPKAFLMDEPLGTLDAEFRELMCLELKKLHLDIGATTVYVTHDQLEAMSLADRIAVMDGGEILQADEPAVIYNKPTTKFVASFIGSRGMNFINIDQGISNEQSTLNIEGTNLTYQ

SEQ ID NO: 143587 - protein, 216 aa, Unknown
  Bacterial polypetide isolated from the Sargasso Sea
IGRAITRKPKVFLFDEPLSNLDAALRVQMRVELAKLHNELDATMIYVTHDQTEAMTLADDIVVLDTGIVSQKGSPLELYDKPNNMFVGGFIGSPKMNFMPSKILSKSADSTEVDIMGMSKISVPKLSASSSEGDAVTLGIRPEHLVVNGDSDGSWESKVFVVEKLGDVTYLYLEKDGEPLVAEAEGHSDIKVGDTVKVGFPAGRCQLFDSSSQAFK

SEQ ID NO: 143588 - protein, 124 aa, Unknown
  Bacterial polypetide isolated from the Sargasso Sea
MSKNDSFVKFDKVDKSYDGKVLVVKDLNLDIAEGEFITMLGPSGSGKTTCLMMLAGFETPTNGEIYLDSNPISNIPPHKRGIGMVFQNYALFPHMTVYENLAFPLKVRKISKEEIDNKIDKALS

SEQ ID NO: 143589 - protein, 201 aa, Unknown
  Bacterial polypetide isolated from the Sargasso Sea
SIGMLLGLITPTEGKILINNKNLNDYKRNEILSQLNFASPYVELPKKLTVKQNLQIYGRLYGVKNLDERINEVSSDLDIKKFFERKTGELSSGQKNRVALAKSLINKPAILLLDEPTASLDPDIGDFIRSYLQEYKSKNEVTILLASHNMNEVERLCDSIIMMKSGKIVDRGTCEQLIKKHGRNNLEETFLKLVRDSDEFQ

SEQ ID NO: 143590 - protein, 287 aa, Unknown
  Bacterial polypetide isolated from the Sargasso Sea
MAHDERLVPIREIKTKVTALTQENITSSKKDDPLLLSVRNLRKTYYTRKKSLFSRSARHSIPAVAGVSFDVPRGTCVGLVGESGCGKTTTSKMIMRAVTPDTGEIVLNDSGKTINVLGLKKRDELLRYRRKVQYIFQDPYSSLNPRMTVFDIISEPLLIHDVGTNETRASRVRELMDLVGLPVKYLRRYPHSFSGGQRQRIGIARALALQPDLIICDEPVSALDVSIQAQVLNLLRDLKSELGLTYLFISHNLAVVDYIADHVIVMCAGHIVESAPRSIFFKDPKHP

SEQ ID NO: 143591 - protein, 236 aa, Unknown
  Bacterial polypetide isolated from the Sargasso Sea
MPSLKDLKIRINTVKSTQKITSAMKMVASAKLKRAQEKAESGRPYATKMSSIVSTLASKVNSESGPKLLFGNKENKRVLLVAISADRGLCGGFNNNISKEIRKRVNDLKKDNKEVKLILVGRKVGTVLKREMGDQIIGSFTGIQGDNLSFSKISPITLQIISLFEDDKIDCVEMYYNRFRSVISQVVTKKQLIPADVNTETPDNVEESTYEYEPEEEMILDHLLPRNLSTQIYSAL

SEQ ID NO: 143592 - protein, 282 aa, Unknown
  Bacterial polypetide isolated from the Sargasso Sea
MNEVYERLDEIEADSATARAGQILGGLGFDPEEQLKATKDFSGGWRMRIALAAALFMKPDLLLLDEPTNHLDVHALTWLEEFLRKWEKTVLIVSHDRGFLNDCTTATVFLHHKKLRYYGGSYDTFLKVRAEHRANEEAIQRNQNLREASLKQFISRFGQGHKKMVRQAQCRMKMLEKLQSERVDVDYDDPYLRINFPSASPLPPPCISVMNVAFGYEGYQTLYQNLDFGLDMDSRVAIVGPNGAGKSTFLKLLEGDILPTEGWINRHTKLRLARFSQHHLET

SEQ ID NO: 143593 - protein, 231 aa, Unknown
  Bacterial polypetide isolated from the Sargasso Sea
MLKADNITLHYGSSQILHGVSIIANVGQITCIMGSNGVGKTSLLRVLSGSHLSSGGSYQLDGEEVSKYRADKLARLGVAYVPQGRLIFPMLTVRENLQTGFACLSRDEHVISDDIYNLFPVLKTMLDRRGGDLSGGQQQQLAIARALITKPRFLLLDEPTEGIQPNIITQIGEVIEFLKSQKKIAIILVEQYFDFAYRLSDNIYAMTRGQIVHDSCKSRINESELRKLVGV

SEQ ID NO: 143594 - protein, 56 aa, Unknown
  Bacterial polypetide isolated from the Sargasso Sea
MSKIIELKNVNKWFDKFQALKDINLEVNQQEKIVICGPSGSGKSTLFRCINRLEEH

SEQ ID NO: 143595 - protein, 144 aa, Unknown
  Bacterial polypetide isolated from the Sargasso Sea
LFKSVIKSKSQKKYEENLKDKAKNIMEDLNILHMADSYARELSGGQKKLLELARSIINEPEILLLDEPLAGVNPKLAEDILSLIKKLSNEGITILMVEHNIEAVMKISERIVVLAEGSLIADGNPNEIRTDRNVIEAYLGKDND

SEQ ID NO: 143596 - protein, 189 aa, Unknown
  Bacterial polypetide isolated from the Sargasso Sea
MKIEVSNLHKSYYDGEGHKLHILKGLNFEIISGSTAAIVGASGTGKSTFMHTLGTLESIDHGNLYLDEKDLTSFTRNQAAKFRNESIGFIFQFHQLLNDFNALENVIIPGLINGGTTGIVKKNAINLLEKVGLAERAFHKPSQLSGGEQQRVAIARALINKPRIVLADEPTGNLDEETGVQVMDILLRL

SEQ ID NO: 143597 - protein, 177 aa, Unknown
  Bacterial polypetide isolated from the Sargasso Sea
IAFIFVTHDQEEALTMSDKIVVMNHGKIIQTGTPIEIYDKPLSKFTAQFIGESNFFEGEIIERNKKIKIKTHYSNILYLENSNQFNFSDNQKLNILLRPEDLSLYPYNSYEDCFIEGEIKQIFFLGTDFKILLNIDKEKIIHCILRDSVRNEINKCKIGNKIKLFYNPSSLRVLNDK

SEQ ID NO: 143598 - protein, 188 aa, Unknown
  Bacterial polypetide isolated from the Sargasso Sea
MDKFNRTLIRIKPEKNINCLPIFIKDLTLILDNRKILSSLNLSINSNNVTVIMGPNGAGKSLFLKILNGILTPTSGCITWNNKKQFSDTLNTQAFVFQKPILLRRSVIANLDYMDSVLGYKKKISKDRLLEIVQLKKQKNQPARMLSLGEQQRLSLVRSLMLRPNLLLLDEPTANLDPASTKIMEDII

SEQ ID NO: 143599 - protein, 288 aa, Unknown
  Bacterial polypetide isolated from the Sargasso Sea
IGFDPIKNDSALHAVLGYMPQKFGLYEDLTVMENLNLYADLRSVTGEVREKTFARLLEFTSLGPFTGRLAGKLSGGMKQKLGLACTLVGEPKVLLLDEPGVGVDPISRRELWQMVHELAGDGMLILWSTSYLDEAEQCRDVLLMNEGELLYQGEPTQLTQTMAGRSFLMHSPQENNRKLLQRALKLPQVSDGMIQGKSVRLILKKEATADDIRHGNGMPEIDISETAPRFEDAFIDLLGGAATSESPLGAILHTVEGTPGETVIEAKALTKKFGDFAATDHVDFAVQR

SEQ ID NO: 143600 - protein, 129 aa, Unknown
  Bacterial polypetide isolated from the Sargasso Sea
MSQITMQPADAMITLEDVNKWYGQFHVLKDINLKVKQGERIVLCGPSGSGKSTTIRCINHLEEHQQGRIVVDGIELNEDIRNIEKVRQEVGMVFQHFNLFPHLTVLQNCTLAPIWVRKMPKKEAEALAM

SEQ ID NO: 143601 - protein, 244 aa, Unknown
  Bacterial polypetide isolated from the Sargasso Sea
MPNSIEVINLTKTYKSKEAVRNINFKINENEIVGLLGPNGCGKTTTIGMILGLLKPTSGKVLINGMNLEKNKISLLHKMNFISPYIELPKKLKVKQNLIVYGKLYNIKNLNEQIDYLSNKLRLNELLDKVTGELSSGQKNRVSLAKALINNPSVLLLDEPTASLDPETGDFIRTFLENYKKEKRISVLLASHNMDEVKRLCDSILLMKDGLILDSGTPDNLIKKYGRKNLEEVFLEIIRNKNEF

SEQ ID NO: 143602 - protein, 301 aa, Unknown
  Bacterial polypetide isolated from the Sargasso Sea
NASFEVSKGEMLVVMGLSGSGKSTLLRCISRLTDATGGKIFIEGQDLLSLKEKELIELRRNKMGMVFQSFALLPHKTVLENIAFPLQIKGIETEKSINKAMDMVKLVGLDGRENYFPRELSGGQQQRVGIARSLAVEPDIWFLDEPFSALDPLIRKEMQDEFLRLQEKLKKTIMFITHDFDEALKLADRIAIMKDGIIEQLDTPAKIVLNPATEYVKKFTEEVPREKVLIIEDVMDAPTSENLSDLKVSKDEIIENVAEKILSQEKSVGVTDENNKIVGTVHPFKIIHTVFGGRKKQLDHG

SEQ ID NO: 143603 - protein, 110 aa, Unknown
  Bacterial polypetide isolated from the Sargasso Sea
RLSIARALVKDSPILILDEATSALDSESEIEVQQAIENLMENRTTVVIAHRLSTIRNADRICVMEEGRIVEEGTHEELLLLEGRYSQLHALQFRSETEEELGHSGNYLVS

SEQ ID NO: 143604 - protein, 312 aa, Unknown
  Bacterial polypetide isolated from the Sargasso Sea
MTVGELSAFLFYAVMAGGSVATISEVIGEVQRGVGASERLYELFTTEPAIRSLNADTAEASAPSTYSALKGASTKPIISKAAPKIELENVSFAYPNSKPLFNNLNINIQAGERLALVGASGAGKTTLFQLLMRFYDPSAGQILFNGAPINKMPVDVLRQHIAIVTQEPVVFADTVLENIRYGSPHASDDAVINASKQAFAHEFIDNLDERYNTQLGERGVKLSGGQKQRIAIARAILADRPILLLDEATSALDAMSERMVQRAIDRLMVGKTSIVIAHRLATVQHADRILVMDKGQVVGSGDHASLMKSDTL

SEQ ID NO: 143605 - protein, 211 aa, Unknown
  Bacterial polypetide isolated from the Sargasso Sea
MEVQSLRKYFPIRKGFIKKTVGHVKSVDGINFHINEGETLGLVGESGCGKTTTARCILRAMKPTEGKIQFKTTDGSHTDLATLKEDQIRSLRTDIQMIFQDPFASLNPRMNILDLIGEPMLVNGLTNRKQRTEKVAELLKMVGLRPEYMQRFPHAFSGGQRQRIVIARALALKPRLVVADEPVSALDVSVQAQVLNLMLELQQNLNLTYLF

SEQ ID NO: 143606 - protein, 76 aa, Unknown
  Bacterial polypetide isolated from the Sargasso Sea
RKIVKSLIPRHLNVQVWKYLLESYASEQAARMVAMENATSNSEDMIKNLTLEFNKARQAAITTEMLEIVSGAEALK

SEQ ID NO: 143607 - protein, 78 aa, Unknown
  Bacterial polypetide isolated from the Sargasso Sea
MSKNAIISFHDVTKSFGDVKAVNSVCFEIKRGEFFALLGPSGCGKTTLLRMVAGFEIPDSGEIAIDNQLMAGTPPNLR

SEQ ID NO: 143608 - protein, 235 aa, Unknown
  Bacterial polypetide isolated from the Sargasso Sea
FDKTGTLTSDEMEVLGVAGLASSSSASSSSSSSSSAAAAAAAASPVDSGLVSAAAVPEETSLVLAGCQQLVLVDGELLGDPMERAALQAAGWLFASEGVCVCRDPGRRAQLRIVQRFPFSSELRRSATVAAVERKQGKQGGLSSALLGGPPPPPPPQHVVLCKGAPEVMRALLAAVPEGYDDAYTHHVRLGRRVLALASKPLPSHDVLARQLSRTEAEQGLRFGGFLVLHCPPKP

SEQ ID NO: 143609 - protein, 174 aa, Unknown
  Bacterial polypetide isolated from the Sargasso Sea
MPWKTVKENITFALMNGGKTNSAAEANDIAMEYIQKVKLDRFENTYPHMLSGGMKQRVAIARGMAMEPDILLMDEPFAALDALTRRQMQEELLELWDETRFTVLFVTHSIEEAVIVGSRILIMSPHPGQVKAELNAHDQSHATIGQDDFAELQNKIHNMIFADRVLEDEAIPHA

SEQ ID NO: 143610 - protein, 306 aa, Unknown
  Bacterial polypetide isolated from the Sargasso Sea
NNASFEVSKGEMLVVMGLSGSGKSTLLRCISRLTDATDGKIFIEGQDLLSLNNKELIELRRNKMGMVFQSFALLPHKTVLENIAFPLQIKGVETENSINKAMDMVKLVGLDGRENYFPRELSGGQQQRVGIARSLAVEPDIWFLDEPFSALDPLIRKEMQDEFLRLQEKLKKTIMFITHDFDEALKLADRIAIMKDGIIEQLDTPAKIVLSPATEYVKKFTEEVPREKVLIIEDVMDAPTADNLSDLKVSKNEIIENVAEKILSQEKSVAVTDESNKIVGTVHPSKIIHTVFGGRKITIKIWNLLN

SEQ ID NO: 143611 - protein, 163 aa, Unknown
  Bacterial polypetide isolated from the Sargasso Sea
MAFFEGNKMTGGYGDGPDIISSCTIDVNKGEIVAILGPNGAGKSTAMKAMLGLLNLKSGNVLIEGEDISKLSPQERVKKGISFVPQTRNVFAELTVRENLEVGAFLREDDVLKVIEEIYDLFPILRDKKDQVVGQLSGGQRQQVALGRALMIRPSVLMLDEPT

SEQ ID NO: 143612 - protein, 97 aa, Unknown
  Bacterial polypetide isolated from the Sargasso Sea
KVSGGQHQRIGIARALYRNPKIFVMDEATSALDYKTEDNIMRDLNLKNTDLTAIIVSHRSRAVKNCDLIYYLENGRIKDFGSFNNLSKKYKKLKLRN

SEQ ID NO: 143613 - protein, 106 aa, Unknown
  Bacterial polypetide isolated from the Sargasso Sea
MSDPIIKIQNMNKWFGDFQVLKNINLEVEANKKIVVCGPSGSGKSTLIRCINRLEEHQEGDIIVDGNELSEKTKDIEKIRAEVGMVFQQFNLFPHLSILDNCTLAP

SEQ ID NO: 143614 - protein, 235 aa, Unknown
  Bacterial polypetide isolated from the Sargasso Sea
DVSFKLEGGQTLGLVGSSGCGKSTVMRLLLRFYRPSSGSITIDGQDIARVSGASLRRLFSVVTQDAQLFNGSIRENIAYARSGAGDAEILKAASRAELALDAEGSDLRLDKPCGEKGAKLSGGQQQRVALARAMLKNGTIYLLDEPTTGLDGVVSKQIQKTLDSFSANMTTIMITHHLEDLKHAHAILYLDSGKIIERGTFDGLLAQGGKFAEQVEARKRGGGSTESGPTNILHL

SEQ ID NO: 143615 - protein, 196 aa, Unknown
  Bacterial polypetide isolated from the Sargasso Sea
VWFRKKLRPPLKPYQIAYQGVARTFQNIALFKGMSTLDNIMTGRFTHMTSGVAAQAVWKGPAEREEIRNREKVEQIIDFLEIQKIRRTEVGRLPYGLQKRVELGRALAAEPKLLLLDEPMAGMNVEEKEDMSRFVLDVNEEFGTTVALIEHDMGVVMDIADRVVVMDYGKKIGDGTPAEVRSSQVVIDAYLGVSHE

SEQ ID NO: 143616 - protein, 143 aa, Unknown
  Bacterial polypetide isolated from the Sargasso Sea
MFWKRYPAIKRNSANYGKIELENVHVSFDSKNIILNDFVLNIDKGKYVSILGTSGIGKTTLLRAISGFKRINSGYIRINGQLASSGFSHMPPENRNLGFVFQDYALFPHLNVFENVGFGLGRKVKDRKIKIQSIIEMIDLKKP

SEQ ID NO: 143617 - protein, 91 aa, Unknown
  Bacterial polypetide isolated from the Sargasso Sea
MIIKLKQVTKNYGNVQGISNINLEVNKGITGILGPNGAGKSTTMKIILGLSRPSRGRVTVDGRNPFDDWELKKDFGFVPEYDCFYEHMSGL

SEQ ID NO: 143618 - protein, 292 aa, Unknown
  Bacterial polypetide isolated from the Sargasso Sea
KIENKGNVTLTGLTISDTLTDGNGGSLTLNNGPSYDSTTLGSSPGTLKVGEVQTYTALYVITAPVVRTPSVINSAVATASSTSALVSDTSDDGNDDDGNTVDDPTVVNISPDPSIEAVKTATVSDVNANTLNDPGDIITYTIVVVNTGNVTLTSINLADTMTDNNGNALSLDGGPTFVSSSGSSVAGTLASAESATYTASYTIAPGAAFSGAIKNRVLVTGSSPGNTGDVTDFSDNGNDNDGNIYNDFTVVQTSAEASINVIKSATVSDVNANSLTDAGDIITYTIVVSNTG

SEQ ID NO: 143619 - protein, 113 aa, Unknown
  Bacterial polypetide isolated from the Sargasso Sea
NTQVDFLGGQQQRVAIARALAMRPKVMLLDEITSALDPEVVGEVLNVIRSLNKEHNLTMIMVTHQMGFAREISDRVCFFNEGKIFEEGPPEKLFGDPQNERTKQFLHAVLDAN

SEQ ID NO: 143620 - protein, 59 aa, Unknown
  Bacterial polypetide isolated from the Sargasso Sea
ILFLDEPTSALDKENTEIVLELIKSKLNKNVAIITIIHDATIRNQICTREFNLENFTEV

SEQ ID NO: 143621 - protein, 92 aa, Unknown
  Bacterial polypetide isolated from the Sargasso Sea
RALCMEPKIMLFDEPTSALDPEMIKEVLDVMVNLANQGMTMIVVTHEMGFAKEVADKMIFMDEGMIVEKADTKEFFANPKSDRTKLFLSQIL

SEQ ID NO: 143622 - protein, 194 aa, Unknown
  Bacterial polypetide isolated from the Sargasso Sea
REVNQPGPERAVVFQNHALLPWLTCYQNVELAVKTVFKGRKNKREMREWIEHNLKLVHMDHAMHKYPAEISGGMKQRVGIARALAMEPSVLLMDEPFGALDALTRAHLQDSVMEIQADLNNTVIMVTHDVDEAVLLSDKIVMMTNGPAATVGEVLEVDLARPRDRLALASDERYNHFRSQVLSFLYERQRRPVE

SEQ ID NO: 143623 - protein, 105 aa, Unknown
  Bacterial polypetide isolated from the Sargasso Sea
MVKANKSKNNIKNFKTVSINNLSHFYGKNENKKQVLNDVNLNIDKGELVLLKGPSGCGKTTLLTLIGALRTCQSGDLKVLNNQLNGASRKTRQVLRRSIGMIFQG

SEQ ID NO: 143624 - protein, 282 aa, Unknown
  Bacterial polypetide isolated from the Sargasso Sea
NIKAGESLGLVGQSGCGKTTTARSLCLLEPKTSGSVNFFNPEKNIMESIDAIDEDGMRVFRRNMQMIFQDPYESLNPRWTIKDIIKEPLDIHNIGSLGEREEAIVEILRTVGLTPPENYLQRYPHEISGGQRQRVSIARTLIMKPKFVICDEPTSMLDVSIRISIMDLMLNLAKELDVSYLYITHDLAVARYMCNRIAVMFNGKLVEIAETEELLNNPIHPYTKRLISSIPIPDPGYKRERYEVNYDELDKIISSNPNEKMVDIGNEHLVATHDTKDFFIET

SEQ ID NO: 143625 - protein, 244 aa, Unknown
  Bacterial polypetide isolated from the Sargasso Sea
MSQIKIVNLQKSFGDFTAVKNSNLTINDKEFFVLLGPSGCGKTTTLRMIAGLELPTSGEIYLGDEEVGMLRASERDIAFVFQLFALYPHMNVKNNLSFPLKMQGYSRDEIKTRVEEAAKLLRIDHILNSNISSLSGGDRQRVALGRALVRRPKAFLMDEPLGTLDAEFRELMCLELKKLHLDIGATTVYVTHDQLEAMSLADRIAVMDGGEILQADEPAVIYNKPTTKFVASFIGSPGMNFINI

SEQ ID NO: 143626 - protein, 217 aa, Unknown
  Bacterial polypetide isolated from the Sargasso Sea
MHPISFNLGPGKILGVVGPNGSGKSTLLRLLYRFYKPTSGLIKIDDTNIWSVSNKEVARKVAVVLQEQPSDFALNVFDIVSLGRTPHRSWGSNTNGIHDNKVVKNSLEYLSLLEFADRKFNTLSGGERQRVMVARAIAQEPSLLVLDEPTNHLDIKQQLEVLNLIRNLPLTIITSLHDLNMASSVCDEVLLLNHGYSLGYGIPKDIFSEKTISDAFD

SEQ ID NO: 143627 - protein, 247 aa, Unknown
  Bacterial polypetide isolated from the Sargasso Sea
MNKFQLLDDGLIINKISKSYGNKKVVRDISISINRGEIVGLLGPNGAGKTTTFYMIVGLVKPDTGSILLDKIEISKMPIYSRGLQGISYLPQEPSIFRGMNVEDNLLSIIEIVEKDKNKHDIILQSLLNEFDINHVRKSKSIVLSGGERRRLEIARTLASKPKYLLLDEPLTGIDPVSIEEIKIIIKKLKEKNIGVLITDHNVRETLKIVDKVYIVNEGMIFFSGNPDEAISDERIKKFYLGSDFSI

SEQ ID NO: 143628 - protein, 133 aa, Unknown
  Bacterial polypetide isolated from the Sargasso Sea
ESAKKANAHNFIQKLSQEYETEITERGSNFSGGQIQRIAIARAILGNPSILLLDEATSALDAESEAEVQKGLNRAMKDRTVIVIAHRLATTQEANKIVVFDKGEIIEEGKHIDLINKPGIYKELCEKQLIKKI

SEQ ID NO: 143629 - protein, 116 aa, Unknown
  Bacterial polypetide isolated from the Sargasso Sea
MTSSTATSAVIRASALCHSYGKGSMRRRVLQGINVEIQPGEVVLLTGPSGCGKTTLLTLIGALRSVQEGQLDVLGVPLRGASAGQRRRVRERIGMIFQGHNLLRCLTAEQNVQMGA

SEQ ID NO: 143630 - protein, 107 aa, Unknown
  Bacterial polypetide isolated from the Sargasso Sea
MRRRKGGNLSGGQQQQLAIARALVTDPKVLLLDEPTEGIQPSIIKDIAKALNEIRKLRRITIVVSEQVLSFAMDVADRLFVIEGGRLVHETARADTDEQRIKSYLSV

SEQ ID NO: 143631 - protein, 242 aa, Unknown
  Bacterial polypetide isolated from the Sargasso Sea
MTLCLNQVELSFAGRPVVRGVSLQLDAGEVVGLLGPNGAGKTTTFNLVTGMLRPDSGDVLLDGESISPLAMPERARMGIGYLPQEASVFRNLTVQDNLLLAMHQSGYPSHLRRARLDELVEDFQLDRFLHRKGFQLSGGERRRTEVARALAVGPNGPRYLLLDEPFAGVDPLAVNDLQQLIRSLRERGVGMLITDHNVRETLSITDQAYILTDGTILASGTADQLASDANVKRRYLGEDFRL

SEQ ID NO: 143632 - protein, 239 aa, Unknown
  Bacterial polypetide isolated from the Sargasso Sea
MEIAVQAVSHQYGGHHALDNISLCLKPGLTMLLGPNGAGKSTLFALITGLQKLTQGSITFDGATLSQSRTSIMAKMGVVFQQSTLDIDLSVKQNLSYFASLHGISTTSALSHIQGLLDELDLTSKLNTKVRNLNGGHRRRVELARCLIHKPSLLLLDEPTVGLDIESRHLILRVVQALAHSQNVSVLWATHLFEEVKHNNNLIVLSKGRVLAHNQCEALLAKYHQQDIEHLWQHLMQEG

SEQ ID NO: 143633 - protein, 304 aa, Unknown
  Bacterial polypetide isolated from the Sargasso Sea
ERAMALLDEVGIRDPQAAMSAFPHEFSGGMRQRVMIAMALINEPKLLIADEPTTALDVTIQAQILKLIAELQTKRDIGVLFISHDLAVVSDTADQIVVMEKGKVVESGQPKAIFDNPQHPYTQKLLAAIPSGQKAADTVTPDPLIRIENLRTWFTPTGGADPVKAVDDVSLEIHRSEVLGLVGESGSGKSTLGRSILRLVPITDGQITFEGTELSALEGKSLKQFRHRMQMIFQDPYASLNPRMTVYDTLAEPLLLHGLVRKADLDQAIRELMDNVGLARAFVRKYPHEFSGGQRQRIAIWPRT

SEQ ID NO: 143634 - protein, 106 aa, Unknown
  Bacterial polypetide isolated from the Sargasso Sea
MPSLKDLRNRISSVKSTKKITSAMKMVAAAKLKRAQTNAEQTRPYAKKIKEIVDDLSENVNTSSFKFGNSDLSEKSKNILLIVCSADRGLCGGFNGSIIKFTKKIV

SEQ ID NO: 143635 - protein, 196 aa, Unknown
  Bacterial polypetide isolated from the Sargasso Sea
MINKISKSYGNKKVVRDISISINRGEIVGLLGPNGAGKTTTFYMIVGLVKPDTGSIVLDKIEISKMPIYSRGLQGISYLPQEPSIFRGMNVEDNLLAIIEIVEKDQNKQNIILQSLLNEFDINHVRKSKSIVLSGGERRRLEIARTLASRPKYLLLDEPLTGIDPVSIEEIKIIIKKLKQKNIGVLITDHNVRETL

SEQ ID NO: 143636 - protein, 316 aa, Unknown
  Bacterial polypetide isolated from the Sargasso Sea
GPLSGGEKRRVALCRLLLSSPDMLLLDEPTNHLDAESVSWLQRFLHDFSGTVVTVTHDRYFLDEVAGWILELDRGQGIPYEGNYSGWLEQKQKRMEQEGRQDASRMRSLAEELEWVKASPRGRQAKSKARLTAYEELLAQGQEKAIDNTKIMIPAGPRLGDLVIETDKLVKGFSDQLLIDELSFRLPAGGIVGIIGPNGAGKTTLFRMITGQEEPDNGSIKVGDTVKLGYVDQSRDNLNPKATVWEEISDGLDEIELGKRKMQSRAYCGLFNFRGPDQQKVVGQLSGGERNRVHLAKMLKSGANLILLDEPTNELD

SEQ ID NO: 143637 - protein, 188 aa, Unknown
  Bacterial polypetide isolated from the Sargasso Sea
FLTFNVCGLKTNFADRYPHEMSGGQRQRVGIARALAMNPEFIICDEAVSALDVSIQAQVINLLEDLRDEFGLTYLFISHDLSVVRHICHRVAVMYLGNIVELAECDELFDNPIHPYTRALLEAVPIPDPDIENARVHKVVKGEIPSPINPPGGCVFHPRCELEVETCSKKMPEFREVRPGHWVACTEV

SEQ ID NO: 143638 - protein, 276 aa, Unknown
  Bacterial polypetide isolated from the Sargasso Sea
FDLKQGETLGLVGESGCGKSTLGRTLLKLFEPTAGTITFEGRDITHLSSKEMRSLRQEMQIVFQDPAESLNSRHTVGQILEEPFVIHGKGNAEQRRVWVQELLEKVGLPGSAVDRYPHEFSGGQRQRIGIARAIALKPKLLVCDEAVSALDVSVQSQIVNLLLTLQREMNLAIIFIAHDLSVVKHISDRIAVMYLGRIVELAEAQSLYLAPRHPYTQALISAIPVPDPRRRSQRILLTGDVPSPISPPSGCHFHQRCPYAGELCRTKSPSLQPCDG

SEQ ID NO: 143639 - protein, 291 aa, Unknown
  Bacterial polypetide isolated from the Sargasso Sea
TEGSPTVTGIISLNPGGETSLLRVTAAVEKGSQHPLGMAVVKAAQEKGIAIPAVTHFDAPSGKGVSGDVEGQRVVIGNELAMQENSIVIDNQKAVADTLRMEGATVIYVATDGDLAGLIAISDPVKTTTPDALKALRQAGIRIVMLTGDNQLTAEAVARKLGIDEVEAGILPDGKKAVITRLKESGHVVAMAGDGVNDAPALAAADVGIAMGTGTDVAIESAGVTLLKGDLMILNRARHLSEITMKNIRQNLFFAFIYNALGVPVAAGLLYPVYGILLSPVIAAAAMALSS

SEQ ID NO: 143640 - protein, 248 aa, Unknown
  Bacterial polypetide isolated from the Sargasso Sea
MSRPDSLNLSKSPILEVHNLEKVFQSPGIFNKNKIIAVDNVSFKVFKGEIVALVGESGSGKSTIAKLVTRMIRPSAGSIYLDGKNKKVTESRNVPLEYRKTVQMVFQDPFGSLNSIHTVYHHLARPLLRHGLKKQEEILSHIIHLLEKVGLNPGEKFAEKFPHEMSGGERQRVAIARALSLEPQIIVADEPTSMLDVSIRMDILEIFAKMRKENNLTVLFITHDLASARYLSDRILVLKNGSIIEENI

SEQ ID NO: 143641 - protein, 258 aa, Unknown
  Bacterial polypetide isolated from the Sargasso Sea
MRGISSKTRQKKSLEWLEKLEVRELAKRDISTLSGGQKQRVALARSLVMEPEILLLDEPLSALDAHLVIRMQAVLTQLQKELGITFVYVTHSQSEAFAMANRVIIMNVGEISQIGTPKDIYRSPTNQFVAEFVGRNNILSGKVYDIKSKIAFIKTNSGNYNFEIIDQNIKLGNTLNYIISADLMNFSLVKPKNSNIVNCKLISEEYIGSMVTLFLESVDGTEFKIQMQEREHSKLNIQNGEKYWLSWSKKNVHTLKKD

SEQ ID NO: 143642 - protein, 282 aa, Unknown
  Bacterial polypetide isolated from the Sargasso Sea
STLVRHINRLLEPTSGKILINNQDVMKFDKENLQKLRNKKIGMVFQNFALMPHRSVLDNIAMPLEIRGVSKNDRLDAANNILNIVELQGWGNKYAHELSGGMQQRVGLARALAADPEFLLMDEPFSALDPLIRRQLQTEFIKLSKKMKKTTVFITHDLDEAVRVGHRIAIMRDGAVVQIGTPEEIVVNPADEYVADFVKGISRLKVVQAKTIMKSIKDYENKFGSLDNNNEIVNENEVLSKLIETSISKDKPIVVSDKNNQKIGVISQPDLLKAVVEGNENE

SEQ ID NO: 143643 - protein, 216 aa, Unknown
  Bacterial polypetide isolated from the Sargasso Sea
MGGQQQRIALARAMAPKPSLLLMDEPFSSLDEELREQLAREVRLILKHENISALLVTHDQNEAFAMGDDICVLNQGRVQQTDSAYNLYHNPRNRFVAEFIGEGSIFSGVIVSKDTIETDLGKIKGVLPESFKKMANVEVLIRPENVVLSDMNEIQAVVKDRYFRGSGFLYNFKTINGHELLSIIPSKDKLSLDQVVGLQLKIEKLIVFNPSSRALN

SEQ ID NO: 143644 - protein, 203 aa, Unknown
  Bacterial polypetide isolated from the Sargasso Sea
MNLVANNLTYKPNHEFHLNDISFNFKKGNLYTILGRTLSGKTTLLKTIAGLLNPDSGVIHFEDKEFSKIPVWQRNVAMVYQQFINYPHLNVYENISFPLKQRKLDENKIKNDVNEALKTVGLIGFENRKIQELSGGQQQRVALARSLAKKAKILLLDEPLVNLDYKLREQLREEFKRIFSKGFAEDTILIYSTTDPQEVMELN

SEQ ID NO: 143645 - protein, 181 aa, Unknown
  Bacterial polypetide isolated from the Sargasso Sea
MNKFLEIQNLNISFQGNRSFNTLNNFNLKLNKNGSLGIVGESGSGKTLSMLALTRLLPKQALISSGSFSFLDQDLSKVDNLNFYKNFSGKKISMIFQEPMTALNPVYTIGRQLMYTYMYHNKVTNKEAYNKSLEMLDAVKLTNNTERMKQYPHQLSGGQRQRIMIAMALINKPQLLIADEP

SEQ ID NO: 143646 - protein, 160 aa, Unknown
  Bacterial polypetide isolated from the Sargasso Sea
MASLKDIRSRIDSVKRTQKTTSAMKMVSAAKLRKSEDNIKAALPYAQKLKDIVSPLCSRFREGNVEDNFVRFFQTKEGNKTAVILITTDRGLCGGFNASLCKGLSQKLLEEGIDRAEFSIIGRKGNDFFKKTTHEILSFHSGTQPENQLSLVKEIVNNFT

SEQ ID NO: 143647 - protein, 95 aa, Unknown
  Bacterial polypetide isolated from the Sargasso Sea
KLIICDEPTSALDVSVQAQILALLKKLQKEYELGYLFITHNISVVEYIAHYVAVMYEGKIVEQGRVDKILKNPENPYTKRLLSAVPRIELKSRAL

SEQ ID NO: 143648 - protein, 312 aa, Unknown
  Bacterial polypetide isolated from the Sargasso Sea
EQHLQNIKGTVIAVTHDRYFLDNVAGWILELDRGEGIPFKGNYSSWLDQKSKRLAQEEKSESKRRKALERELEWVRKGAKGRQAKGKARLNNYENMRNESVKEKETKIEIPIPNGPRLGNEVIEAQSISKGYDGNLLYEDLNFKLPPAGIVGIIGPNGAGKTTLFKMIMNEETPDSGSFKVGETVKIGYVDQRHKSIDPNESIYEVISGGNDTIQIGGQSVNSRAYVSKFNFNGADQQKKVGVLSGGERNRLHLAMTLKTEANVLLLDEPTNDIDVNTLRALEEGIESFAGCAVVISHDRWFLDRICTHILA

SEQ ID NO: 143649 - protein, 236 aa, Unknown
  Bacterial polypetide isolated from the Sargasso Sea
MDLVANNLSYKPDDQYHLNEVSFNFKEGNLYTILGRTLSGKTTLLKTIAGLLTPDSGEIEFDGKNFLKIPVWERNVAMVYQQFINYPHLNVFENIAFPLKQRKIDQSIINEKVMDALKSVGLLGYENRKIQELSGGQQQRVSLARSLVKNAKILLLDEPLVNLDYKLREQLRDEFKNLFSKGLADETILIYSTTDPRETMELNGEVIVLDEGKVLQVGPAKEIFENPNSLKVAEIS

SEQ ID NO: 143650 - protein, 236 aa, Unknown
  Bacterial polypetide isolated from the Sargasso Sea
MSDNNQLPVIKCESVYKIFGNNAKNLLEDSNGNVDAKTFQDAGCIVGVNNASFDVKKGEMLVVMGLSGSGKSTLLRCISRLTDATAGKIFIDGDDLLSMNSKELIELRRNKMGMVFQNFALLPHKTVLENIAFPLQIKGTNTNESIAKAMEMVELVGLKGRENYFPRELSGGQQQRVGIARSLAVEPDIWFLDEPFSALDPLIRKEMQDEFLRLQGVLKKTIMFVTHDFDEALRLA

SEQ ID NO: 143651 - protein, 239 aa, Unknown
  Bacterial polypetide isolated from the Sargasso Sea
MKDIIFSYPGKSNSTLNELNIEIPVNKTVGIVGSSGSGKSTIIDIILGLINPDKGEIVIDGEFKINKDNIHFMQDKIGFVPQSIFLSDASIKENIAFGESISEIDESKIEKSLILANLDEFITTLPDGLDTQVGQNGMQLSGGQRQRIGIARALYRESEILIFDEATSSLDNVTEALVMDAINNFAKTKTIIIVAHRLSTVQKCDKLYLIDKGNVVDSGNYEYLLENNKEFLEMATIIN

SEQ ID NO: 143652 - protein, 309 aa, Unknown
  Bacterial polypetide isolated from the Sargasso Sea
WSNAESMLKEANGNVDAKTFQENGCIVGVNNASFEVSKGEMLVVMGLSGSGKSTLLRCISRLTDATGGKIFIEGQDLLNLNNKELIDLRRNKMGMVFQSFALLPHKTVLENIAFPLQIKGIKTEDSINKAMDMVKLVGLDGRENYFPRELSGGQQQRVGIARSLAVEPDIWFLDEPFSALDPLIRKEMQDEFLRLQEKLQKTIMFITHDFDEALKLADRIAIMKDGIIEQLDTPANIVLNPATEYVRKFTEEVPREKVLLIKDVMDETTSDVGDLKVSKDEIIENVAEKILTQEKAVAVTDGKNNIVGS

SEQ ID NO: 143653 - protein, 260 aa, Unknown
  Bacterial polypetide isolated from the Sargasso Sea
MSEPVIKCQSVYKIFGANAERMLKEANGNVDAKTFQEKGCIVGVNNASFEVSKGEMLVVMGLSGSGKSTLLRCISRLTDATGGKIFIEGQDLLNLNNKELIDLRRNKMGMVFQSFALLPHKTVLENIAFPLQIKGIKTEDSINKAMDMVKLVGLDGRENYFPRELSGGQQQRVGIARSLAVEPDIWFLDEPFSALDPLIRKEMQDEFLRLQEKLQKTIMFITHDFDEALKLADRNCIMKDGIIEQLDTPANIVLIQLRNM

SEQ ID NO: 143654 - protein, 266 aa, Unknown
  Bacterial polypetide isolated from the Sargasso Sea
MTDIIQKVKNLSIGFRSKKGEEILILKNINTNIKKGETVGIVGESGSGKSTLALAMMGYVKHGLYTIGGECQFNSSNLLKMKSKDLEKIRGRKIAMIPQNAGQALTPNLKIGYQIDEALQLHSDLDEKEREKKISELLNKVRLPSPETIALRYPHELSGGQQQRVAVAMALAGTPDLLLLDEPTTGLDVTTQAHVLELLNFIAKDTGTSMVYVSHDLGAIAQVSDRIIVMYSGEIVLEGPSRDILKRPIHPYTHGLLKSIPKLSLA

SEQ ID NO: 143655 - protein, 140 aa, Unknown
  Bacterial polypetide isolated from the Sargasso Sea
LRKEKVGFVFQSFELLPSLTALENVMLPSELKDEDEPEERAKYFLDRVGLKEREHHYPNQLSGGEQQRVAIARAFACSAKILFADEPTGNLDPKNGEMVSDLLFEVNSETDNALVVVTHDHDLADRCDKKINLKLGKIVE

SEQ ID NO: 143656 - protein, 123 aa, Unknown
  Bacterial polypetide isolated from the Sargasso Sea
MTSSKSFVKFDKVDKSYDGKVLVVKDLNLDIDEGEFITMLGPSGSGKTTCLMMLAGFETPTNGEIYLDSKPISRIPPHKRGIGMVFQNYALFPHLTVYENLAFPLKVRKLSKDDIDKKVDKAL

SEQ ID NO: 143657 - protein, 230 aa, Unknown
  Bacterial polypetide isolated from the Sargasso Sea
DVARRVADALKLVQLGDAGHHMPAQLSGGMQQRVALARALVIEPDVLLLDEPLSALDANLRASVRSELKALHERLPNLTIVCVTHDQDDALVLSDRTLLMREGRIAQLGTPQQLYDTPNDGFVARYLGAANLLPPQVAFPMDDVRYNERERVACLRPEALRIAPLGEGQLHGAITSVEWYGAVLSVSVVLDAMPNEPVLVTMQRGQGMMPEKGARVSLRYEADDVVLINP

SEQ ID NO: 143658 - protein, 119 aa, Unknown
  Bacterial polypetide isolated from the Sargasso Sea
ERADEKARNLNGGHRRRAEIARALIHDPKVLLLDEPTVGLDVAARQGLVAHVHALAEAGLCVLWATHLTDEVRAEDRLIMLDQGRILKNGMAGDIAAGRPLTQVFLELTGAAQDAGVAL

SEQ ID NO: 143659 - protein, 252 aa, Unknown
  Bacterial polypetide isolated from the Sargasso Sea
RLGMSLVFISHDLSVVKKLSDYIYVMKNGKIVEFGTNDEIFNNPKNEYTRELVSYQSNIKESKNFDSDSILKVEDLDVWYPIKKGLLKRTVDYVKAIKNVSFDLKIGESIGIVGESGSGKTSLILAILNLIESKGKIKINKKDLNQLNKKEMLNLRKEIQIVFQDPFSSLSPRMNIEDIISEGMLIHYPSISKKEKEEKIKNILDKVGLEYKNTIGKYPHEFSGGQRQRICICRALILEPKIFILDEPTSAL

SEQ ID NO: 143660 - protein, 230 aa, Unknown
  Bacterial polypetide isolated from the Sargasso Sea
MPSLKDLRNRISSVKSTKKITSAMKMVAAAKLKRAQDNAERSRPYANKMKDIVISLISRSNTDNLKFSKTNNKKKTVLLIVCSADRGLCGGFNGSIIKHTKNLTDTLKKNGKNFKFLFVGKKAYQSLRRLYKDLTIDLVSDFANPRIEFEIASSIRDQVLKLFFDSEISECYLIYTKFKSAISQNVESQKLLPVEKDYQQDSHPKTVMYDFEPNEEIILDDIIPRNIAIQ

SEQ ID NO: 143661 - protein, 227 aa, Unknown
  Bacterial polypetide isolated from the Sargasso Sea
MLNISKVETFYGNIQALRGVDVKVNNGEIVALIGSNGAGKSTLLMTISGVNKAATGEILFDSKSIANMPPHDIVNLGISQVPEGRRIFSRLTVEDNLRLGASVNKKGKNFDLDSKDVYDLFPVLKDRLSQRGGTLSGGEQQMLAIGRAMMARPKVLLLDEPSLGIAPKLVNQIFTSIKNINKEKKVTVFLVEQNAKKALELADRGYVLVNGKISLEGAGKDLLNNPR

SEQ ID NO: 143662 - protein, 114 aa, Unknown
  Bacterial polypetide isolated from the Sargasso Sea
KKKPIKRALEVVNDVKLPDPERILKSFPHQLSGGQQQRIVIAMALMSKPSLLILDEPTTALDVTVEAAVVDLVKDLGKKYGTSMLFISHNLGLVLETCDRICVMYSGEAVETGS

SEQ ID NO: 143663 - protein, 184 aa, Unknown
  Bacterial polypetide isolated from the Sargasso Sea
ERIAIIGENGVCKTTLLNTLAGKLTPKAGEFKWSENANIGYYAQDHADEFEKDMNLFEWMEQWQQEGDDEQVVRSFLGRMLFSQNDIKKSVKVISGGEQGRMLFGKIMMHKPNILLMDEPTNHMDMESIEALNLALEAYEGTLLFVSHDRQFVSSVATRIWEIKDGKIIDFRGNYSEYLASKEA

SEQ ID NO: 143664 - protein, 118 aa, Unknown
  Bacterial polypetide isolated from the Sargasso Sea
FNRKTGELSSGQKNRVSLAKSLINKPEILLLDEPTASLDPDIGDFIRSYIQDYKSKNQVTILLASHNMSEVERLCDSIIMMKKGKIVDFGTCKELIQKHGRDNLEETFLKLVRSKDEF

SEQ ID NO: 143665 - protein, 183 aa, Unknown
  Bacterial polypetide isolated from the Sargasso Sea
MFVQIKNLSKIYKKFLAVNKINFNIERNKTIGLLGPNGCGKTTTIGMILGLVTPSEGEIFIENKNIEKYSRDQILSRFNFASPYVELPKKLTVKQNLEIYGRLYGIKNLKDRINDIASDLDIKNFFERKTGELSSGQKNRVSLAKSLINKPEILLLDEPTASLDPDIGDFIRSYIQEYKSKNK

SEQ ID NO: 143666 - protein, 260 aa, Unknown
  Bacterial polypetide isolated from the Sargasso Sea
RNPTGLELAAPIRGEIVFKDVDFEYNLERPVFSGLNLTIEGGKVVALVGASGCGKSTVTKLIERFYDPTRGTITLDGIDIRNLRIDKLRANIGIVSQEPLLFEASIADNIAAGRPQAISGAKASMNEIVAAAEAASAHEFIMSFPNGYDTMVGGKNSKLSGGQKQRIAIARAALRNPSILILDEATSALDTENERLVQDALDSLVHSVAGGQRTTIVIAHRLTTVRDADKIVVLGSEDASAGLAGGAGSAHGSVVWNKAR

SEQ ID NO: 143667 - protein, 186 aa, Unknown
  Bacterial polypetide isolated from the Sargasso Sea
MLKITNVETFYGKIQALRGVDIDVNDGEIVSLIGSNGAGKSTLLMTISGVNKARSGNINFNGERIENREPHKIVDLGICQVPEGRRIFSRLTVEENLRLGAFTNEKGKHFETDIKDVYDLFPVLSDRKTQRGGTLSGGEQQMLAIGRALMSKPKVLLLDEPSLGIAPKLVNQIFASIKNINKEKNV

SEQ ID NO: 143668 - protein, 128 aa, Unknown
  Bacterial polypetide isolated from the Sargasso Sea
VVEHFTSGKVDEIHVVYNYFINLAQQEVKSEVLLPLVYDDEDGAVRDRLYEPSKDRLVSSLVPRHLNIQIWKYLLESYASEQAARMLAMENATTNAGDMIKNLTLEFNKARQAAITTEMLEIVSGAEA

SEQ ID NO: 143669 - protein, 145 aa, Unknown
  Bacterial polypetide isolated from the Sargasso Sea
MSEDSIISLKNVNKWFGEFHVLKDVDLEVKKKERIVVCGPSGSGKSTMIRCINRLEEHQEGTIIVDGIELTGNLKNIDSVRKEVGMVFQQFNLFPHLSVKENITLAPIWVKKMPKAEAEELAMEQLEIVKIPEQANKYPGQLSGG

SEQ ID NO: 143670 - protein, 196 aa, Unknown
  Bacterial polypetide isolated from the Sargasso Sea
GDRVAIVGRSGSGKSTLLHLLAGLDDLDSGSIKVGGLPLSGLSPDARAAIRMRYMGFIYQQHHLLPEFDALENICMPLRLSGSGKKEADKLGRELLERVGLGDRANHKPSELSGGERQRVALARAVISKPDLVLADEPTGNLDEENAASAIELLLELTINSGSSILMVTHDHSLLSGFDRVLELSSGLLSEASEVG

SEQ ID NO: 143671 - protein, 175 aa, Unknown
  Bacterial polypetide isolated from the Sargasso Sea
DIQMVFQDPTESLNPRYTARQSIYDPLKNLTKMNNDEINNKIIEVSNLVGLPLNLLDRLPHQLSGGQKARVGIARAIALSPKILILDEPTASLDVSIQAIILNLLVDLRAKLDMSYLFVSHDLNVVQLLCDYIIVMKEGLIIEQGKSNQIISNPEENYTKSLLAASPKPPKLPKA

SEQ ID NO: 143672 - protein, 172 aa, Unknown
  Bacterial polypetide isolated from the Sargasso Sea
MAYFEGAKMTAGYGDGPDIISSCSITANRGEIVAILGPNGAGKSTAMKVMLGLLKLKSGSVTLNDEDISNINPQDRVKKGISFVPQTRNVFAELTVRENLEIGGFLTEGSLENKIESIYSLFPILSEKKTQVVGQLSGGQRQQVALGRALMSDPSVLMLDEPTAGVSPNCNG

SEQ ID NO: 143673 - protein, 144 aa, Unknown
  Bacterial polypetide isolated from the Sargasso Sea
MSDPIIKIQNMNKWFGDFQVLKNINLEVEANKKIVVCGPSGSGKSTLIRCINRLEEHQEGDIIVDGNELSEKTKDIEKIRAEVGMVFQQFNLFPHLSILDNCTLAPIWVKKMPKKEAQELALDQLKKVQIDDQANKFPGQLSGG

SEQ ID NO: 143674 - protein, 194 aa, Unknown
  Bacterial polypetide isolated from the Sargasso Sea
MAKIEIQNLSKQFGEIYAVNNQNLIVNKGEFLILLGPSGCGKTTTLNCIAGLEMPSSGKILFNEVDVTYSPPHSRNIAMVFQSALLYPHLNCKQNILMSLQKANINDDEKEKRILDAVEILNIKDLLNKKPHELSGGERQRVATAKAIVRQPDAFLLDEPMAALDAALRQTLRSELVNLQKKLNTTTIFVTHDQ

SEQ ID NO: 143675 - protein, 206 aa, Unknown
  Bacterial polypetide isolated from the Sargasso Sea
GQSGSGKSTLMKLLPRLYEIEEGKILIDDYDVSKTELYSVRRQIGIVPQEPLLFSGTVSENIALTKPDVDSEEIIRAAKIADAHDFIMSLPQGYSTNVGERGSSLSGGQKQRIAIARTIISNPKLLIMDEATSALDYQTEKKVCDNLKTSCKGVTVFFITHRLSTIKNADKIIMMNEGSIAEIGNHNDLIENKGRYYALYRQQEAN

SEQ ID NO: 143676 - protein, 260 aa, Unknown
  Bacterial polypetide isolated from the Sargasso Sea
NGDIDLLDGLKREGKNLVVGYFSQHQVDDLDLQKNAIQHIQSIDEKATEAEIRNFLGGFNFRDNKAKDAIKNFSGGEKARLALAKIAFRKPNLLLMDEPTNHLDMDMRQALTVALQDFSGAILLISHDRHLLANTVDEFLIIDKGKLSRFNGDLEDYRTLILKGSVNNESVKDKKESRSKLQKKEVKSIKANISSLEKTLKRLQRKLSEVNDKLNSPDSYNEDSGNNFHDLLREQVNLISEIENAEQEWLELNQKLDESV

SEQ ID NO: 143677 - protein, 215 aa, Unknown
  Bacterial polypetide isolated from the Sargasso Sea
NGAGKSTLLRIMAGVDKDFSGEARAQPGIKIGYLEQEPPLDPTKDVRGNVEDGVREALDALERLDQVFAEYAEPDADFDALAKEQEKLESIIHAWDAHNLNNQLEIAADALNLPAWDADVSLLSGGERRRVALCRLLLSKPDMLLLDEPTNHLDAESVSWLERFLKDFPGTIVAITHDRYFLDNVAEWILELDRGHGIPYQGNYSSWLEQKNARL

SEQ ID NO: 143678 - protein, 274 aa, Unknown
  Bacterial polypetide isolated from the Sargasso Sea
MKKEILKLRDVKVYFPVKAGVFNRTVGHVMAVDGVDLDIYRGEVLGLAGESGCGKTTLGKAILRLVEPTNGEVTYVSKEDDETELTSLEKKDMDPFRKKLQIVFQDPHSSLNPSFTIFGSLQDPLKKFGVNSKEERRKIIGDLLEAVNMRREYMDRYPHEFSGGQRQRIGIVRALCLDPELIVCDEAVSALDVSIQAQVLQLLMQLKKDNNLTYLFITHDLSVTEYLCDRIAVMYLGRIVELCDSEDLYKNTLHPYSEALISAIPVADLDKKTK

SEQ ID NO: 143679 - protein, 164 aa, Unknown
  Bacterial polypetide isolated from the Sargasso Sea
SGRICFENTDLMQMKREESSAFRNKTIGFIFQFHQLLQDFNALENVMIPALILGNSRTTAMERSKMLLDQVGLFDRMHHKPSQLSGGEQQRVAIARALTNRPKLLLADEPTGNLDEETGRQVMELLLKLNQENHTTLVMITHNQKLAMETNSKFRLENGLLNQE

SEQ ID NO: 143680 - protein, 224 aa, Unknown
  Bacterial polypetide isolated from the Sargasso Sea
MLKVRELSKSIKGKRIVNNVSFDVNFGSIFGLLGPNGAGKTSTFYMIAGLIKPDSGKVLISGQDISNIPIHSRSKLGIKYLPQEPSIFKDLTVYENLYGLAELSFTNKKSINNFIESSMDEFSLSSISSLRGRQLSGGQRRKVEIARTLAADPKIILLDEPFAGIDPIAIDDIKDVLNKLILKKIGILITDHNVRETLEICDQAAILNNGEIIAKGEKDYLIND

SEQ ID NO: 143681 - protein, 279 aa, Unknown
  Bacterial polypetide isolated from the Sargasso Sea
NFSDNGCIVGVNNASFEVSKGEMLVVMGLSGSGKSTLLRCISRLTDATGGKIFIEGQNLLKLNNKDLINLRRNKMGMVFQSFALLPHKTVVENIAFPLQIKGVKTEESISKAMDMVKLVGLDGRENYFPRELSGGQQQRVGIARSLAVEPDIWFLDEPFSALDPLIRKEMQDEFLRLQEKLQKTIMFITHDFDEALKLADRIAIMKDGIIEQLDTPANIVLNPATEYVRKFTEEVPREKVLLIEDVMDSSKENLGDLKVSKDEVIENVAEKILTQENSV

SEQ ID NO: 143682 - protein, 59 aa, Unknown
  Bacterial polypetide isolated from the Sargasso Sea
MADVKMSSIYKSFGNTEVIHGVDLEVEDHEFVVFVGPSGCGKSTLLRLVAGLEDVTQGE

SEQ ID NO: 143683 - protein, 266 aa, Unknown
  Bacterial polypetide isolated from the Sargasso Sea
MIYRSMICLSDSQGQWQKVISKIGSIEIVNDELQNAKTYKQKNGDKSLEDFKYEIELKDLTFSYDAKSKVLDNINFTIHAQKTIGIVGPSGSGKSTLLDIISTLLQPTQGKLIIDNISSKIIDTESWRSQIGYVCQDSVMFDDTIANNIGMWKGDFNNDENYRKKLIDASIDANAHSFIVDFDRGYDTKIGDRGIKLSGGQKQRIFIARELMKNPKILILDEATSALDSESENMIRASIDSLKGKLTVVIVAHRISTIKNCDHIIV

SEQ ID NO: 143684 - protein, 154 aa, Unknown
  Bacterial polypetide isolated from the Sargasso Sea
LNKSSLRSMIGYVPQETILFHDSVRNNISFGDKKISDDQIKTALKRAGAEGFINQLPNRLDFNVGEHGGRLSGGQKQRLGLARALLYSPKLLILDEPTSALDKRSENAIIDTLNELRGTVTIIAISHQETFVKTSDRKYLLENGKLKEQEIYTN

SEQ ID NO: 143685 - protein, 231 aa, Unknown
  Bacterial polypetide isolated from the Sargasso Sea
DVQEGDFFALLGPNGAGKTTAIGIITSLVNKSSGSIEVFGHDLDKDLAKAKSCIGVVPQEVNLNLFDYNFNILVNQAGFYGIPRSEGKKRAEQYLKQMQLWEKRKTNARSLSGGMKRRLMVARALVNRPKLLLLDEPTAGVDIETRRMMWDFLRDLNANGTTIILTTHYLEEAEQLCNKVAIIDEGKIIENDSMQNVLKKLKTEVFILNTEKPLDKAHEIDGYASALKSPQ

SEQ ID NO: 143686 - protein, 173 aa, Unknown
  Bacterial polypetide isolated from the Sargasso Sea
MIRVEHFYKNYGPYPAVIDVSFEVLKGEIVGFLGPNGAGKTTTMRSITGYLPPTSGNITVSGYDSVKYSLEARRHIGYLPETVPLYLDMTVTDYLSFMGKIRGMNQKWINERINKVIDHVRLGDYRNTHVGKLSKGYRQRTGIAQAILHEPDVLIMDEPTIGIDPIQVVETRE

SEQ ID NO: 143687 - protein, 283 aa, Unknown
  Bacterial polypetide isolated from the Sargasso Sea
LSESSIKFENDEIIACPKKTLSALRGNKISMIFQEPMTSLNPYQKVGFQIDETLIVHKKLPPKQAREKTIDLLKKVKIPEPETKVDSYPHQLSGGQRQRIMIAMALANKPELLIADEPTTALDVTVEKALLELLSDLQQEFGMSILFITHDLNIVRRFSDEVCVMKEGKIVESGKVKDIFDNPQHSYTVKLLNSIPGKKAELNLENEQLLTGQKVDIKYPITKNIFGKTVDFLNAVKKVDIRIHSGSTTGLVGESGSGKSSLARALLGIEKAEGSIIFDGKNI

SEQ ID NO: 143688 - protein, 147 aa, Unknown
  Bacterial polypetide isolated from the Sargasso Sea
LFIPQKPYMLLGSLREQLCYPTEVSKFSDEHLTSVLHEVNLKTLVDRYPNLDIKQDWPRILSLGEQQRLAFARLLLNSPRFAVLDEATSALDIDTEKKLYNLLKERELSLISVGHRPSLKDFHENILELNGKGDWKLLTSDKYNFKD

SEQ ID NO: 143689 - protein, 210 aa, Unknown
  Bacterial polypetide isolated from the Sargasso Sea
MLGSNGVGKSSIFNLITGLVQPSYGSIHFDNIKVNEYPIYLRTKKFKIGMIPQNGGYFHDLTLIENLKAIGEIQIENQHDMNSKINQLISRFELDAVRNIKAKFLSGGQKRKLVIALALLGDPKVLLLDEPFAALDVMTIKMLQEVIVNLQAENNIGICICDHQARDLLNCVDVAIVLSNCKIIAKGTPNELINNSNARAAYFGDSFKFN

SEQ ID NO: 143690 - protein, 233 aa, Unknown
  Bacterial polypetide isolated from the Sargasso Sea
MDEAIIDLNKLCFRWKNSSRMLLNIPEFRMKQHEHIFLQGPSGCGKSTLLSLVGGILISESGSLKVLGQEIWDLSRSGRDAFRVDHIGFIFQLFNLLPYLSIEDNVMLPLRFSRIRAKRAGKTKLDRLKETHRLLKALGLEEQLAEKNPVIELSVGQQQRVAAARALIGSPELIIADEPTSALDSDLRHSFLELLFGECKKSGSTLLFVSHDSSLRDNFKTKASMDELNKVII

SEQ ID NO: 143691 - protein, 78 aa, Unknown
  Bacterial polypetide isolated from the Sargasso Sea
MNAPLISLQGLSKEFHGKNVVELVNLTIKAGEFYGILGPSGCGKTTLLRLIAGLEQPSSGQIIIDGLSMNSVPANRRP

SEQ ID NO: 143692 - protein, 269 aa, Unknown
  Bacterial polypetide isolated from the Sargasso Sea
MAKITLKKLSHSYLANQKNDADWALRGVDIDWKDGGAYALLGPSGCGKTTLLNIISGLLKPTEGEILFDDKDVTTLNPVERDIAQIFQFPVIYDTMTVYDNLAFPLKNRGLSDTEIDSKVKEIAEMLELTSTLNNRASGLTADGKQKISLGRGLVRSDVNVIMFDEPLTVIDPHLKWVLRSKLKELHQKINRTMIYVTHDQIEALTFADQVVVMHEGQIVQTGTPVELFEKPKHTFVGHFIGSPGMNILPCEIKNGQINLKEKYYPQIL

SEQ ID NO: 143693 - protein, 249 aa, Unknown
  Bacterial polypetide isolated from the Sargasso Sea
EKISLSFGGVHALDEVTFDIRKGEIRAIIGPNGAGKSSMLNVINGFYQPQQGFIKYKGNERKKMSPQIAASQGIARTFQNIALFRGMSTLDNIMTGRNLKMRRGIFWQMIHWGPARNEEIHHREIAEHVIDFLEIEPIRKTPVGRLPYGLQKRVELGRALAAQPDLLLLDEPMAGMNVEEKEDMCRFIIDVNEEFGTTIALIEHDMGVVMDLSDRVVVLNYGKKIADGTPDFVRADQGVVDAYLGVSEK

SEQ ID NO: 143694 - protein, 185 aa, Unknown
  Bacterial polypetide isolated from the Sargasso Sea
MIEIKNLHKSYEIGASSLHVLKGIDFSVEDGDLVAIMGSSGSGKSTLLNILGMLDTSDVGTYDLDKIRIADMNEKKAANYRNKFLGFVFQSFNLINYKNALENVALPLYYQGISRKERQKTALNFLDKVGLKDWADHLPSELSGGQKQRVAIARALASNPKVLLADEPTGALDSTTSLEVMALIK

SEQ ID NO: 143695 - protein, 160 aa, Unknown
  Bacterial polypetide isolated from the Sargasso Sea
VFLFEGSVFENIAYGNIEANSEEVWNAARLSESDRFINDLPNKEDTIVGERGQKLSGGQRQRISIARAILKNPEILILDEATSAVDNETEAAIQESLETLKEGRTVIAIAHRLSTIRNADLIYVLEDGEIVENGTHDQLLGNNNVYTKLWDVQTGKTRKY

SEQ ID NO: 143696 - protein, 143 aa, Unknown
  Bacterial polypetide isolated from the Sargasso Sea
KLYSVSDIKSRIEYLVEKLRLSELLNKVTGELSSGQKNRVSLAKALINDPSVLLLDEPTASLDPEIGDFVRTFLENYKKEKKISILLASHNMNEVTRLCKSILMMKDGLIIDQGSPEELIKKHGRKNLEEVFLKLSRRKDELN

SEQ ID NO: 143697 - protein, 204 aa, Unknown
  Bacterial polypetide isolated from the Sargasso Sea
ISIIYLAVDGVLAGLLAVSDPIKPTSKEAVTKLKADNVKIIMATGDGLTTARAVAKEMGIEEVHGEVKPQDKERLVADLQQSGRKVAMAGDGINDAPALARADVGIAMGTGTDVAMNSAQLTLVKGDLMGILRARALSVATVKNMRQNLGFAFLYNSMGIPLAAGLLYPLTGHLLSPMIAALAMSVSSASVVFNALRLRNTRIE

SEQ ID NO: 143698 - protein, 234 aa, Unknown
  Bacterial polypetide isolated from the Sargasso Sea
MEIAVQAVSHQYGGHHALDNISLCLKPGLTMLLGPNGAGKSTLFALITGLQKLTQGSITFDGATLSQSRTSIMAKMGVVFQQSTLDIDLSVKQNLSYFASLHGITTTCALSHIQGLLDELDLTSKLNTKIRNLNGGHRRRVELARCLIHKPSLLLLDEPTVGLDIESRHLILRVVQALAHSQNVSVLWATHLFEEVKHNNNLIVLSKGRVLAHDQCEALVAKYHQQDIEHLWQH

SEQ ID NO: 143699 - protein, 134 aa, Unknown
  Bacterial polypetide isolated from the Sargasso Sea
MKNELELINIKKSYGNFNAIHGINLKISEGSYCCLLGPSGCGKTSLLRMIAGHEEISEGEIYLGPSRLNELPPAKRGTSMMFQSYALFPHLKVLDNVSFALKIAGKSKEERTKTALKYIEMVQMQGYENRLPHQ

SEQ ID NO: 143700 - protein, 273 aa, Unknown
  Bacterial polypetide isolated from the Sargasso Sea
VGESGSGKSVTALSILQLLPEGTVQYSSESSIKFESDEIISCPKKPLSALRGNKISMIFQEPMTSLNPYQKVGFQIDETLMIHKKLTSKQARKKTIDLLKKVKIPEPETKVDSYPHQLSGGQRQRIMIAMALANEPELLIADEPTTALDVTVEKALLELLSDLQKEFGMSILFITHDLNIVRRFSDEVCVMKEGKIVESGKVKDIFDNPQHSYTIKLLNSIPGPKPELNLENEELLIGRKVDIKYPTVKNIFGKTVDFLNAVKKVDITIHSGS

SEQ ID NO: 143701 - protein, 112 aa, Unknown
  Bacterial polypetide isolated from the Sargasso Sea
MISVSDVNLTFETNDGPVNALRSVSLEVNEGDFVSFIGPSGCGKTTLLRVIAALEKPTEGKVVVNNMTPDEARKAREYGYVFQAAGLYPWRTVSGNIKLPLEIMGYSASEKE

SEQ ID NO: 143702 - protein, 234 aa, Unknown
  Bacterial polypetide isolated from the Sargasso Sea
ISPEFTSSKTVIHNVSLDVNSGEIVGLLGPNGAGKTTTFYMIVGLLKSDEGSIYINDQNITYEPIHKRFEQGISYLPQEPSVFRDMTAKDNIDSILEVDSSLSKIQKANILEHLIEKFDLSKFINTKGIQLSGGERRRVEIARALALKPKFLLLDEPFAGIDPISVIDLQKIIKVLAKEDIGILITDHNVRETLKICDKSYVINSGKVLASGKSKDLVKNEIVKKVYLGESFKL

SEQ ID NO: 143703 - protein, 117 aa, Unknown
  Bacterial polypetide isolated from the Sargasso Sea
MQGLSKLYRHKRSIELLNSVGLEDQLNRRPNQLSGGQQQRVAVARALASKPKFVLADEPTANLDSSSTANLLDIMSKLNKTEKMTFIFSTHDQRVIDRANRIITLEDGKILSDKKIK

SEQ ID NO: 143704 - protein, 157 aa, Unknown
  Bacterial polypetide isolated from the Sargasso Sea
MLAVRINNLSYSMNEKKILNNINLLLEKEKIACILGPSGCGKTTLLKLIAGLSKVQEGEIFLNETLVSSSDTHLKTEKRKIGFLFQDYALFPHQTVKQNLQFAIKDKSTSHRVEEIMDVIKLSDSLEKYPHELSGGEQQRVALARSIIAKPDLLLLD

SEQ ID NO: 143705 - protein, 241 aa, Unknown
  Bacterial polypetide isolated from the Sargasso Sea
MNESVVQVNNLAKQFKNALAVNDVSFSITRGTILGLLGPNGCGKSTTIGMMLGLIKPTSGEVIINNQNIENNRTSLLEKMNFISPYIELPKKLTVEENLKVYGKLYGVKNLKDKIYNLMEKLNLTEFRSRKTGELSSGQKNRVSLAKALINDPEILLLDEPTASLDPDVGDNIRSFIEDFASNQNTTILLASHNMNEVERLCHEVMMMKDGKIIDKGKSNELISKHGRKNLEEVFLKIVRE

SEQ ID NO: 143706 - protein, 242 aa, Unknown
  Bacterial polypetide isolated from the Sargasso Sea
MTNSIEVINLSKKYKSKNAVNNINFKIGENEIVGLLGPNGCGKTTTIGMILGLLKPSSGQVLINGKNIETNKISLLHKMNFISPYIELPKKLKVKQNLIVYGKLYNVDDLENRIDYLSDQLRLTDLLDKITGELSSGQKNRVSLAKALINDPTVLLLDEPTASLDPETGDFVRTFLENFKKEKKISVLLASHNMDEVKRLCGSVLMMKDGIIVDSGTPNDLILKHGRKNLEEVFLEIARNKK

SEQ ID NO: 143707 - protein, 198 aa, Unknown
  Bacterial polypetide isolated from the Sargasso Sea
RLDKKLRQSTQFELMDIHYELGITFVIVTHDQEEAMTLSDRIAIMEQGQFVQIGSPNLIYENPRSKFVADFLGNINLLEATITEQNDKEIVVDCAALGGELKFDQTEQANASEMTVALRPEKVMIEKNIPTNDDQSHIKGIVEDFGYFGNLSIYRVKTESGHVIQVSKQNRDRVEQSIKWEDEVYLSWDNDSLMLLGE

SEQ ID NO: 143708 - protein, 162 aa, Unknown
  Bacterial polypetide isolated from the Sargasso Sea
MEIAVQAVSHQYGGHHALDNISLCLKPGLTMLLGPNGAGKSTLFALITGLQKLTQGSITFDGATLSQSRTSIMAKMGVVFQQSTLDIDLSVKQNLSYFASLHGISTTSALSHIQGLLDELDLTSKLNTKVRNLNGGHRRRVELARCLIHKPSLLLLDEPTVG

SEQ ID NO: 143709 - protein, 29 aa, Unknown
  Bacterial polypetide isolated from the Sargasso Sea
MQELFVWSQKIIIFDEPTSALDPEMIKEV

SEQ ID NO: 143710 - protein, 149 aa, Unknown
  Bacterial polypetide isolated from the Sargasso Sea
LTVEENLRLGAHANEKGKYFEKDVKEVYDLFPVLSDRKTQRGGTLSGGEQQMLAIGRALMSKPKVLLLDEPSLGIAPKLVNQIFVSIKNINKEKNVTIFLVEQNAKKALELADRAYVLVNGKVTIKGSGQELLKNKDIQAAYLEGGAKN

SEQ ID NO: 143711 - protein, 296 aa, Unknown
  Bacterial polypetide isolated from the Sargasso Sea
FEIKQGIGSEKGMVHAVENIDFSLQPGETLGLVGESGCGKSTTGRSIVRLVEPTRGEVNFNGQDLISLNKTEMRDFRRQIQMIFQDPFASLNPRMTVGDTIAEPIFVHDKIKGDELKDRISMLLKRVGLGPDYATRYPHELSGGQRQRIGIARAIALTPKLIIADEAVSALDVSIQAQVVNLMMDLQEDLKLAYLFISHDMAVIERVSHRVAVMYLGEIVELGLRSQIFENPQHPYTKKLMSAVPIADPKNRKKELNLMTDEIPSLVKPMGYEPEKKQLINVSDGHQVMPFDGMKI

SEQ ID NO: 143712 - protein, 279 aa, Unknown
  Bacterial polypetide isolated from the Sargasso Sea
SGVIIPDEGKIYLNENNLKLNSPLDAKKNDIGMVFQHFNLFETLSVFENLIIDSDEERESLREKIDTIMKKYNFSIDLDIPVLNLSAGQKQKVEIIRCLIRSPKVLIMDEPTSVLTEQETSELFLSLKKFSEEGILIIYITHKLKEVMQLCDEVAVMRRGKLVSVSEINNENIESLANKMVGQNLKTIKKQKAKTSSDQLIKITNLNFTSEDPFETNLMNINFSVNRGECLGIAGISGNGQSELFQVLSGEIISEKNSIEFNKNYIGDLNPQERREYLM

SEQ ID NO: 143713 - protein, 193 aa, Unknown
  Bacterial polypetide isolated from the Sargasso Sea
FDEPLSNLDAALRSEMRVEISKLHNQIKTNMIYVTHDQVEAMTLADRIVILNLGNIEQVGTPDEIYNNPANIFVAQFIGTPKMNILPLNNENIISENKIKFLGNEITFEKTKFDKKKYFLGIRPEHFNLSNESQFKFKPKIDLVENLGNEKIVYMSNDNLELSAKISSQEDFQNQINFDSKDIFIFDENGRRI

SEQ ID NO: 143714 - protein, 123 aa, Unknown
  Bacterial polypetide isolated from the Sargasso Sea
LNVFENVGLGLGRKVNDRRIKIQNIIDMIDLKGHEKKYPNQLSGGQQQRVAIGRALAISPSAILMDEPFSNLDFSLKKILSNEVKKIIKNTGTTTIMVTHDEIEAERLSDECYLLENGKIKQI

SEQ ID NO: 143715 - protein, 95 aa, Unknown
  Bacterial polypetide isolated from the Sargasso Sea
AIARALCMQPKIMLFDEPTSALDPEMIKEVLDAMVNLAKGGMTMIVVTHEMGFAKEVADEVIFMDEGMIVEKNTTKEFFANPKSDRTKLFLSQIL

SEQ ID NO: 143716 - protein, 235 aa, Unknown
  Bacterial polypetide isolated from the Sargasso Sea
VSLSYGNRQILENINFKITEGQIFGMLGPNGVGKSTIFNLITGLINPGNGKIKIAGEDVTKYPVYLRTKKFKVGYVPQYGGFFNDLTLHDNLKAISEIVIDNKNYRIERVNYLISKFELDNLKDIKGKFLSGGQKKKLVIALSLLSEPKVLLLDECFAALDVLTIKMLQEIIVNLQNENRITICICDHQARDLLACVDMAMILSNGKIIAQDMPSNLVKNINAKNAYFGDNFKFN

SEQ ID NO: 143717 - protein, 324 aa, Unknown
  Bacterial polypetide isolated from the Sargasso Sea
EPKRCDSQKIEMTEMKKTDRHSTRCLKFQEIDWMAPVTKAETSNQVEPGDVILKIDNLKKYYEVAANALFGSSGDKKVVKANETLSFEAREGETLAIVGESGCGKSTLAKVLMGLETATDGTVVLDNNSIGSIPIENRTTETVADIQMVFQNPFDTLNPSMTVGRQIVRALEIFKFGKSDKDRNERLLELLDLVKLPREFADRMPRQLSGGQKQRVGIARAFAGGARIVVADEPVSALDVSVQAAVTDLLMEIQRNEKTTLLFISHDLSIVRYLSDRVMVMYLGHVVELGTTDQVFAPPYHPYTEALLSAVPIADTNVEKEHIV

SEQ ID NO: 143718 - protein, 248 aa, Unknown
  Bacterial polypetide isolated from the Sargasso Sea
AGCPDRHVTHSYGDKILFLGAELEVERGDRIAFVGPNGAGKSTLLRLVMGVEPPDEGSARLGEHNVIAGYFEQNQAEALDLSKTVIDTMYEAVPDWTQTQVRSLLGSFCFSNDTVFKEVGKLSGGEKARLALALMLLTPCNLLVLDEPTNHLDIPAKQMLEDALMAYEGAALLVSHDRYFISRVANRIVELREGELVLYRGNYTYYLEKKEEERAAAKEKELAAERESKRKANKEKQKARDARRKKAA

SEQ ID NO: 143719 - protein, 148 aa, Unknown
  Bacterial polypetide isolated from the Sargasso Sea
GKTLNHIPTEKRKVGLLLQDGTLFPHLTVEQNIYFGMNKKLKAKEKLNLINDNLKKANMEGFQDRYPHTLSGGQKARIACLRAILSEPEILLLDEPFSSLDPEFRNTFRNFMINKVKESNIPCLLVTHDESDKLISNEQPIDLNLFME

SEQ ID NO: 143720 - protein, 222 aa, Unknown
  Bacterial polypetide isolated from the Sargasso Sea
MDDGLIISKISKSYGNKLVVRDISISINRGEIVGLLGPNGAGKTTTFYIIVGLVKPDTGSIYLDKLEVSSLPIYKRGVMGISYLPQEASIFRGMNVEDNLLSIIEIHEKNRGKQDIILQNLLNEFDINHVRKSKSIVLSGGERRRLEIARTLASNPKYLLLDEPLTGIDPVSIEEIKIIIRKLKQKNIGVLITDHNVRETLKLVDKVYIVNEGAIFFKGNPN

SEQ ID NO: 143721 - protein, 175 aa, Unknown
  Bacterial polypetide isolated from the Sargasso Sea
ADRYPHEMSGGQRQRVGIARALSLNPEFIICDEAVSALDVSIQAQVINLLEDLREEFNLTYLFIAHDLSVVRHLCQKVAVMYLGKIVEMADCDELYDNPQHPYTKALLNAVPVPDPEVEKNREHNIMTGEVPSPINPPSGCVFHPRCSLAVESCKSDIPVLEDKRAGHFVGCTQV

SEQ ID NO: 143722 - protein, 204 aa, Unknown
  Bacterial polypetide isolated from the Sargasso Sea
SAMKMVAASKLRRSQEKAEAARPYSSRLEEMLSSLATSASSGEGIIKLLTGTGEDQNYIVVPVSADRGLCGGFNSSINRETFKLVKKLESENKKVQLLPIGKKSRDFFLRTLKENITDSFVDTNVSSAGYNIALEISAKLQSLYFEGKFDKCILVYNKFKSAISQEVTQQQLIPLDISNKNNEDKSNETESSKKAIYTYEPEKK

SEQ ID NO: 143723 - protein, 174 aa, Unknown
  Bacterial polypetide isolated from the Sargasso Sea
FQVVSFATTTGFTTADFNAWPLFLPYLLLYAAIIGACAGSTGGGMKVIRILLIFKQGIREVQRLIHPKAVIPVKLGRNPVPDRVIESVWGFFAVYVMAFLVMLLALVATGLDIITAFSAVGSCINNLGPGLADVSTTYESIPTQAKWILCVAMLLGRLEVFTLLVLFTPMFWRR

SEQ ID NO: 143724 - protein, 116 aa, Unknown
  Bacterial polypetide isolated from the Sargasso Sea
MSENIIQINNMNKWFGDFQVLKGINLEVKPKEKIVVCGPSGSGKSTLIRCINRLEEHQEGNIIVDGTELTEDTKNIEQIRAEVGMVFQQFNLFPHLSIIDNCTLAPIWVKKLPKKE

SEQ ID NO: 143725 - protein, 257 aa, Unknown
  Bacterial polypetide isolated from the Sargasso Sea
MHALSIKDLSKKYKSGVEALKSVSFDVQEGDFFALLGPNGAGKTTAIGIITSLVNKSSGSIEVFGHDLDKELAKAKSCIGVVPQEVNLNLFDYNFNILVNQAGFYGIPRSEGKKRAEQYLKQMQLWDKRKTNARSLSGGMKRRLMVARALVNQPKLLLLDEPTAGVDIETRRMMWDFLRDLNANGTTIILTTHYLEEAEQLCNKVAIIDEGKIIENDSMQNVLKKLKTEVFILNTEKPLDKAPQIDGYITALKSPQE

SEQ ID NO: 143726 - protein, 220 aa, Unknown
  Bacterial polypetide isolated from the Sargasso Sea
MNKFKLLDDGLIINKISKTYGNKKVVSDISLSIKRGEIIGLLGPNGAGKTTTFYMIVGLVKPETGNILLDKIDITQAPIYLRGAKGISYLPQEPSIFRGMNVEDNLLSIIEVVEKDKNKHQIILQGLLNEFNISHVRKSSSTVLSGGERRRLEIARTLASNPKFLLLDEPLTGIDPVSIEEIKSIIKTLTKKNIGVLITDHNVRETLKIVDKVYIVNEGS

SEQ ID NO: 143727 - protein, 242 aa, Unknown
  Bacterial polypetide isolated from the Sargasso Sea
KGFIKKTVGHVKSVDGINFHINEGETLGLVGESGCGKTTTARCILRAMKPTEGKIQFKTSDGSHTNLATLKEDQIRSLRTDIQMIFQDPFASLNPRMNILDLIGEPMLVNGLTKRKQRTEKVAELLKMVGLRPEYMQRFPHAFSGGQRQRIVIARALALKPRLVVADEPVSALDVSVQAQVLNLMLELQQNLNLTYLFVAHDLSVVKHISDRIAVMYVGKIVESAPTDSLFNKPKTSLYCST

SEQ ID NO: 143728 - protein, 260 aa, Unknown
  Bacterial polypetide isolated from the Sargasso Sea
GYQIDEALRLHTNFQKEDRDVKISELLNKVRLPSPETIAKRYPHELSGGQQQRVAVAMALAGSPDLLLLDEPTTGLDVTTQAHVLELLNFIAKDTGTSMVYVSHDLGAIAQVSDRVIVMYSGEIVLDGPVRTILKNPIHPYTYGLLKSIPKLTLSGLPNSMSGSQPQPGTIKEGCSFYDRCEFAEDKCKIKSPELEFVNEFNTSVRCFNHKELHKKKDKDKKSSKNVLRKLTKNEILDISSVSISYAKQKFIEQLLNKID

SEQ ID NO: 143729 - protein, 159 aa, Unknown
  Bacterial polypetide isolated from the Sargasso Sea
KLIKSWRKGVSLVSQDIYLLDRSIKENISLTNKPNLINNKKLNKVISLAELNKFTKKLKRGVDSKVGEEGIWLSGGQKQRIGIARGFYKDSNLIILDEATSALDEKTQKKILSNLNREFKDKTIIMISHRLSTLKICDEIYEIKNGELNVVDIDKILMQ

SEQ ID NO: 143730 - protein, 232 aa, Unknown
  Bacterial polypetide isolated from the Sargasso Sea
MILSARDISKSYRGRKVVNNISIEVNQGEIVGLLGPNGAGKTTSFYMIVGIIKPEQGDIFLDNEVISKYPMYQRAQKGIGYLAQEESVFRKLSVEDNILGVLEFSGLSKNQQEEKAQQLMEEFGLINIRKSRGDLLSGGERRRTEIARALANNPNFLLLDEPFAGVDPIAVEDIQSIISVLKKKNIGILITDHNVQETLAITDRTYLMFEGKILKEGVPEDLAKDEMVRKVY

SEQ ID NO: 143731 - protein, 202 aa, Unknown
  Bacterial polypetide isolated from the Sargasso Sea
MNLKIQNVSLSIKGRFIVNDVSITVNPGEVVGLMGPNGAGKTTTFNLAVGNIKPDKGEVLMNGKNITNLPLPIRSKLGLGYLTQEASIFRNLTVKDNIDLALQNSSYSRAAIRNRREQLINEFNLNNFVDNYGYQLSGGERRRCEIARALTVGRKGPKYLLLDEPFSGIDPLAVNDLKKLILKLSGDGVGILITDHNVRETL

SEQ ID NO: 143732 - protein, 311 aa, Unknown
  Bacterial polypetide isolated from the Sargasso Sea
LRRAKEVLVDVKLPDPERILKSYPHQLSGGQQQRIVIAMALMSKPALLILDEPTTALDVTVEAAVVDVVKDLGKKYGTSMLFISHNLGLILETCDQICVMYSGEAVETGSISDVFDKMQHPYTQALFQSIPLPSADKNSRPLVAIPGNFPLPHERPTGCNFGPRCNYFKDGLCNIQAIPMNKIKGFERHFSRCSRIEEINWDTPISSSSQFESPPPGDVVLKIDNLKKYYEVAANALFGSSGTNKTVKANETLSFEARESETLAIVGESGCGKSTFAKVLMGLETATDGDILLDKENIESTPIEARDTQTV

SEQ ID NO: 143733 - protein, 104 aa, Unknown
  Bacterial polypetide isolated from the Sargasso Sea
RQRIAIARALILKPRFIILDEPTSALDRSIQIQVIDVLKQLQLKYKLTYLFISHDLKVIRSMCDKIFVMSEGSMVEYGNAKEVFNNPKENYTKKLLDASLKYSS

SEQ ID NO: 143734 - protein, 124 aa, Unknown
  Bacterial polypetide isolated from the Sargasso Sea
MENNNIDINNDKIGNYGKSLSGGQKQRIGIARALYNNPKVLILDEATSALDSINQNKILSNILEFTNVSIIILITHNTNLLKNFDNIYLLDNGKIVAQGDFNELSTNNLLFKELTVNKEVKKKL

SEQ ID NO: 143735 - protein, 202 aa, Unknown
  Bacterial polypetide isolated from the Sargasso Sea
MSTRPFLEVSGITVRFGGLVAVNNLSFDVARGSIHALIGPNGAGKSTTFNCISRYYQPTEGRIVVDGEDVTHHAPSRMAGMGIARTFQNLELFGDLSVYENVLLGCHSHSANTLGRLLRRPSGEIRDLVDSLIERVGLTHDRDTRAKELDFGHQKLLEIARALALKPRLLLLDEPAAGLRNRDIENLDHLLTQLAEKDGITV

SEQ ID NO: 143736 - protein, 236 aa, Unknown
  Bacterial polypetide isolated from the Sargasso Sea
ISNVETFYGKIQALRGVDLDVNDGEIVSLIGSNGAGKSTLLMTISGVNKAKRGNIVFNGENIENKQPHKIVDMGICQVPEGRRIFSRLTVEENLRLGAHSNEKGKYFENDIKEVYDLFPVLSDRKTQRGGTLSGGEQQMLAIGRALMSKPKVLLLDEPSLGIAPKLVNQIFVSIKNINKEKNVTIFLVEQNAKKALELADRAYVLVNGKVTIKGSGQELLKNKDIQAAYLEGGAKN

SEQ ID NO: 143737 - protein, 262 aa, Unknown
  Bacterial polypetide isolated from the Sargasso Sea
MTDEQTSETLLEVDAISLSFGGVHALVDVSFDIRKGEVRSIIGPNGAGKSSMLNVINGFYHPQEGTITYQGRARKQMRPHDAAAGGIARTFQNIALFKGMSTLDNIMTGRNTHMSKSLFWQALRIGPAQREEIEHREFVEHVIDFLEIQSIRKTPVGRLPYGLQKRVELGRALAAEPTLLLLDEPMAGMNLEEKEDMSRFILETNDEFGTTIALIEHDMGVVMDISDRVVVLDYGRKIAEGTPEEVRANQNVIDAYLGVSHD

SEQ ID NO: 143738 - protein, 309 aa, Unknown
  Bacterial polypetide isolated from the Sargasso Sea
SSEEVKAANYHAIKLSAAFIPIIRIAILFGFTATLLIGGFMALDGQIKVAMYSVLLFITQRLLWPLTELGDTFDLYQRAMASFKRITTLKDTRPTITNGNSELKNFENSIVFNDVNFSYVEGFSVLNNVSVEINKGQTVAIVGSTGSGKSTMIKLILRLYDVTEGDIKFDNINIKDLDLTSLRSNIALVSQDIFLFEGSVFENIAYGNLDASEDEIWEAARLSESDDFINQLPNKEHTIVGERGQKLSGGQRQRISIARAILKNPEILILDEATSAVDNETEAAIQRSLDTLKEGRNSIAIAHRLFTIR

SEQ ID NO: 143739 - protein, 155 aa, Unknown
  Bacterial polypetide isolated from the Sargasso Sea
IKGKTKFNWVYGKLYSVENIEDRIEYLSNKLRLSNIMDKITGELSSGQKNRVSLAKALINDPTILLLDEPTASLDPETGDFIRSFLENYKKEKEVSILLASHNMSEVERLCDSVLMMNNGKIIDSDTPKRLIKKHGRKNLEEVFLQLVRNNDELQ

SEQ ID NO: 143740 - protein, 235 aa, Unknown
  Bacterial polypetide isolated from the Sargasso Sea
MAYFEGIKMTAGYGDGPNIINSCSINVERGEIVAILGPNGAGKSTAMKAMLGLLNLKSGNVILDGKDISKVSPQDRVKNGISFVPQTRNVFAELTVRENLEIGGFLRDKGLEKMIETITDLFPILGEKQTQVVGQLSGGQRQQVALGRALMSEPSVLMLDEPTAGVSPIVMDELFDHIIKVKKTNVAIIMVEQNAKQALNISDRGYVLVTGENKFEGSGEELLNDPEVRRSFLGA

SEQ ID NO: 143741 - protein, 123 aa, Unknown
  Bacterial polypetide isolated from the Sargasso Sea
LGPLDQKTCLALMHQVKLRADLLKQPVRELSGGQRQRVALGRLLHQRPELVLADEPLSALDPSLAEDVLNTLLLLPGCLISLHRPDLIHRFDRVLGLRGGALVIDAASDTIHRDQLEWLYASA

SEQ ID NO: 143742 - protein, 263 aa, Unknown
  Bacterial polypetide isolated from the Sargasso Sea
MSILEVNNVSKSFGGVKANVDISMSVDKGKIVGLIGPNGSGKTTLFNSIVGTYPIDQGSIKFNGKEVSELPVPVIAKLGLLRTFQQTRIYGKLNCVENMLISHKASDESLVKIFSQIPKNLTEKAENLLSFVGLYQKRKLRAGDLSFGQQKLLELAMALMNEPEMLLLDEPTAGINPTLINGIIDRLIKVNQDFGITLFVIEHNMRVIMQLAESIFCLAHGKLLAKGTPEEIKNDNRVIDAYLGGHIWGNHTKFLEMHQSQKI

SEQ ID NO: 143743 - protein, 232 aa, Unknown
  Bacterial polypetide isolated from the Sargasso Sea
RRHKMGMVFQHFALFPHRTVIENIAFPLEVQGINRTEREKSAMEIIDLVGLQGRENYFPKELSGGQQQRVGIGRSLAVKPELWFLDEPFSALDPLIRKEMQNEFLKIQNSLKKTIIFITHDFDEAIKLADRIIIMNEGRIVQIGSPEDLIMKPANDYVKEFTEDLPRERLLSVKSIMNNQKQPSNSLTVYEDEKIFSILEKVLSEGSVSVIDRSNNVVGSLNKETVSRFINN

SEQ ID NO: 143744 - protein, 209 aa, Unknown
  Bacterial polypetide isolated from the Sargasso Sea
MSLEVQNLSYSFKNNLLIKGLNFKIEKNEIGFVSGSSGIGKSTLLNIISGLKRPDSGSIICNNNFFNGDGLFVQPEKRNIGYVFQDFALFPHINAEKNIKYGMHQDNINFFDEVVDTLNLKKHITKMPHELSGGQQQRVAIGRAILIKPQLILLDEPFSNLDQANVNLAKRLIVKVIEDLQIPCLLVTHGSSQSDLGLISKENYYFLIF

SEQ ID NO: 143745 - protein, 75 aa, Unknown
  Bacterial polypetide isolated from the Sargasso Sea
MSQDIIIAFNEVSKSFGDVKAVKAANFEIQRGEFFALLGPSGCGKTTLLRMVAGFEIPDSGEISIDNQHMSGTPP

SEQ ID NO: 143746 - protein, 252 aa, Unknown
  Bacterial polypetide isolated from the Sargasso Sea
FPPFWFVINIINGAENEREDLNSGYDADLNNSIVFDDVSFSYDHKNILNKVNFEVKAGEFITIVGSSGGGKTTLSDMLLRFNEPDEGQISIDGKDIRSLSKKSLRAMLGYVPQETILFHDSIKNNITFGDEKISDEQLKIALERAGAMSFISKLQGGMDFVVGEHGGRLSGGQKQRLGLARALLFSPKLLILDEPTSALDKQSEKDILDTLNDLRGSATIIAISHQETFVNASDRKFILEKGKLSEQKIDLN

SEQ ID NO: 143747 - protein, 210 aa, Unknown
  Bacterial polypetide isolated from the Sargasso Sea
MTDAVIKCDSVYKIFGANAKKMLQEANGNVDAKTFQKMGCIVGVNNASFEVSKGEMLVVMGLSGSGKSTLLRCISRLTDATDGKIYIEGQDLLSLKNKELIELRRNKMGMVFQSFALLPHKTVLENIAFPLQIKGIKTEDSINKAVDMVKLVGLEGRENYFPRELSGGQQQRVGIARSLAVEPDIWFLDEPFSALDPLIRKEMQDEFLRL

SEQ ID NO: 143748 - protein, 73 aa, Unknown
  Bacterial polypetide isolated from the Sargasso Sea
QPKYILLDEATSALDARNEQYVFDRLRDSSMQYILVSHKPQLACYFDRVLKFEVDGGWSVMSADQYENQLTSQ

SEQ ID NO: 143749 - protein, 178 aa, Unknown
  Bacterial polypetide isolated from the Sargasso Sea
MKIHVSNLHKSFLDGEGRKLHILRGINFEANSGSTVAILGASGTGKSTFLHILGALESIDEGVLRLGDENLSDLNRDQAAKFRNKEVGFVFQFHQLLQDFTALENVMIPQLIQGGKIDLVRKNSIDLLKKVDLYSRSGHKPAQLSGGEQQRVAIARALVNRPSIVLADEPTGNLDERT

SEQ ID NO: 143750 - protein, 184 aa, Unknown
  Bacterial polypetide isolated from the Sargasso Sea
MDLVANNLSYKPDDQYHLNEVSFNFKEGNLYTILGRTLSGKTTLLKTIAGLLTPDSGEIEFDGKNFLKVPVWERNVAMVYQQFINYPHLNVYENIAFPLKQRKMDQSIINDKVMDALKSVGLLGYEKRKIQELSGGQQQRVSLARSLVKNAKILLLDEPLVNLDYKLREQLREEFKNLFSKRFS

SEQ ID NO: 143751 - protein, 25 aa, Unknown
  Bacterial polypetide isolated from the Sargasso Sea
LALARAMLQKADILLMDEPTNHLGC

SEQ ID NO: 143752 - protein, 166 aa, Unknown
  Bacterial polypetide isolated from the Sargasso Sea
TFKIGYVPQYGGYFHDLTLLQNLKAIAEIQITDNFTRLNTIEKVISQFELDSIINIPAKFLSGGQKKKLVIALALLNNPKVLLLDEPFAALDVLTIKMLKELIVNLQSQEKISICICDHQARDLLSCVDSAIILSNCKIIAKGTPAQLVNDIKAKNAYFGDSFKFN

SEQ ID NO: 143753 - protein, 236 aa, Unknown
  Bacterial polypetide isolated from the Sargasso Sea
MNELLKINNLNISFESSGNDLKTLKDFNISLKERESLGIVGESGSGKTLSMLALTRLLPKQAKITSGSIIFRNKILNNLLNKNFYKEISGNKISMIFQEPMTALNPVHTVGKQLLDTYLYHNDVSFEKGVSRALEILDAVQLSKNKQRMEQYPHQLSGGQRQRVMIALALINNPDLLIADEPTTALDVTVQKEIIQLISKLRETIGMALIFISHDLGVVSQISDNIIVMKDGDIVE

SEQ ID NO: 143754 - protein, 250 aa, Unknown
  Bacterial polypetide isolated from the Sargasso Sea
MTRKPKLVSSNNGLVIKNIRKTLSRKQIVRDVSLKLKRGNTVGLLGPNGAGKTTTFYMIMGLLDCDGGEIMLDDKDLTNLPMYKRARMGLGFLPQQPSIFRGMSVEDNLLSVLETKNYQKDHKQNMLEELLTEFSLAHLRRAMPHMLSGGERRRTEIARCLCSNPSIILMDEPTAGVDPLGIDDIKMLIKQLMNKNIGVLITDHNVREVLDICDYSYVMHSGEIIADGDSNQILGNKEVRKFYLGNSFRY

SEQ ID NO: 143755 - protein, 138 aa, Unknown
  Bacterial polypetide isolated from the Sargasso Sea
YIIELLEKVGLKPGKSFAEKFPHEMSGGERQRVAIARALSVEPQIIVADEPTSMLDVSIRMEILEIFAKMRIEDTLTVFFITHDLASARYLADRIIVLKNGKVIEENKSEDLIRNPVEVYTKQLIKAASPGWLSSLEN

SEQ ID NO: 143756 - protein, 194 aa, Unknown
  Bacterial polypetide isolated from the Sargasso Sea
MTVKPKLISTNTGLEVSNLRKSLSGKQIVRDMSIKVGKGEVIGLLGPNGAGKSTALYCIMGLIACDSGEIKLNNNDITTLPMWKRAQAGLGYLPQQPSIFRGLNVENNIMAILETTNLNLDQRVNRLEELLAEFNLTHLRSAMPHQLSGGERRKCECARLLGTNPSYVLFDEPFSALDPISINDIKSEINRLKK

SEQ ID NO: 143757 - protein, 97 aa, Unknown
  Bacterial polypetide isolated from the Sargasso Sea
MSPVNAVDIKNLSLVFETNDGSVHALESIDLKIAKGDFVSLIGPSGCGKTTLLRVIADLQMPSSGSLEVNGKSPEKARTERDYGYVFQSPALFPWRT

SEQ ID NO: 143758 - protein, 211 aa, Unknown
  Bacterial polypetide isolated from the Sargasso Sea
MIQKPQLVASKNGLIVNNLRKSLSHKQIVRDVSLRLQRGKTIGLLGPNGAGKTTTFYMIMGLIDCDGGEILLDDKLLTSLPIYKRAKLGIGFLPQQPSIFRGMTVEDNLLSILETQNYQKDQKQNILEELLTEFSLTHLRRAMPHMLSGGERRRTEIARCLCSNPSFILMDEPTAGVDPIGIDDIKILIKQLMNKNIGVLITDHNVREVLD

SEQ ID NO: 143759 - protein, 150 aa, Unknown
  Bacterial polypetide isolated from the Sargasso Sea
MQPQSRFIGITGPSGAGKSSLFRALAGVEKSASVQTPWTSQKVGIVFQQPKLFPHTDVRGNLALAQRHASPNAMSIDACLRGCYCEHLIDKPVQALSGGEAQRVAIARALVNGPDVLLLDESLSAIDIFTRRKIYQFLNNLCVSGKLTCL

SEQ ID NO: 143760 - protein, 115 aa, Unknown
  Bacterial polypetide isolated from the Sargasso Sea
MLSVNNLSVNYGSTRVVDKLNFELGQDEILMLVGPTGCGKTTILQALAGLIPISEGEMTLGSWHSTAKKHVPPEKRNVGMVFQDFALFPHLTVQQNVCFRLKDTKLADHWLNLLG

SEQ ID NO: 143761 - protein, 178 aa, Unknown
  Bacterial polypetide isolated from the Sargasso Sea
MASLKDIRKRIDSVKRTQKTTSAMKMVSAAKLRRAEDHIREATPYAQKLKSIVSSLSTRFEGEVQDTGFGSLFRHSSGKRTGVILVTSDRGLCGGFNSNLSKALYQQLIDEGVECAEFAIFGRKGNDFFKRTPHKILVNHAGTPPDQHLNLVKEVVDDFTRRFENGELDQVLLAYNHL

SEQ ID NO: 143762 - protein, 244 aa, Unknown
  Bacterial polypetide isolated from the Sargasso Sea
MSDLIKATDINVSRQGKKILDDVSVSLGHHDFLTIIGPNGAGKSMLLKCLMGFYLPDAGTVKRATGLRVGYVPQHFAPEHTMPISVKRFLGLRRNVDKKQLDKVTEETSVISLLEKPLFTLSGGERQRVLLARSLLNNPHLLVLDEPAQNLDVSGQLGFYRLVEKIYEERKVSVLMVSHDLHMVMASTNEVICLFHHVCCCGKPQVVTQDPEFITLFGNDMASMMSAYQHSHDHIHQNNHSHES

SEQ ID NO: 143763 - protein, 230 aa, Unknown
  Bacterial polypetide isolated from the Sargasso Sea
MKAENISKEYVSGTFIKKRNLALKPVSFSIDDKTPSITAIAGESGSGKTTFARVLAGILEKSSGVLRYQDKDLDYMTKDEELNFKKEVQTIFQDPFEVYNPFYKVDHVLTTPLKKFGMASSKSESDKMIISALEEVGLRPDETLGRYPHQLSGGQRQRIMVARAFLLRPKIIIADEPVSMVDASLRATILEELKNLRKNHNISIIYITHDLTTAYQVADNIMILYKGQVV

SEQ ID NO: 143764 - protein, 250 aa, Unknown
  Bacterial polypetide isolated from the Sargasso Sea
MISKPKLISSNSGLVVNNLRKSLSRKQIVRDVSLKLQRGNTIGLLGPNGAGKTTTFYMIMGLIQSDGGDITLDNEDITHLPMYKRSKKGLGFLPQQPSIFRGLSVEDNLLSILETQKHPKDQRQNILEDLLTEFSLTHLRRAMPHMLSGGERRRTEIARCLCSNPSIILMDEPTAGVDPIGIDDIKMLIRQLMKKNIGVLITDHNVREVLDICDYSYVMHGGKIIASGNSNKILGSSEVRKFYLGDSFKY

SEQ ID NO: 143765 - protein, 155 aa, Unknown
  Bacterial polypetide isolated from the Sargasso Sea
LIDGKDIQTNINGWQQNLGYVSQSTNLLDESIKNNIAFGVSEDQIDNKKLLDASKNSQIYEFISSLKEKFESQVGERGIALSGGQIQRIGIARELYRDPPIILLDEATSALDLDTEKEFLKCLDQLKGNKTIVFVSHRKSALENCNKIIDLNLDA

SEQ ID NO: 143766 - protein, 240 aa, Unknown
  Bacterial polypetide isolated from the Sargasso Sea
FDTLNPSMNVGRQIIRALEIFRFGKSDKDRSERMLELLDLVKLPRAFAERMPRQLSGGQKQRVGIARAFAGGARIVVADEPVSALDVSVQAAVTDLLMEIQRNEKTTLLFISHDLSIVRYLSDRVMVMYLGHVVELGTTDQVFSPPYHPYTEALLSAVPIADTSVEKEHIVLEGDIPSAMDPPSGCPFQTRCRWKKDVPGDLCEKKIPPQRDISIGHQIKCHLSETKLSEMTPVIKLAVE

SEQ ID NO: 143767 - protein, 274 aa, Unknown
  Bacterial polypetide isolated from the Sargasso Sea
SQAGSISVSNIQKIYDPDGAAVHALENCSCEIPSGKFVAMVGPSGCGKSTLLNMIAGFDQPTSGEIKLDDQLLVSANTQTPPNSDRVVVFQNGALFPWKTVLENIAYGPIVQKTRGRGQAEEEARDLLRKVGNLERISDAFPGQISSGMQRRVEILRALINQPKVLLLDEPFRAMDTVSKSKMHQHLLDIHDRFKPSILLITHDLVEAILLADVVLVMTTRPGTIKVKLNVDLPRPRSRDMILSEEFTQLQKQAIAAVHEEARKAFERGEKELA

SEQ ID NO: 143768 - protein, 283 aa, Unknown
  Bacterial polypetide isolated from the Sargasso Sea
MEPAIQIQNVWKIFGNTSKEALDAIQNKKISKQEALEKYNSVIGVSNVSFDVKKGEIFCVMGLSGSGKSTLVRHINRLLEPTSGKILINNQDVMKFNKENLQVLRNKKIGMVFQNFALMPHRSVLDNIAMPLEIRGISKNDRLDAANNILNIVELQGWGNKYAHELSGGMQQRVGLARALAADPEFLLMDEPFSALDPLIRRQLQTEFIKLSKKMKKTTVFITHDLDEAVRVGHRIAIMRDGTVVQIGTPEEIVINPADEYVADFCKGISRLKVVQAKQLCNH

SEQ ID NO: 143769 - protein, 134 aa, Unknown
  Bacterial polypetide isolated from the Sargasso Sea
MGAINISNVGKVYPNGTRALEDVNIEINDGEFVVLVGPSGCGKTTLLRMVAGLEDITEGEISIAENVVNEVAPKDRDIAMVFQNYALYPHMSVYDNMAFSLKLRKLSKEEIDKKVKEAAKTLEIDELLDRKPKA

SEQ ID NO: 143770 - protein, 272 aa, Unknown
  Bacterial polypetide isolated from the Sargasso Sea
MFIKFFGTNAKKMLQDANGNVDAKKFQENGCIVGVNNASFEVSKGEMLVVMGLSGSGKSTLLRCISRLTDATDGKIFIEGQDLLSLNNKELIELRRNKMGMVFQSFALLPHKTVLENIAFPLQIKGIKTEDSINKAMDMVKLVGLDGRENYFPRELSGGQQQRVGIARSLAVEPDIWFLDEPFSALDPLIRKEMQDEFLRLQEKLQKTIMFITHDFDEALKLADRIAIMKDGIIEQLDTPANIVLNPATEYVRKFTEEVPREKVLLIEDVMD

SEQ ID NO: 143771 - protein, 106 aa, Unknown
  Bacterial polypetide isolated from the Sargasso Sea
GGQQQRVAIARALAMRPKVMLLDEITSALDPEVVGEVLNVIRSLNKEHSLTMIMVTHQMGFAREISDRVCFFNEGKIFEQGPPEQLFGDPKNERTKQFLHAVLDAN

SEQ ID NO: 143772 - protein, 290 aa, Unknown
  Bacterial polypetide isolated from the Sargasso Sea
FQENGCIVGVNNASFEVSKGEMLVVMGLSGSGKSTLLRCISRLTDATGGKIFIEGQDLLNLNNKELIELRRNKMGMVFQSFALLPHKTVLENIAFPLQIKGINTSDSINKAMNMVKLVGLDGRENYFPRELSGGQQQRVGIARSLAVEPDIWFLDEPFSALDPLIRKEMQDEFLRLQEKLQKTIMFITHDFDEALKLADRIAIMKDGIIEQLDTPANIVLSPATEYVRKFTEEVPREKVLLIKDVMDASTSDEIGDLKVSKDEIIENVAEKILTQEKTVAVTDGKNNIVG

SEQ ID NO: 143773 - protein, 159 aa, Unknown
  Bacterial polypetide isolated from the Sargasso Sea
YLPQQTSIFRGLTVYENLIGIAQIVKKNPEEQKSIVEKIMAEFSITHLRDIKATALSGGERRRTEIARCLINSPKVLLLDEPFAGVDPLAVQDIKHLLLKLQARGCAVLVTDHNASQLLSVVDRAYVIANGNIIANGTPRQIVNTTEAKKLYFGEDFSF

SEQ ID NO: 143774 - protein, 290 aa, Unknown
  Bacterial polypetide isolated from the Sargasso Sea
KVGLLSGGEKRRIALCRLLLSKPDMLLLDEPTNHLDAESVDWLEQFLHRFPGTVVAITHDRYFLDNAAEWILELDRGYGIPYKGNYSTWLDQKQARLESEQKGEEARAKALKKELEWVRQNAKGRQAKSKARIARFEELSDYEYQKRNETQEIFIPVAERLGTQVIEFKNVTKSFGDRVLIDNLSMNIPAGAIVGIIGPNGAGKSTLFKLIAGREQPDSGEVVIGSTVKMAFVDQHRDALSDDKTVWEDISGGLDMINIGKFTMASRAYAGRFNFNGGDQQKKVGMLSGG

SEQ ID NO: 143775 - protein, 145 aa, Unknown
  Bacterial polypetide isolated from the Sargasso Sea
NISILNETLRENILFGLSSKQFSDKEVLKSIELSNLKNLLLKLPDGLDHKIKEKGLNFSGGELQRIGIARALVFDPEILIFDEATSALDTFTENEILKDINSLKSKTIIMISHRMNTLKYCDKIYLIDKGKIKDNGSYDKFNEKY

SEQ ID NO: 143776 - protein, 221 aa, Unknown
  Bacterial polypetide isolated from the Sargasso Sea
MASHQYVYVMSRLSKTWPGGKEVLKNISLSFLPGAKIGVLGLNGAGKSTLLRIMAGIETEFHGEAWAADGIKIGYLPQEPELDPSLDVAGNVMAGMGRAKELVDRFNEVSAKFAKEMTDDEMNSVIAEQAELQEEIDAIDGWDLERKAEIAMDALRVPAGDADVTKLSGGEKRRVALCQLLLSAPDMLLLDEPTNHLDAESVAWLQKFLHGFPGTVVTITH

SEQ ID NO: 143777 - protein, 175 aa, Unknown
  Bacterial polypetide isolated from the Sargasso Sea
KALRQAGIRIVMLTGDNQLTAEAVARKLGIDEVEAGVLPDGKKAVITRLKASGHVVAMAGDGVNDAPALAAADVGIAMGTGTDVAIESAGVTLLKGDLMILNRARHLSEITMKNIRQNLFFAFIYNALGVPVAAGLLYPVYGILLSPVIAAAAMALSSVSVIVNALRLKSVRLGK

SEQ ID NO: 143778 - protein, 117 aa, Unknown
  Bacterial polypetide isolated from the Sargasso Sea
LLDKITGELSSGQKNRVSLAKALINDPTVLLLDEPTASLDPETGDFVRTFLENFKKEKKISVLLASHNMDEVKRLCGSVLMMKDGIIVDSGTPNDLILKHGRKNLEEVFLEIARNKK

SEQ ID NO: 143779 - protein, 83 aa, Unknown
  Bacterial polypetide isolated from the Sargasso Sea
KQRISLARAFYHKRKIFFLDEATSALDNKTEEEIVSEIKELRGNHTMIIIAHRYKTVENCDRIYVLKNGVIKESGNPKNILLN

SEQ ID NO: 143780 - protein, 60 aa, Unknown
  Bacterial polypetide isolated from the Sargasso Sea
DPPVIILDEATSALDITTEKKIMNTIFNLKNKTIIIIAHRLKTVEKCDKVFRFEKGKIVN

SEQ ID NO: 143781 - protein, 146 aa, Unknown
  Bacterial polypetide isolated from the Sargasso Sea
MSDPIIKIEGMNKWFGDFQVLKDIDLEVEKNKKIVVCGPSGSGKSTLIRCINRLEEHQKGTIIVDGTELTENTKNIEAIRAEVGMVFQQFNLFPHLSILDNCTLAPVWVKKMPKKDAEELAMKQLEKVQIADQAKKFPGQLSGVNN

SEQ ID NO: 143782 - protein, 129 aa, Unknown
  Bacterial polypetide isolated from the Sargasso Sea
RGSERAEDLIRKVRLQGKEDSYPGELSGGQQQRVAIARSLAMNPDVMLFDEVTSALDPETVKEVLVTIKELAQEGMTCILVTHEMGFAKEVADHIYFTDNGVILEHGPPSTFFTESSDPRTREFLSQIL

SEQ ID NO: 143783 - protein, 130 aa, Unknown
  Bacterial polypetide isolated from the Sargasso Sea
MSGGQQQRVALARSLATSPTVLLLDEPFSALDTFTRSSLQQDVAAICKQKGITMVLVTHDIDEAVMMSDRVFVMDQNPGRIIDEIKVDLAWPRKHMSQDFQCIREDLMTAFKGTEKTESLRALDGGRSAA

SEQ ID NO: 143784 - protein, 49 aa, Unknown
  Bacterial polypetide isolated from the Sargasso Sea
ENCIALLEKGGIRDVEFRLNAYPHQLSGGQRQRVMIAMAIANRPKILIA

SEQ ID NO: 143785 - protein, 100 aa, Unknown
  Bacterial polypetide isolated from the Sargasso Sea
MTSKNGESLKAEKRDLGLMFQSYALWPHMTVFKNIEFGLVMKKLSLEEKEIRYKQMEKLFHLEGLRNRYPSELSGGQQQRVALARMLAVKPSLLLLDEPL

SEQ ID NO: 143786 - protein, 267 aa, Unknown
  Bacterial polypetide isolated from the Sargasso Sea
DAKKNKIGMVFQHFNLFETLSVFENLSIDATEDNKSLRVRINEILKKYNFNIDLDIPVLNLSAGQKQKVEIIRCLLRSPKVLIMDEPTSVLTEQETEELFISLKKFCDEGILIIYITHKLKEVLSLCDEVAVMRKGKVVSVSQTQNERVETLANKMVGQKLAKIKKKINISKNKDEIFKVKHLNFYSDDPFETNLVNLNFSVKKGECLGIAGISGNGQNELFQILSGEIITPDTSIIFRNKEIAKLNPKQRREYLMAFSPEDRISQA

SEQ ID NO: 143787 - protein, 212 aa, Unknown
  Bacterial polypetide isolated from the Sargasso Sea
MNKFQLLDDGLIVNKISKSYGKKKVVRDISISINRGEIVGLLGPNGAGKTTTFYMIVGLVKPDTGSIVLDKIEISKMPIYSRGLQGISYLPQEPSIFRGMNVEDNLLAIIEIVEKDQNKQNIILQTLLNEFDINHVRKSKSIVLSGGERRRLEIARTLASRPKYLLLDEPLTGIDPVSIEEIKIIIKKLKQKNIGVLITDHNVRETLKIGIK

SEQ ID NO: 143788 - protein, 220 aa, Unknown
  Bacterial polypetide isolated from the Sargasso Sea
MFIVVKNLTKIYNKYFAVNKISFQIEKNRTIGLLGPNGCGKTTTIGMLLGLVSPTSGEILIEGKNINLFKRDEILKRFNFASPYVELPKKLTVKQNLEIYGRLYGISDLNKRIYEISSDLDIKNFFDRKTGELSSGQKNRVSLAKSLINKPEILLLDEPTASLDPDIGDFIRSYIQEYKQKNRVTILLASHNMSEVERLCNSIIMMRKGKIIDSGTCENL

SEQ ID NO: 143789 - protein, 191 aa, Unknown
  Bacterial polypetide isolated from the Sargasso Sea
KPTDGEILIDGKKIEGNRIEILKKINFISPYIELPKKLTVKQNLIVYGKLYNVLNINNTIEYLVEKLRLSDLLNRITGELSSGQKNRVSLAKALINNPSVLLLDEPTASLDPEIGDFVRTFLENYKKEKKISILLASHNMNEVTRLCKKILMMKDGVIIDKGNPEELIKKHGRKNLEEVFLKLSRNKNELY

SEQ ID NO: 143790 - protein, 234 aa, Unknown
  Bacterial polypetide isolated from the Sargasso Sea
KGVTKHFDDVQALSKIDLNVDKGEFITIVGPSGCGKSTLLRIIAGLVAPSEGIINKQNTSGAFVFQDSALLPWRTVQKNVELLMELENVDKVERKHRAEQALEQVGLTGFNKNYPHQLSGGMKMRLSLARSLVLKPDFLLLDEPLSAVDELTREVLQEEIHELWKQEKFTSILVTHNVAEAVYLSNRVIIMSPRPGYITHIVDIPFKKRNQLLRSKQQFTKIVNDISGKLRTWK

SEQ ID NO: 143791 - protein, 241 aa, Unknown
  Bacterial polypetide isolated from the Sargasso Sea
MSTLTSAGLKKSFESKTVIHNVSLEVNSGEIVGLLGPNGAGKTTTFYMIVGLLKSDEGSIYINDQNITYEPIHKRFEQGISYLPQEPSVFRDMTAKDNIDSILEVDSSLSKIQKANILEHLIEKFDLSKFINTKGIQLSGGERRRVEIARALALKPKFLLLDEPFAGIDPISVIDLQKIIKVLAKEGIGILITDHNVRETLKICDKSYVINSGKVLASGKSKDLVKNEIVKKVYLGESFKL

SEQ ID NO: 143792 - protein, 178 aa, Unknown
  Bacterial polypetide isolated from the Sargasso Sea
MRTLETTVIWVTHDQEEALLVADRVAFMIDGEIKQIDSPEHIYMYPATLEAAEFIGEGVAFLSEIRSDQITSIFGDLPISECATESNRLEIDQSSSAILFVRPEQITLEPDQIHVGSTVAGTVISKDYFGHSSLLTVQLDDKSLFKVRVTSRVEVSEGQRLNLGLREYPRAFAQTVSV

SEQ ID NO: 143793 - protein, 206 aa, Unknown
  Bacterial polypetide isolated from the Sargasso Sea
MSLFEVKNITVAFGGVKALNDVSFGVDKGEIFTIIGPNGAGKSTLFNVISRIYEPSKGEIYFENQNISKTKPHNISKLGIARTFQNLELFENATVLQNLLLGRHIYKKTNILSEVFFTPSARKQEHEYRLKVEEVIDFLDLQHYRDTLINGLPYGVRKNVELARALCTDPKLLLLDEPSSGLTNEETIDLGFWIKDIQSLLGITII

SEQ ID NO: 143794 - protein, 202 aa, Unknown
  Bacterial polypetide isolated from the Sargasso Sea
MGILEVKDVNKRFGGLQALGNVNLSVAENSCHVIIGPNGAGKSTLLNCLVGKLIPDTGSVLFDGQSVLGRKPYEINQMGISRVFQTPEIFGDLSVLENMLIPIFAKRDGAFRMHAVEDTANEKEIVEQAEHMLESLNMADKRHMHSASMSRGDKRRLEIGMCLAQEPRLLLLDEPTAGMARADTNNTIDLLKQIKDERDITI

SEQ ID NO: 143795 - protein, 191 aa, Unknown
  Bacterial polypetide isolated from the Sargasso Sea
MSFKINIKNKSFINKHDKKKVEVLKNIKIEIQSNEFVCIVGPSGCGKTTLMNMIGGLIPFDNNEKIGRDLDNDDTFGYVFQTSRLLPWLTVKENIELVSKKDTNLDIEINHLLKEFDLLEFINYFPKALSGGMRRRVSLVRALINKPEVLLMDEPFVSLDQPTAENLYKVLIDFWKKNPITVILITHNLKE

SEQ ID NO: 143796 - protein, 237 aa, Unknown
  Bacterial polypetide isolated from the Sargasso Sea
EESETQENVLGSLFNIKTINLSKSFGGTKALDSINIELNSKKIHGLVGQNGAGKSTLGKIIGGHHRFTEGKLLINSQYVDKWSPKLALDKGIAMIHQELALVPRMTVFENIFLGIEKNKFGILKKKNFGLYDTLEEKIGFGLNPNEIVGNLRIADQQKVEIMRALARDAKVIIMDEPTSSLTKDEVERLHSLMKKLKSSGYLIIYVSHFLDAILEVCDDVTILRDGKLIRSNSIEKE

SEQ ID NO: 143797 - protein, 53 aa, Unknown
  Bacterial polypetide isolated from the Sargasso Sea
ARALCMEPKIMLFDEPTSALDPEMIKEVLDAMVSLAKGGMTMIVVTHEMGFAK

SEQ ID NO: 143798 - protein, 83 aa, Unknown
  Bacterial polypetide isolated from the Sargasso Sea
KNPNVLVFDEATSALDNLTEQAVMDAVHNLGKDVTIIMIAHRLTTVKDCDIIFFLEDGKLAAQGTFDKLIQNNDNFRATAAQI

SEQ ID NO: 143799 - protein, 176 aa, Unknown
  Bacterial polypetide isolated from the Sargasso Sea
MAEQPSYGSIYLLGHSLADTNKEDLTKLRRRIGIVFQNFRLLNHLTAAENVALPLRIAGATVSQVKDYVLELLDWVGLREQRDKMPSSLSGGQQQRVALARAVVTRPSLLLADEPTGNIDDENAKKIMYLLTELNKIGTTVIVASHRKDLCRDPNINQLLIESGRLAVLNKSPKQC

SEQ ID NO: 143800 - protein, 247 aa, Unknown
  Bacterial polypetide isolated from the Sargasso Sea
TKYLWLKDTLMSYLGGQQQRVAIAMALAGSPELLLLDEPTTGLDVTTQAHVLELLNEIAKDRDTSMVYVSHDLGAIAQVSDRVIVMYAGEIVLDGDVREVLNSPLHPYAYGLLNSIPKLSLPGLPEAMPGTPPQLEQNINGCSFSERCEFASDKCKNSRPELFTPKNKKMKVRCFWHSKLSEKQYKPNYGTHLANKTKNLDEVLKLDKISITYSKQSILDQLLNRFSEKNITVKDIEIEINKGETIA

SEQ ID NO: 143801 - protein, 136 aa, Unknown
  Bacterial polypetide isolated from the Sargasso Sea
YNIQNLNDRIDHLANKLRLKDLLNKITGELSSGQKNRVSLAKALINDPTVLLLDEPTASLDPETGDFVRSFLEDYKKEKKISVLLASHNMEEVKRLCSSVLMMKDGLIVDRGTPEELITKYGRRNLEEVFLEIARK

SEQ ID NO: 143802 - protein, 243 aa, Unknown
  Bacterial polypetide isolated from the Sargasso Sea
MFIEIKNLTKNYNKFLAVNKINFLIKKNKTIGLLGPNGCGKTTTIGMILGLVTPSSGEIKIENKNISTFKRDEILKRFNFASPYVELPKKLTVRQNLEIYGRLYGIKNLNERIDEISEDLNIKNFFDRKTGELSSGQKNRVSLAKSLINKPEVLLLDEPTASLDPDIGDFVRSYIQDYKSKNKVTILLASHNMSEVERLCDSVIMMREGKIIDEGTCSDLIKKHGRNNLEETFLKLARSKNEF

SEQ ID NO: 143803 - protein, 205 aa, Unknown
  Bacterial polypetide isolated from the Sargasso Sea
IVGESGSGKSTLALAMMGYVKHGLYTIGGECEFNSFYLLKMKNRDLEKIRGRKIAMIPQNAGQALTPNLKIGYQIDEALQLHSDFKEEEREQKISELLNKVRLPSPETIALRYPHELSGGQQQRVAVAMALAGTPDLLLLDEPTTGLDVTTQAHVLELLNFIAKDTGTSMVYVSHDLGAIAQVSDRIIVMYSGEIVLEGPSRDIL

SEQ ID NO: 143804 - protein, 88 aa, Unknown
  Bacterial polypetide isolated from the Sargasso Sea
ILADRPILLLDEATSALDAMSERMVQQAIDRLMVGKTSIVIAHRLATVQHADRIIVMDKGNIVGMGDHASLMKSDTLYREYAELQLLS

SEQ ID NO: 143805 - protein, 220 aa, Unknown
  Bacterial polypetide isolated from the Sargasso Sea
AKGVIKSYKNGENKLKVLDGINLPLEQGEIITVVGKSGSGKSTLLNILSTLDSADEGEIIIDGKNIEGYSDIEISKFRNSFIGFVFQFHHLLPDFTVVENILMPAWIKRDKSKLNKAYELLETLQLMGIKDKYPMELSGGEKQRVAVLRALINRPKILFADEPTGNLDENNALLLVDLLRKINRDYEVAILLTTHNPDVAAIGKKRYELKSGLLEKSKDL

SEQ ID NO: 143806 - protein, 258 aa, Unknown
  Bacterial polypetide isolated from the Sargasso Sea
SSDNSSNTPVIKCESVYKIFGSNAFKLLENSNGQVDAKTFQEAGCIVGVNNASFGVQKGEMMVVMGLSGSGKSTLLRCISRLTDATAGKIFIDGEDLLSMNSRQLIELRRNKMGMVFQSFALLPHKTVIENIAFPLQVKGTNTRESMAKALEMVELVGLKGRENYFPRELSGGQQQRVGIARSLAVEPDIWFLDEPFSALDPLIRKEMQDEFLRLQAVLNKTIMFVTHDFDEALRLADRIAIMKDGIIEQLDTPDNIV

SEQ ID NO: 143807 - protein, 274 aa, Unknown
  Bacterial polypetide isolated from the Sargasso Sea
QVNQSKQGLLVEILSGLDALRVNGAYSFIKRKFSAQADDYSKVTNSAKRFNQITTNYVSIVQQIAQIAIIVYGFHLFVEQRISMGAIIATMILSGKTLGPLAKMAQTLGRANSAYVARNNLIDFFSQQRRERFSKVGLENVRKNLAIDIQNASVKLSADSKPIFTNLSFDVKKGEKIAIIGRSGAGKTTLLRTVCGLLEPETGSVQINGDQASSIPRDELFRHVGVVLQESWLFSGTLRDNLTLGYEDFNDEQVSEALNAAGAHFLGENKGEML

SEQ ID NO: 143808 - protein, 243 aa, Unknown
  Bacterial polypetide isolated from the Sargasso Sea
MLKVNNLVKSFGGILATDKLTFKVEPGELHALIGPNGAGKTTLIRQITGEIKQDSGTIYFNDKEISALPIHTRSALGLARSFQITNIFKDMTTLENVTLAVQSRIGHSFYFWANAKKDPKLIEPATIFLKQVGLEDRADIISGQLSHGEHRQLEIAMALATEPKMLLLDEPMAGMGTEESKLMVEIIQKLKKKITILLVEHDMDVVFALSDKITVLVYGKVIATGYPDIIRNIPEVQAAYLGE

SEQ ID NO: 143809 - protein, 237 aa, Unknown
  Bacterial polypetide isolated from the Sargasso Sea
IQKLSMEVEAGEIHAVIGPNGAGKTTLIAQLSGSLKPDSGRILFEHQDITHVPEYRRSALGLARSFQITSVLKNFSALDNVALAVQAHAGHSFRFWNKARKAQELKEPALEILEKIGITDRMDMPASSLSHGEQRQLELAMALATRPKLLLLDEPMAGMGVEESQKMVELLQDLKGTHTLVLIEHDMDAVFALADRITVLVYGESIACDTPENIRSNPEVRKAYLGDGEVLTEIEEV

SEQ ID NO: 143810 - protein, 228 aa, Unknown
  Bacterial polypetide isolated from the Sargasso Sea
MNIIEVKDLKKAYLLPSDKTKTFNAVDSISLGIKKGEVYGILGPNGAGKTTTLEMLEGLKEIDDGSAIIDGIDVSKDPYEVKKVIGVQLQSNEYFDKLDLSELLTLFSKLYSTNIDHSKLLDQVNLLDKANAKTQHLSGGQRQRFSIACALVNNPKILFLDEPTTGLDPQAKRNLWNLVKDLNASGMTIVLTTHNMEEAEHLCDRIAIMDEGKLIAEDTPKALIEKIC

SEQ ID NO: 143811 - protein, 120 aa, Unknown
  Bacterial polypetide isolated from the Sargasso Sea
MDKFFDSDRGLVRAVQNLHLDIKENDFIVLLGPSGCGKTTTLRCVAGLERPNGGSIEIAGTLVDSVDKGEFVPPERRDIGMVFQSYAVWPHLNVYQNVALPLTDGSRRVPKDQVTDRVMK

SEQ ID NO: 143812 - protein, 186 aa, Unknown
  Bacterial polypetide isolated from the Sargasso Sea
MSSLTIKNLNKIYNPGKNEVHAVKDFNLEIEDGEFVALLGPSGCGKTSTLRMIVGLESITSGSILFDDVEINHLSPEQRNVAMAFESYALYPNFTIFENLAFPLEVKKNSSSEISKKVGEIAEMLQITNILELKPNQLSGGQQQRVSLGRALIRDPAVFILDEVMSHLDAHLKFQMLFELKKIHQT

SEQ ID NO: 143813 - protein, 206 aa, Unknown
  Bacterial polypetide isolated from the Sargasso Sea
MNLKIHNVSLSIKGRLIVNDVSITVNPGEVVGLMGPNGAGKTTTFNLAVGNIKPDKGEIIMNGKNITNLPLPIRSRLGLGYLTQEASIFRDLNVKDNIDLALQNSSYSRAAIRNRREQLINDFNLNNFVDSYGYQLSGGERRRCEIARALTVGRKGPKYLLLDEPFAGIDPLAVNDLKKLILKLSSDGVGILITDHNVRETLLITN

SEQ ID NO: 143814 - protein, 279 aa, Unknown
  Bacterial polypetide isolated from the Sargasso Sea
LGIVGESGSGKTLSMLALTRLLPKQAIVSSGSIDFLNHNLSEIDNLNFYKNFSGKKISMIFQEPMTALNPVYTIGRQLMYTYMYHNKVGKKEAHHKSLEMLSAVKLSDNLERMKQYPHQLSGGQRQRVMIAMALINNPSLLIADEPTTALDVTVQKEIINLIQELKEKFGMALIFISHDLGVVSQVSKNIIVMKRGDIIETGKTYNVLNKPKKLYTKTLISCLKNLNTKRKINKHQKNNKIIEIKNLSKIYKLPSKLFSAKKNINAVNDINFSVYEGET

SEQ ID NO: 143815 - protein, 207 aa, Unknown
  Bacterial polypetide isolated from the Sargasso Sea
EVNSFIIGPNGAGKSTLLKAIMSLIKVSAGRFYVNGEEKTNLSTHRIVMEGIGYVPQVANVFPSLTIDENLEIGSWSIKRNKKEALTKIYNDFPMLGNRKKDKAGNLSGGQRQILALARALVTSPSLLLLDEPSAGLSPVAINEVFTSIKEINDSGVSILLVEQNAKRALSFSDRGYVLDQGRNAYQGKGEELLNDSRVIDLYLGKL

SEQ ID NO: 143816 - protein, 242 aa, Unknown
  Bacterial polypetide isolated from the Sargasso Sea
MSISLEIINLSKTYGSKEAVQNISFKVNQNKIIGILGPNGCGKTTTIGMILGLLKPTKGKVLINGIEIEKNRVNLLNKLNFISPYIELPKKLTVKQNLEVYGRLYDVKDLKNKINYLCEKLRLNEFINKVTGELSSGQKNRVSLAKSIINDPSVLLLDEPTASLDPETGDFVRSFLEEYQREKKTSILLASHNMSEVERLCSSVLMMNKGSIIDKGTPKELIKKHGRKNMEEVFLKITRDLI

SEQ ID NO: 143817 - protein, 193 aa, Unknown
  Bacterial polypetide isolated from the Sargasso Sea
TAGSIRLLDHDITRTDPAKVARMGLVRSFQISAVFPHLSVLDNVRVALQRPGGLATQFWLPMRSLNRLNERAMQLIESVGLADKRHEPAADLSYGRKRVLEIATTLALEPKVLLLDEPMAGMGHEDVHVVAEIIREVATQRAVLMVEHNLKVVADLCHQVTVLQRGEILTSGDYRTVSQDERVRVAYMGTDDD

SEQ ID NO: 143818 - protein, 174 aa, Unknown
  Bacterial polypetide isolated from the Sargasso Sea
RDEILARINFCSPYIELPKKLTVKQNLEVYGRLYGVKNLSERILEISKDLDIKNFFKRKTGELSSGQKNRVSLAKSLINKPEILLLDEPTASLDPDIGDFVRSYIQEYRSKNQVTILLASHNMNEVERLCDSIIMMKKGKIIDRGTCKEIIKKHGRNNLEETFLKLARSRDELQ

SEQ ID NO: 143819 - protein, 238 aa, Unknown
  Bacterial polypetide isolated from the Sargasso Sea
MNKPILECNGIAAGYVKGLNILQGIDLVVSEGEIISIIGPNGAGKSTLLKAIMGLINVSAGRFFINGVEKTNLSTHKIINEGIGYVPQVENVFPSLTIEENLEIGAWSLTKNRKSSITKVLKDFPLLNERKKEKAGNLSGGQRQILALARALVTSPNLLLLDEPSAGLSPVAINEVFKTIKEINEKNVSILLVEQNAKRALKFSNRGYVLDQGRNAYQGEGVELLNDPRVVDLYLGKL

SEQ ID NO: 143820 - protein, 82 aa, Unknown
  Bacterial polypetide isolated from the Sargasso Sea
LLDEATSALDAVTEANISKSLDKLSENTTTIVVAHKLSSIKDADTIFVLDDGSLVEFGTHTELLKKKKYYATMVNAQNKNDK

SEQ ID NO: 143821 - protein, 226 aa, Unknown
  Bacterial polypetide isolated from the Sargasso Sea
MQNSIKVINLNKSYGSKEAVKNINFEIKENEIVGLLGPNGSGKTTTIGMILGLLKPSSGEVLINGLKIEKYRDDILQKINFISPYIELPKKLTVKQNLIVYGKLYSVKNLKEKIDYLVNKLRLENLLNRITGELSSGQKNRISLAKAIINDPSVLLLDEPTASLDPEIGDFVRTFLENYKKENKVSILLASHNMDEVTRLCSSIMMMKNGSIIDEGKPKDLIKKHG

SEQ ID NO: 143822 - protein, 197 aa, Unknown
  Bacterial polypetide isolated from the Sargasso Sea
APKPSLLLMDEPLSSLDEELREQLAREIRLILKQEKISAILVTHDQNEAFAVGDHICVMHQGRVQQNDSAYNLYHRPLNRFVAEFIGEGTLLPGVVADEDSIATDLGEIKGNLPESCKHQDNVDVLIRPENVILADNKENKAVITERYFRGSNYLYTLKTNGGVELLCLLPGSEALQIDQYISVRLQIEKPVVFSRP

SEQ ID NO: 143823 - protein, 130 aa, Unknown
  Bacterial polypetide isolated from the Sargasso Sea
NDFNALENVMIPRLIHGEATGIVKKNAIDLLEKVGLAERAFHKPSQLSGGEQQRVAIARALINKPRVVLADEPTGNLDEETGVQVMDILLRLNKEHQTTFIMITHNPSLASKMQFQYRMENGQLHLIANK

SEQ ID NO: 143824 - protein, 183 aa, Unknown
  Bacterial polypetide isolated from the Sargasso Sea
GSGKTTLLNCLSALDSPTSGEYQFSGNKVPKNESEAMTTFRRENIGYVFQFFNLLQDLTVLENLLLIQELAGSRDEDRARSLLALVGLEAEVDRFPAEISGGQQQRVAIARSLAKRPRLLLGDELTGNLDSWTSSVVMEVLVKACDSEGITCVFVTHDESLVQYATRVIRIDSGKIISDDIVG

SEQ ID NO: 143825 - protein, 234 aa, Unknown
  Bacterial polypetide isolated from the Sargasso Sea
MIKVNNIFKSFKEEDVLINVTFEFEKGSIVGFLGPNGAGKSTLIKILTGVISPDKGTIYINNENIAESRNITKSNIGYIPEVPTGFNNLTVKEFLYFCGELRNLKKCIIKSELDLIDQQFQIKDIFRKRMDSLSKGLRQRIWLIQAILHNPDVLLLDEPTDGLDPIQKRSIIKFIKNIGFNKTIIITSHTLEDLQILCNHVLIIKDGILIFNDNLETVIKNYNNLNNAYMQIIN

SEQ ID NO: 143826 - protein, 236 aa, Unknown
  Bacterial polypetide isolated from the Sargasso Sea
MLELDNLNVNFGKIKAVCDVCLKISRGEIITITGPNGAGKSSTLNAITGIIRPVKGSINFRGEEIAGQTSEKIIKKGIVQIPEGRKIFGTLTVRENIIIGGYRKLPFTLYNQNMKSVLNLFPSLENRLDENASNLSGGQAQLLALARGLMAEPDLLLLDEPTLGLSPIPAMEIFKLLKWLKSAGMTIILVEQNIHKTLAISDRIYILESGKVILKGRPDKIKSAPEFLQYAGDYSV

SEQ ID NO: 143827 - protein, 182 aa, Unknown
  Bacterial polypetide isolated from the Sargasso Sea
MINSLQIINLSKAYDAKEAVKNISFKLSQNEIVGILGPNGCGKTTTIGMILGLLKPTSGKILINGIEIESHRVKLLNKLNFISPYIELPKKLTVKQNLEVYGRLYDVNKLKIKIDYLCEKLRLYEFINKITGELSSGQKNRVSLAKSIINDPEVLLLDEPTASLDPETGDFVRSFLEEYQRE

SEQ ID NO: 143828 - protein, 211 aa, Unknown
  Bacterial polypetide isolated from the Sargasso Sea
MQTNSQKENAPKFLEINGISLSFREIQALRNVSFTVNKHELFAIIGPNGAGKSSMLNCINGFYHPQLGTITFKGQTRHRMQPYEAARQGIARTFQNIALFRGMSTLDNIMTGRNTKMKRNLLWQALHFGPAKTEELEHREAAERVIDFLEIESIRKTPVGTLPYGLQKRVELGRALAAEPDLLLLDEPMAGMNLEEKQDMCRFILDLNDEF

SEQ ID NO: 143829 - protein, 163 aa, Unknown
  Bacterial polypetide isolated from the Sargasso Sea
VFVTHDQEEALTMSDRIAVINEGEIQQIGEPEQIYESPSNKFVANFIGEANLLSGVCKTPGENGVCELDTGHELNLFVPPHIKQNDKVTIFIRPERIKIEKSSKDKSQLSISEFTYLGNAATIQLKSNNQLINVNLPIEDLKVFKKDDYVDIHFPKESAQVID

SEQ ID NO: 143830 - protein, 90 aa, Unknown
  Bacterial polypetide isolated from the Sargasso Sea
MLSLQNISKRFDGKPALDALSLDIHEGEFVVLVGPSGCGKSTLLRLLAGLEPVSEGEIWLHDQNITALSPRERNFAMIFQNYALFPHLSV

SEQ ID NO: 143831 - protein, 227 aa, Unknown
  Bacterial polypetide isolated from the Sargasso Sea
MLDIENTSQDEVPKITFNNVSFSWPGKKERVIQNCSFSIKKKGLWMIVGENGSGKSTLLKLINGLLTPSNGLINKSAKVGMVFQNPDHQILMPNCRSELLLNINQRFSKKDTANKIDFALKKVGLSGFDKRPIHTLSGGQKQRLTIACCLISDKNLVLMDEPTALLDSTSQLKVLEIIKDLTNNKSNPFTALWITHRLEELIYADAVAEMKNGNLSEWQKPLNFKYN

SEQ ID NO: 143832 - protein, 242 aa, Unknown
  Bacterial polypetide isolated from the Sargasso Sea
LTAAQRKARLDDMLALVKLEGLAKRYPHELSGGQQQRVSIARALAYEPQLLLLDEPFSNIDAQVRHSMMAEIRSILKQRNVSAVFVTHSKDEAFVFADTLAIFNQGVIVQHGRAEDLYAAPNSRYVADFLGSGNYLPAEVIDGHSVATPIGELRSLTPLSQSHAFNGQVFLRPQQLALSADDAGVGTITERRFLGAFCHYWVKVEAASHAHYVEVRSQIMQLNVGQRVGLSTEPHSLVLFES

SEQ ID NO: 143833 - protein, 131 aa, Unknown
  Bacterial polypetide isolated from the Sargasso Sea
MAFFEGNQMTAGYDEGADIISSCTINVNKGEIVAILGPNGAGKSTAMKAMLGLLNLRSGDVTIDGKNISDLNPQDRVKRGISFVPQTRNVFAGLTVRENLEIGAFLRNDELDEIIEEIYELFPILSDKKTQ

SEQ ID NO: 143834 - protein, 200 aa, Unknown
  Bacterial polypetide isolated from the Sargasso Sea
MSDAVIKCESVFKIFGTNAKKMLEDSNGNVDAKKFQENGCIVGVNNASFEVAKGEMLVVMGLSGSGKSTLLRCISRLTDATDGKIYIEGQDLLSLNNKELIELRRNKMGMVFQSFALLPHKTVVENIAFPLQIKGIKTEDSISKAMDMVKLVGLDGRENYFPRELSGGQQQRVGIARSLAVEPDIWFLDEPFSALDPLIR

SEQ ID NO: 143835 - protein, 134 aa, Unknown
  Bacterial polypetide isolated from the Sargasso Sea
DIVRVAKISDAHDFIMGLNDGYSTNVGERGAGLSGGQKQRIAIARTLLTNPKLLILDEATSALDYQTERKVCDGLRNAAKNSTVFFITHRLNTVKKADLIVMLHNGSVEEVGSHEELMKLKGRYYALFRQQEAS

SEQ ID NO: 143836 - protein, 238 aa, Unknown
  Bacterial polypetide isolated from the Sargasso Sea
KMTEAVLELKDVCFRWPNQDRATIDLPELKIDQGESIFLQGPSGSGKSTLLSLVGGILIAESGSLRVLGEELKSLSRARRDAFRVTHLGFIFQLFNLLPYLSLEENVLLPLRFSKKRAQRAGRNQAERLEEAQRLLTALGLSEPLKEGRPVVELSVGQQQRVAAARALIGRPELVIADEPTSALDADLREVFLNLLFAECDKAGSALLFVSHDSELGRLFGRSLFLPHINSVSSFEAA

SEQ ID NO: 143837 - protein, 248 aa, Unknown
  Bacterial polypetide isolated from the Sargasso Sea
MAKITLKDLSHSYLEKQNSNVDWALREVNIDWKDGGAYALLGPSGCGKTTLLNIVSGLLKPTKGKVLFNDKDITTLNPVERDIAQIFQFPVIYDTMTVYDNLAFPLKNRGLSESEIESKVKEIAEMLELTSTLNNRASGLTADGKQKISLGRGLVRSDVNVIMFDEPLTVIDPHLKWVLRSKLKELHQKINRTMIYVTHDQTEALTFADQVVVMHEGQIVQTGTPVELFEKRKHTFVGHFIGSLWNEY

SEQ ID NO: 143838 - protein, 107 aa, Unknown
  Bacterial polypetide isolated from the Sargasso Sea
AQFGSDLDASTQQLLNRGSKLTELLKQSQYSPLKVEEQVVSIYSGVNGYLDNFENSKIKDFENKLLDEIKSNAPDILNSIRDTGKLEGKPEEKLKNILDKMKENFNA

SEQ ID NO: 143839 - protein, 235 aa, Unknown
  Bacterial polypetide isolated from the Sargasso Sea
VNKISKSFGNKQVVRNISLNINRGEIVGLLGPNGAGKTTTFYIIVGLIKPDTGEIYIENIDVSTLPIYLRGQKGISYLPQEASIFRGMNVEDNLMSIIEIIEKNKDKHQIILENLLNEFDIRHVRKSKSIVLSGGERRRLEIARTLASNPKYLLLDEPLTGIDPVSIEEIKIIIKKLKNKNIGVLITDHNVRETLKIVDKVYIVNEGTIFFKGLPQDAVNDKKIRNFYLGSDFNL

SEQ ID NO: 143840 - protein, 221 aa, Unknown
  Bacterial polypetide isolated from the Sargasso Sea
MNNQIEINNLSKIYDNGFNALKDINLNIKKGEIFAMLGPNGAGKTTLINIICGIVRPSHGKVMVENFDIINDYRETRSRIGLVPQELTLEQFETVFNNVSYSRGLYGKKPNPLLIEKVLKQLSLWDKKDLILRQLSGGMKRRVLIAKALSHEPEILFLDEPTAGVDVELRKEMWKVVETLRETGVTIILTTHYIEEAEAIADRIGVINQGEIIIVEEKKKL

SEQ ID NO: 143841 - protein, 167 aa, Unknown
  Bacterial polypetide isolated from the Sargasso Sea
MIKTLIETINLKKTYQHFNGNITLFNNINLKIKQGELVALVGPSGSGKSSLLHLLALLDEPTRGEVIINNIVTRKFSDEKKDETRRKNVSIIFQDNNLLNDFTAIENVMMPLIIKGENILYAKKEAQKILKAVKIFDRSQHFPNELSGGEQQRVAIARALIARTNLF

SEQ ID NO: 143842 - protein, 89 aa, Unknown
  Bacterial polypetide isolated from the Sargasso Sea
RILSLGEQQRLAFARLLLNSPQFAVLDEATSALDIETEKYLYGLLIKRELSLISVGHRPTLKEFHNNVLALNGKGNWQLLPTKNYNFDN

SEQ ID NO: 143843 - protein, 233 aa, Unknown
  Bacterial polypetide isolated from the Sargasso Sea
MISLQSVSKRYGSKVVVRDVSFEVAEGEVVGFLGPNGAGKTTTLRMISGYITPTVGRIEVAGYDVVQDNISVAKRIGYLPELPPLYDTLSVVGYLRFVAKAKGVTRSEMDLELDRVATACRLGSVFRHEVFKLSKGYRQRLGLAQALIGKPDVLLLDEPTSGLDPGQIQETREVIRSFGKEHTVLLSTHILSEVTRICQRVAIINEGRLLTIDTPAGLQRAAQEANCIVLKVS

SEQ ID NO: 143844 - protein, 244 aa, Unknown
  Bacterial polypetide isolated from the Sargasso Sea
MSNRILEVDSLSIAFRGNKVVRDVSFSIDRGETVAIVGESGSGKSVTALSVMQLLPYQYASHPTGSILVDGQEVVGAEEDDMLKIRGDRVGMVFQEPMTSLNPLHHIEKQIAEVLYVHRGMGLIEARERTLELLTLVGLPRPEERLRSYPHELSGGQRQRVMIAMALANEPDLLIADEPTTALDVTIQAQILELLDDLKARLDMALLLITHDLGVVRKMADRVCVMTNGDMVEQGSADDIFDRP

SEQ ID NO: 143845 - protein, 136 aa, Unknown
  Bacterial polypetide isolated from the Sargasso Sea
QAYNLIPVLTAKENVEFIMLMQGDSANERKTRAEELLNAVGLLDQINRKPGQLSGGQQQRVAVARALASKPKFVLADEPTANLDSTSTSNLLDIMYRLNKEENMTFIFSTHDQRVIERAKRIITLEDGKILSDKKQ

SEQ ID NO: 143846 - protein, 98 aa, Unknown
  Bacterial polypetide isolated from the Sargasso Sea
LATQPRLLVCDEPTSALDVSIQAQILNLLKDLQEQLNLTILFISHDLPVVRQMCDRIAVLKNGKLCETSETEELFKNPSHDYTKELLTLMPKIESIYN

SEQ ID NO: 143847 - protein, 245 aa, Unknown
  Bacterial polypetide isolated from the Sargasso Sea
MSEPVIKCEAVYKIFGENAKKMLQESNGNVDAKTFQENGCIVGVNNASFEVSKGEMLVVMGLSGSGKSTLLRCISRLTDATGGKIFIEGQDLLQLNNKELIELRRNKMGMVFQSFALLPHKTVVENIAFPLQIKGIKTEDSISKAMDMVKLVGLDGRENYFPRELSGGQQQRVGIARSLAVEPDIWFLDEPFSALDPLIRKEMQDEFLRLQDKLQKTIMFITHDFDEALKLADRIAIMKDGIMNS

SEQ ID NO: 143848 - protein, 129 aa, Unknown
  Bacterial polypetide isolated from the Sargasso Sea
GRAITRNPKLFLFDEPLSNLDAALRSEMRVEIFKLHKKLKSNIVYVTHDQIEAMTLADKIVIMNNGKIEQYGSPEDIYNNPKNIFVAEFIGNPKMNILKIKTQDILNKNTFKLLGKEIKFEESYFDKEF

SEQ ID NO: 143849 - protein, 132 aa, Unknown
  Bacterial polypetide isolated from the Sargasso Sea
MASLKDIRKRIDSVKRTQKTTSAMKMVSAAKLRRAEDHIREATPYAQKLKSIVSSLSSRFEGEEQDTGFGSLFRSPSGKRTGVILITSDRGLCGGFNSNLSKSLLQKLMDEGVDCAEFVIFGRKGNDFFKRT

SEQ ID NO: 143850 - protein, 221 aa, Unknown
  Bacterial polypetide isolated from the Sargasso Sea
RNLILEVKNITKEVNSPEGLLTIVKDINLSVEQGKPISLVGPSGSGKTTLLAIMAGLDLPTSGSVTLLGSKITSLDEDKRAQIRGKDVGFVFQSFHLMPRLTALDNVMLPLEISGDPRSMDKAQEALKQVGLSKRAKHFATQLSGGEKQRVAIARSIVNKPKILFADEPTGNLDQKSSGSITDLLFSLNELIQTTLVLVTHDLSLADKCDEVFELSEGHLL

SEQ ID NO: 143851 - protein, 331 aa, Unknown
  Bacterial polypetide isolated from the Sargasso Sea
KSTLVKILSGVIMPDEGEIFLNKNILKINSPIDAKKNDIGMVFQHFNLFETLSVFENLIIDSEETPENLKEKIQLIMRKYNFSINLDIPVLNLSAGQKQKVEIIRCLIRNPKVLIMDEPTSVLTEQETSELFLSLKKFSEEKILIIYITHKLKEVMKLCDEVAVMRRGKLVSVSEIKNENIESLANKMVGQNLKTIKKKKSSISSSDQLIKITNLNFTSEDPFETNLENINFSVNRGECLGIAGISGNGQSELFQILSGEIISDKNSIEFSNNFIGDLNPQERREYLMAFSPEDRLEQAAIPQMKIFENVALNNFKSSNFFNNGLINESRI

SEQ ID NO: 143852 - protein, 133 aa, Unknown
  Bacterial polypetide isolated from the Sargasso Sea
KVEIVEELQAKNEFVAMTGDGVNDAPALARADVGIAVGSGTDVAAETADIILVNSNPKDIANLILFGKATYNKMIQNLIWATGYNVVAIPLAAGVLYSSGFVLGPAVGAVFMSLSTIIVAINAQLLKRKIGKK

SEQ ID NO: 143853 - protein, 282 aa, Unknown
  Bacterial polypetide isolated from the Sargasso Sea
YQRLAKLLETMPRQTEKMELPPITGRVSARNASVIPPGERRITLQNVTLDIPAGTVCMVVGPSGAGKSTFLKALLGLWPTAAGEIRVDGTEPSKFDRAAFGPQLGYLPQDIELLEGTVAKNIARFGDIDSEAVIAAAHDAGIHEFVLSLSEGYETELGPLGTQLSPGQRQRVALARALYKNPKLVVLDEPNSNLDESGESALHTAIKKLKDAGSTVVIVSHREGVLPLSDSILVLTAGKVKSFEATADMVARIEKSKKETQKRLASNKVKPVVQTIPAAGLA

SEQ ID NO: 143854 - protein, 173 aa, Unknown
  Bacterial polypetide isolated from the Sargasso Sea
YVTHDQGEALTMSNRIAVFDDGEIQQLAAPDILYEAPENAFVAQFIGENNTLFGKVSKVDGEICTVNLDSGETLKALAVKIEGAGSDTMISLRPERVVVNPDSDKYPNRLSAKVEELIYLGDHIRSRMNVCGHDDFIVKIPNSAQHAQLEPGQTVQVGWLSEDSRALDVPVSS

SEQ ID NO: 143855 - protein, 258 aa, Unknown
  Bacterial polypetide isolated from the Sargasso Sea
MSPKIFAKSLDLTFSTNDGPVHALKDVDLDINEGDFVSFIGPSGCGKTTFLRVLADLEKPTGGKVQINGVSPTDARKSRAYGYVFQAPGLYPWRTIGKNIKLPLEIIGLSKQEQNDRVERVLRLVDLQDFENKFPWQLSGGMQQRASIARALAFDADILLMDEPFGALDEIVRDHLNEQLLDLWRTTSKTICFVTHSIPEAVYLSTKIVVMSPRPGRIIDVIETSLPNERPLDIRESSEFIAIAQRVREGLRSGHSYE

SEQ ID NO: 143856 - protein, 241 aa, Unknown
  Bacterial polypetide isolated from the Sargasso Sea
TAAQRKARLDDMLALVKLEGLAKRYPHELSGGQQQRVSIARALAYEPQLLLLDEPFSNIDAQVRHSMMAEIRSILKQRNVSAVFVTHSKDEAFVFADTLAIFNQGVIVQHGRAEDLYAAPNSRYVADFLGSGNYLPAEVIDGHSVATPIGELRSLTPLSQSHAFNGQVFLRPQQLALSADDAGVGTITERRFLGAFCHYWVKVEAASHAHYVEVRSQIMQLNVGQRVGLSTEPHSLVLFES

SEQ ID NO: 143857 - protein, 103 aa, Unknown
  Bacterial polypetide isolated from the Sargasso Sea
MSESIIQISNMNKWFGDFQVLKGINLEVKPKEKIVVCGPSGSGKSTLIRCINRLEEHQEGNIVVDGTELTEDTKNIEQIRAEVGMVFQQFNLFPHLSILDKST

SEQ ID NO: 143858 - protein, 194 aa, Unknown
  Bacterial polypetide isolated from the Sargasso Sea
LAGLIAISDPVKATTPDALKALRQAGIRIVMLTGDNQLTAEAVARKLGIDEVEAGVLPDGKKAVITRLKASGHVVAMAGDGVNDAPALAAADVGIAMGTGTDVAIESAGVTLLKGDLMILNRARHLSEITMKNIRQNLFFAFIYNALGVPVAAGLLYPVYGILLSPVIAAAAMALSSVSVIVNALRLKSVRLGK

SEQ ID NO: 143859 - protein, 210 aa, Unknown
  Bacterial polypetide isolated from the Sargasso Sea
LNLKVEKREIVAVMGRNGMGKTTLFKTLMGIVPQTAGSVQVDGQEVAGLEPHQRVASGVAYVPQGRMIFPSMTVLENIQTGLPAAAGGKVPDDLYALFPVLHDMRKRKGGNLSGGQQQQLAIARALATNPKVLLLDEPTEGIQPSIIKDIARTLKEIRSIRDLTIVVSEQVLSFTMEIADRFLVIEKGRFVLEESAANADEATISRYLSV

SEQ ID NO: 143860 - protein, 194 aa, Unknown
  Bacterial polypetide isolated from the Sargasso Sea
MTIKPKLVSSNNGLVVNKLRKTLSQKQIVRDVSLKLERGKTIGLLGPNGAGKTTTFYMIMGLIDCDGGEILLDDIHLTSLPMHKRAKLGIGFLPQQPSIFRGMSVEDNLLSILETQILPKDQKQNMLEELLTEFSLTHLRRAMPHMLSGGERRRTEIARCLCSNPSIILMDEPTAGVDPIGIDDIKVLIKQLMD

SEQ ID NO: 143861 - protein, 190 aa, Unknown
  Bacterial polypetide isolated from the Sargasso Sea
MASKEIKLSCRNVWKVYGKTPDNFFDNNNGNVSDPLKLAQEMNHKEHIVANANVSFDVHVGEIFVIMGLSGSGKSTIIRCLSRLVEPTAGEVILDNEDLLKKTPKELTEIRRHKMGMVFQNFGLIPHLNVIENIAFPLKIQNFNKDTCFEKAKKVIELVGLEGREENYPSQLSGGQQQRVGIARSLIVEP

SEQ ID NO: 143862 - protein, 253 aa, Unknown
  Bacterial polypetide isolated from the Sargasso Sea
SGKSTLALVMMGYVKHGLYTIGGECEFNSSNLLNMKSKDLEKIRGRKIAMIPQNAGQALTPNLKIGYQIDEALQLHSDLSEKEREKKISELLNKVRLPSPETIALRYPHELSGGQQQRVAVAMALAGTPDLLLLDEPTTGLDVTTQAHVLELLNFIAKDTGTSMVYVSHDLGAIAQVSDRIIVMYSGEIVLEGPSRDILKRPIHPYTHGLLKSIPKLSLAGLPESMPGSQPQPGIIQSGCSFFDRCNFSEDKC

SEQ ID NO: 143863 - protein, 222 aa, Unknown
  Bacterial polypetide isolated from the Sargasso Sea
MNKIKFENVSKAYSGGRQALSEVSLELIEGEVTFLTGHSGAGKSSLLKLIMRDQLATDGVVSVNGVDLASIKDSNLPYYRRGLGIVFQDHYLLMKRTVFENVAIPLSLIGLSDEVMARRVRAALTIVGLEALSGSKPTELSAGERQRVGIARAVVMRPRILLADEPTGNLDPELSLRAMELFAQFTEIGSIVIVASHDQFLIEQMKARVVELREGRVVHDSR

SEQ ID NO: 143864 - protein, 129 aa, Unknown
  Bacterial polypetide isolated from the Sargasso Sea
MTTFIKANFQVSYPNFNFDVDLQLPASGITVVFGPSGSGKTTLLRCLAGFEKSGRLEIAGEIWQDKNKFLPPNERAIGMVFQESRLFSHLKVRENLLYGYKRTPAESRKLHLEGVARVLALENLLNRGI

SEQ ID NO: 143865 - protein, 204 aa, Unknown
  Bacterial polypetide isolated from the Sargasso Sea
MNLIIKSLNFSYQSEEVFKDLNLNFNSGILNLISGPSGSGKTTLLNLIAGLEKPSSGLIMLDDNIQSSNDKFIEPENRNIGFIFQDFALFPHLNVKQNIEFSGNRNEELLNKLINKLSIANHLSKYPYELSGGQQQRVSIARALFSEPKILLIDEPISNQDKNNKIEIIRIISEFIKEKEIVCILVSHEEINNVQVETRSFNFS

SEQ ID NO: 143866 - protein, 117 aa, Unknown
  Bacterial polypetide isolated from the Sargasso Sea
MGNDHFVRFENVDKSYDGKQLVVKGLNLDIEEGEFVTMLGPSGSGKTTCLMMLAGFETPTNGQIYLDNKVISDIPPHKRGIGMVFQNYALFPHMTVYENLAFPLRVRKIPKDEADKK

SEQ ID NO: 143867 - protein, 100 aa, Unknown
  Bacterial polypetide isolated from the Sargasso Sea
LDQFKNQYENRIGEDGLKISGGQRQRVGIARALYKKSFLIILDEVTSALDEYTEEIILKFIFKNSESKTKVIVSHKPSTLKFCDNTYMLEDGKLIKKDIG

SEQ ID NO: 143868 - protein, 178 aa, Unknown
  Bacterial polypetide isolated from the Sargasso Sea
IRLMPDGYNTLVGDDGALLSGGQKQRIAIARAILKNSPILILDEATSALDSESEIKIQEAMSNLTKDRTTLVIAHRLSTIEDADKIVVLDNGKIVEEGSHEELLSLDAHYAKLHANQFKDDTPSKVEEAKISFPLISSAANPIDHTSFIEKSWYRKSMLSWILWPLSKLTSYLSESKI

SEQ ID NO: 143869 - protein, 181 aa, Unknown
  Bacterial polypetide isolated from the Sargasso Sea
MNLVAKNLTYKPDNEFHLKDVSFNFKKGNLYTILGRTLSGKTTLLKTIAGLLNPDSGEIKFEDKEFNKIPVWKRNVAMVYQQFINYPHLTVYENISFPLKQRKLDKQKIKIDVEEALKTVGLMGFEKRKIQELSGGQQQRVALARSLAKKAKILLLDEPLVNLDYKLREQLREEFKRIFSG

SEQ ID NO: 143870 - protein, 268 aa, Unknown
  Bacterial polypetide isolated from the Sargasso Sea
MSEPVIKCEAVYKIFGENAKKMLQESNGNVDAKTFQENGCIVGVNNASFEVSKGEMLVVMGLSGSGKSTLLRCISRLTDATGGKIFIEGQDLLQLNNKELIELRRNKMGMVFQSFALLPHKTVVENIAFPLQIKGIKTEDSISKAMDMVKLVGLDGRENYFPRELSGGQQQRVGIARSLAVEPDIWFLDEPFSALDPLIRKEMQDEFLRLQEKLKKTIMFITHDFDEALKLADRIAIMKDGIIEQLDTPANIVLNPATEYVRKFTEEV

SEQ ID NO: 143871 - protein, 263 aa, Unknown
  Bacterial polypetide isolated from the Sargasso Sea
INNKDVMELDREHLQELRNKKIGMVFQNFALMPHRSVVDNIAMPLEIRGISKNDRLDAANKILEIVELQGWGNKFAHELSGGMQQRVGLARALAADPEFLLMDEPFSALDPLIRRQLQTEFIKLSKQMKKTTVFITHDLDEAVRVGHRIAIMRDGKVIQIGTPEQIVVSPADEYVADFVKGISRLKVVQAKSIMQTIHDYESKNSKLSDNLQSVDEHELLSKLIEISKSDQKSLIVKDKNQINIGVITQSDLLKAVVEDGDGE

SEQ ID NO: 143872 - protein, 190 aa, Unknown
  Bacterial polypetide isolated from the Sargasso Sea
MIKPHLTTTLDTTPVLNAVGLTKSFGDFLANDQISFSIQPGEIHALVGENGAGKSTFVKLVYGLLQPDDGHIFWQGEPVTVTGPLKARQLGIGMVFQHFSLFESLSVVENIQLALPAGETLKILSERIREMSDVYGLAIDPDAYIYNLSVGQQQRVEVMRCLLQNPSLLIMDEPTSVLTPQETEQLFLVL

SEQ ID NO: 143873 - protein, 246 aa, Unknown
  Bacterial polypetide isolated from the Sargasso Sea
MSEPVIKCENVYKIFGANAQKMLQDSNGNVDAKTFQENGCIVGVNNASFEVSKGEMLVVMGLSGSGKSTLLRCISRLTDATGGKIFIEGQDLLQLNNKDLIDLRRNKMGMVFQSFALLPHKTVVENIAFPLQIKGVKTEDSISKAMDMVKLVGLDGRENYFPRELSGGQQQRVGIARSLAVEPDIWFLDEPFSALDPLIRKEMQDEFLRLQDKLQKTIMFITHDFDEALKLADRIAIMKDGIIEQL

SEQ ID NO: 143874 - protein, 293 aa, Unknown
  Bacterial polypetide isolated from the Sargasso Sea
ILSIKEAMVRFNEKPIFENLSFNIHRGSRIALVGKNGVGKSTLMNVITGFLDLDEGERWEDIGISIGYLKQDNEKINNETIFDYIFRKFKQEDKESLKYKVDIIASSLDLNTSQNMISLSGGQLRRAALARSLVEEPEILLLDEPTNHLDLDAINWLENYLLNYPGTFLCVSHDKMFLKNVTNRVFWLDRGNLRVSPKGFKDFDNWSSDLLDQEARELKNRKQSMLVDIEWASRGVKARVKRNIRRLEKVQEMKKKLKDDESSYRKAVSKISYKIPDQFENSSKMIGEFFNVF

SEQ ID NO: 143875 - protein, 223 aa, Unknown
  Bacterial polypetide isolated from the Sargasso Sea
AIKKREVYGILGPNGAGKTTTLEMLEGLKEIDDGFAIIDGIDVSKDPYAVKKVIGVQLQSNEYFDKLDLSELLTLFSKLYSTSIDHSKLLDQVNLLDKANAKTQHLSGGQRQRFSIACALVNNPKILFLDEPTTGLDPQAKRNLWTLVKDLNSSGMTIVLTTHNMEEAEYLCDRIAIMDKGKLIAEDTPKALIEKYAPEPSDIPLTGNIEDVFLNLTGHSLRD

SEQ ID NO: 143876 - protein, 200 aa, Unknown
  Bacterial polypetide isolated from the Sargasso Sea
MSKLSVHHLSKSYRSREVVSDVSLVVENGEIIGLLGPNGAGKTTSFYMIVGLIKSSAGSIHIDNFELDNLSMDKRSHMGLSYLPQEASIFKKLTVEENIMAILETHNSSNRNTIKQRVDMLLDEFRIGHLRNNYGSSLSGGERRRVEIARAVATKPRFLLLDEPFAGIDPISIGDIQKLIYELREHGIGILITDHNVRET

SEQ ID NO: 143877 - protein, 185 aa, Unknown
  Bacterial polypetide isolated from the Sargasso Sea
PCPLLGRIDVDDGNRLEERVTLMAQQDSLLPWLNTVDNVLLGARLRGQRLDRVRASRLIDQVGLGEHQHKKPHALSGGQRQRVALARTLMEDRPVVLLDEPFSALDARVRAEMQELAAEHLAGRTVLLVTHDPGEAARLGDSIHVMTGTGLISVEPPSSPVIRAYDDPEVLACQGRLLRLLREAS

SEQ ID NO: 143878 - protein, 277 aa, Unknown
  Bacterial polypetide isolated from the Sargasso Sea
VKPDSGSMLFNQNEYTPENPKSARQMGVGMVFQHFSLFDALSVYDNIAIGMDKTFDKNDLQKRIYNVSKQYGLSISLNKIVGNLSAGERQRIEIVRCLLQDPKIMIMDEPTSVLTPGEVSDLFVVLKKLAGQGVSILYISHKLEEIRALCSKATIMRNGKVVDTCDPRKLSAGKIAESMVGGSFSTPKKTKIKFGKVLLETKNVFFDSSNKFGVPLKGINLNLQKGQIVGIGGVAGNGQDELLGLLSGELVPTKGSIYLEGEDITFFGPVARRQIGC

SEQ ID NO: 143879 - protein, 137 aa, Unknown
  Bacterial polypetide isolated from the Sargasso Sea
SDDDVINAAKQAFAHEFIVYLDERYNTQLGERGVKLSGGQKQRIAIARAILADRPILLLDEATSALDAMSERMVQQAIDRLMVGKTSIVIAHRLATVQHADRILVMDKGQVVGSGDHASLMKSDTLYREYAELQLLS

SEQ ID NO: 143880 - protein, 287 aa, Unknown
  Bacterial polypetide isolated from the Sargasso Sea
NKGISKTEALEEYNSVIGVSDVSFDVNQGEIFCVMGLSGSGKSTLVRHINRLLEPTSGKILINSQDVMQLDRDNLQELRNKKIGMVFQNFALMPHRSVVDNIAMPLEIRGVSKNDRLDAANKILEIVELQGWGNKFAHELSGGMQQRVGLARALAADPEFLLMDEPFSALDPLIRRQLQSEFIKLSKQMKKTTVFITHDLDEAVRVGHRIAIMRDGKVIQIGTPEEIVVNPADEYVADFVKGISRLKVVQAKTIMQTVESYESTNGKLEENLQSVNEHELLSKLIEV

SEQ ID NO: 143881 - protein, 214 aa, Unknown
  Bacterial polypetide isolated from the Sargasso Sea
NIKEKNFINKLDNSKLNVLKNIDIKINSNEFVCIVGPSGCGKTTLMNIIGGLIYADKQNIKLNGKTKKDIEENISYVFQSSRLLPWLTVRENIELVSQKKTNIENDINGLLNNFGLSEFIDFYPKAISGGMRRKVSLARALINKPSILLMDEPFVSLDQPTSEGLYDVLINYWKMKPITIILITHSLKEALLLSDRILFFSKKPGTVVFDYKVK

SEQ ID NO: 143882 - protein, 163 aa, Unknown
  Bacterial polypetide isolated from the Sargasso Sea
MSLIQFNNLQFNYPNSFDFLFKMSQFSISKGSRIFIEGPSGSGKTTFLNLMTGLVQPTSGSITVLEKDITRSSMSDIDRFRADHFGIIFQWFNLLPYLSVLENIELPCFFSTIRKQNVLNQFNTVTQSARYLCDNLDIDDQLLSKPVSQLSIGQQQRVAIARA

SEQ ID NO: 143883 - protein, 128 aa, Unknown
  Bacterial polypetide isolated from the Sargasso Sea
EEKEEVYLRTFLGRMLFTGEEAMKGANVLSGGEKVRCMLSKMMLAKANFLLMDEPTNHLDLESITALNNAMKEFQGVVLFTSHDHQLVNTVANRIIELTPNGIIDKMMNYNDYVKDSKIIQLKEELYA

SEQ ID NO: 143884 - protein, 172 aa, Unknown
  Bacterial polypetide isolated from the Sargasso Sea
MAFFEGNKMTGGYGDGPDIISSCTINVNKGEIVAILGPNGAGKSTAMKAMLGLLNLKSGKVLIEGEDISKLSPQERVKKGVSFVPQTRNVFAELTVRENLEVGAFLREDDVLKVIEEIYDLFPILRDKKDQVVGQLSGGQRQQVALGRALMIRPSVLMLDEPTAGVSPIVMD

SEQ ID NO: 143885 - protein, 283 aa, Unknown
  Bacterial polypetide isolated from the Sargasso Sea
IDSVVRQKLDKDAALERYKAVVAVGGTSFQVFHGETFCIMGLSGSGKSTLVRHINRLIEPSAGGVFVNGIDVGNLSSKGLRALRSTTIGMVFQNMALFPNRSVRDNITFGLEMRNETLDERREVAEEMLSLVQLEDWGDRYPSELSGGMQQRVGLARALAADPDILLMDEPFSALDPLIRRQLQDQFLDISSKLNKTSLFITHDLDEAIRMGDRIAIMKDGEFVQIGRPDEIILSPVNDYVEAFVGGVSRLKILSAINVMKPLERDIKEVTHLENYHMVDADC

SEQ ID NO: 143886 - protein, 116 aa, Unknown
  Bacterial polypetide isolated from the Sargasso Sea
MSNSTPSFVKFEKIDKSYDGEVLVVKNLNLDIAKGEFVTMLGPSGSGKTTTLMMLAGFETPTNGEIYLDTNPISKIPPYEREIGMVFQNYALFPHMTVQENLAFPLEVRKISKSET

SEQ ID NO: 143887 - protein, 191 aa, Unknown
  Bacterial polypetide isolated from the Sargasso Sea
MAEVIFNKLEKVYSNGFKAVHAIDLKIADGEFMVIVGPSGCAKSTTLRMLAGLETISGGEVRIGEKIVNNLAPKARGIAMVFQNYALYPHMTVRENLAFGLKLSKLPKDQIDAQVNEAAKILELEELLDRLPRQLSGGQAQRVAVGRAIVKKPDVFLFDEPLSNLDAKLRASMRIRISDLHKQLKKSGKPA

SEQ ID NO: 143888 - protein, 218 aa, Unknown
  Bacterial polypetide isolated from the Sargasso Sea
MPNLKDLKVRINSVQSTQKITSAMKMVAAAKLRRAQEQAEEARPYSQRMERMIATLARKMSNVGGPALLAGTGVEDKYLLVVMTADRGLCGGFNSSIVRATRKRIAELQKNGKSVKLLCVGKKGADQLRRDASDLIADSLEGVTRGVIQFAAASDIGTKLIQMFEAGEFDVCSLIYNKFQSAMTQIVTEQQIIPANVMEEESPTSSIGAYEYEPDEEQ

SEQ ID NO: 143889 - protein, 225 aa, Unknown
  Bacterial polypetide isolated from the Sargasso Sea
MAIIKKFRIKSFKKIQPVVKIQKISLSYGKRQILDDISFNINQGEILGLLGPNGAGKSTIFNLITGLIKPDYGKIIFDKTDATNFPIYSRTEKFKIGYVPQHGGYFHDLTLLENLNAIGEILIKEKNLRNSKISDLISRFELESLTNVKARFLSGGQRKKLIIALALLGSPKLLLLDEPFAALDILTIKTLQQIIVDLQTENNIAIVLCDHQARDLLSCVDVAIV

SEQ ID NO: 143890 - protein, 99 aa, Unknown
  Bacterial polypetide isolated from the Sargasso Sea
MTVSDEVVIEISNMNKWFGHFHVLRDIDLIVNKGERIVICGPSGSGKSTLIRCINRLEEHQKGIIKVDGVELNDDVKKIDKIRSEVGMVFQSFNLFPHL

SEQ ID NO: 143891 - protein, 275 aa, Unknown
  Bacterial polypetide isolated from the Sargasso Sea
FTYSFSPEDRVGIIGPNGSGKSTLLDLIAGKRLPTSGKIKLGETVHIGYLDQHTNDLNQGSGLNRKVIDFVEEAALRIDHGGKQITASQLLEKFLFPPSQQHSPLLKLSGGEKRRLALCKMLIQAPNVLLLDEPTNDLDIQTLSVLEDFLDDFKGCVVVVSHDRYFLDRTIDRIFNFENGHLRRYEGNYSRFLDHKILEERNNETKKRAKIVNNSQNKRGQEIKLDSKNDSRRLSFKEARELKELDLRLPMLEKKKIYLERKITDSDVDISEISH

SEQ ID NO: 143892 - protein, 269 aa, Unknown
  Bacterial polypetide isolated from the Sargasso Sea
SILNNISFKLGHGRILAITGESGSGKSMTALSITQLQPKYAKLKGKIFFKDQDITEKDEFELCKIRGAKIGMIFQEPMTALNPVKTVGDQISETIVLHSEKNKKSADTETLDILERVGLSPATEVIKRYPHELSGGQRQRVVIGIAIALKPSIVIADEPTTALDVTTQAQILALLKRLVKEDNISLILITHDLAVVSDMADEIAIMQNGIIVEIDETQNLFRNMKHPYTRSLFAASGHSVDLPLAKRSTDLLLTIQNVTCRYRLARTKI

SEQ ID NO: 143893 - protein, 145 aa, Unknown
  Bacterial polypetide isolated from the Sargasso Sea
MAYFEGAKMTAGYGDGPDIISSCSITANRGEIVAILGPNGAGKSTAMKAMLGLLKLKSGSVTLNGEDISKINPQDRVKKGISFVPQTRNVFAELTVRENLEIGGFLTEGSLENKIESIYSLFPILSEKKSQVVGQLSGGQRQQDA

SEQ ID NO: 143894 - protein, 249 aa, Unknown
  Bacterial polypetide isolated from the Sargasso Sea
MLEIRNLCKSFGAIKATDDVSLSVDRDTIHALIGPNGAGKTTLISQLSGYMQPDRGTITFDGKDLLTIPSDKRPHYGLVRSFQITSVFPELTVLDNICLVLQSMNGQAHSMFRMADMDSSERNEAQEIITRVGLSDKTHSLTGNLAHGQKRQVEIAMALATKPKLLLLDEPMAGMGAEESHKIMTLLKGLRSSVTMLLVEHDMDVVFRLADKVSVLVYGRVIASDTPQNIRNNQDVQEAYLGGNELNME

SEQ ID NO: 143895 - protein, 82 aa, Unknown
  Bacterial polypetide isolated from the Sargasso Sea
MIKKNSINKEKIVDLISIEKSFDQVKAVNDVCLGINEGEFFSLLGPSGCGKTTLLRIIAGFEKPENGDVFINGKNVNFVAPK

SEQ ID NO: 143896 - protein, 80 aa, Unknown
  Bacterial polypetide isolated from the Sargasso Sea
MSAIIQMKEVNKWFGDFQVLKDINLEVGEKQKIVVCGPSGSGKSTLIRCINRLEEHQKGQIIVDGNELSEKTKDIEKIRA

SEQ ID NO: 143897 - protein, 236 aa, Unknown
  Bacterial polypetide isolated from the Sargasso Sea
ENITFTYPKKEEPALNKLDMLIPANSVIGIVGPSGSGKSTLIDILLCLIEPQEGHLKIDDDIINDQNRRSWQNTIGFVAQTIFLSEGTVAENVAFGIPEDQIDLDQVQKVLKLAHLSDFISTLDKDIHTKVGERGVQLSGGQRQRIGIARALYHKAEVLVFDEATSSLDGITEKMIMEAIHEFSGKKSIILIAHRLKTVKKCDKIFFIDKGRVADQGTYQELIENNEHFKNMAAHA

SEQ ID NO: 143898 - protein, 231 aa, Unknown
  Bacterial polypetide isolated from the Sargasso Sea
MHTKHLELEQVGIDFPTPKGPFTALQDVNLKISKGEFVSLIGHSGCGKSTVLNIVAGLHQATTGGVILDGAEVKQPGPERAVVFQNHSLLPWLTVYKNVELAVKSTMRGKSKNEMRDWIMHNLELVHMTHALDKLPSEISGGMKQRVGIARALAMEPKVLLMDEPFGALDALTRAHLQDSLMEIHADLGNTVIMITHDVDEAVLLSDRIVMMNNGPAATIGEILDIELPRP

SEQ ID NO: 143899 - protein, 152 aa, Unknown
  Bacterial polypetide isolated from the Sargasso Sea
WEVARRAKLSELIKTLPDGMSTVVGERGLKLSGGEKQRVAIARTLLKNPPILILDEATSSLDTLTEKEIKVSLNNLAKKRTSIIIAHRLSTIVDADKILVFEKGKIIEQGTHIQLLKKKGLYADMWNTQQTIEKAEETLQNIKPEYKKLLRK

SEQ ID NO: 143900 - protein, 88 aa, Unknown
  Bacterial polypetide isolated from the Sargasso Sea
MEPKIMLFDEPTSALDPEMIKEVLDVMKELAKSGMTMIVVTHEMGFAKEVADRVMLFDEGMLVEENTPEEFFNNPKSDRTKLFLSQIL

SEQ ID NO: 143901 - protein, 116 aa, Unknown
  Bacterial polypetide isolated from the Sargasso Sea
KKINIQVDFQGGQQQRVAIARALAMRPKVMLLDEITSALDPEVVGEVLNVIRSLNKEHSLTMIMVTHQMGFAREISDRVCFFNEGKIFEEGPPEKLFGNPQNERTKQFLHAVLDAN

SEQ ID NO: 143902 - protein, 229 aa, Unknown
  Bacterial polypetide isolated from the Sargasso Sea
MFKFEKLVFGDLGWGDEFLFALLMTILVSICSMGLGVFIAIFAAWSKLTYNKILNFIASFYTTVIRGIPELLVIYLIFFGGSAAIMNLAKTFGYNGYIELNAFTISVIAIGIISATYSTEVLRAAYLSINQGQIEAAKSLGLSKFHIFLKILTPQILRHAIPGLGNIWQVTLKDTSLISVTGLVEIMRQTRIASNVEHSPLTFLITAAFLYLFLYTFSGKFFNYIEKKS

SEQ ID NO: 143903 - protein, 146 aa, Unknown
  Bacterial polypetide isolated from the Sargasso Sea
MTKYALEIEQLNKTYRNGVKALKDINLNVEDGDLFAFLGPNGAGKSTVIGIITTLVNITSGTVKVYGKDIRQFPEATKKMIGVVPQEYNLNQFIPIQETMINIGGYFGLTKKQSMNKTQELFEDLGIWHKRECTPRELSGGMKRRL

SEQ ID NO: 143904 - protein, 205 aa, Unknown
  Bacterial polypetide isolated from the Sargasso Sea
KVLDGINLSLEQGEIITVVGKSGSGKSTLLNILSTLDSADEGEIIIDGKNIEGYSDIEISKFRNSFIGFVFQFHHLLPDFTVVENILMPAWIKRDKSKLNKAYELLETLQLMDIKDKYPMKLSGGEKQRVAVLRALINRPKILFADEPTGNLDEKNALLLVDLLRVINRDYKVAILLTTHNPDVAAIGKKRYELKSGLLELKKEL

SEQ ID NO: 143905 - protein, 278 aa, Unknown
  Bacterial polypetide isolated from the Sargasso Sea
TQDANIKNSLVKSTKAKVNFVLPKKALFSAENILTAVNEISMETLEGEVLGVVGESGSGKSTLAKTILGLQKLSSGQVEVFGQRLTEINKKELKEIRKKMQVVFQDPFSSLNPRMTVFEILKEPLDSFFPSMTKESAQKDIEDGLMEVGLTPEYLGRYPHELSGGQCQRVAIARALMPKPQLLICDEAVSALDASIRGEIIELLLRIKAEKKLTMIFIAHDLAVVRKICDRVIVMQSGKIVEQGPTEKVFFEPEKEYTANLLSAVPVPDPKMEREKHT

SEQ ID NO: 143906 - protein, 214 aa, Unknown
  Bacterial polypetide isolated from the Sargasso Sea
SCTINVNKGEIVAILGPNGAGKSTAMKAMLGLLKLKSGNILINGEDISILSPQERVKKGISFVPQNRNVFAELTVKENLEVGAFLREDDVSKVIKEIYDLFPILSEKKDQVVGQLSGGQRQQVALGRALMIRPSVLMLDEPTAGVSPIVMDELFEHIIQVKKTNVAIIMVEQNAKQALSISDRGYVLVTGENKFEGSGKELLNDPEVRRSFLGA

SEQ ID NO: 143907 - protein, 47 aa, Unknown
  Bacterial polypetide isolated from the Sargasso Sea
RMMAMENATSNAGDMIKSLTLEFNKARQAAITTEMLEIVSGAEALND

SEQ ID NO: 143908 - protein, 96 aa, Unknown
  Bacterial polypetide isolated from the Sargasso Sea
DEPTSALDVSVQAQVLNLLKDLQKDLGLTYLFITHDLAVVRVMAHRIGVLKSGRLVEEEDTKRLIEFPQSDYTRMLIRSAPRIRPSDQVHAATIPV

SEQ ID NO: 143909 - protein, 138 aa, Unknown
  Bacterial polypetide isolated from the Sargasso Sea
MAFEVNNLSFSFNNSFHIENLSFKIAQSEVCLLKGASGSGKSTLLNIISGLKKPDNGNIILNNNLLNSENEFINPEKRNIGYVFQDFALFPHINAEKNIKYAMSISENVLFDRLSNKLSLSNHLSKMPYELSGGQQQR

SEQ ID NO: 143910 - protein, 165 aa, Unknown
  Bacterial polypetide isolated from the Sargasso Sea
MNENNIEILNIQKLNISTFNNKILNNVSLKIHKGEMIGLVGESGSGKSVTALSILALLDEKAMKIDTGKIFLSNENILEKNEKEMQEIRGNKISMIFQEPMTSLNPVFTIGDQINEVHSIHNNLNKDKADELTISLLDRVGIPNPEISIKKYPHQLSGGQRQRVM

SEQ ID NO: 143911 - protein, 140 aa, Unknown
  Bacterial polypetide isolated from the Sargasso Sea
MSKNTEFVKFDKVDKSYDGKVLVVKDLNLNISEGEFITMLGPSGSGKTTCLMMLAGFETPTNGEIYLDSNPISNIPPHKRGIGMVFQNYALFPHMTVYENLAFPLRVRKVQKDEIDKKVDKALSMVSLSGFESRMPAQLS

SEQ ID NO: 143912 - protein, 225 aa, Unknown
  Bacterial polypetide isolated from the Sargasso Sea
KDISFTIKKDEILGLLGPNGSGKTTTIGMLLGLLKPTQGQVLIEGKKIEENRIEILKKINFISPYIELPKKLTVKQNLIVYGKLYNVSNIKNRIDYLVEKLRLSDLLNRVTGELSSGQKNRASLAKALINNPTVLLLDEPTASLDPEIGDFVRTFLENYKKEKKISILLASHNMNEVTRLCKSVLMMKDGEIIDKGIPEDLITRHGRKNLEEVFLKLSRNKNEFH

SEQ ID NO: 143913 - protein, 247 aa, Unknown
  Bacterial polypetide isolated from the Sargasso Sea
GKGVSGDVEGQRVVIGNELAMQENSIVIDNQKAVADTLRMEGATVIYVATDGYLAGLIAISDPVKATTPDALKALRQAGIRIVMLTGDNQLTAEAVARKLGIDEVEAGVLPDGKKAVITRLKASGHVVAMAGDGVNDAPALAAADVGIAMGTGTDVAIESAGVTLLKGDLMILNRARHLSEITMKNIRQNLFFAFIYNALGVPVAAGLLYPVYGILLSPVIAAAAMALSSVSVIVNALRLKSVRLGK

SEQ ID NO: 143914 - protein, 144 aa, Unknown
  Bacterial polypetide isolated from the Sargasso Sea
MNNIITFDKVSKSFGELKVLDQLNLEVKDGEKLALIGPSGSGKTTILRILMTLETIDSGFVSVNNEYLWHEKINDKVVPATDKHLQKMRDQIGMVFQQFNLFPHLTAIENVKQPQILVKKKNESEAKEKAEDLFNMIGLIDKID

SEQ ID NO: 143915 - protein, 89 aa, Unknown
  Bacterial polypetide isolated from the Sargasso Sea
ICDEPTSALDVSIQAQILNLLKDIQDELHLTMLFISHDLPVIRQMCNRIIVLKNGAVCETKDTEELFNNPEHEYTKELIRLMPKIESII

SEQ ID NO: 143916 - protein, 291 aa, Unknown
  Bacterial polypetide isolated from the Sargasso Sea
FKGEMLVVMGLSGSGKSTLLRCISRLTDATGGKIFIEGQDLLKLNNKDLIDLRRNKMGMVFQSFALLPHKTVVENIAFPLQIKGVKTEESISKAMNMVKLVGLDGRENYFPRELSGGQQQRVGIARSLAVEPDIWFLDEPFSALDPLIRKEMQDEFLRLQDKLQKTIMFITHDFDEALKLADRIAIMKDGIIEQLDTPANIVLKPATEYVRKFTEEVPREKVLLIEDVMDTSKDNLGDLKVSKDEIIENVAKKILTQEKSVAVVNSNNEIIGSINPTKIINTVFGAKENSN

SEQ ID NO: 143917 - protein, 264 aa, Unknown
  Bacterial polypetide isolated from the Sargasso Sea
IFPLKQRKLSEEQIKIDVEDALKTVGLVGFENRKIQELSGGQQQRVALARSLAKKAKILLLDEPLVNLDYKLREQLREEFKRIFSEGLSQDTILIYSTTDPQEVMELNGEVIVLDEGKVLQKGAAKEIFENPKNLKVAEISNDPPMNIFKGIKSSNELNFENISINLPAYFKNLEDQNYYFGIRASEIKLDNKGEEFEIELAEISGSETLLHLKRGGSKIIALIEEVMNFKIHEKVKVKFNENKFYAFNNNEELVSSPYGVLNG

SEQ ID NO: 143918 - protein, 238 aa, Unknown
  Bacterial polypetide isolated from the Sargasso Sea
MVYQQFINYPHLNVFENIAFPLKQRKMDQSIIKEKVMDALKSVGLLGYENRKIQELSGGQQQRVSLARSLVKNAKILLLDEPLVNLDYKLREQLREEFKNLFSKGLADETILIYSTTDPRETMELNGEVIVLDEGKVLQVGPAREIFENPNSLKVAEISNDPPMNIIEAKILDNHIKIEGIDVEAPQHLSKLTEDGLKIGLRSSDIELSENGHEFEVELAEISGSETLLHLKRGATKI

SEQ ID NO: 143919 - protein, 268 aa, Unknown
  Bacterial polypetide isolated from the Sargasso Sea
MNNIKKFRIIKFKSKPILAAKSISKSFDKRVILRKIDIHLNQGEMLGLLGSNGAGKSTFMNIVLGLLKCDFGDIFLGNTKLTNLAIHERSKLGIAYLPQQTSIFRGLTVYENLLGIAQIVKKRASDQHSIVEKLMAEFSITHLRDVKATALSGGERRRTEIARCLINNPKVLLLDEPFAGVDLLSIQDIKGLLMKLQSRGCAVLVTDHNASQLLSVVDRAYVIANGTIVANGTPRQIVNTSEAKKLYFGRRFYLLVFINEIKIFCLSK

SEQ ID NO: 143920 - protein, 235 aa, Unknown
  Bacterial polypetide isolated from the Sargasso Sea
EMLVVMGLSGSGKSTLLRCISRLTDATGGKIFIEGQDLLELNNKELIELRRNKMGMVFQSFALLPHKTVVENIAFPLQIKGTNTEDSINRAMEMVKLVGLDGRENYFPRELSGGQQQRVGIARSLAVEPDIWFLDEPFSALDPLIRKEMQDEFLRLQEKLQKTIMFITHDFDEALKLADRIAIMKDGIIEQLDTPANIVLNPATEYVRKFTEEVPREKVLIIEDVMDASIKDNLG

SEQ ID NO: 143921 - protein, 303 aa, Unknown
  Bacterial polypetide isolated from the Sargasso Sea
MIETIDLTKKYGDFFALESLDLKLEQGDLFGFIGPNGAGKTTTIRILSTLLQPTWGEAYVCGHSIYTHPREIRRSIGYMPDIFGVYDDMRVIEYLEFFAAAYRIYGAERRRVAERSLELVDLVAKRDELVTSLSRGMTQRLGLARVLLHDPHVLLLDEPASGLDPRARIEMRNLLKRLQGMGKTVLVSSHILPELADICNRVGIIEYGRLLACGDVQDLLRQVRGQPVIRIRVAGDSLAAANALETAAEAKGVTVRDGDVLVALAEGVVDHSPLVNRLVAAGEKVLVGQEQEVNLETAFLELT

SEQ ID NO: 143922 - protein, 279 aa, Unknown
  Bacterial polypetide isolated from the Sargasso Sea
TTWLESKAKRLDMEDKKASSMDKALKQELDWVRKNAKGQQKKGKARLRAYEELCAASAEYTKREGMDSITIPTAPRLGDVVLTCEGLTKGFDTRGLLIDNFTATIPPGSIVGIVGGNGAGKTTLFRMIVGEDEPDGGSCKVGETVKLMYVDQSRDSLDSTKSVFEELTGGADEVNLGGKAVNSRAYCSWYNFKSSDQQKKVGDLSGGERNRLQLARVLTSGGNCLLLDEPTNDLDVATLRALEEALLSWNGCAFVISHDRWFLNKIATHIIAFEGDSQD

SEQ ID NO: 143923 - protein, 276 aa, Unknown
  Bacterial polypetide isolated from the Sargasso Sea
AFINYPHLNVYENISFPLKQRKLSEDKIKKDINESLKTVGLIGFENRKIQELSGGQQQRVALARSLAKKAKILLLDEPLVNLDYKLREQLREEFKKIFSQGISEETILIYSTTDPQEVMELNGEVIVLDEGKVLQMGPAKEIFENPKNLKVAEVSNDPPMNIIKGSKNAEKINFENINIDIANHLSKLKNKDYYFGIRASEIKLDNEGQEFEVELAEISGSETLLHLKRGNTKVISLIEEVMNFKIHQKVKIKFNENKFYAFDESEKLVSSPYGGF

SEQ ID NO: 143924 - protein, 92 aa, Unknown
  Bacterial polypetide isolated from the Sargasso Sea
IHDFIDSLPNNFETRVGEDGTLLSGGQKQRIGIARALFRKKEILTLDEATSALDIITEEKILKNLNGIEELTIIQITHRNLKTISYDQEINF

SEQ ID NO: 143925 - protein, 141 aa, Unknown
  Bacterial polypetide isolated from the Sargasso Sea
ASEEEVWEAARLSESDKFINLLPKKEKTIVGERGQKLSGGQRQRISIARAILKNPEILILDEATSAVDNETEAAIQRSINTLKKGRTVIAIAHRLSTIRNAEIIYVLEDGRIVESGNHESLLDIKGVYSKLWSVQTGEKIS

SEQ ID NO: 143926 - protein, 235 aa, Unknown
  Bacterial polypetide isolated from the Sargasso Sea
LSEIIEHLLPDIDGENHPLLDTRDVKRKAYLIVSADRGLAGAFNANVLKVAQKEIDDFGKDNVDLFCVGKKARDYFRRREYNLIEDHVEFWADMEFEHAMMISRSLISHFNSFQVDEIHVVYNYFVNITQQEIKSETLLPLVYDPSKNKRSDRLYEPSKEQIVNTLVPRHFNVQVWKYLLESYASEQAARMLSMENATSNAQDMIKDLTLQFNKARQAAITTEMLEIVGGAEALG

SEQ ID NO: 143927 - protein, 180 aa, Unknown
  Bacterial polypetide isolated from the Sargasso Sea
RLGVGRTFQVTAVYASMSVVENVQMALISHNRKAFSAFTRAAKLYRDDAMALLGLIGMKDQADRAANILAYGDLKRLELAVALAHDPALLLMDEPTAGMAPGERRALMKLTADIVAERGVSVLFTEHDMDVVFENAHRVLVLNRGQLLAEGSVDDVRANRAVQEVYLGGGTTFGGDGDHA

SEQ ID NO: 143928 - protein, 127 aa, Unknown
  Bacterial polypetide isolated from the Sargasso Sea
SDVGLKDKIDEWPDKLSGGQKQRLAIARSLAMDPVLMLLDEPTSALDPELVGEVLSVLRNLVNEGMTMLIVTHELGFASKFGDRIVFMDDGEIIEEGAPNIILKSPKTDRLKLFLEKLDITSLKEKH

SEQ ID NO: 143929 - protein, 221 aa, Unknown
  Bacterial polypetide isolated from the Sargasso Sea
MSESSEKINNSPVIQCESVYKIFGTNASKLLESSKGLVDSKTFQDAGCIVGVNNATFGVSKGEMMVVMGLSGSGKSTLLRCISRLTDATAGKIFIDGEDLLSMNSKQLIELRRNKMGMVFQSFALLPHKTVIENIAFPLQVKGTSTKDSISKALEMVELVGLKGRENYFPRELSGGQQQRVGIARSLAVEPDIWFLDEPFSALDPLIRKEMQDEFLRLQGV

SEQ ID NO: 143930 - protein, 204 aa, Unknown
  Bacterial polypetide isolated from the Sargasso Sea
RAITRNPKIFLFDEPLSNLDAALRSEMRVEISKLHNQIKTNMIYVTHDQVEAMTLADRIVILNLGNIEQVGTPDEIYNNPANIFVAQFIGTPKMNILPLNNENIISENKIKFLGNEITFEKTKFDKKKYFLGIRPEHFNLSNESQFKFKPKIDLVENLGNEKIVYMSNDNLELSAKISSQEDFQNQINFDSKDIFIFDENGRRI

SEQ ID NO: 143931 - protein, 228 aa, Unknown
  Bacterial polypetide isolated from the Sargasso Sea
MRGCRFAKLPQSNQQRFYAMSKPILEVIDLTHRFKTDEKPLLHQIHMKIFHGQTVAITGSSGSGKSTLLHLVSGMHNIQSGSVILLGKNLGQLSEEEKCKMRQKDIGIVYQQHHLLPDLNVSENITLPLYQQGLIKEHTEVFEKLITQLGLEKIANKDISILSGGEKQRVSIARALVCMPKILFMDEPTGNLDPQNTNKLLKMIANLQKTCNLTILMVTHDNTIAKSL

SEQ ID NO: 143932 - protein, 89 aa, Unknown
  Bacterial polypetide isolated from the Sargasso Sea
MEPKILILDEPTSALDVTIQNQILNLLNKLQDQLQLSYIFISHDMTVIKAISNRIIVLKDGLIVEEDISSNIFNSPKSEYTKKLISSIV

SEQ ID NO: 143933 - protein, 140 aa, Unknown
  Bacterial polypetide isolated from the Sargasso Sea
VTHDQEEALTMSDRIFLMNQGKIVQSGDAETLYTAPVDVFAAGFIGNYNLLDADKASQLLQRPISGRIAIRPEAIELSRSGELDALVRSHSLLGNVIRYRIEARGVELVVDVLNRSADDLHPDGQRLALSIDPSALCEVA

SEQ ID NO: 143934 - protein, 209 aa, Unknown
  Bacterial polypetide isolated from the Sargasso Sea
MSQIKISNLQKSFGDFTAVKNSNLTINDKEFFVLLGPSGCGKTTTLRMIAGLELPTSGEIYLGEEEVGMLRASERDIAFVFQLFALYPHMNVKNNLSFPLKMQGYSRSEIKTRVEEAAKLLRIDHILNSSISSLSGGDRQRVALGRALVRRPKAFLMDEPLGTLDAEFRELMCLELKKLHIDIGATTVYVTHDQLEAMSLADRIAVMDG

SEQ ID NO: 143935 - protein, 180 aa, Unknown
  Bacterial polypetide isolated from the Sargasso Sea
KSTLLNILSTLDNADEGEIIIDGKNIKGLSDNEISTFRNSFIGFVFQFHHLLPDFTVLENILMPTWISKENSKKNTAYKLLETLHLIDKKDKYPMELSGGERQRVAVLRALINNPKILFADEPTGNLDEKNALILVDLLREINRDYKVAILLTTHNPDVAAIGEERYEIKSGFLEKRKDL

SEQ ID NO: 143936 - protein, 159 aa, Unknown
  Bacterial polypetide isolated from the Sargasso Sea
IELPKKLTVKQNLEVYGRLYGISNLKHRINEISEDLNIKTFLNRKTGELSSGQKNRVSLAKSLINKPEILLLDEPTASLDPDIGDFVRSYIQDYRSKNQVTILLASHNMSEVERLCNSLIMMKNGKIIDRGTCKEIIEKHGRNNLEETFLKLARSKNEF

SEQ ID NO: 143937 - protein, 167 aa, Unknown
  Bacterial polypetide isolated from the Sargasso Sea
SWQNNIGFVAQSIFLSDSSIAENVAFGIPKDKIDTERVLKSLELAHLLELVEGFKDGIYTQVGERGVQLSGGQRQRIGIARSLYHGAEILIFDEATSSLDGITEKMIMQAIHEFSGEKTIILIAHRLKTVEKCDQIFFMDKGSIVDQGTYIDLFEKNKLFRNMADHA

SEQ ID NO: 143938 - protein, 273 aa, Unknown
  Bacterial polypetide isolated from the Sargasso Sea
MLQVFKIYGQIVLVTDETVISANSLNLTFQTNDGPVHALKDVNLNITKGDFISFIGPSGCGKTTFLRVMADLEQPTDGTITINGVAPNVARESRAYGYVFQSAGLYPWRTIGKNICLPLEIMGISKAEQKERVAKVLKLVELEDFERKFPWQLSGGMQQRASIARALAFDAEILLMDEPFGALDEIVRDYLNEQLLELWKNTNKTICFVTHSIPEAVYLSTKIVVMSPRPGRIIDVIENALPLERPLNIRESAEFIKIAQRVRQGLREGHSYE

SEQ ID NO: 143939 - protein, 230 aa, Unknown
  Bacterial polypetide isolated from the Sargasso Sea
MPSLKDLKIRINTVKSTQKITSAMKMVASAKLKRAQEKAESGRPYATKMSSIVSTLASKVNSESGPKLLFGNKENNRVLLVAISADRGLCGGFNNNISKEIRKRVNDLEKDNKEVKLILVGRKVGTVLKREMGDRIIGSFTGIQGDNLLFSKISPITLQIISLFEDDKIDCVEMYYNRFRSVISQVVTKKQLIPADVNTETPYNDEESTYEYEPEEEMILDHLLPKKLST

SEQ ID NO: 143940 - protein, 309 aa, Unknown
  Bacterial polypetide isolated from the Sargasso Sea
MLCPSDLLLLDEPTNHLDLDAVIWLERWLQRYQGTLLLISHDKAFIDNTVAQIISVEQQQLIAYTGNYSSYETQRAERLRLQDIEYRKQQDKIAHLESFITRFKAKASKAKQAQSRIKQLERMETLLPAHHASQFSFEFKAPIALPNPLIQMEKVMLGYGDHIVLEQVKLNLVPGSRIGLLGRNGQGKSTLIKLLAGVHEPKTGVFTTAKGLNVGYFAQHQLEYLDPQASALLHLQRLDSKATEQQHRDFLGGFGFHGDEATGPVAPMSGGEKARLVLALIVYQKPNLLLLDEPTNHLDLEMRHALNMA

SEQ ID NO: 143941 - protein, 126 aa, Unknown
  Bacterial polypetide isolated from the Sargasso Sea
EIVEKLMAEFSITHLRDIKATALSGGERRRCEIARCLINNPKVLLLDEPFAGVDLLSIQDIKGLLLKLQSRGCAVLVTDHNASQLLSVVDRAYVIANGAIVANGTPRQIVNTAEAKKLYFGEDFTI

SEQ ID NO: 143942 - protein, 157 aa, Unknown
  Bacterial polypetide isolated from the Sargasso Sea
MAFFEGIKMTAGYNDGPDIISSCSINVDRGEIVAILGPNGAGKSTAMKAMLGLLKLKSGAVKIDGKDISKMSPQDRVKSGISFVPQNKNVFSELTVRENLEVGAFLRKDNINEVIEKIYQLFPILKEKSSQIVGQLSGGQRQQVALGRALMINPSVL

SEQ ID NO: 143943 - protein, 113 aa, Unknown
  Bacterial polypetide isolated from the Sargasso Sea
MIKPKNFWDSVSGQQQRSAIARALCMEPKIMLFDEPTSALDPEMIKEVLDAMVNLAKGGMTMIVVTHEMGFAKEVADEVIFMDEGMIVERAPTKTFFANPKSDRTKLFLSQIL

SEQ ID NO: 143944 - protein, 124 aa, Unknown
  Bacterial polypetide isolated from the Sargasso Sea
MLAVKINNLSYQINNNDILQNVSLELEQDKIACVLGPSGCGKTTMLKLIAGLDKVQSGEIYLHDNLVSSINKHIKTEKRKIGFLFQDYALFPHLSVKENLNFAIQNHKDLSNNIDEIIEIIKLP

SEQ ID NO: 143945 - protein, 209 aa, Unknown
  Bacterial polypetide isolated from the Sargasso Sea
MLTAQNITLHYASSQILFGVTIVAKMGEITCIMGSNGVGKTSLLRVLSGTHPSSGGIYRLNQKDVTNYQADILARLGVAYVPQGRFIFPMLTVRENLETGFACLPKDERVIPSETYQLFPVLKTMLDRRGGDLSGGQQQQLAIARALVTKPNLLLLDEPTEGIQPNIITEIGDVICHLKSQRQMAIVLVEQYFDFAFELADQIYAMVRG

SEQ ID NO: 143946 - protein, 220 aa, Unknown
  Bacterial polypetide isolated from the Sargasso Sea
MNIIEVKDLKKAYLLPGDKSKTFNAVDHISLGIKKGEVYGILGPNGAGKTTTLEMLEGLKEIDDGFAIIDGIDVSKDPYAVKKVIGVQLQSNEYFDKLDLSELLTLFSKLYSTTIDHSKLLDQVNLLDKANAKTQHLSGGQRQRFSIACALVNNPKILFLDEPTTGLDPQAKRNLWTLVKDLNASGMTIVLTTHNMEEAEYLCDRIAIMDKGKLIAEDTP

SEQ ID NO: 143947 - protein, 90 aa, Unknown
  Bacterial polypetide isolated from the Sargasso Sea
FHKPSQLSGGEQQRVAIARALINKPRIVLADEPTGNLDEETGVQVMDILLRLNKEHRTTFIMITHNPSLASKMQFQYRMENGQLHLIANK

SEQ ID NO: 143948 - protein, 277 aa, Unknown
  Bacterial polypetide isolated from the Sargasso Sea
IYKLSSFKCFENIAFPLKQRKIDQSVINEKVMDALKSVGLLGFEKRKIQELSGGQQQRVSLARSLVKNAKILLLDEPLVNLDYKLREQLREEFKNLFSKGLADETILIYSTTDPRETMELNGEVIVLDEGKVLQVGPAKEIFENPNSLKVAEISNDPPMNIIEAKISDNHIKFEGIDLEAPKHLSKLTENGLKIGLRSSDIELNENGHEFEVELAEISGSETLLHLKRGNTKIIVSIEEVLNFKIHDKIKINFKIDNAYAFHADGKLASSPFGGLSG

SEQ ID NO: 143949 - protein, 269 aa, Unknown
  Bacterial polypetide isolated from the Sargasso Sea
MRFFQPTTNPDNAVEVRGLKKIYASSGKSAPKDALKDINLAIPKGSFFALLGPNGAGKSTFINILAGLVVKTAGEAKVWGYDIIDDMRAARRCIGVVPQELNLDAFFTPREVLDLQAGLFGIPEIARRTDEILEAVGLADQANAYARSLSGGMRRRLLVGKAMVHSPPVLILDEPSAGVDVDLRRQLWSYVKALNTSGTTVLLTTHYLEEAEAMCDTIGIINHGQLIACEKTPDLLGRLDSKQMVITVDQDLDAVPKALTAFATELREA

SEQ ID NO: 143950 - protein, 89 aa, Unknown
  Bacterial polypetide isolated from the Sargasso Sea
DTFSLGEQQRLAFARLLLNSPRFAVLDEATSALDIKTEKRLYNLLRDRELSLISVGHRPSLKDFHENILELNGKGDWKLFTTDKYNFKN

SEQ ID NO: 143951 - protein, 142 aa, Unknown
  Bacterial polypetide isolated from the Sargasso Sea
FGLTKEEIKEDKIINALKLSNLYDFVMDLEYKLETVVGENGVKFSGGERQRLGIARALYHNPSVLIFDEATSALDNLTEQKIIENIFMLREQKTIITIAHRLSTIRSADQIYFLKKGMLAGSGTYDELYSSNTDFKRLADLS

SEQ ID NO: 143952 - protein, 33 aa, Unknown
  Bacterial polypetide isolated from the Sargasso Sea
RAILKDAPILILDEATSALDSMTEKSIQASLDD

SEQ ID NO: 143953 - protein, 119 aa, Unknown
  Bacterial polypetide isolated from the Sargasso Sea
LGRVGLADMADHRAADLSYGRKRALEIATTLALDPKVLLLDEPLAGMGQEDVETMARLIADVARDCAVLMVEHNIKVVADIGDDITVLQRGEILTQGSYDAVSADPRVREAYMGTEDDD

SEQ ID NO: 143954 - protein, 147 aa, Unknown
  Bacterial polypetide isolated from the Sargasso Sea
RGETRRNKPKAILLNVGLNDTAAIGQKNGRHQLDIDGFEYGLERLINEMNSQTSVFVIGLTPVDENKMPFAGCLWYSNDFCNSYERRMEEVCLNQNVPFLPTFREIYSDQRSKNWITNDGIHLNSQGHFWIFQRLKSWEILTKWKDS

SEQ ID NO: 143955 - protein, 195 aa, Unknown
  Bacterial polypetide isolated from the Sargasso Sea
NFAGTDRNEMEPELAAKSGIARTFQNIALFKGMSTLDNLMTGRLLKQKQNFLMQALYLGSVAKEEEEHREKVERVIDFLDLQSIRRTPVGSLPYGLQKRVELGRALAMEPEILLLDEPMAGMNVEEKQDMSRFVLTVNNELKTTIVLIEHDMGVVMDISDRIVVLDYGKKIGSGLPTEIRNNKAVIDAYLGVSDD

SEQ ID NO: 143956 - protein, 118 aa, Unknown
  Bacterial polypetide isolated from the Sargasso Sea
MTPIAVTLLTGFLGAGKTTLLRHILNEQHGYKIAVIENEFGEVSVDDQLIGDRATQIKTLTNGCICCTRSSELEDALLDLLDNLDKGTINFDRLVIECTGMADPGPIIQTFFSHEVIC

SEQ ID NO: 143957 - protein, 153 aa, Unknown
  Bacterial polypetide isolated from the Sargasso Sea
MLKVNSVSKIIKDKKILNGISFSLNFGQICGLLGPNGAGKTTSFYIIAGLAKSDSGHIEFIDQDITNMPIHKRSNLGIKYLPQEPSIFQNLTVYENLFGLAELTFKNNNDIKTSVEKLLDEFDLIEIRGLQGRQLSGGQRRKVEIARTLVSNP

SEQ ID NO: 143958 - protein, 114 aa, Unknown
  Bacterial polypetide isolated from the Sargasso Sea
FKGKLDKDDHIFLDKLLSSTNMMDKKFRYPHELSGGEKQRVSIIRSIALKPKCIFMDEPTGNLDNDTSLLIHELCIDIHKEWGIGIFLATHDMVFASKMDTNFNIKNKRITAND

SEQ ID NO: 143959 - protein, 115 aa, Unknown
  Bacterial polypetide isolated from the Sargasso Sea
IDECPDNLSGGQKQRLAIARSLAMDPILMLLDEPTSALDPELIGEVLSVLRNLVNEGITMLIVTHELGFASKFGDKIVFMDAGEIIESGPPNTILKSPKTERLKLFLEKLSLTSL

SEQ ID NO: 143960 - protein, 128 aa, Unknown
  Bacterial polypetide isolated from the Sargasso Sea
MSEDSIISLKNVNKWFGDFQVLQDVNLEVKRKERIVVCGPSGSGKSTMIRCINRLEEHQEGTIIVDGIELTGNLKNIDSVRREVGMVFQQFNLFPHLSVKENITLAPIWVKKMPKAEAEQLAMQQLEI

SEQ ID NO: 143961 - protein, 175 aa, Unknown
  Bacterial polypetide isolated from the Sargasso Sea
GNVDAKTFQENGCIVGVNNASFEVAKGEMLVVMGLSGSGKSTLLRCISRLTEATGGKIFIEGQDLLQLNDKELIDLRRNKMGMVFQSFALLPHKTVIENIAFPLQIKGIKTEDSISKALEMVKLVGLDGRENYFPRELSGGQQQRVGIARSLAVEPDIWFLDEPFSALDPLIRKE

SEQ ID NO: 143962 - protein, 88 aa, Unknown
  Bacterial polypetide isolated from the Sargasso Sea
MDEATSALDSEVESSIQAALEKVMQGKTVLAIAHRLSTLIKMDKIIVMDKGKIVEVGSHEVLVENNGLYARYWRRQSGGFIETRLAAE

SEQ ID NO: 143963 - protein, 226 aa, Unknown
  Bacterial polypetide isolated from the Sargasso Sea
RQRVAIGRALVREPRIFLFDEPLSNLDAKLRVEMRREIKKLHQQLKTTVVYVTHDQTEAMSLGTNIAIMNHGVIQQNDTPENIYNKPSNTFVADFIGSPSMNLIKGNLKESSNKVSFIAHGSNIEIQINGYDFKEKSNLDNKEVFFGIRPEHIFFKKSNEEDFEINLRADLSEYIGHEQIMTFNFENQEVLAKFPSTVKIDLSKNTKLFFDLTQISLFDAKTEERI

SEQ ID NO: 143964 - protein, 173 aa, Unknown
  Bacterial polypetide isolated from the Sargasso Sea
MVFQDPTESLNPRYTARQSIYDPLKNSTKMNNDEINNKIIEVSNLVGLPLNLLDRLPHQLSGGQKARVGIARAIALSPKILILDEPTASLDVSIQAIILNLLVDLRAKLDMSYLFVSHDLNVVQLLCDYIIVMKEGVIIEQGKSNQIISNPEENYTKSLLAASPKPPKLPKVS

SEQ ID NO: 143965 - protein, 271 aa, Unknown
  Bacterial polypetide isolated from the Sargasso Sea
MQYYFGFTATLLIGGFLALDGEIKVATYSVMLFITQRLLWPLTELGVIFDSYQKAMASFRRILNLKNTLPTIDNGNEKLTSFNKNIEISNLNFEYVKNFPVLNDVSIDINKGQTTAIVGSTGSGKSTLIKLILRLYDSTSGEIKFDGKNIRDLELDSLRNKIGLVSQDIFLFEGTVFENIAYGNLDAKDEEVWEAAKLSESDKFINLLPNKENTIVGERGQKLSGGQRQRISIARAILKNPEILILDEATSAVDNETEAAIQRSINTLKEG

SEQ ID NO: 143966 - protein, 195 aa, Unknown
  Bacterial polypetide isolated from the Sargasso Sea
MAFENLTLGYDSQAAVNNLEADIAEGSLTAVVGPNGAGKSTLLRGVVGALSPLEGRVAFGTSSRDDIAYLPQQSEIDWTFPLSVIDLVAMGLWREIGPFGQLKGDRLARVEAALAAMGLTGFENRPIGSLSGGQMQRTLFARLLLQDASLILLDEPFTSVDASTIAVLLDLIQRWHKEGLTVLTVLHDHETVRAH

SEQ ID NO: 143967 - protein, 156 aa, Unknown
  Bacterial polypetide isolated from the Sargasso Sea
MIEIKNLHKSYEIGASSLHVLKGIDFSVEDGDLVAIMGSSGSGKSTLLNILGMLDTSDTGTYDLDKIRIADMDEKKAANYRNKFLGFVFQSFNLINYKNALENVALPLYYQGVSRKERQKTALTYLDKVGLKDWADHLPSELSGGQKQRVAIARAW

SEQ ID NO: 143968 - protein, 264 aa, Unknown
  Bacterial polypetide isolated from the Sargasso Sea
NELISLQPPIPQNNKDILPLKKVISLKNIFYSYPSSQITTLKDINLSIPAYSTVGIVGPTGSGKTTTVDIILGLLEPKKGKLEVDGKVIDKDNLKAWQSSIGYVPQQIYLADDTVTANIALGRDPKYIDQNAVERAAKIANVHEFIINELPLKYETTVGERGIRLSGGQRQRIGIARALYHNPQLLILDEATNALDNLTEQAVMDAVNNLGNEITIILITHRLSTVKKCDNIFLLEKGELKQQGTFEKLIQLSDNFRASAKNIQ

SEQ ID NO: 143969 - protein, 244 aa, Unknown
  Bacterial polypetide isolated from the Sargasso Sea
MILKAHEISKSYKGKKVVNKVSVKVSQGEIVGLLGPNGAGKTTSFYMIVGIIKPEEGEIYLDNKKISKYPMYKRAQSGIGYLAQEASVFRKLSVEENILSILEFSNLSKSKQKERTESLMEEFGLTHIRNNRGDLLSGGERRRTEIARALATDPKFLLLDEPFAGVDPIAVEDIQSIISILKKKNIGILITDHNVQETLAITDKTYLMFEGKILQEGIPEKLAEDEMVRKVYLGKNFEFKRKKL

SEQ ID NO: 143970 - protein, 250 aa, Unknown
  Bacterial polypetide isolated from the Sargasso Sea
MAQFIYSMYRVSKVVPPKRTILKDISLSFFPGAKIGVLGLNGSGKSTLLRIMAGIDKEFEGEAKPLAGTKIGYLPQEPELDMSKTVREVVEEAVADVKYALTRLDAVYAAYADENADFDALAREQGELEAIIQAKDGHNLDNILERAADALRLPAWDAKVNVLSGGERRRVAICRLLLEKPDMLLLDEPTNHLDAESVAWLERFLHDYTGTVVAITHDRYFLDNVAGWILELDRGEGIPWEGNYSSWRSK

SEQ ID NO: 143971 - protein, 227 aa, Unknown
  Bacterial polypetide isolated from the Sargasso Sea
MLTLNQVSYRWPNAADDCLRNISLELQEGEWLALTGDNGAGKSTLLRIMAGLLTPSSGTITVQNRAIAQLKNRERARVLGVLFQEAENQIFHSKVAEEVAFGLRLQKLPATEIAQRTMAALQLCQLEDVADAHPLDLHTAQRRMVAVASLEALKPAILLLDEPSRDFDAHWLGVFENWLAVCRTRGASVVAISHDAAFTQRHFSRIVRLHNKNLMPSDMPPQASSPA

SEQ ID NO: 143972 - protein, 105 aa, Unknown
  Bacterial polypetide isolated from the Sargasso Sea
MNDTPQSFVKFEKIDKSYDGEVLVVKNLNLDIAKGEFVTMLGPSGSGKTTTLMMLAGFETPTNGEIFLDTKPISKIPPYEREIGMVFQNYALFPHMTVAENLSFP

SEQ ID NO: 143973 - protein, 110 aa, Unknown
  Bacterial polypetide isolated from the Sargasso Sea
MGSSDSFVKFDKVDKSYDGETLVVKDLNVDIPQGEFLTMLGPSGSGKTTTLMMLAGFETPTGGEIYLEGEAINKIPPNKRGIGMVFQNYALFPHLTVNENLAFPLEVRKL

SEQ ID NO: 143974 - protein, 218 aa, Unknown
  Bacterial polypetide isolated from the Sargasso Sea
MSKITLKELSHSYLSNQLKKEDWALRDVNIDWEDGGAYALLGPSGCGKTTLLNIVSGLITPTKGKILFNDEDVTLKNPVERNIAQIFQFPVIYDTMTVYDNLAFPLKNRGISKEEIDSKVLEIAEMLELKSTLYNRASGLTADGKQKISLGRGLVRSDVNVIMFDEPLTVIDPHLKWILRSKLKELHQKINRTMIYVTHDQTEALTFADQVVVMHEGQ

SEQ ID NO: 143975 - protein, 218 aa, Unknown
  Bacterial polypetide isolated from the Sargasso Sea
DDNKFKIENISLEISKNQKIGIIGKSGSGKSTIIDILAGILKDKSINLKVDDKPIESKNDQYHWQKKIGLIPQNISILNETLRENILFGLSSKQFSDEEVLKSIELSNLKNLLLKLPDGLDHKIKEKGLNISGGELQRIGIARALVFDPEILIFDEATSALDTFTENEILKDINSLKNKTIIMISHRMNTLKYCDKIYLIEKGEIKDFGSYDKFNEKY

SEQ ID NO: 143976 - protein, 212 aa, Unknown
  Bacterial polypetide isolated from the Sargasso Sea
AGRGAQRWEKSRLALVKWLLDPPNLLLMDEPTTHLDMASIDALITALQQYEGTLIFISHDVHFIRAISQHTIHVNGGRLRNFPGGYDYYLQKTNAETARAGLTSGAKKSSVAATPPKPKGDQRARKRAEAEARNARSRERRGIEKEVKRLEDEIQSAEKKITELTEELENPETYDDPARAMTINRELTQAQNTLDSLTPEWEAAVEKLEQIS

SEQ ID NO: 143977 - protein, 106 aa, Unknown
  Bacterial polypetide isolated from the Sargasso Sea
MSDKIIQITEMNKWFGDFQVLKNINLEVEKNKKIVVCGPSGSGKSTLIRCINRLEEHQQGSIIVDGNELTEDTKDIEKIRAEVGMVFQQFNLFPHLSILDNCTLAP

SEQ ID NO: 143978 - protein, 243 aa, Unknown
  Bacterial polypetide isolated from the Sargasso Sea
FFLKDLNYKDKSEKNSIFNKLEISNVSFEYNDGLNIFNNLNLTINRGDCIIITGPSGSGKTTLVDILLGLINPKKGKIILNDNDNRKFYLNSLTYYVSQQKFLINETIFKNITMNDDISSFEQLSASEKELFNKSIKYSGVEEIINSKKEKIYYYIGEDGSLLSGGQRQRIAIARAIFSNRDLIILDESTTALNEELEKEVSKNLINLTTLGKTIICITHHTYLVPYFKYHYDIKNKKLNKIK

SEQ ID NO: 143979 - protein, 267 aa, Unknown
  Bacterial polypetide isolated from the Sargasso Sea
MAKITLKDLSHSYLAKQNSDIDWALREINIDWKDGGAYALLGPSGCGKTTLLNIISGLLKPTKGEVLFDDKDVTSLNPVERDIAQIFQFPVIYDTMTVYDNLAFPLKNRGLSKTEIDSKVKEIGEMLELTPTLNNKAAGLTADGKQKISLGRGLVRSDVNVIMFDEPLTVIDPHLKWILRSKLKELHQKINRTMIYVTHDQIEALTFADQVVVMHEGQIVQTGTPVELFEKPKHTFVGHFIGSPGMNILPCEIKNGQVNFEGKCIIK

SEQ ID NO: 143980 - protein, 206 aa, Unknown
  Bacterial polypetide isolated from the Sargasso Sea
MSTIELQNLTKAFGDLIAVNNVSLKVDENEVLCLLGPSGCGKTTTLRMVAGLEVATSGEILIGDKNVSNLDTRDRNLAMAFQFYALYPSLTVAENLANPLHAENLSDDEVKRKIFEVADILQLRDIVNRKPHQLAEGEKQRVAVGRAIIRDPECFLFDEPLSRLDVQLREQMRGQIKEVLSDLKKATVIVTHDQLEALTMATKLQL

SEQ ID NO: 143981 - protein, 66 aa, Unknown
  Bacterial polypetide isolated from the Sargasso Sea
VIDNIAFPLKLQGIEKADRYAQAERVIELVGLQGRENNFPNELSGGQQQRVGIARSLAVGARYMVT

SEQ ID NO: 143982 - protein, 230 aa, Unknown
  Bacterial polypetide isolated from the Sargasso Sea
MSIYWGEEMIKLENISLKLDNFRTKFTVEIKKGEWVGIIGQSGAGKSTFLNLIAGFAQPEVGSLLINNIEMRDLPASKRSISSLFQDNNLFPHLSVYQNIAIAIKPNLKLHDNEKKKIFEIIEYLNLSSKIHSSIGRLSGGERQRVALGRVMSSDKKILLLDEPFSQLDPNLRIEMLELIKKIREKKNITIIMAIHTPAEAIDFVSRFLLIKEGEILRELEPQDYSIDLY

SEQ ID NO: 143983 - protein, 88 aa, Unknown
  Bacterial polypetide isolated from the Sargasso Sea
MPLYCYWDEATSALDNLTEQKIQTSISQLMKNKTSIIIAHRLSTIEDSDIIYVLDKGRVTDSGTHKELLQKSKLYAKLQLQEELLKSK

SEQ ID NO: 143984 - protein, 290 aa, Unknown
  Bacterial polypetide isolated from the Sargasso Sea
VIGVSDVSFDVNKGEIFCVMGLSGSGKSTLVRHINRLLEPTSGKILINNQDVMQFNKENLQELRNKKIGMVFQNFALMPHRSVLDNIAMPLEIRGVSKNDRLDAANNILNIVELQGWGNKYAHELSGGMQQRVGLARALAADPEFLLMDEPFSALDPLIRRQLQTEFIKLSKQMKKTTVFITHDLDEAVRVGHRIAIMRDGRVVQIGTPEEIVVNPSDEYVADFVKGISRLKVVQAKTIMQPLEQYKKNFGENFSNNEKVNENDILSKLIETSVSKDKPIVVVNDHNMKS

SEQ ID NO: 143985 - protein, 124 aa, Unknown
  Bacterial polypetide isolated from the Sargasso Sea
MENFNCKIKKGKFTSIIGPSGTGKTSILKLIAGLIEPEKGEIKFESQILKDVINKITLIQQNPSLMPWLNVHDNITLAKLNKKKINYKNIDKLIRDIGLQEFSSYFPHQLSGGLLQRVAIARAL

SEQ ID NO: 143986 - protein, 304 aa, Unknown
  Bacterial polypetide isolated from the Sargasso Sea
YGEAPDKFLKNTNNNPTTEEIKKNNYIPAVRDASIDVNTGEILVIMGLSGSGKSTLLRCMSKLIEPTHGQVFFEGNDLLKASEKELIDIRRHKMGMVFQHFALLPHRTVLQNVAFPLEVQGQEIQKREERAKDVIKLVGLEGREKYYPRELSGGQQQRVGLARSLAVEPDVWFLDEPFSALDPLIRKEMQNEFLRLQSMLKKTIVFITHDFDEAIRLADRIAIMYEGLIVQVGTPEELITKPATDYVAEFTKDIPRSKLLNAESIMNEKDKKPHENIVNYSDKIEKSASKVLKSESIFSVVDDN

SEQ ID NO: 143987 - protein, 302 aa, Unknown
  Bacterial polypetide isolated from the Sargasso Sea
MGTNINSYSEKEYQNIRGKNISMIFQEPMSSLNPIYTIENQISEVLKIHGKFSDKELKEKCLELLKQVQIPEPESRLSQYPHQLSGGQRQRIMIAIAIANNPDLLIADEPTTALDVTVQTEILKLLQSLQQKYQMSILFITHDLTIVRQISDRVCVMYNGKIKETGFTKEIFENPKDDYTKHLLSSEPEERDLHYDKNGRSILSGENLDVTFNTKVKVSGRNKVLSINAVNNISLDLKEGETLGIVGESGSGKTTLGQTLLRLVDRESNTDVKGEIKFFEDRIDDLSRKQFKPFRNQMQIVF

SEQ ID NO: 143988 - protein, 296 aa, Unknown
  Bacterial polypetide isolated from the Sargasso Sea
YSEKEYQNIRGKNISMIFQEPMSSLNPIYTIENQISEVLKIHGKFSDKELKEKCLELLKQVQIPEPESRLSQYPHQLSGGQRQRIMIAIAIANNPDLLIADEPTTALDVTVQTEILKLLQSLQQKYQMSILFITHDLTIVRQISDRVCVMYNGKIKETGFTKEIFENPKDDYTKHLLSSEPKERDLYYDKNGRSILSGENLNVTFNTKVKVSGRNKVLSIKAVNNISLDIKEGETLGIVGESGSGKTTLGQTLLRLVDRESNTDVEGEIKFFDDRIDHLSRKQFKPFRNQMQIVFQ

SEQ ID NO: 143989 - protein, 237 aa, Unknown
  Bacterial polypetide isolated from the Sargasso Sea
KKVNFAYKKDNHVLKNINLEIKKGEVTAFVGASGAGKSTMLALILKFITPNNGNIFIDDKNLKLINTKDIRKNIALVQQQPFLFSGKIIDVIRMGRSFTKEEVIESAIKANAHNFIQNLPEKYETKISERGSNFSGGQVQRIAIARAILGNPSILLLDEATSALDAESESEVQEGLNRAMKDRTVIVIAHRLATTQEANKIVVFDKGEIIEVGRHIDLINKTGIYKELCEKQLIKKI

SEQ ID NO: 143990 - protein, 155 aa, Unknown
  Bacterial polypetide isolated from the Sargasso Sea
MIDLEIKDLKKSFGSEFVLKGLSFSVNSQSLLAIIGSNGAGKSTLLRCCSRLIEPSSGSIKIFDKEITTLNSHKLGQIRRDVAFIFQRHNLVPRLSVLSNVIHGDFGNITSGIIRVTRWFHFLAPQNSRSRAMDCLRKVNLSHLAMKRVDSLSGG

SEQ ID NO: 143991 - protein, 299 aa, Unknown
  Bacterial polypetide isolated from the Sargasso Sea
LEQHFGPMSEVAPGWKLRVLLAQALFSDPDVLLLDEPTNHLDINTIRWLESILTARTSTMIIISHDRHFLNSVCTHMADLDYGELRLFPGNYDEYMTAATQARERLLSDNAKKKAQIAELQTFVSRFSANASKAKQATSRAKQIDKIQLEEVKPSSRVSPFIRFEQFKKLHRQAVTLQNVSQGFDGETLFKGLNLQIEAGERVAIIGPNGIGKTTLLRTMVGEMPPMAGEVKWAESADIGYFAQDHADDFKDDCTLFEWMAQWTQGGEQLVRGTLGRMLFSNDEIGKSVKVISGGEQGR

SEQ ID NO: 143992 - protein, 179 aa, Unknown
  Bacterial polypetide isolated from the Sargasso Sea
MTALRAENLHFAYQDKVVLDDVSFSLPRGKLIGIVGPNGSGKSTLLKLLARQLPLQRGTVEIHGKPLLGYSLKALARELAFLPQRPVLAEGIRVEQLVQYGRHPHQGWFNQWSAEDARQVARACEVMQLDAIWQRSAASLSGGQAQRAWLGMILAQNTDLILLDEPTSALDIGHQAEVM

SEQ ID NO: 143993 - protein, 200 aa, Unknown
  Bacterial polypetide isolated from the Sargasso Sea
MSKLSDYDGPILEIENLSISFFTRLREIPAVMDFSVTVQPGEAVGLVGESGCGKSTVALGVMQDLGVNGKIVDGSIKFKGQDLGKLSPEALRDIRGNEIAMIYQEPMASLNPAMKIANQLMEVPMIHEGISKDEAYRRALEVVNDVKLPDPERILKSFPHQLSGGQQQRIVIAMALMSKPSLLILDEPLPLWMYCRSSVV

SEQ ID NO: 143994 - protein, 103 aa, Unknown
  Bacterial polypetide isolated from the Sargasso Sea
MLELDDLCLAYDTPHGRRTVVDGLSLALPRGDIGCLLGASGCGKTTVLRAIAGFEPVRMGRIVLDGVPVAAPSLDVPPERRRIGMMFQDYALFPHLSAADKRR

SEQ ID NO: 143995 - protein, 106 aa, Unknown
  Bacterial polypetide isolated from the Sargasso Sea
QRISIARALATQPRLLVCDEPTSALDVSIQAQILNLLKDLQEQLNLTILFISHDLPVVRQMCDRIAVLKNGKLCEISMTEELFKNPSHEYTKELLTLMPKIESIYN

SEQ ID NO: 143996 - protein, 109 aa, Unknown
  Bacterial polypetide isolated from the Sargasso Sea
GQRQRVSIARALATQPRLLVCDEPTSALDVSIQAQILNLLKDLQEQLNLTILFISHDLPVVRQMCDRIAVLKNGKLCEVSMTEELFKSPNHEYTKELLTLMPKIESIYN

SEQ ID NO: 143997 - protein, 268 aa, Unknown
  Bacterial polypetide isolated from the Sargasso Sea
MNKNFFEIKNVDFQVGGKTKVKNLSLHIEKKGEIICLLGPSGIGKTTILRSIAGLEKISNGSISLKSKVLSSKNDYVEPENRNIALSFQENALFPHYTIKKNIYFGADRNKGNGVRKIDPRKIIKILNIEKILNKYPHQISSGEAQRVSLTRALVSNPDLLLLDEPLSNIDENFKEEIQVKLKQILKDYKITTIIVTHDSYEAFYLGDKCGIILEKKLKQFDEPYNVYHYPNSINVVNFLNRGVLVPAKVTGQYTLQNDDLGLIKGNL

SEQ ID NO: 143998 - protein, 166 aa, Unknown
  Bacterial polypetide isolated from the Sargasso Sea
MAEHYRLVAQDIFLSDGTIAENIAFGIHKSEINIDKVRETLKLAQLTELIDSLDKGIETPVGERGIQLSGGQRQRIGIARALYHDAELLVFDEATSSLDGITENMIMESITNLTGQKTIVIIAHRLKTVQKCDQIFFMDQGKVIDYGSYEKLIETNELFKKMASHA

SEQ ID NO: 143999 - protein, 181 aa, Unknown
  Bacterial polypetide isolated from the Sargasso Sea
MSNIKKFRIKSFKEDKPVLRLDKISIKFGKKIILDNLDLKLNKNQILGVLGPNGAGKSTIMNIILGLVKQDYGSVFIDTKIVDKYPIHERTKKFSLSVVPQHSGFFFDLTVYENLKAIAEITIDNISYRNERIDSSISKFELDSIRDLKAKQCSGGQQKRLSIAMALISDPAILLLDEPYA

SEQ ID NO: 144000 - protein, 180 aa, Unknown
  Bacterial polypetide isolated from the Sargasso Sea
VLINGFQLEKNRIEILQKINFISPYIELPKKLTVKQNLIVYGKLYSVKNLNRRIDYLVEELRLQNLLDRVTGELSSGQKNRISLAKAIINNPSVLLLDEPTASLDPETGDFVRTFLENYKKEKKVSILLASHNMDEVTRLCSSIMMMKNGLIIDQGKPNDLVKKHGRQNLEEVFLKLVRN

SEQ ID NO: 144001 - protein, 112 aa, Unknown
  Bacterial polypetide isolated from the Sargasso Sea
MFKFEKLVFGDLGWGDEFLFATLMTILVSICSMGLGVFIAIFAAWAKLSLNKFLLFLSNLYTTVIRGIPELLVIYLIFFGGSAAIMNIAKSFGYHGYIELNAFTISVIAIGI

SEQ ID NO: 144002 - protein, 181 aa, Unknown
  Bacterial polypetide isolated from the Sargasso Sea
VINGIDIENQRVNILDQLNFISPYIELPKKLSVKQNLEVYGRLYDVQNLDTKIEYLSEKLRLGKIINKITGELSSGQKNRVSLAKSIINDPAILLLDEPTASLDPETGDFVRSFLEDYQKEKETSILLASHNMAEVERLCSSVLMMNNGLIIDRGSPRDLIKKHGRKNMEEVFLELTREKL

SEQ ID NO: 144003 - protein, 98 aa, Unknown
  Bacterial polypetide isolated from the Sargasso Sea
MSFFEGKGMTGGYGGVDIISSCTINVNQGEIVAILGPNGAGKSTAMKAMLGLLDLKSGVVTIDGKDISKLSPQDRVKQGISFVPPTRNVFTGLTVREK

SEQ ID NO: 144004 - protein, 137 aa, Unknown
  Bacterial polypetide isolated from the Sargasso Sea
DVKELRIKIDYLTEKLRLNEFIDKITGELSSGQKNRVSLAKSIINDPLILLLDEPTASLDPETGDFVRSFLEEYQKERGASILLASHNMSEVERLCSSVLMMNKGSIIDQGTPKELIKKHGRKNMEEVFLKLTRDLL

SEQ ID NO: 144005 - protein, 186 aa, Unknown
  Bacterial polypetide isolated from the Sargasso Sea
MTDAVIKCESVYKIFGANAKKMLQESNGNVDAKTFQEKGCIVGVNNASFEVSKGEMLVVMGLSGSGKSTLLRCISRLTDATGGKIYIEGQDLLSLKEKELIELRRNKMGMVFQSFALLPHKTVLENIAFPLQIKGIETEKSIAKAMDMVKLVGLDGRENYFPRELSGGQQQREGIARSLAVEPDIW

SEQ ID NO: 144006 - protein, 176 aa, Unknown
  Bacterial polypetide isolated from the Sargasso Sea
MPSLKDIKTQINSVGSTKKITSAMKMVAASKLRRSQEKAEEARPYSSRLEEMLSSLATSSASGEGVIKLLSGTGKDENYLIVPVNADRGLCGGFNSSINKESFKLAKSLENQNKKVQFLPVGKKSRDFFNRVMKENIVESFVDNNVSTSGYESALKISNKIQELFFGGSFDKCILV

SEQ ID NO: 144007 - protein, 281 aa, Unknown
  Bacterial polypetide isolated from the Sargasso Sea
ELDRGHGIPWEGNYSSWLEQKDVRLEQEEKSASARRKSIASELEWVRANPKGRQAKSKARIARFNDLVDQEFQSRSETNEIYIPPGPRLGDKVIEVKNLRKAFGDKLLIDDLSFSLPPGGIVGIIGPNGAGKTTLFKMLTGVEAPDSGEIDHGDTVDIAYVDQSRDALDDSKTVWEEIADGLDMLEVGKYQTSSRAYVGRFNFKGPDQQKHIGSLSGGERNRVHLAKVLRQGGNVLLLDEPTNDLDVETLRALEVALTDFPGCAVVISHDRWFLDRIATHI

SEQ ID NO: 144008 - protein, 239 aa, Unknown
  Bacterial polypetide isolated from the Sargasso Sea
MSSSILPLRARNLRYVVEGKTLIDDISLSILPGTFNVVLGPNGAGKSLLLRLLHGLLDPTSGTVDWMNSANGDLRRQQAMVFQRPVLLRRSVEANVAFALKSLSIPRVEHARLIDEALDRSGLAASRRVLARLLSVGEQQRLAVARALAGGPDVIFLDEPTASLDPASVQRIEGLLSKANRNGTAIVLVTHDMGQARRLAREILFLHRGRLIERRPAEKFFNRPEADVSRAYLEGKIVV

SEQ ID NO: 144009 - protein, 273 aa, Unknown
  Bacterial polypetide isolated from the Sargasso Sea
MLAVEVQDLSYSINNKKILNNINFNLKKDTISCILGPSGSGKTTLLKLIAGLEKVQSGKIIINGEAVSSTKKHLPTEKRKIGFLFQDYALFPHLTVKQNLEYPINYKNSDYKIEDIIDLIKLPNSLNKFPHELSGGEQQRVALARSIISQPDLLLLDEPFSSLDLNLREEIRDETLHLLQKSNISVIIVTHDPFEAMFISNKINIMDTTGYIIQSGSPADLYKNPKNSYVTEFFGETNRFRGVVNNSYVETPVGKIKAPNDLENKNVEVHVRP

SEQ ID NO: 144010 - protein, 314 aa, Unknown
  Bacterial polypetide isolated from the Sargasso Sea
KTMCLKTGFYRALIFLVISCPCALVISIPLGYFGGIGAASRKGILFKGSNFLDLMTRVNTVVMDKTGTLTKGVFEVQKAVTMDGITTDWLSLAAAMESKSTHPIAKAITEYTKKQGGEISEPEQQEEIAGHGLKGKVNGKHVLIGNQKLMDKEGIVTCADAAEEVNTVIHIAVDQKYAGYLVIADELKEDAAQAINALHKSGVRELIMLSGDKNAVTQQVAKSLGIDKAFGDLLPEQKVEKVEELKKDTNRIIAFVGDGINDAPVLALADVGMAMGGLGSDAAIETADVVIQTDQPSKIATAIQIGKQTKRIVG

SEQ ID NO: 144011 - protein, 212 aa, Unknown
  Bacterial polypetide isolated from the Sargasso Sea
VRDPKAFLFDEPLSNLDAELRVTMRKELSALHEKIGGTMIYVTHDQVEAMTLADQIVVLNNGYVAQAGAPLDLYNNPSDIFVAGFIGSPKMNFIKVNAIDNAGSFNLVSDALNLQTNHKNLQNNSPYSLGIRPEHIEVCEHQDSDLKVNVDFTEQLGSETYFYCQGEGIKQLIVHHTGQYKINKGEELYLRFKRDSVHLFEENGMSVSKKNN

SEQ ID NO: 144012 - protein, 181 aa, Unknown
  Bacterial polypetide isolated from the Sargasso Sea
MGILAGLDTASSGEVYLAGQPLHLLSDDARAELRARAVGFVFQSFLLLPGLTALENITLPAELAGLADATARGRELLALVGLSHRADFYPSQLSGGEQQRVAIARAFITKPAILFADEPSANLDASTGVMIEDLLFELNQQQGTTLVLVTHNPALAKRCRYQLQMNAGVLQQQPLEVTDVA

SEQ ID NO: 144013 - protein, 209 aa, Unknown
  Bacterial polypetide isolated from the Sargasso Sea
MSQIFFTTINNDQYDFMTEWDTTVMDKWVAENIGLSRCKDEAELFETKWFDYRDMHPLMATCLFTEAYKRQYSYIMLSHGREHYETAPFTTGLKRVPYQELSTANKTSLWKARQFADQYCCSYDYFISTVLSAAARRLWDKLPRPQHLWQPELIEIFEEKLAKRAVTRLDDSLVSFKHLGDMQHDPIQERYFEWVLERLRGITRDKRVR

SEQ ID NO: 144014 - protein, 66 aa, Unknown
  Bacterial polypetide isolated from the Sargasso Sea
  misc_feature (8)..(8): Xaa can be any naturally occurring amino acid
MFVVPLVXGKSTLIRCINRLEEHQEGDIIVDGNELSEKTKDIEKIRAEVGMVFQQFNLFATSFNIR

SEQ ID NO: 144015 - protein, 155 aa, Unknown
  Bacterial polypetide isolated from the Sargasso Sea
KEIWEVARRAKLSELIKTLPDGMSTVVGERGLKLSGGEKQRVAIARTLLKNPPILILDEATSSLDTLTEKEIKVSLNNLAKKRTSIIIAHRLSTIVDADKILVFEKGKIIEQGTHIQLLKKKGLYADMWNTQQTIEKAEETLQNIKPEYKKLLRK

SEQ ID NO: 144016 - protein, 320 aa, Unknown
  Bacterial polypetide isolated from the Sargasso Sea
DRNPYYEAGDIFSVIMATMIALLSLMDVAVPAAAVATGRLASQRVIDLVKQVPLIEPSPGSELLADPKAIVASIDKINFQDVHFAYPSRPDLRVLRGANVEILKGEHCAFVGSSGSGKSTIVQLLEKFYHPAAGKIMINDTIDLATIPPISWRKLVGCVGQEPVLFATSILDNLRGGDVSVSRERLIEVATQANAFDFISSFPKGMDTMVGCGGASLSGGQKQRIAIARALVQHPQLLLLDEATSALDPVSESQVQGTIDSIVAEVSMTIITIAHRLSTIRRADKIYVIKEGVVAESGGHKELLKRQGLYFELCLASQES

SEQ ID NO: 144017 - protein, 163 aa, Unknown
  Bacterial polypetide isolated from the Sargasso Sea
VFVTHDQEEALTMSDRIAVINEGEIQQIGEPEQIYESPSNKFVANFIGEANFLYGFCKTNGENGLCELYTGHSINLSVPSHIKQNDKVTIFIRPERIKIVKSSKDKSQLSISEFTYLGNAATIQLKSNEQIINVNLPIEDLKVFKKGDYVDIEFPKGSAQVID

SEQ ID NO: 144018 - protein, 184 aa, Unknown
  Bacterial polypetide isolated from the Sargasso Sea
MSNTVIKCENVFKIFGANAEKMLKESNGNVDPRIFQENGCIVGVNNASFEVLKGEMLVVMGLSGSGKSTLLRCISRLTDATGGKIFIEGQDLLKLNNKELIELRRNKMGMVFQSFALLPHKTVVENIAFPLQIKGLEIDKSINKAMDMVKLVGLEGRENYFPRELSGGQQQRVGIARSLAVEPD

SEQ ID NO: 144019 - protein, 223 aa, Unknown
  Bacterial polypetide isolated from the Sargasso Sea
IIGPSGCGKSSLLRVLNWLTPPDKGEVWLEGKIVGSLSSKLTIKESKLLNSYRARMGMVFQQFNVWPHLNVLENVVRAQMVVAKRSQAEAEAKALKILDEVGLSTKIDEWPDHISGGQKQRLAIARSLAMDPILMLLDEPTSALDPELVGEVLSVLRRLVNNGMTMLIVTHELGFASKFGDRIVFMDGGEIVEEGAPKKILSMPKTQRLKMFLEKLNITSFKQ

SEQ ID NO: 144020 - protein, 201 aa, Unknown
  Bacterial polypetide isolated from the Sargasso Sea
MAADAVALLDHLGIDKAHIVGASMGGMITQVIGLDHSERALSLTPIMSSPGAGIEDDTLSPPTESLMQGIIKSMEHNLKGEYLEGLVCTYRELTGSRFPFDEEKFREKAQEGIDHGHNPFPGHGAAVSSSPHRKDRLKDINLPTLVIHGTEDAILPFDHGQALADGIPNSELMTLEGVGHEIPEQLNDAIVTKLIEHFNKA

SEQ ID NO: 144021 - protein, 284 aa, Unknown
  Bacterial polypetide isolated from the Sargasso Sea
NGYFNYMSANSESSLLRNGKVLTRRDLNGSDSASKGINLEKHLMNVKDARKSVEGGKIGLDESGFEILEHKTKDRNLDFLDSRLVIDSYYNECAQIVREKSGAKCVIPFDHNIRSAEGKKSKKQLSGGQEVQGPAHVVHGDYTLRSAPDRINQLSQKLTKNDTLSSVLDKEERLITKTQANDILTGRRFAIINLWRNIRPIPVETNPIALCNASTVSKQDLVVFEIHYSERIGENYFSKHNERHEWFFYPNMTIDEALLIKQWDSHGDLPTSEEKVSGTKKTTA

SEQ ID NO: 144022 - protein, 122 aa, Unknown
  Bacterial polypetide isolated from the Sargasso Sea
MIQISNLSYTFAKGGGVSNIDMSMNDDEFAFLIGPTGSGKTTLLRLIYMDLLPQVGNIIIGDYDSDGIKQKQIALMRRKVGMVFQDYHLLSDRNLFENVALPLHVIGYSKDEIVDRVKDSLE

SEQ ID NO: 144023 - protein, 158 aa, Unknown
  Bacterial polypetide isolated from the Sargasso Sea
SMQPKVIIADEPTSALDVIVQRQVMETLYEVQENLGAACILIGHDMGLMAQFADKIGIMYAGKMVEMGTVLDIFKKPKHPYTRLLIDSLPDTNSKRDLIGIPGIPPSLLNIEEGCSFCLRIGQKTTSKIPWVKVSKNHYYQKCSKCSNYGKSKKRVKG

SEQ ID NO: 144024 - protein, 304 aa, Unknown
  Bacterial polypetide isolated from the Sargasso Sea
LVEIDDAERRFKAYPHELSGGQRQRIMIAMALVNKPQLLIADEPTTALDVTIQAQILDLMSKLKRDLGMSILFITHDLGLVKEFSDQVCVMQNGNIVESGDTSNVFENPKHSYTQKLLSAEPQPKEDINSEEAPFLEIQNLDVYYDIPSINFFKKNRFHAVKDTSLNIYKNTTIGLVGESGSGKSTLGKAIANLTKFEGNIYFEGKNIISSSKEIKKHIQIVFQDPYGSLSPRMTISEIVGEGLGVHFKLSKLETQNRIDKVLSDVGIELSAKNKYPHEFSGGQRQRIAIARSLIMNPAFMILD

SEQ ID NO: 144025 - protein, 172 aa, Unknown
  Bacterial polypetide isolated from the Sargasso Sea
MHALSIKNLSKKYKSGVEALKSVSFDVQQGDFFALLGPNGAGKTTAIGIITSLVNKSSGLIEVFGHDLDKELAKAKSCIGVVPQEVNLNLFDFNFNILVNQAGFYGIPRSEGKKRAEQYLKKMQLWEKRNTDARSLSGGMKRRLMVARALVNRPKLLLLDEPTAGVDIETRR

SEQ ID NO: 144026 - protein, 230 aa, Unknown
  Bacterial polypetide isolated from the Sargasso Sea
ENKMTAGYGDGPDIITSCSINVNKGEIVAILGPNGAGKSTAMKAMLGLLNLKSGSVLIDGKDISNLSPQDRVKKGISFVPQTRNVFAELTVKENLQIGAFLRKDDIDKVIEEIYELFPILKEKNSQIVGQLSGGQRQQVALGRALMIKPSVLMLDEPTAGVSPIVMDELFEHIIKVKETNVGIIMVEQNAKQALSISDRGYVLVTGENKFEGSGKELLKDPEVRRSFLGA

SEQ ID NO: 144027 - protein, 93 aa, Unknown
  Bacterial polypetide isolated from the Sargasso Sea
SLCMNPRIMLFDEPTSALDPEMIKEVLDTMIELASTGMTMICVTHEMGFAKTVADRVIFMDEGEIVEHNTPAEFFDNPQHDRTKLFLSQILAH

SEQ ID NO: 144028 - protein, 295 aa, Unknown
  Bacterial polypetide isolated from the Sargasso Sea
SGVVRPDKGEVFLNDKSIKLNSPLDAKKNNIGMVFQHFNLFETLSVFENLSIDSDKKNEELRLSVSNILKKYNFKIDLDIPVLNLSAGQKQKVEIIRCLIRSPKVLIMDEPTSVLTEQETEDLFVSLRKFSDEGILIIYITHKLKEVLSLCDEVAVMRKGKVVSVSKTKEEKIETLANKMVGENLNTIKKKINNFKYSEEILKISNLNFKSEDPYETDLINLNFSIKKGECLGIAGISGNGQSELFQILSGEIITEYTSIKFRDKEISKLNPRERREYLMAFSPEDRISQAAFQN

SEQ ID NO: 144029 - protein, 84 aa, Unknown
  Bacterial polypetide isolated from the Sargasso Sea
MGYSHSMSADVQLDDVWVQFGDFVAVRDASLTIEGGEFFSFLGPSGCGKTTLLRAISGFQPPSRGRVLIGGKDMAGIGPNHRPT

SEQ ID NO: 144030 - protein, 248 aa, Unknown
  Bacterial polypetide isolated from the Sargasso Sea
DKFSFNDQITLREIDYNYPNSSQKVLKNININISAKQRIGIVGKTGSGKTTLVDIILGLLNPQNGIVKVDEIDINKNNQRMWQKSIGYVPQKIFLSDDTIAANIAFGTNAKNINYDKVVQASKIANLHEFVTDELPSKYQTKIGERGVRLSGGQSQRIGIARALYHEKNLLVLDEATSALDYQTEKAVMDALKNISKKTTIIIIAHRLNTIKECDKIFFLDKGQIMGEGAYNNLIETNDYFKKFISVN

SEQ ID NO: 144031 - protein, 235 aa, Unknown
  Bacterial polypetide isolated from the Sargasso Sea
LSKNFSSFEAVKEISFSINESEILGLLGPNGCGKTTTIGMMLGLLKPTSGEVIINGLNVEKNRINLLKKMNFISPYIELPKKLTVKENLMVYGKLYSVNNINNRIDYLTETLRLSEFINKKTGELSSGQKNRVSLAKAVVNDPDILLLDEPTASLDPETGDFVRTFIEKISSEKKMSILLASHNMNEVKRLCKSILMMKDGKIIDRGTPTEIINKHGKKNLEEVFLKLNRTKNEL

SEQ ID NO: 144032 - protein, 183 aa, Unknown
  Bacterial polypetide isolated from the Sargasso Sea
MPSLKDIKNQINSVGSTKKITSAMKMVAASKLRRSQEKAEASRPYSARLEEMLSSVASSGSSGEGVIKLLTGTGEDKNYIILPVTADRGLCGGFNSSINRDTTKLIKSLESEGKSVQLITIGKKSRDFFNRTMKDKVIESFADLGTTGAGYEVALEISNKLQNLYFNGKFDKCIIIFNKFKSA

SEQ ID NO: 144033 - protein, 253 aa, Unknown
  Bacterial polypetide isolated from the Sargasso Sea
MKMVAAAKLRRAQESAERGRPYSEKMNNIILNLSSGVSDKENAPKLLSGTGDDKVHLCVVLTADRGLCGGFNSNIIKKAKSYFQKISDTGKTLKIITVGSKGYDQLKRLYQDKIIENISFKESKNANYFDADKVGKIIIEKFENNEFDVCTIFYNQFKNVITQIPQEQQIIPLKTEEKDNKSSEDNYEFEPDEDEILGNLLPKNISTQIFKAMLENSASEQGSRMSAMDNATRNAGEMVDKLTIEYNRSRQAA

SEQ ID NO: 144034 - protein, 191 aa, Unknown
  Bacterial polypetide isolated from the Sargasso Sea
MFIEIKNLTKEFKNTIAVNNINFNIEKNKTIGLLGPNGCGKTTSIGMILGLIKPTSGEIIIDKKNLESLKRDDILSRINFASPYIELPKKLTVRQNLEVYGRLYGIKNLNNRINEISEDLDIKSFFKRRTGELSSGQKNRVSLAKSLINKPEILLLDEPTASLDPDIGDFVRSYIQEYRSKNQVTILLASH

SEQ ID NO: 144035 - protein, 195 aa, Unknown
  Bacterial polypetide isolated from the Sargasso Sea
MELEGVGYHPAAAERPILDAVNLCLEPGQAALVVGRSGSGKTTLLELIAGLATPDGGQIRWDGQVLSSRERRWLCGLVFQFPERHFIGLTVAQELKLGHRRLDSERMEQVMATVGLAGVSLQQAPERLSGGQQRRLALAVQLLRDPKVLLLDEPSAGLDWSVRQELVGLVGRLAAERLVLIVTHEPEVFAAVAAK

SEQ ID NO: 144036 - protein, 291 aa, Unknown
  Bacterial polypetide isolated from the Sargasso Sea
LEKYNSVIGVSDVSFDVNKGEIFCVMGLSGSGKSTLVRHINRLLEPTSGKILINNQDVMQFNKENLQDLRNKKIGMVFQNFALMPHRSVLDNIAMPLEIRGVSKNDRLDAANNILNIVELQGWGNKYAHELSGGMQQRVGLARALAADPEFLLMDEPFSALDPLIRRQLQTEFIKLSKQMKKTTVFITHDLDEAVRVGHRIAIMRDGMVVQIGTPEEIVVNPSDEYVADFVKGISRLKVVQAKTIMQPLEQYKKNFGENLGNNEKVNENDILSKRIETSVSEDKPIVVIND

SEQ ID NO: 144037 - protein, 319 aa, Unknown
  Bacterial polypetide isolated from the Sargasso Sea
DPISLTKTINQSGHIIANANISFDVHVGEIFVIMGLSGSGKSTIVRCVSRLVEPTAGEVLLDGDDLLKKTDSELTTVRRHKMGMVFQNFGLMPHLNVIDNIAFPLKLQGVTESERYEQANRVIDLVGLSGREQNFPKELSGGQQQRVGIARSLAVEPDLWFLDEPFSALDPLIRKQMQNEFLRIQSVQKKSVIFITHDFQEALRLADRMAIMRDGEIVQIGRPVDLILNPADDYIREFTYDVPWESVLSVADIAKHQSGADAGLPRVDGETPVASILPLLAASDNGVLVTSRNGDLVGVANAKTFVAALASSASETRES

SEQ ID NO: 144038 - protein, 212 aa, Unknown
  Bacterial polypetide isolated from the Sargasso Sea
MNLKINNVSLSIKGRLIVNDVSVTVNPGEVVGLMGPNGAGKTTTFNLAVGNIKPDKGEIFMNGKNITNLPLPIRSRLGLGYLTQEASIFRDLTVKDNIDLALQNSSYSRAAIRNRREQLINEFNLNNFVDNYGYQLSGGERRRCEIARALTVGRKGPKYLLLDEPFAGIDPLAVNDLKKLILKLSNDGVGILITDHNVRETLLITNKSYVLS

SEQ ID NO: 144039 - protein, 208 aa, Unknown
  Bacterial polypetide isolated from the Sargasso Sea
MFQDYALFPHLTVKQNLEYPINYKNSEYKIEDIIDLIKLPNSLNKFPHELSGGEQQRVALARSIISQPDLLLLDEPFSSLDLNLREEVRDETLHLLQKSNISVIIVTHDPFEAMFISNQINIMDTSGYIIQSGSPAELYKNPKNSYVTEFFGETNRFNGIVSNSFVQTPVGKIKAPNEFENKNVEVHVRPQGIKLKQQPTPVNGIKGT

SEQ ID NO: 144040 - protein, 205 aa, Unknown
  Bacterial polypetide isolated from the Sargasso Sea
RQRVAIGRAIVRDPKVFLFDEPLSNLDAALRVQTRIEIAKLHNQLTATMIYVTHDQVEAMTLADRIVVINQGIIEQVGTPVELYNSPKNQFVAEFIGSPKMNMINLQDKRSLNLKNLNLPSEASKIGIRPEHISLANSESHKLRGTVRHIENLGEHLLCYVNLEMNSEITAKLDVNSDIRVNEIINLNWHQDHQHFFDSMGFSLN

SEQ ID NO: 144041 - protein, 207 aa, Unknown
  Bacterial polypetide isolated from the Sargasso Sea
LLSQSGESVAIIGASGSGKSTLLGLLAGLDQVTEGEIFLDGEALHSMNEEERAILRGNKVGFIFQSFMLVQSLTALENVMLPAEIAGLDNPKALALDILEQVGLKRRAHHFPNQLSGGEQQRVAIARAFITSPKILFADEPTGNLDAKNSEKIEALLFEMNREKGTTLVLVTHDNELAEHCDRQLTMNAGELVETTGANTMNKKEAV

SEQ ID NO: 144042 - protein, 242 aa, Unknown
  Bacterial polypetide isolated from the Sargasso Sea
MQTKAPLLNVQNLSWGIANKPILKHINVQIPEGKFVGLIGPNGAGKSSLLRCLYRFNKPNEGVIEFNNHDIWQLKSDEYAKCVAVVLQEAPSHFNLSLFDVVALGLTPHKSLFSSTSQSEKQQITLAIKTVGLELHTNQNFESLSGGEKQRALIARAIVQQPQLLIMDEPTSHLDVKYQIQVMELAKSLGVTVFASFHDLNLASAMCDELVVIKNGEITHTGSPAEVLTEHMLDDVFGVCAQ

SEQ ID NO: 144043 - protein, 302 aa, Unknown
  Bacterial polypetide isolated from the Sargasso Sea
GAGKTTLMSLITNKLSLDQGQVLFYPNKEAIDITNKKQDEIARYGVVKTNQIIQDFESLTIKDSLLLAIAAPKYEKIFNFFSEEDLLREAKNEIDEYLDYFHFEDPDNYALSAGEKKLLDIIRCLLLKPKFLLMDEPTAGLPEDQTKKVMDLMKKKTKEEAMSILIVEHNLDLIWEVSERVHFMAEGKILLEGSPEEIKADKTVALKYMGESDPVLTIEEPITQESSNELLETSFIKQVDPLQKEQLNAEYNRSYVPPTRWSKASWGNHSKGADKSPLKSRTTVLRPFDDKIEPLLKARDKR

SEQ ID NO: 144044 - protein, 229 aa, Unknown
  Bacterial polypetide isolated from the Sargasso Sea
MSEKKPDNNIVLENVHLNLNTSAGQINILRGISLKIKSGESVAVIGPSGGGKTTLIMAIAGLEKISSGSLKVAGVETSDLGEDDLAVSRRENFGIVFQDFHLIPTMTALENVAIPLELAGESSNTAFSVSRTQLQSVGLGHRFDHYPSQLSGGEQQRVAIARAYASNPGILLADEPTGNLDGETGAKIMDLLFELHRENGTTMVLISHDTELADRCGRTITLADGKIKE

SEQ ID NO: 144045 - protein, 249 aa, Unknown
  Bacterial polypetide isolated from the Sargasso Sea
MLAVEVQNLTHSINSKKILNNINFNLNKDSISCILGPSGSGKTTLLKLIAGLGKVQSGKILINGEEVSSANKHLPTEKRKIGFLFQDYALFPHLTVKQNLEYPINYKNSDYKIEDIIDLIKLPNSLNKFPHELSGGEQQRVALARSIISQPDLLLLDEPFSSLDLNLREEVRDETLHLLQKSNISVIIVTHDPFEAMFISNQINIMDTSGYIIQSGSPAELYKNPKNSYVTEFFGETNRFHGVVNNSFV

SEQ ID NO: 144046 - protein, 226 aa, Unknown
  Bacterial polypetide isolated from the Sargasso Sea
MTEKIISINNLSKEFLVNKNQTCILKDINFSIFKGDVISISGPSGSGKSTFLNILGLLDSVFNGTYEFLNFNVNLLKNNEKNIIRNKSIGFVHQFFYLIPELTVIENVSLPNLILNNNKKKSNELAKEIIVNCGLENQMHSKPTYLSGGEQQRVAIARALINNPELIIADEMTGNLDEKTADTIFEFFLEKISSNSQTLIYVTHNAKYAKKANQAFEISNNQIKKI

SEQ ID NO: 144047 - protein, 268 aa, Unknown
  Bacterial polypetide isolated from the Sargasso Sea
MNTNIQEIKDLSIGFKSQKGEQISILRNITTNIRKGETVGIVGESGSGKSTLALAMMGYIKHGLFTTGGECLFKSQDLLSLNNRELEDIRGRKIAMIPQNAGQALTPNLKIGYQIEEALKLHTDFNKIEREQKISELLNQVRLPSPKIMALRYPHELSGGQQQRVAVAMALAGNPELLLLDEPTTGLDVTTQAHVLELLKDIAKDTGTSMVYVSHDLGAIAQVCDRVIVMYAGEIVLEGPVRKILKEPIHPYTYGLLKSIPKLSLSGL

SEQ ID NO: 144048 - protein, 89 aa, Unknown
  Bacterial polypetide isolated from the Sargasso Sea
NPRIMLFDEPTSALDPEMIKEVLDVMIELAESGMTMLVVTHEMGFATAVAHRVIFMDEGEIIEANDPDNFFNNPQNDRTKLFLSQILQH

SEQ ID NO: 144049 - protein, 195 aa, Unknown
  Bacterial polypetide isolated from the Sargasso Sea
LFDEPLSNLDAALRSEMRVEISKLHKKLKSNIIYVTHDQVEAMTLADRIVVLNKGIIEQFGTPAEVYSDPNNIFVAEFIGSPKMNIIKIDKEQIVNTNTIELFNNKITFENVDFEDKVYLGIRPEDISVKSDHDIKLNVKVDLIENLGFEKIIYTKLKEKQIIIKSSENISNQQLNISFSKDKVLFFDKNKNRIR

SEQ ID NO: 144050 - protein, 220 aa, Unknown
  Bacterial polypetide isolated from the Sargasso Sea
DNFITQGIFKFHNVYFSYQSRKILSNINFQFYPRKLNIVLGSSGTGKSTIFKLLLRLKEPKSGTITLDNTDLREAKVSYLRENIGIVNQNTYLFNTTIFENIKYTNEKITKEQVSKFINSLGLNNTVFKNLNLDSETGVEGFNLSNGQRQMILILREYFANKKILLMDEPTSSLDVKSKAIIMDFIKHISTQRTIIITTHDNFVKDKADIIYDLNKMNKN

SEQ ID NO: 144051 - protein, 148 aa, Unknown
  Bacterial polypetide isolated from the Sargasso Sea
LLFIPQKPYMLLGSLREQLCYPTEVKKFSDEHLTSVLHEVNLKTLVDRYPNLDIKQDWPRILSLGEQQRLAFARLLLNSPRFAVLDEATSALDINTEKKLYSLLKERELSLISVGHRPSLKDFHENILELNGQGDWKLLTSDKYNFKD

SEQ ID NO: 144052 - protein, 206 aa, Unknown
  Bacterial polypetide isolated from the Sargasso Sea
MSNTLLEIKDLNISFNLNNKISKTVSNFNINLKKKKTIGIVGESGSGKTLSMLALTRLLPKQAFVEKGKIIFDQKDITNFSNKDFYKQISGKRISMIFQEPMTALNPVYTVGRQLIETYLFHNYASRNEAYKRSINLLESVQLTNSKERMNQYPHQLSGGQRQRVMIAMSLINDPELLIADEPTTALDVTVQKEIILLIEKLIKDL

SEQ ID NO: 144053 - protein, 214 aa, Unknown
  Bacterial polypetide isolated from the Sargasso Sea
MKSGPISFLDRPKDNIAIRLDGLSKIYKSQGFSKQKNALKDINLAIPAGCIFGLLGPNGAGKSTLINILAGTVIKSDGRVTVWGEDLDINPRQCRANIGIVPQELNIDVFLTPYESLEFTAGMYNIPRKERLTKEILEIVGLTEQSHAYARTLSGGMKRRMLVAKAMVHSPPILILDEPTAGVDVALRQKLWDNVRSLNDSGVTIVLTTHYLEE

SEQ ID NO: 144054 - protein, 283 aa, Unknown
  Bacterial polypetide isolated from the Sargasso Sea
IAGLSHVQDGEIFLNNNLVSSNNVHLKTEKRKIGFLFQDYALFPHQTVKENLQFAIKNKSTSHTIKEILDVIKLSDSLDKYPHELSGGEQQRVALARSIIAKPDILLLDEPFSSLDLNLREEVRDDTLHLLQKSNISVLVVTHDPFEAMFISNKIYIMNKKGKIVQSGSPKELYNLPNSSYVANFFGETNKFSGVVKNNTVETPVGEFNVDHSLESKNVNVYIRPEAVKLNQEQTPVNGIKGTVMASKLMGGYSFVHLSVLNNNNEIVHVHSHMPPTFLPNQS

SEQ ID NO: 144055 - protein, 223 aa, Unknown
  Bacterial polypetide isolated from the Sargasso Sea
MSNVVIKCESVYKIFGANAKKMLQDSNGNVDAKKFQENGCIVGVNNASFEVSKGEMLVVMGLSGSGKSTLLRCISRLTDATDGKIFIEGQDLLSLNNKELIELRRNKMGMVFQSFALLPHKTVLENIAFPLQIKGIKTEDSINKAMDMVKLVGLDGRENYFPRELSGGQQQRVGIARSLAVEPDIWFLDEPFSALDPLIRKEMQDEFLRLQEKLQKTIMFITP

SEQ ID NO: 144056 - protein, 100 aa, Unknown
  Bacterial polypetide isolated from the Sargasso Sea
ALLRDAPILLLDEATSALDAESERLVQDAVETLMAQRTTLVIAHRLATVRKADRIVVMDGGRIVEQGTHESLSGQGGLYARLASLQFDTVVAGQPIAPLG

SEQ ID NO: 144057 - protein, 122 aa, Unknown
  Bacterial polypetide isolated from the Sargasso Sea
RFDRARAASLAAQAGRGNDFLDKRASELSGGEAQITALIRVLQLAPEVLLLDEPTASLDPESSHAIEALVHAWFAADPARHASMWVSHDPAQAARMSVRHLTMRAGVLDESVATPVQQELGQ

SEQ ID NO: 144058 - protein, 126 aa, Unknown
  Bacterial polypetide isolated from the Sargasso Sea
FIRDLPNGYDTQLEERGTNLSGGQLQRIAIARAVLGNPAVLLLDEATSALDAEAEAAVQLGLRRAMRGRTVLVIAHRLATVQEADQIVVLERGCIVDRGTHDTLMQRGGRYRDLCERQFIRDLQNG

SEQ ID NO: 144059 - protein, 102 aa, Unknown
  Bacterial polypetide isolated from the Sargasso Sea
GGHKQRAALARALCMEPKIMLFDEPTSALDPEMIKEVLDAMVNLAKAGMTMIVVTHEMGFAKEVADEVVFMDEGMIVERAKTKDFFANPKNERTKLFLSQIL

SEQ ID NO: 144060 - protein, 161 aa, Unknown
  Bacterial polypetide isolated from the Sargasso Sea
MAKDNNSKKNIKNLKTVSINNLSHFYGKNENKKKVLNDVNLNIDKGELVLLKGPSGCGKTTLLTLIGALRTCQSGDLTVLNNQLNGASRKTRQILRRSIGMIFQGHNLLRCLTAEQNVQMGADLIKGLTYLQRREIARNWLSAVGLEEHHKKLPNDLSGGQ

SEQ ID NO: 144061 - protein, 246 aa, Unknown
  Bacterial polypetide isolated from the Sargasso Sea
MSESLNNSNNTPVIQCESVYKIFGNNASKLLENSNGQVDAKTFQEAGCIVGVNNASFEVNKGEMMVVMGLSGSGKSTLLRCISKLTDATAGKIFIDGEDLLAMSNKQLIELRRNKMGMVFQSFALLPHKTVIENIAFPLQVKGTNTRESMAKALEMVELVGLKGRENYFPRELSGGQQQRVGIARSLAVEPDIWFLDEPFSALDPLIRKEMQDEFLRLQGVLNKTIMFVTHDFDEALRLADRIAIM

SEQ ID NO: 144062 - protein, 87 aa, Unknown
  Bacterial polypetide isolated from the Sargasso Sea
MSIKNYIKIKNLSKSFGDVEVLKNINLEVEEGEFFSLLGPSGCGKTTLLRILAGFEYLSESEVFFDDANVTSLPTNLRPSNMVFQNY

SEQ ID NO: 144063 - protein, 46 aa, Unknown
  Bacterial polypetide isolated from the Sargasso Sea
RCINRLEEHQKGTIIDDGTELTENTKNIEAIRAEVGMVFQQFNLFP

SEQ ID NO: 144064 - protein, 109 aa, Unknown
  Bacterial polypetide isolated from the Sargasso Sea
AQFGSDLDASTQKLLNRGSKLTELLKQDQYSPMTVAEQVVTVYCGVKGYLDTIENNQIRSFEKGLLDLIKNKKPEILESIQNTGKIEENTEKLLTEVITNYKKSNFEKK

SEQ ID NO: 144065 - protein, 237 aa, Unknown
  Bacterial polypetide isolated from the Sargasso Sea
MLQIRNLETSYGLIRALKGVNLSAKEGKLTCILGPNGAGKSTLLFTIAGILSADKGEIIFLGEQIANQSASTIVRKGLALVPENRLIFPQLSVEENLKAGAYNRLKGESKTVQKDIDNIYDRFPVLAERSKQLGGTMSGGEQQMLAVARALMSKPKLLLMDEPSVGLAPMIVSEIFSIIKSLNTDGISIILVEQNASKALQIGDYFYLLDQGKIIFQGDKKKLIEKDIIKKAYLGKK

SEQ ID NO: 144066 - protein, 240 aa, Unknown
  Bacterial polypetide isolated from the Sargasso Sea
MEIAVQAVSHQYGSHNALDNISLCLKPGLTMLLGPNGAGKSTLFALITGLQKLTKGSITFDGASLSQSRTSIMAKMGVVFQQSTLDIDLSVKQNLSYFASLHGISTASALSHIQGLLDELDLTSKLNTKIRNLNGGHRRRVELARCLIHKPSLLLLDEPTVGLDIESRHLILRVVQALAHSQNVSVLWATHLFEEVKHNNNLIVLSKGRVLAHDQCEALLAKYHQQDIEHLWQHLMQEGS

SEQ ID NO: 144067 - protein, 192 aa, Unknown
  Bacterial polypetide isolated from the Sargasso Sea
MNNTKKFRIIKFKSKPILAAKSISKSFDGRIVLRKMDVRLNQGEMLGLLGSNGAGKSTFMNIVLGLLKPDFGDIFLGNSKLTNLAIHERSKLGIAYLPQQTSIFRGLTVYENLLAIAQIVKKNSTEQKDIVEKLMAEFSITHLRDVKATALSGGERRRTEIARCLISNPKVLLLDEPFAGVDLLSIQDIKGL

SEQ ID NO: 144068 - protein, 190 aa, Unknown
  Bacterial polypetide isolated from the Sargasso Sea
PSGGGKTTLLNAIGGLDIPDSGEVWVAGQRIDCLSKGELAGLRLKQIGFVFQAYNLIPVLTARENVEFVMQVQGMPADERGGKSEAILEEVGLSGLGDRLPAEMSGGQQQRVAVARAIVSRPALVLADEPTANLDSKTSDELIELFAELNETHGTTFVIATHDQRVMAHAKRLVKILDGRIVDDIDQHTA

SEQ ID NO: 144069 - protein, 191 aa, Unknown
  Bacterial polypetide isolated from the Sargasso Sea
KDMVGIVGKSGSGKTTLVNVLLGFHNIDASIKYNSNIVKDIRVWISQVGYVPQDTYLLDDSIKNNIAFGLSDNEIDETILNEAIEQSQLKSFIDSLKEGVNTIIGENGVKLSGGQRQRLGIARALYTRPEILIFDEATSSLDMETENDFVEAILKFKSKKTVLIITHRPSLLRTCDKIFKLENGQLKLNEK

SEQ ID NO: 144070 - protein, 110 aa, Unknown
  Bacterial polypetide isolated from the Sargasso Sea
NKKNNENNSLERVIEFIPEIKNFLYSDAYQLSGGQQKLVSLARAMIIGNNLLLLDEPFEGVAPALAERLVELIIGLNKLKLITMITESDETYSKIIGAEIVRLERGKIVT

SEQ ID NO: 144071 - protein, 107 aa, Unknown
  Bacterial polypetide isolated from the Sargasso Sea
LSSGQKNRISLAKAIINDPNVLLLDEPTASLDPEIGDFVRTFLENYKKEKKVSILLASHNMDEVTRLCSSIMMMKNGLIIDQGKPSDLIKKHGRKNLEEVFLKLARN

SEQ ID NO: 144072 - protein, 40 aa, Unknown
  Bacterial polypetide isolated from the Sargasso Sea
PSAVGYQPTLATDMGKFTRKNNNYQQGIYYLCSSDLCPCG

SEQ ID NO: 144073 - protein, 243 aa, Unknown
  Bacterial polypetide isolated from the Sargasso Sea
MFIEIKKLTKIYNNFLAVNKINFQIEKNKTIGLLGPNGCGKTTTIGMMLGLVTPSEGEILIENKNIKSFKRDDILKRFNFASPYVELPKKLTVKQNLEIYGRLYGIKNLDERITEISSDLDIKNFYERKTGELSSGQKNRVSLAKSLINKPEILLLDEPTASLDPDIGDFIRSYIQEYKKSNKVTILLASHNMSEVERLCDSVIMMRKGKIIDSGTCQDLIQKHGRNNLEETFLKLARSKDEF

SEQ ID NO: 144074 - protein, 230 aa, Unknown
  Bacterial polypetide isolated from the Sargasso Sea
YKKDNQVLKNINLDIKRGEVTAFVGPSGAGKSTMLALILKFITPNNGDIFIDDKNLKILNTKDIRKNIALVQQQPFLFSGTIIDVIRMGRNFTKEEVIESAIKANAHNFIQMLPEKYETKITERGSNFSGGQIQRIAIARAIIGNPSILLLDEATSALDAESESEVQEGLNRAMKDRTVLVIAHRLATTQEANKIVVFDKGEIIEVGKHIDLINKPGIYKELCEKQLIKK

SEQ ID NO: 144075 - protein, 297 aa, Unknown
  Bacterial polypetide isolated from the Sargasso Sea
LRALSGGWRRRAALARSLAPRPDLLLLDEPTNHLDFEAISWLESRLAAFSGAVLFITHDRAFLQRLATRIVEIDRGKLRSWPGDYADFLRRRAEALAAERQANSEFDRKLAEEEIWIRQGIKARRTRNEGRVRALEAMREVRAQRVNPDARARVHIEEADQSGRKVLDARSLCFGYGDSMLIQDFSLRIRRGDRIGLVGNNGVGKSTLLRLLLGEIEPKAGSIKWGVNIQLGYFDQHRRELDQDKTVAQIVGDGREYVTLNGKPRHVVGYLRGFLFSAKRALTPVRALSGGERNRVI

SEQ ID NO: 144076 - protein, 75 aa, Unknown
  Bacterial polypetide isolated from the Sargasso Sea
RQRIALARALVQNPKLLILDEPTSALDPESQDTIIKILKSLKGKFTMILITHHPSVSRISDKIFQLKNGYLTEKI

SEQ ID NO: 144077 - protein, 86 aa, Unknown
  Bacterial polypetide isolated from the Sargasso Sea
MSCLGGQQQRVAIARALVNDPSIVFADEPTGNLDTKTGEEIMSLFKELHRNGQTIIVITHENDIADQTDRIITVKDGLIESDEWRV

SEQ ID NO: 144078 - protein, 165 aa, Unknown
  Bacterial polypetide isolated from the Sargasso Sea
MENKNSDEVIVKFEDVTKQYGDLVVLDKLNLDIKKNEMVSIIGPSGSGKTTVLRVLMTLEKINGGVIHLDGEKLTHMESNGKLIEADEKYLRERRSKIGMVFQQFNLFPHMTALQNCIEAPVEVLGMKKEEAEERALELLELVGLTEKKDQHPSRLSGGQQQRVQ

SEQ ID NO: 144079 - protein, 148 aa, Unknown
  Bacterial polypetide isolated from the Sargasso Sea
CFCSLSVHENLEMGAWTIETNLKEKFEELYNLFPDLKDKRNQLAGQLSGGQRQMVAMAKALILNAEVLLLDEPTAGLSPKYRGEIFATIQRINKSGLPVLMVEQNAKQALQISHRGYVLVDGSNRYTGTGQDLSSDPDVARMFLGSRG

SEQ ID NO: 144080 - protein, 219 aa, Unknown
  Bacterial polypetide isolated from the Sargasso Sea
MSEAVIKCENVYKIFGSNAHKMLQDANGNVDAKTFQENGCIVGVNDASFEVSKGEMLVVMGLSGSGKSTLLRCISRLTEATGGKIFIEGQDLLKLNNKELINLRRNKMGMVFQSFALLPHKTVVENIAFPLQIKGIKTEDSISKAMDMVKLVGLDGRENYFPRELSGGQQQRVGIARSLAVEPDIWFLDEPFSALDPLIRKEMQDEFLRLSEKLQKTIM

SEQ ID NO: 144081 - protein, 208 aa, Unknown
  Bacterial polypetide isolated from the Sargasso Sea
RARALVGASGAGKSTLLGVANVLIQPSSGSVEWFGEPRLRRRLRSRIGTLWQDLRLIEGISVQHNLNTGRLAQWSWWQVLFNLLRPLEYRPCAEALAQVELEAALLPLPLSALSGGQRQRVAMARLLRQNAELLLADEPLAQLDPPLARRLLQLLLGLATPPRALLMSLHRPDWLDGFDRVVGLRHGELLFDRPAQDITTSDLEQLYS

SEQ ID NO: 144082 - protein, 200 aa, Unknown
  Bacterial polypetide isolated from the Sargasso Sea
HDIGPPESHPDRAVQLMEQVGLSAAQLDRFPHEFSGGQRQRIGIARALAVNPDFIVADEPVSALDVSVQAQVINLLSDLKDELNLTMLFIAHDLAVVEHVCDRVAVMYLGKIMEIAPADTLYSRPNHPYTEALLSAVPTPEPGRKRDRITLSGDIPSPIDPPAGCVFRTRCPRAEKVCSEKMPKLVGLGEGHFSACHLTT

SEQ ID NO: 144083 - protein, 108 aa, Unknown
  Bacterial polypetide isolated from the Sargasso Sea
QVGEGGLSLSRGQRQTVALARATLNDPPILLMDEPTASLDARAEKQFIRSMQLVSRDRTLLLITHKMHLLNLVDRIIVLDRGHIMADGPKNEVLALLNSGTMAGEQTP

SEQ ID NO: 144084 - protein, 220 aa, Unknown
  Bacterial polypetide isolated from the Sargasso Sea
MSKSSAIILKLENLKTYFPVKKGIFRNTVGYVKAVDGINLEIRKGETLGLVGESGCGKTTLGKSILQLVESTEGKILYCSNGQETDLRKLQQSEMKPFRKKLQIIFQDPHSSLNPAFTVYGSLKDLLKNFGTQSKTEIRKKIGDLLEAVNMRRDQMDNYPHEFSGGQRQRIGIARALCVEPELIVCDEAVSALDVSIQAQVLKLLKDIKDENNLTYIFIT

SEQ ID NO: 144085 - protein, 110 aa, Unknown
  Bacterial polypetide isolated from the Sargasso Sea
VNLAQQEVKSEVLLPLVYDDEDRNVRDRLYEPSKESLINSLVPRHLNIQIWKYLLESYASEQAARMLAMENATTNAGDMIKNLTLEFNKARQAAITTEMLEIVSGAEALK

SEQ ID NO: 144086 - protein, 199 aa, Unknown
  Bacterial polypetide isolated from the Sargasso Sea
IMGSSGSGKSTLLNILGMLDVANKGTYTLDGKVIKDLDETKAAIYRNKFLGFVFQSFNLISYKTALENVMLPLYYQKISRKERQQSAQKYLEEVGLGPWASHHPNELSGGQKQRVAIARALVSEPKVLLADEPTGALDSKTSYELMDLLQKINDAGKTLLIVTHELDIANMCKRIVHLRDGIMVEDKKVSQIKANQYVE

SEQ ID NO: 144087 - protein, 145 aa, Unknown
  Bacterial polypetide isolated from the Sargasso Sea
YENLLGIAQILKKKPREQKDVVEKLMAEFSITHLRDVRATALSGGERRRTEIARCLISNPKVLLLDEPFAGVDLLSIQDIKGLLLKLQSRGCAVLVTDHNASQLLSVVDRAYVLANGIIVANGPPREIVNTAEAKKLYFGEDFRI

SEQ ID NO: 144088 - protein, 224 aa, Unknown
  Bacterial polypetide isolated from the Sargasso Sea
MTNSIEVINLSKKYKDKEAVANINFKINENEMVGLLGPNGCGKTTTIGMILGLLKPSSGEVLINGVNIEKNKISLLHKMNFISPYIELPKKLKVKQNLIVYGKLYNIQNLNDRIDHLANKLRLKDLLNKITGELSSGQKNRVSLAKALINDPTVLLLDEPTASLDPETGDFVRSFLEDYKKEKKISVLLASHNMEEVKRLCSSVLMMKDGLIVDRGTPEELITK

SEQ ID NO: 144089 - protein, 250 aa, Unknown; identical to SEQ ID NO: 143312
  Bacterial polypetide isolated from the Sargasso Sea

SEQ ID NO: 144090 - protein, 226 aa, Unknown
  Bacterial polypetide isolated from the Sargasso Sea
MAKITLKDLSHSYLEKQNNDSDWALRGVNIDWKDGGAYALLGPSGCGKTTLLNIVSGLLKPTKGSVLFDDKDMTSLNPVERDIAQIFQFPVIYDTMSVYDNLAFPLKNRGLSDSEVASKVKEIAEMLELTSTLNNRASGLTADGKQKISLGRGLVRSDVNVIMFDEPLTVIDPHLKWVLRSKLKELHQKINRTMIYVTHDQTEALTFADQVVVMHEGQIVQTGTPV

SEQ ID NO: 144091 - protein, 235 aa, Unknown
  Bacterial polypetide isolated from the Sargasso Sea
MVRVLEAKGVWKVYETAATRVEALRDVSVKINQGEMVAVMGPSGCGKTTLLNCLSGLDEVSLGKVFVEGVSIFDGDDTLRTKVRREQLGFIFQSFNLIPVLSALENVEMPLQLNSAEPNSKAIRKKALRALEKVGLKDWASHRPAELSGGQQQRVTIARAYVHEPGLLLADEPTGNLDTETGTKILDLLVELNKELNITMMIVTHDKEVSKRCSRTLEMRDGRIYKDTKNILEEE

SEQ ID NO: 144092 - protein, 189 aa, Unknown
  Bacterial polypetide isolated from the Sargasso Sea
MSRPVIKCESVYKVFGVNAKKMLQGVSGNVDAKAFQEAGCIVGVNNASFEVSKGEMLVVMGLSGSGKSTLLRCISRLTDATVGKIYIEGQDLLALKNKELIELRRNKMGMVFQSFALLPHKTVLENIAFPLQIKGMKTQDSISKAVEMAKLVGLEGRENYFPRELSGGQQQRVGIARSLAVEPEYLVFG

SEQ ID NO: 144093 - protein, 124 aa, Unknown
  Bacterial polypetide isolated from the Sargasso Sea
MGYTNNSEAYVSFQNVQKTYDGESFVIKNLNLDAERGEFITMLGPSGSGKTTCLLMLAGFETATYGEIILDGTSINNVPPHKRNIGMVFQNYALFPHLTVNENLAFPLQVRKVEKNEIAKKVRN

SEQ ID NO: 144094 - protein, 292 aa, Unknown
  Bacterial polypetide isolated from the Sargasso Sea
GNAGKMLQESNGNVDAQTFQEAGCIVGVNNASFEVSKGEMLVVMGLSGSGKSTLLRCISRLTDATSGKIFVEGQDLLSLNNKELIELRRNKMGMVFQSFALLPHKTVLENIAFPLQIKGINTEDSISKAMDMVKLVGLDGRENYFPRELSGGQQQRVGIARSLAVEPDIWFLDEPFSALDPLIRKEMQDEFLRLQGVLKKTIMFITHDFDEALRLADRIAIMKDGIIEQLDTSDNIVLNPATEYVRKFTQEVPREKVLKIEAVMDPVSDDQNLSDLIVSQNAIIEEVAEQIL

SEQ ID NO: 144095 - protein, 245 aa, Unknown
  Bacterial polypetide isolated from the Sargasso Sea
MIEIKNISKSFKDQESTNHVLDNVSITIRKGDCVAIIGKSGIGKSVLLKHIIGLVKPDKGSVFIDGVDINAIRFKDLQKIRSSIGMVFQFGALLDSMNVEDNIGLALNKLSNLSKDSINVKIFDSLASVNMEGTEKLMPSELSGGMKKRIGIARAIAIDPEYLLYDEPTTGLDPITTGKINFLIKKIHNLGNVTSIMVTHELKTVYDVADRVIMLDEKKVIFDGKPKQLINSKIPIIQEFIGNSN

SEQ ID NO: 144096 - protein, 262 aa, Unknown
  Bacterial polypetide isolated from the Sargasso Sea
MHPFEVSKGEMLVVMGLSGSGKSTLLRCISRLTDATDGKIFIEGQDLLSLNNKELIELRRNKMGMVFQSFALLPHKTVVENIAFPLQIKGIKTEDSISKAMDMVKLVGLDGRENYFPRELSGGQQQRVGIARSLAVEPDIWFLDEPFSALDPLIRKEMQDEFLRLQEKLQKTIMFITHDFDEALKLADRIAIMKDGIIEQLDTPANIVLNPATEYVRKFTEEVPREKVLLIQDVMDPSTENNLGDLKVLKDEIIENVAEKIL

SEQ ID NO: 144097 - protein, 113 aa, Unknown
  Bacterial polypetide isolated from the Sargasso Sea
MRERGQKLSGGQRQRISIARAILKNPEILILDEATSAVDNETEAAIQESLETLKEGRTVIAIAHRLSTIRNADLIYVLEDGEIVENGTHDQLLGNNNVYTKLWDVQTGKTRRF

SEQ ID NO: 144098 - protein, 64 aa, Unknown
  Bacterial polypetide isolated from the Sargasso Sea
MVADIEVFEGTSGIDNRDCHVEFTGDTLKMPISQDLMGRAFNGSRGGAERLHDRIQLARWKTPR

SEQ ID NO: 144099 - protein, 211 aa, Unknown
  Bacterial polypetide isolated from the Sargasso Sea
YDPLDGRITLGGVDYKQLNFVSMHRQIGTVSQETQLFNDTIAKNITYGAPDDVSDEDVEAVARAAQAWEFISSFEDGMHTKVGERGQRLSGGQKQRIAIARCLLRKPKLLLLDEATSALDAASEAAVQKALDTLIWTGHHTVLLVAHRLSTVVNANQIVVLQKGNCVEQGKHAELLDKSGVYAELVHTQLQHSVEAGAAGGGGAAPPSAES

SEQ ID NO: 144100 - protein, 244 aa, Unknown
  Bacterial polypetide isolated from the Sargasso Sea
MFIEINNLTKNYGKYTAVNKINFAIDKNKTIGLLGPNGCGKTTTIGMMLGLVTPSEGEITIENKNINTFRRDEILKRFNFASPYVELPKKLTVKQNLEIYGRLYGVKELRKRIEEISIDLDIKNFFNRKTGELSSGQKNRVSLAKSLINKPEILLLDEPTASLDPDIGDFIRSYIQEYKSKNKITILLASHNMNEVERLCDSIIMMKKGRIIDVGTCRELIKKHGRSNLEETFLKLARSKDEFF

SEQ ID NO: 144101 - protein, 275 aa, Unknown
  Bacterial polypetide isolated from the Sargasso Sea
ELLNKVRLPSPETMAFRYPHELSGGQQQRVAVAMALAGKPDLLLLDEPTTGLDVTTQAHVLELLRFIAKDTGTSMIYVSHDLGAIAQVSDRIVVMYAGEIVLEGPARKILKEPIHPYTYGLLKSIPKLSLAGLPASMPGTQPQPGSINEGCSFYDRCNLATDHCKKNSPDLEHIKELDTNVRCFNHKELINQNNNLQTSITKKSNNSEAIEVLKLKDVSISYAKQKFFDQLLNKISDQNPTVKDINIDIKKGETIALVGESGSGKSTILKSIAGL

SEQ ID NO: 144102 - protein, 178 aa, Unknown
  Bacterial polypetide isolated from the Sargasso Sea
MRWTKPLLSSILILFLGCELSEGVFENPLDREVASSNGISPPALVFYPDIISTNAGAGAPTSVYAMEISGVGMAEIEINYDPNKVSVGSVAKGELFDGGNQPFFHYEDDSAGSLIVYIGYLGPNGNSISGTGNIANIIFNTLSAGSSEISISSTSRILDPDAKAITLNGYGKGTIDAQ

SEQ ID NO: 144103 - protein, 220 aa, Unknown
  Bacterial polypetide isolated from the Sargasso Sea
MSLMDIKFEKNYNNFVLNCNFDVDEKINGIFGPSGSGKSTLLNCIAGFTNPDSGKILIEGKTFYDLKKKILLPPEKRNIGYVTQKSNLFPSMNINENIYYGYKVDSRINIKDIIDMMNINDLLLKFPNQISGGQAQKVSIARALASNPNVLLMDEPLSELDLNSKLMILNYLKKINAEYKIPIIYVSHDISEMIAICDNIFIIKNGSINKKISSSELSLE

SEQ ID NO: 144104 - protein, 202 aa, Unknown
  Bacterial polypetide isolated from the Sargasso Sea
MSDNLIEVRNLVKHFEVSKSLFSRNKKIVKAVDGISFDIKAGETLGLVGQSGCGKTTTARSLCLLDPKTSGNINFYNPDSQSMESFDNINEDGLKTFRRNIQMIFQDPYESLNPRWTIKDIIKEPLDIHNIGSMNEREEAIIEILRTVGLTPPENYLGRYPHEISGGQRQRVSIARTLVMKPKFVVCDEPTSMLDVSIRISI

SEQ ID NO: 144105 - protein, 135 aa, Unknown
  Bacterial polypetide isolated from the Sargasso Sea
MTSETMIEMSSVHKWFGELHVLNDINLKVAKGEKIVICGPSGSGKSTLIRCINRLEEHQRGEIVVEGTELTNDNRSVEKIRGEVGMVFQQFNLFPHLSILDNCSLAPIWVRKLPKVEAREKAMEYLKKSPNRRSG

SEQ ID NO: 144106 - protein, 187 aa, Unknown
  Bacterial polypetide isolated from the Sargasso Sea
MNEIIESVKNLSIGFNSQKGKQISILRNVSTNIKKGETVGIVGESGSGKSTLALAMMGYIKQGLFPLKGECLFKSEDLLKMSSRQLEKIRGRKIAMIPQNAGQALTPNLKIGYQIDEALRFHTDLNKTERDKKISELLNKVRLPSPETMAFRYPHELSGGQQQRVAVAMALAGKPDLLLLDEPTTGL

SEQ ID NO: 144107 - protein, 186 aa, Unknown
  Bacterial polypetide isolated from the Sargasso Sea
MNEIIESVKNLSIGFNSQKGKQISILRNVSTNIKKGETVGIVGESGSGKSTLALAMMGYIKQGLFPLKGECIFKSEDLLKMSSRQLEKIRGRKIAMIPQNAGQALTPNLKIGYQIDEALKLHTDLNKTERDKKISELLNKVRLPSPETMAFRYPHELSGGQQQRVAVAMALAGKPDLLLLDEPTTG

SEQ ID NO: 144108 - protein, 342 aa, Unknown
  Bacterial polypetide isolated from the Sargasso Sea
YLEQQNSNSDWALRDVNIDWKDGGAYALLGPSGCGKTTLLNIVSGLLKPTKGSVLFDDKDVTSLNPVERDIAQIFQFPVIYDTMSVYDNLAFPLKNRGLSDSQIASKVKEIAEMLELTTTLNNRASGLTADGKQKISLGRGLVRSDVNVIMFDEPLTVIDPHLKWVLRSKLKELHQKINRTMIYVTHDQTEALTFADQVVVMHEGQIVQTGTPVELFEKPKHTFVGHFIGSPGMNILPCEIKNGEINFSGQKLQSHNAIKKSNFKKTQIGIRPEFINFSKDGIPVKIKRVSNTGRHKIVDTECNGGNIKILSNASTEIPSGSAHITFNQKYTYVYGDNWIIE

SEQ ID NO: 144109 - protein, 236 aa, Unknown
  Bacterial polypetide isolated from the Sargasso Sea
MTIKPKLVSSNNGLVVNKLRKTLSQKQIVRNVSLKLERGKTIGLLGPNGAGKTTTFYMIMGLIDCDGGEILLDDIHLTSLPMYKRAKLGIGFLPQQPSIFRGMSVEDNLLSILETQKLPKDQKQNMLEELLTEFSLTHLRRAMPHMLSGGERRRTEIARCLCSDPSIILMDEPTAGVDPIGIDDIKVLIKQLMNKNIGVLITDHNVREVLDICDYSYVMHSGEIIAEGESDIILWQ

SEQ ID NO: 144110 - protein, 521 aa, Unknown
  Bacterial polypetide isolated from the Sargasso Sea
GSLDVSSERAKSKELKHLKLLFNFARPYWKTMILAIIALIGAAIGTLGIGRVIQLLIDRGFEEGSRGLSEIIILAYLVVLIISVATFMRYYLVMWLGERVVSDLRASIYKKVIALSPSYFELNKTTEVLSRISIDTTLIQSIVGAGASIALRNLMLLIGGLIMLNITSFKLSLLIMISVPLIILPLILFGKRVRNLSRETQAAIANVNSVADETLKEIRTVQSYVREDIEFSRFVDRVNSSFNKAKKQIMARGLLTFAVIAVAFGSVVSVLWIGASDVMVGDMTAGDLGAFVVYAIMTAASVAALSEVYGDLQKAAGAAERISELLMAEPVIKPPLKPLKLKNNPQGIIEFKSVTFAYPSRPNINVLNNFSLTIQPGETVALVGPSGSGKTTIFQLVLRFYDPQEGFISFDNLNLIRVDPRDLRSNIGTVPQDPVIFDTNVWDNIAYSKPDASEAEIVSAASAAAATEFIDRLPEGYNTNLGERGVTLSGGQKQRIAIARSILHNPSVLLLDEATSALDTE

SEQ ID NO: 144111 - protein, 506 aa, Unknown
  Bacterial polypetide isolated from the Sargasso Sea
MGEKPRYLAGNDKATIGELIKLNNIYSRLIKLPKVVNTRSYRPFDLICFSRDLKQTYLLEYTLTKPKISSIVDGRLVELPTIPELSAFGYEIYPSLSFDLKKPFDLLVFAYGAEVKPLISLILVSIVVLICGLSIPILSGVLVSDVIPQGNSQMLFACLAIILFVVATSTISQYIQGILMLRIETKADLKLQTAVWDRFFKLPNQVITSFNLGDLYVRLSSISRIRSQLNAGAMSSLLQAVFSISYIFLMYIYSPTLTVCVLLLTILYIAFVIYFGKKSIAVWVKLYQFKAEISGQSFETTEIIQTLKVYSAQRGFSRSWLGKFRSISDLVVKADFYSQSISLVTSSMTSLGTVLFFVVFTQQVFANPEILDNPSLVGNFVAFYVAFIAFNTAITSAVTALVYRFAIVVALWDYAQPLILKPIEPSFAPDSIVKSIDGSIQVMGLTVKPKDRDVELFSKLTFNVEAGEFYGVKGAQGSGKSTLLRILAGTELVEYCKVMIDHLPLD

SEQ ID NO: 144112 - protein, 598 aa, Unknown
  Bacterial polypetide isolated from the Sargasso Sea
MLAVYLCAPFVASVPQLGAADWANVDWRAVWSAVGISAASASVASLVILLGGVPLGYLLARSNSRKMALLGFVVQLPLALPPLTSGVLLLFLLGPYSWVGQFTDGALTDSFAGIVLAEVFVAAPFLIIAAKSAFAAVDPVLDDVAATLGHHAGSRFFRVMLPVAWPAIRAGLALAWLRAFGEFGATVMVAYHPYSLPVYTYVVFGGQGLPAMMPLLLPTLAIAIVCAALSIYSVRQKSALEQTENGDDAPEPGTDLTASRGETAGRRLAFHLQRRLGAFELDIAWTPATRRLAIIGPSGSGKSLALRLIAGLESNASCSVRLGATDLSPLPPERRQIGYMPQDYGLFPHMTVAQQLAFPVDADAASARYWLDHLGLAQLVARLPHQLSFGQRQRVALARALTRHSELLLFDEPFAALDTPRRRRLQQSLRALQREIAAVTIIVTHDPDEAALLADEVLVVEQGRVLQAGAIAAVFEQPASMRVAELLGLHNVGEGSVTAPGRIEIGNGLTIATAHGDQEIAVGQRMMWRISSHAVHLCPDGAHAGVVEAVELRRGERYVRLNIAGVRFDIANGDTRLREGSPCRIDIDDAGVSVWKLS

SEQ ID NO: 144113 - protein, 246 aa, Unknown
  Bacterial polypetide isolated from the Sargasso Sea
MILKAKEISKSYSGRKVVDNISIEVNQGEIVGLLGPNGAGKTTSFYMIVGIIKPEDGNIYLDNEIISNYPMYQRSQRGIGYLAQEESVFRKLSVEDNILGVLEFSDLSKKEQNIKAEELMEEFGLINIRKNRGDLLSGGERRRTEIARALANDPKFLLLDEPFAGVDPIAVEDIQSIISVLKNKNIGILITDHNVQETLAITDRTYLMFEGKILKEGIPEDLAKDEMVRKVYLGKNFEFKKKKIDF

SEQ ID NO: 144114 - protein, 343 aa, Unknown
  Bacterial polypetide isolated from the Sargasso Sea
MSKPVIKCEAVYKIFGENAKKMLQESNGNVDAKTFQENGCIVGVNNASFEVSKGEMLVVMGLSGSGKSTLLRCISRLTDATGGKIFIEGQDLLQLNNKELIELRRNKMGMVFQSFALLPHKTVVENIAFPLQIKGIKTEDSISKAMDMVKLVGLDGRENYFPRELSGGQQQRVGIARSLAVEPDIWFLDEPFSALDPLIRKEMQDEFLRLQDKLQKTIMFITHDFDEALKLADRIAIMKDGIIEQLDTPANIVLNPATEYVRKFTEEVPREKVLLIQDVMDPSTTDNLGNLKVLKDEIIENVAEKILTQEKTVAVIDNNNKIVGSINPTKIINTVFGGRKNSN

SEQ ID NO: 144115 - protein, 387 aa, Unknown
  Bacterial polypetide isolated from the Sargasso Sea
IYTPVVFAFALAVAVLPPLVIGGAWLDWVYRALVLLVVACPCALVISTPVTIVSGLAAAARKGILIKGGVYLENGRHLALLALDKTGTLTHGKPVQTDSLHLLEVDEPLHAAWAASLAARSDHPVSRALAQRAEEQGQALHDVEDFEALPGRGSRGRIDGTLLFMGNHRLVEDLGLCSAQLEQRLEALERQGKSVVVLCDEQRALMLFAVADTVRQTSREAVAELHELGVRTCMLSGDNVHTAAAIAEQVGVDEARGDLLPADKLAWVEARQAQGRVVGMVGDGINDAPALAKAEIGFAMGAAGTDTAIETADVALMDDDLRKIPAFVRLSRQTHAILVQNIVLALGIKAIFLALTLAGEATMWMAVFADMGVSLMVVFNGLRLLRK

SEQ ID NO: 144116 - protein, 198 aa, Unknown
  Bacterial polypetide isolated from the Sargasso Sea
AIVGASGSGKSTLLGILAGLDQASSGEVYLAGQPLHQLTEDERAELRARSVGFVFQSFLLLPSLTALENVTLPAELAGMADAQARGLELLAQVGLSHRADFFPNQMSGGEQQRVAIARAFITKPAVLFADEPSANLDSATGEKIEDLLFELNKQQGTTLVLVTHNHELAQRCQFRFQMHAGHLTADLTQATEGKRHVG

SEQ ID NO: 144117 - protein, 146 aa, Unknown
  Bacterial polypetide isolated from the Sargasso Sea
EENLRLGAHANEKGKHFENDIKEVYDLFPVLSDRKTQRGGTLSGGEQQMLAIGRALMSKPKVLLLDEPSLGIAPKLVNQIFVSIKNINKEKNVTIFLVEQNAKKALELADRAYVLVNGKVTIKGPGQELLKNKDIQAAYLEGGAKN

SEQ ID NO: 144118 - protein, 316 aa, Unknown
  Bacterial polypetide isolated from the Sargasso Sea
ALLGPSGCGKTTLLNIISGLITPTKGDILFDDKIISGLSPVERNIAQIFQFPVIYDTMTVYDNLAFPLKNRKIPEEEIKVKVHEIAEMLELSSTLNNRASGLTADGKQKISLGRGLVRSDVNAIMFDEPLTVIDPHLKWILRSKLKELHQKINRTMIYVTHDQTEALTFADQVVVMHEGQIVQTGTPVDLFEKPKHTFVGYFIGSPGMNVLPCQIKGNDVIVNGKKIETHQQIKKSNFNKTEVGVRPEFISFSNEGIPVKVLSVSNTGRHKIVDTESETGKIKIIAKSNEDIPSGSAFLKFKKEYTYTYGDSWIIE

SEQ ID NO: 144119 - protein, 193 aa, Unknown
  Bacterial polypetide isolated from the Sargasso Sea
MLEIQGLTKTYDNGVKALNNVNLSISKGMFGLLGPNGAGKSSLMRTIATLQQPDSGSILFNGIDVLKDPQALRKTLGYLPQDFSVYPRISAFELLDHLAVLKGFTQKKERKELVEGLLAHTNLFQHKDKAVSGFSGGMRQRFGIAQALLGNPDLLIVDEPTAGLDPEERNRFHNLLVSLGEEKVIILSTHIVD

SEQ ID NO: 144120 - protein, 378 aa, Unknown
  Bacterial polypetide isolated from the Sargasso Sea
MSEVAPGWKLRVLLAQALFSNPDILLLDEPTNNLDINTIRWLEQVLNDRESTMIIISHDRHFLNSVCTHMADLDYGELRVYPGNYDEYMTAATQARERLLADNAKKKAQIADLQSFVSRFSANASKSSQATSRLKQIDKIKIEEVKVSSRQNPFIRFEQEKKLYRNILEIEGVSKGYGEAPLFKGLNMMLEVGEKVAILGTNGIGKSTLIKTLVGALAPDTGTIKWSENAQIGYYAQDHAEDFDTDLNVFDWMAQWKQENEDEQAVRSVLGRLLFSQDDIKKPVKVLSGGEQGRMLFGKLMMQRPNILIMDEPTNHLDMESIESLNLALEMYKGTLIFVSHDREFVSSLATRILELTENGIRDFGGTYEDYLRTQGVV

SEQ ID NO: 144121 - protein, 358 aa, Unknown
  Bacterial polypetide isolated from the Sargasso Sea
MAKIELSNISHSYNPNEPNPIYALNPFSMTWENGKRYAILGPSGCGKTTMLNIVSGLVKPTKGKILFDEIDVTSLITEQRNIAQVFQFPVIYNTMTVYDNLAFPLKCRNFSKDKIDERVNSVSDTLKLSSFLNSPARKLTADQKQLISLGRGLVREDVAGVLMDEPLTVIDPDLKFRLRRSLKEINEQYKTTLVYVTHDQNEAMTFADNIIVMDQGEIVQVGLPKDLFERPKTTFVGYFIGSPAMNLFKSEVSSKNTIKFNNLEIKTETDLSKLKNKAVKLGIRSEFIKIANDQKENVIDVKVSRVEDFGNFKLITAKVGGFEIKSKVEREIPISSEKLSLFLPAEKCCIYSDEKLVQ

SEQ ID NO: 144122 - protein, 247 aa, Unknown
  Bacterial polypetide isolated from the Sargasso Sea
MNKFQLLDDGLIVNKISKSYGNKKVVRDISISINRGEIVGLLGPNGAGKTTTFYMIVGLVKPDTGSIILDKVEISKMPIYSRGLQGISYLPQEPSIFRGMNVEDNLLAIIEIVEKDKNKQNIILQSLLNEFDINHVRKSKSIVLSGGERRRLEIARTLASRPKYLLLDEPLTGIDPVSIEEIKIIIKKLKQKNIGVLITDHNVRETLKIVDKVYIVNEGMIFFSGNPNEAISDERIKKFYLGSNFSI

SEQ ID NO: 144123 - protein, 572 aa, Unknown
  Bacterial polypetide isolated from the Sargasso Sea
PWLRREQVGAQPVLREVPMRDLVPGDIVQLSAGDMIPADIRLIESRDLFISQAVLTGEALPVEKYDTLGDVTQKSASTLAADQGNLLDLPNICFMGTNVVSGRAKAVVVATGPRTYFGSLAKAIVGSRVQTAFDRGVNSVSWLLIRFMLVMVPIVFFLNGFSKGDWGDAFLFALAVAVGLTPEMLPMIVSANLAKGATAMAKRKVVVKRLNAIQNFGSMDVLCTDKTGTLTQDKIILEHHVNAFGQRDDAVLSLAWLNSFHQSGMKNLMDQAVVQFSEQNPKFQVPFAYSKVDELPFDFVRRRLSIVVKDAAGDQLLVCKGAVEEMLSISTHVMEAGEALPLDDRRREALLALANDYNEDGFRVLVVATRNIPKALARQQYTTSDERNLVIQGFLTFLDPPKETAGPAIAALQQIGVAIKVLTGDNAVVTSKICRQVGLEPGQPLLGVEIEAMDDATLLRRVEERTVFAKLTPLQKSRVLKALQTNGHTVGFLGDGINDAPALRDADVGISVDSGTDIAKESADIILLEKSLMVLEEGVLKGRETFGNIMKYLNMTASSNFGNVFSVLVASA

SEQ ID NO: 144124 - protein, 355 aa, Unknown
  Bacterial polypetide isolated from the Sargasso Sea
IEYGVVASWFRFCLNFLGGILPVMMVGGSLWFWSSGSITAGDIAATGTIALRLSQMTGWVSYVLMALYSNLGEIEDGMKTLSPDHDLTDVENAKPLSVQAGKIEFNKLSFAYGGRVSSIDNVSLAISPGEKVGVVGASGAGKSTLVSILLRLYNPDKGSVKIDNQNLKLVSQESLRLQIGMVTQETALFNRSAMDNILYGNPSASKENVFKAAQQAEAHEFILSLKDHKGRTGYEAHLGEQGVKLSGGERQRIALARAILKDAPILVLDEATSALDSEVESAIQTALERVMEGKTVLAIAHRLSTLVKMDKIVVMDKGKVIEVGPHEFLVKKGGLYSRYWKRQSGGFIETSLAVE

SEQ ID NO: 144125 - protein, 215 aa, Unknown
  Bacterial polypetide isolated from the Sargasso Sea
LGESPENLSNEAKQRIGYVPQQPFGYEGFTVDKALELHRSFYPNWDTALEQDWLKRFDLDVTQAVQKLSVGQRQSLALIMAMAYRPTLLLLDEPVASLDPIARRQFMGDLFDLALESGSAVLFSSHITSDLERVASHVALIKKGELVLFKEIDALREEVKLLTISDDTQLPANYTILSQTGQAVLVDTQGNAEVVVGVQHEKSLNLEQLFMELHR

SEQ ID NO: 144126 - protein, 276 aa, Unknown
  Bacterial polypetide isolated from the Sargasso Sea
MVAVPEVLNRNAAAAPVRDGARIDVRHVSHQFALRGAALPVLQDVSFAVEPGEFVALLGPSGCGKSTLLRLVAGLDTPTQGSVQADGATIAGPDPSRVVVFQDPTLYPWRTVRGNVGIGPQAQRRGFIRRRGPQEDQARQRIDAALELVGLTEFAEAFPHQLSGGMAQRVALARALVNDPALLVLDEPFGKLDSLTRIRMQGELARLWQDARFSVLLVTHDVEEALLLAGRVIVFSERPARVVAQVHNDAPYPRHRDDPKLVALRREVLAQLGLDT

SEQ ID NO: 144127 - protein, 249 aa, Unknown
  Bacterial polypetide isolated from the Sargasso Sea
SFGKSEKELIEIRRHKMGMVFQNFGLLPHLNVIDNIAFPLKLQGLKEKDRLQKAARVIELVGLNGRENNFPMELSGGQQQRVGIARSLAVEPDVWFLDEPFSALDPLIRKQMQDEFLRIQSLQKKSVVFITHDFQEALRIADRMAIMRDGQIVQIGKPVDLILNPKDNYIRDFTKDVPWESVLKASDIIDKSQKILQKAKEVPFDMPVAKMLPLLSKKSVGVVVVDQAGKKLGMANAQSFVTALATAEN

SEQ ID NO: 144128 - protein, 286 aa, Unknown
  Bacterial polypetide isolated from the Sargasso Sea
VVMGLSGSGKSTLLRCISRLTDATGGKIFIEGQDLLELNNKELIELRRNKMGMVFQSFALLPHKTVVENIAFPLQIKGTNTEESINRAMEMVKLVGLDGRENYFPRELSGGQQQRVGIARSLAVEPDIWFLDEPFSALDPLIRKEMQDEFLRLQEKLQKTIMFITHDFDEALKLADRIAIMKDGIIEQLDTPANIVLNPATEYVRKFTEEVPREKVLIIEDVMDTSIKDNLGDLKVSKDEIIENVAEKILTQENLVGVVDSQNNIVGSIKPSKIIDTVFGGRKNGS

SEQ ID NO: 144129 - protein, 421 aa, Unknown
  Bacterial polypetide isolated from the Sargasso Sea
MITTLFFLAALMVGVPIGVCLCLSGAVYILSIGSPVLFQSFPMQMFGGVDSYGLIAIPLFILIGEIMNSGGITRRLVDLSMAFIGSVKGGLAYVNILANMLVSSIIGSATAQVAIMSQVMVPEMEKQGYDKTFAAGLTVYGGMLGPIIPPSVMFVVYSVLAQVAVGDMLIAGILPGVLLTLLFFVVIALMGFVYNYPRSEKRTLAQRARTVVQASPTLLIPIIIVGSILSGVANPTESAAVGALVSALVGRYVTKEFRFSAMPAILLRSAIYSAIVLFLVAAAAVFSWLLIYGKVPQMVAAWVQTVAHDPVTFLLLTNVILLVIGTVIDGIPGLIMTAPILLPIATEVYHIDPRHFGVVIVVNLVLGLMTPPVGLSFFVASAVTGAKPGKMFIVTLPFFIISCVALVMLSLFPSLSLGLLK

SEQ ID NO: 144130 - protein, 265 aa, Unknown
  Bacterial polypetide isolated from the Sargasso Sea
MNLVVSQSAPVIEFRSVSCRFISPDGKATIALRDFSMAVAKGEFVAIVGPTGCGKSTTLSMITGLLKPTTGEVRVMGAPVDGIDPRIGFVFQADAVFPWRSVLDNVAAGPLYRGRSKSAAHDEANEWLRRVGLEKFGKHYPHQLSGGMRKRVALAQTFINKPEILLMDEPFSALDMQTRTLMQDELLQLWSANSGSVVFVTHDLEEAIALADRVFVLSARPATLKKVYEIDLPRPRITSEVRYEPRFIEISRDIWHDLREEVQIA

SEQ ID NO: 144131 - protein, 359 aa, Unknown
  Bacterial polypetide isolated from the Sargasso Sea
MNLIGEKISYKPDEQFHLNDVSFNFKKGNLYTILGRTLSGKTTLLKTIAGLLNPDQGSISFEEKDFIKIPVWERNVAMVYQQFINYPHLNVYENITFPLEQRKLSPEQIKKDVDEALKTVGLVGFENRKIQELSGGQQQRVALARSLAKKAKILLLDEPLVNLDYKLREQLREEFKRIFSEGLSQDTILIYSTTDPQEVMELNGEVIVLDEGRVLQKGPAKEIFENPSNLKVAEISNDPPMNVLKGSKNSKNLNFENISLEIPNHFKNLEDKDYNFGIRASEIKLDENGEEFEIELAEISGSETLLHLKRGNSKIIALIEEVMNFKIHEKVKINFNANKFYAFGEDEKLVSSPYGGTNG

SEQ ID NO: 144132 - protein, 250 aa, Unknown
  Bacterial polypetide isolated from the Sargasso Sea
MTIKPKLVSSNNGLVVNKLRKTLSQKQIVRDVSLKLERGKTIGLLGPNGAGKTTTFYMIMGLIDCDGGEILLDDIHLTSLPMYKRAKLGIGFLPQQPSIFRGMSVEDNLLSILETQDLPKDQKQNMLEELLTEFSLTHLRRAMPHMLSGGERRRTEIARCLCSNPSIILMDEPTAGVDPIGIDDIKFLIKQLMNKNIGVLITDHNVREVLDICDYSYVMHSGEIIAEGESDIILGNREARKFYLGDSFKY

SEQ ID NO: 144133 - protein, 253 aa, Unknown
  Bacterial polypetide isolated from the Sargasso Sea
ILKMTIKPKLVSSNNGLVVNKLRKTLSEKQIVRDVSLKLERGKTIGLLGPNGAGKTTTFYMIMGLINADGGKITLDNRDLTKLPMYKRAKLGLGFLPQQPSIFRGMSVEDNLLSILETQNYLKDQKQNILEDLLTEFSLGHLRRAMPHMLSGGERRRTEIARCLCADPSIILMDEPTAGVDPIGIDDIKVLIRQLMNKNIGVLITDHNVREVLDICDYSYVMHAGEIIAQGESDKILGNREVRKFYLGDSFRV

SEQ ID NO: 144134 - protein, 232 aa, Unknown
  Bacterial polypetide isolated from the Sargasso Sea
MISLQQVSKDFGVKTLLARVNLEVGPRERLGLIGTNGSGKSTLLRVMAGLEPPGEGRVQINPRSRVIYVDQNPALDPERTVLEQVFAGSGEKMQLVKRYEGLTRQLEANPTDASLLGELSGLSSRMDELKAWELERQCQEVLSRLGISDHHRKVGELSGGYRKRLALASALVAEPDGLLLDEPTNHLDALATEWLQGFLQRFSGALVLITHDHYFLERVTNTIVELDSGDYA

SEQ ID NO: 144135 - protein, 453 aa, Unknown
  Bacterial polypetide isolated from the Sargasso Sea
GNGEFGIKNLNISIPRGKTISIVGESGSGKTLTALSILRLNPNTSIISNDSKIIFSGRDILKIDKKELNAIRGNEISMIFQEPLSSLNPLHTVEKQISEALILHTTKKSQDIRGAVIDLMHKVRINEPETKLTRYPHQLSGGERQRVMIAMALSNNPKLLIADEPTTALDVTVQFEILKLLKTLQSELDLTILFITHDLSIVKNFTDYVYVMQNGCLVEEGSTDSIFSKPSDAYTKRLVNARNLVGKRRKRNKSLEILKLNSLSAQYEQNKLFRKTRVNKVVSNINLSINLGETIGLVGESGSGKTTIGLSILRLIKSDGNIIFMGDDLARKSFKALKRIRKDLQIVFQDPFGSLSPRLTVEQIIEEGLIAQKIELDANGRKERVLEILKDVGLEPDQLNRYPHEFSGGQRQRIAIARAIILRPKLLVLDEPTSSLDATVQLQILNLLKKITR

SEQ ID NO: 144136 - protein, 231 aa, Unknown
  Bacterial polypetide isolated from the Sargasso Sea
MIKVDDIDFYYGSSQILYNVSLNAEDNEITCLMGSNGVGKTSLLKFLSGIYPANKGNYYFDGSNVTNTNSYTLAKKGIGYVPQGRLIFPLLSVKENLETGFACLDKEEHFIPDKIFELFPVLKQMIGRRGGDLSGGQQQQLAIARALISKPKMLLMDEPTEGIQPNIIQQIGEVIKYLKSDQGMTIFLVEQYFDFAFDLADHIYVMKRGRIIKDVRKDSLNKSDFKKEISI

SEQ ID NO: 144137 - protein, 268 aa, Unknown
  Bacterial polypetide isolated from the Sargasso Sea
MNTSVERNFKIGDPILEVNNISLSFGGVNAITDTSFNVLEHEVRAIIGPNGAGKSSMLNCINGIYKPQQGSIAFKGNTLSKITPNIIAQMGISRTFQNLALFKRMSAIDNILVGRKLHSKANFLDVALQLPKARREEKVNLKKCEEIVEFLEIEKIKDTPVGKLPYGIQKRVELGRALATEASLLLLDEPMAGMNVEEKREMCRFILEVNEEYGTTMVLIEHDMGVVMDISDRVVVLDYGKIIGDGPPHEVRANQNVIDAYLGVSHGE

SEQ ID NO: 144138 - protein, 228 aa, Unknown
  Bacterial polypetide isolated from the Sargasso Sea
MSDKVIKCEAVYKIFGAGAKKMLQDVSGNVDAKTFQDAGCIVGVNNASFEVSKGEMLVVMGLSGSGKSTLLRCISRLTDATAGKIFIEGQDLLSLKNKELIELRRSKMGMVFQSFALLPHKTVLENIAFPLQIKGMKTEDSISKAMEMVKLVGLEGRENYFPRELSGGQQQRVGIARSLAVEPDIWFLDEPFSALDPLIRKEMQDEFFRLQGALRKTIMFVTHDFDEA

SEQ ID NO: 144139 - protein, 634 aa, Unknown
  Bacterial polypetide isolated from the Sargasso Sea
MNKSNLIIKNKNPKSVVEVKDLKVQFQLKDKIVKAVDGISFNINKGETIAIVGESGSGKSVTALSLMRLTDYSGGRIVAGEINLQSKNNLNLNLTRLDQEKMRDIRGNDISMIFQEPMTSLNPVFTIGMQITETIIKHQGKTKKEAFEIALEMIKLVRIPEPEKRLNQYPHELSGGMRQRVMIAMALSCKPSLLIADEPTTALDVTIQAQILDLIKMLQRDIGMSVMFITHDMGVVAEVADRVVVMFAGKKVEEGTAVEIFQNPKHPYTRSLLAAVPKLGSMVGKKLPAKFINLDVKSSDNPKNKEKISTKKVVEMKDTVNRTSSPLLEVKGLTTRFLIKQDFGRAGGNIHAVENISFSLQPGETLGLVGESGCGKSTTGRSIIGLTSPTRGEVFFEGVDLTDLNNKEMIQYRKKMQMIFQDPFASLNPRMTVGQIIAEPIIVHGLETKLGSNSRVIKLLNRVGLDEQYYSRYPHELSGGQRQRIGIARALALEPKLIIADEAVSALDVSIQAQVVNLMMELQEEFGLTYLFISHDMAVIERVSHRIGVMYLGEIVEIGLRSQIFENPQHPYTKKLMAAVPIADPTKRKKKLNLMNDEIPSLLKPIGYEPEYVQMIKLGEDHYVKPFDGMQVQN

SEQ ID NO: 144140 - protein, 217 aa, Unknown
  Bacterial polypetide isolated from the Sargasso Sea
KILDKIKCNIYNESIIAVLGPNGAGKSLFLKTINGLTAVESGKIKFNSREINDQIRKEIALVFQKPTLLRRTVLENMQFVLEKKNKLSNLEIMNHLQRVGLDTYKDKPARLLSGGEQQRLSLARALLINPSLLLLDEPTANLDPYSLNLIEEIILDENKKGKTIILTTHDMGQAKRLAKEILFFDKGKLLEQTKAINFFTKPKTKEAQSYINGKILL

SEQ ID NO: 144141 - protein, 321 aa, Unknown
  Bacterial polypetide isolated from the Sargasso Sea
NSKQEALEKYNSVIGVSNVSFDVKKGEIFCVMGLSGSGKSTLVRHINRLLEPTSGKILINNQDVMQFDKEDLQNLRNKKIGMVFQNFALMPHRSVLDNIAMPLEIRGVSKNDRLDAANNILNIVELQGWGNKYAHELSGGMQQRVGLARALAADPEFLLMDEPFSALDPLIRRQLQSEFIKLSKQMKKTTVFITHDLDEAVRVGHRIAIMRDGEVVQIGTPEEIVVNPSDEYVADFVKGISRLKVVQAKTIMQSIEEYKKTFGDNLRNNERVNENDILSKLIETSVTEDKPIIVTNNDNLEVGIITQSDLLKAVVEGNDSE

SEQ ID NO: 144142 - protein, 283 aa, Unknown
  Bacterial polypetide isolated from the Sargasso Sea
MGLSGSGKSTLLRCISRLTDATGGKIFIEGQDLLQLNNKELIDLRRNKMGMVFQSFALLPHKTVVENIAFPLQIKGVKTEESIKKAMDMVKLVGLDGRENYFPRELSGGQQQRVGIARSLAVEPDIWFLDEPFSALDPLIRKEMQDEFLRLQDKLQKTIMFITHDFDEALKLADRIAIMKDGIIEQLDTPANIVLNPATEYVRKFTEEVPREKVLLIKDVMDLSKDDLGDLQVSKDEIIENVAEKILTQEKSVAVVNNNNQIIGSINPTKIINTVFGGRKNNN

SEQ ID NO: 144143 - protein, 302 aa, Unknown
  Bacterial polypetide isolated from the Sargasso Sea
MILIQCQGLSKHYGSKKALNNVNLTLEAGAPIALVGPNGAGKTTLFSLLCGYLTPSAGTVRILGEAPNSPALLGQIAALPQDATLDPNLTIISQLSFFARLQGMDSKQANQEALRVLNLVDLAEVAQQKPPSLSHGMSKRVAIAQALIGSPKLVLLDEPTAGLDPANAKKIRELVRTLSPSTTFVISSHNLDELEKLCDQVLYLDKGELGQSISMRSSNSGSDYLTLTMESCDSETLIQAVGQIAGVVNITSKQAHVFVIQLDDTANRHYEFETALLALFKQQHWQYKMLLKGRTLEETLFS

SEQ ID NO: 144144 - protein, 330 aa, Unknown
  Bacterial polypetide isolated from the Sargasso Sea
MAKVTLKGLSHSYLKTQSSDADWAIRGVDIDWNDGGAYALLGPSGCGKTTLLNIISGLITPTKGDILFDDKVVSGLNPVERNIAQIFQFPVIYDTMTVYDNLAFPLRNRKIPEEEIKAKVHEIAEMLELSSTLNNRASGLTADGKQKISLGRGLVRSDVNAIMFDEPLTVIDPHLKWILRSKLKELHQKINRTMIYVTHDQTEALTFADQVVVMHEGQIVQTGTPVDLFEKPKHTFVGYFIGSPGMNVLPCQIKGNDVIVNGKKIETHQQIKKNNFSKTEVGVRPEFISFSNEGIPVKVLSVSNTGRHKIVDTESETGKIKIIAKSNEDI

SEQ ID NO: 144145 - protein, 153 aa, Unknown
  Bacterial polypetide isolated from the Sargasso Sea
MSFLQFKEITKIYPNGTLAVNNTSLEINNGEFMVFVGPSGCGKSTMLRMIAGLEDITRGEIFLDGRLINKINPSERDVAMVFQNYALYPHMNVYKNLAYGLKNRGETKDEIERKVSEVSKLLKINQYLLRKPAMLSGGQRQRVAMGRANSKKP

SEQ ID NO: 144146 - protein, 238 aa, Unknown
  Bacterial polypetide isolated from the Sargasso Sea
TLNPSMTVGRQIVRALEVFKYGESDDERHDRMFQLLDLVKLPRAFATRMPRQLSGGQKQRVGIARAFAGGARIVVADEPVSALDVSVQAAVTDLLMEIQRKEKTTLLFISHDLSIVRYLSDRVMVMYLGHVVELGTTDQVFSPPYHPYTEALLSAVPIADTSIEKKHIVLEGDIPSAMNPPSGCPFQTRCRWKKDVPGSLCETEIPPIKTLDGGHQIKCHLAKSKLEKMEPVIKIAAE

SEQ ID NO: 144147 - protein, 357 aa, Unknown
  Bacterial polypetide isolated from the Sargasso Sea
MAKIDLSKVSHSYNPNDPNPVFALNPFSMTWENGNRYAILGPSGCGKTTMLNIVSGLVRPSAGRILFDDKDVTDLKTEDRNIAQVFQFPVIYNTMTVYENLAFPLKCRDFSKSKTDERVNSVAETLNLKSFLNSPARKLTADQKQLISLGRGLVREDVAAVLMDEPLTVIDPDLKFRLRRNLKEINEQYKTTLVYVTHDQNEAMTFADNIIVMSEGEVVQTGSPKELFERPNTTFVGYFIGSPAMNLFESEASSNDSVKINDTLIKTHTNLSNLKTKNIKLGIRSEFIKIAQNQNENLIDVNVEKVEDLGNYKLITAKMGNFTIKSKVTRETEIPSQNVKLHVPAEKCCVYEDNKLI

SEQ ID NO: 144148 - protein, 242 aa, Unknown
  Bacterial polypetide isolated from the Sargasso Sea
MTIPLEIIDLSKTYDTKEAVRNISFKVNENEIIGILGPNGCGKTTTIGMILGLLKPTKGKVLINGVEIEKQRVKLLNELNFISPYIELPKKLTVKQNLEVYGRLYDVKELGIKIDYLSEKLRLNEFINKITGELSSGQKNRVSLAKSIINDPSVLLLDEPTASLDPETGDFVRSFLEEYQKEKKTSILLASHNMAEVERLCSSVLMMNKGSIIDQGTPGELIKKHGRRNMEEVFLKLTRDLI

SEQ ID NO: 144149 - protein, 206 aa, Unknown
  Bacterial polypetide isolated from the Sargasso Sea
MSEPVIKCENVYKIFGANAEKMLKDSNGNVDAKTFQENGCIVGVNNASFEVSKGEMLVVMGLSGSGKSTLLRCISRLTDATGGKIFIEGHDLLQLNNKDLIDLRRNKMGMVFQSFALLPHKTVVENIAFPLQIKGVKTEESISKAMDMVKLVGLGGRENYFPRELSGGQQQRVGIARSLAVEPDIWFLDEPFSALDPLIEKKCKMS

SEQ ID NO: 144150 - protein, 272 aa, Unknown
  Bacterial polypetide isolated from the Sargasso Sea
MNALSVKNLSKKYKNGVEALQSVSFDVQKGDFFALLGPNGAGKTTAIGIITSLVNKSSGSIEVFGHNLDKELAKAKSCIGVVPQEVNLNLFDFNFNILVNQAGFYGIPRAEGKKRAEQFLKKMQLWEKRKTDARSLSGGMKRRLMVARALVNQPKLLLLDEPTAGVDIETRRMMWDFLRDLNASGTTIILTTHYLEEAEQLCNKVAIIDEGKIIENDLMQNVLKKLKTEVFILNTEKPLHQAPDIDGYVTSLKSPQEIEITVSQEQGVNDAF

SEQ ID NO: 144151 - protein, 389 aa, Unknown
  Bacterial polypetide isolated from the Sargasso Sea
VELEKKRFESNKSRYSIINEVFGGVKEVKIGGLEKIYVDRFAKPSLNYARTQAAATALRQLPRFALEAIAFGAILLVILYLISQRDGFNTALPIISLYAFAGYRLMPAVQLIYSSFTQLTFVGPALNKLHDDIKNLSSLTLDESQNTLPFNKKITLKNIHYSYPNATRTTLNDISISIAAKTTVGLVGPTGCGKTTTVDILLGLLQAQKGTLEVDGQVITKKNIRAWQRSIGYVPQNIYLADDTVASNIAFGQDAKYVNNEDIEKAAKIANLHDFVTNELPNKYQTTIGERGIRLSGGQRQRIGIARALYHNPKVLILDEATNSLDGQTEQAVMDAVNKLSKDITIILIAHRLNTLNHCDIIFKLENGIVKNFGTFNELIENNKNHITT

SEQ ID NO: 144152 - protein, 240 aa, Unknown
  Bacterial polypetide isolated from the Sargasso Sea
MKNSIEVINLKKYYGEKEAVKSLNFKVQSNEIMGLLGPNGSGKTTTIGMILGLLKPSSGEILINGLKLEDKKYEILHKINFISPYIELPKKLTVKQNLIVYGKLYSVKNIKQKIDYLVNKLRLEDLLNRVTGELSSGQKNRISLAKAIINDPNVLLLDEPTASLDPETGDFVRSFLEKYKKENKISILLASHNMDEVTRLCSSIMMMKNGQIIDQGKPSDLIEKHGRKNLEEVFLKLVRN

SEQ ID NO: 144153 - protein, 393 aa, Unknown
  Bacterial polypetide isolated from the Sargasso Sea
MSDDKKIIFSMVNVSKQTPQGKQIIKNIHLSFYYGAKIGILGLNGAGKSTVMKIIAGVENDYQGDVVFSPGYTVGYLPQEPILDDSKTVKEIVKEGVQEVVDLLKEYDEINNKFMDEEIMNDADKMNTLIDQQGKVQEKIDQLDAWDLDSKLDLAMNALRTPEGETSVKNLSGGERRRVALCRLLLKQPDILLLDEPTNHLDAESVHWLEQHLQNYKGTVIAVTHDRYFLDNVAGWILELDRGEGIPFKGNYSSWLEQKSKRLAQEEKSESKRRKALERELEWVRKGAKGRQAKGKARLNNYENMRNESVKEKETKIEIPIPNGPRLGNEVIEAQSISKGYDGNLLYEDLNFKLPPAGIVGIIGPNGAGKTTLFKMIMNEETPDSGSFKVGET

SEQ ID NO: 144154 - protein, 334 aa, Unknown
  Bacterial polypetide isolated from the Sargasso Sea
MSESLNNSNNTPVIQCESVYKIFGNNASKLLENSNGQVDAKTFQEAGCIVGVNNASFGVNKGEMMVVMGLSGSGKSTLLRCISKLTDATAGKIFIDGEDLLAMSSKQLIELRRNKMGMVFQSFALLPHKTVIENIAFPLQVKGTNTRESMAKALEMVELVGLKGRENYFPRELSGGQQQRVGIARSLAVEPDIWFLDEPFSALDPLIRKEMQDEFLRLQAVLNKTIMFVTHDFDEALRLADRIAIMKDGIIEQLDTPDNIVLNPATEYVKKFTEDVPREKVLKIESIMDAYDSNNSSSTKVSKDAIIETLAESILNSKEILTVVDNNNEIVGSL

SEQ ID NO: 144155 - protein, 233 aa, Unknown
  Bacterial polypetide isolated from the Sargasso Sea
AGLIEGDTNGGRIDVNGRCIQKDGRLDSRIRVQRAEIGFIFQQFNLIDRLSVLTNVLCGFLGRAPRWRTTFLRFTKAERKRAIECLQRVGIAAQATQRASTLSGGQQQRAAIARTLAQGARIVLADEPISSLDPASSKNVMEHLAAINRDDRVTVVVSLHQVDYAVRYCPRTIALRDGEIVFDGASSALTPALLSDLYGDASIELFGDPEEIENPNIVPIPTKDSLQPKAVPA

SEQ ID NO: 144156 - protein, 306 aa, Unknown
  Bacterial polypetide isolated from the Sargasso Sea
NGCIVGVNNASFEVSKGEMLVVMGLSGSGKSTLLRCISRLTDATDGKIFIEGQDLLSLKNKELIELRRNKMGMVFQSFALLPHKTVLENIAFPLQIKGIKTEDSINKAMDMVKLVGLDGRQNYFPRELSGGQQQRVGIARSLAVEPDIWFLDEPFSALDPLIRKEMQDEFLRLQEKLKKTIMFITHDFDEALKLADRIAIMKDGIIEQLDTPAKIVLSPATEYVKKFTEEVPREKVLKIEDVMEKPNNDNLSDLKVSKNEIIEIVAEKILSQEKSVAVTDENNKIVGTVHPSKIIHTVFGGRKNNE

SEQ ID NO: 144157 - protein, 344 aa, Unknown
  Bacterial polypetide isolated from the Sargasso Sea
MTFDNPVIKCESVFKIFGSNPEKMLEKNSSYVDSKTFQEAGYIVGVNNASFEVAMGEILVVMGLSGSGKSTLLRCISRLTEATSGKIYIDGQDLLSLKNKDLIELRRNKMGMVFQSFALLPHKTVIENIAFPLQIKGMKTSDSISKSLEMAKLVGLEGRENYFPRELSGGQQQRVGIARSLAVEPDIWFLDEPFSALDPLIRKEMQDEFLRLQSSLKKTIMFVTHDFDEALKLADRIAIMKDGIIEQLDTPANIVLNPATEYVKKFTQEVPREKVLKIESVMDNKDQDSNLSDFTVSKDSIIENVAEKILGQEKSVAVVDDDNNNVGIINPAKIIRILFGEKKS

SEQ ID NO: 144158 - protein, 368 aa, Unknown
  Bacterial polypetide isolated from the Sargasso Sea
MINLTDLSMNFGNKSLFENSSLTFDPGKSYGIVGANGSGKSTLLRLVSGDEKPISGKISLPSKINVGVLRQNHFQFENFIVIDVVLLGKPELCEARREKDNILKSEKFDSETGIRLGQLEEIIAEEDGYVAEPFAAEILSGLGVDEQYHTGPMNALSGGFKLRVLLAQLLFQQPDLLLLDEPTNHLDIISIRWLENYLNSQFKGTLLVISHDRNFLNAVASHIVDIDYEELRLYSGNYEQFLESKLLAENQKMKELETFKRKSAEMQAFIDRFRAKATKARQAQSRVKQLDKMEIPEVKRSSRISPNFCFEQSRQSGRTVLTVNNICKSFDDKSVLNHISFEIQRGEKVAIIGPNGIGKSTLLKIFLI

SEQ ID NO: 144159 - protein, 232 aa, Unknown
  Bacterial polypetide isolated from the Sargasso Sea
MSEPVIKCENVYKIFGANAQKMLQDSNGNVDAKIFQENGCIVGVNNASFEVSKGEMLVVMGLSGSGKSTLLRCISRLTDATGGKIFIEGQDLLQLNNKDLIDLRRNKMGMVFQSFALLPHKTVVENIAFPLQIKGVKTEDSISKAMDMVKLVGLDGRENYFPRELSGGQQQRVGIARSLAVEPDIWFLDEPFSALDPLIRKEMQDEFLRLQEKLQKTIMFITHDFDEALKLA

SEQ ID NO: 144160 - protein, 505 aa, Unknown
  Bacterial polypetide isolated from the Sargasso Sea
MPIFAFIKPYKWMVIAALGALLVTAGVNLSLGQGVKFVIDHGFIAGSQAQLQQAVLVLIGLISLLAVGTFSRFYLMSWIGERVSNDIRKAVFNRIVTLHPSYFEENRSGELMSRLTTDTTLLQSIIGSSFSMALRSALMLVGGLVMLLITNLKLTLVVVACVPLVLVPMMVFGKKVRKLASSSQDAIADISTYAGEIIQNIKVVQSYSHETQEQHAFALETEKAFNVAKSRIKQRSFLIAAVIFLTFSAISAMLWVGGSDVLAGTMTGGELGAFVFYAIMVAMSVATVAEVYGELQRAAGAAARLLELLAVKSEIENPENPQDAQLQNNASLPAISLENISFNYPSRPDVSALNKISLSISQGQTVAIVGPSGAGKTTLFELLQRFYDPASGAIKFHDIDIKSLSLNTLRDKMGMVAQNPILFSSDVMHNIRYGNPNATDEQVYAAAKHAHADEFIKQLPQGYNSFLGEQGVRLSGGQKQRIVLARAILKDPEILLLDEATSALD

SEQ ID NO: 144161 - protein, 190 aa, Unknown
  Bacterial polypetide isolated from the Sargasso Sea
MIEVINLSKSYQKNKAVKNINFNIGENEIIGLLGPNGCGKTTTIAMILGLLKPSKGKILINKKNIENHRIELLHKMNFISPYIELPKKLTVKQNLTVYAKLYNVENINERIDYLSSALKLDKLLNNLTGELSSGQKNRVSLAKSLINNPSVLLLDEPTASLDPETGNFIRSFLEDYTKQKKVSILLASHN

SEQ ID NO: 144162 - protein, 240 aa, Unknown
  Bacterial polypetide isolated from the Sargasso Sea
MQNSIKVINLKKSYGTKEAVKNISFEIKENEIIGLLGPNGSGKTTTIGMILGLLKPTSGEVLINGIKIEKNPIEILQKINFISPYIELPKKLTVKQNLIVYGKLYSVKNLNEKIDYLVGKLRLENLLNRVTGELSSGQKNRISLAKAIINDPNVLLLDEPTASLDPEIGDFVRTFLENYKKEKKVSILLASHNMDEVTRLCSSIMMMKNGLIIDEGKPNDLIKKHGRKNLEEVFLKLARN

SEQ ID NO: 144163 - protein, 308 aa, Unknown
  Bacterial polypetide isolated from the Sargasso Sea
MHALSIKNLSKKYNSGVQALKSVSFDVEKGDFFALLGPNGAGKTTAIGIITSLVNKSSGSIEVFGYDIDKELAKAKSCIGVVPQEVNLNLFDYNFNILVNQAGFYGITRNEGKKRAEQYLKKMQLWDKRKTDARSLSGGMKRRLMVARALVNRPKLLLLDEPTAGVDIETRRMMWDFLRELNQSGTTIILTTHYLEEAEQLCNKVAIIDEGEIIENDSMQNVLKKLKTEVFILNIEKPLNEKPIIEDYSIDLKSPHEIEITVAQDQGINSAFISLEEQGIKVLSLRNKNSRLEELFLDLTKGQTGVHS

SEQ ID NO: 144164 - protein, 347 aa, Unknown
  Bacterial polypetide isolated from the Sargasso Sea
ICKKGLYTIDGECLFESSNLLKKNNRELEKIRGRKIAMIPQNAGQSLTPNLKIGYQIDEALRLHTNLKKVDRDKRISELLNKVRLPSPETIALRYPHELSGGQQQRVAVAMALAGNPELLLLDEPTTGLDVTTQAHVLELLNFIAKDTGTSMVYVSHDLGAIAQVSDRIIVMYSGEIVLEGPSRSILKKPIHPYTYGLLKSIPKLSLAGLPQSMPGSQPQPGSILSGCSFFDRCNLAEDRCKNNSPQLEYINDLETSVRCFNYKSLKDEKDIANQARRNETIIKENEILNLTDVSISYAKQKLIDQILNKTVDSNPTVKDINININRGETIALVGESGKWKSTILNQ

SEQ ID NO: 144165 - protein, 343 aa, Unknown
  Bacterial polypetide isolated from the Sargasso Sea
MSEAVIKCEAVYKIFGENAKKMLQDSNGNVDAKTFQENGCIVGVNNASFEVAKGEMLVVMGLSGSGKSTLLRCISRLTDATGGKIFIEGQDLLNLNNKELIELRRNKMGMVFQSFALLPHKTVVENIAFPLQIKGIKTEESINKAMEMVKLVGLDGRENYFPRELSGGQQQRVGIARSLAVEPDIWFLDEPFSALDPLIRKEMQDEFLRLQEKLQKTIMFITHDFDEALKLADRIAIMKDGIIEQLDTPANIVLNPATEYVRKFTEEVPREKVLLIEDVMDESISNNLGDVKVSKDEIIENVAEKILTQEKSVAVIDENNKTVGSINPTKIINTVFGGRKNGK

SEQ ID NO: 144166 - protein, 323 aa, Unknown
  Bacterial polypetide isolated from the Sargasso Sea
MDSSNSAIKVENVWKVFGNTSPEALDAIQNKGISKTQALEEYNSVIGVSDVSFDVKQGEIFCVMGLSGSGKSTLVRHINRLLEPTSGKILINDQDVMKMDRQNLQELRNKKIGMVFQNFALMPHRSVVDNIAMPLEIRGVSKNDRLDAANKILEIVELQGWGNKFAHELSGGMQQRVGLARALAANPEFLLMDEPFSALDPLIRRQLQSEFIKLSKQMKKTTVFITHDLDEAVRVGHRIAIMRDGKVIQIGTPEEIVVSPADEYVADFVKGISRLKVVQAKTIMQTIENYESKNGKLAEDLQIVDEHELLSKLIEVQNLNRNQ

SEQ ID NO: 144167 - protein, 240 aa, Unknown
  Bacterial polypetide isolated from the Sargasso Sea
MQNSIKVINLKKSYGKKEAVKNINFEIKENEIIGLLGPNGSGKTTTIGMILGLLKPTSGEVLINGLKIEENPNEILQKINFISPYIELPKKLTVKQNLIVYGKLYSVKNLNDKIDYLVSKLRLENLLNRVTGELSSGQKNRISLAKAIINDPRVLLLDEPTASLDPEIGDFVRTFLENYRKEKKVSILLASHNMDEVTRLCSSIMMMKNGLIIDQGKPFDLIKKHGRKNLEEVFLKLVRN

SEQ ID NO: 144168 - protein, 336 aa, Unknown
  Bacterial polypetide isolated from the Sargasso Sea
MSKSPKLVCKNVWKLYGDNPKEFLQSHNNNPDKKTIESAGYIQAIRNASLEVYENEILVIMGLSGSGKSTLVRCMSRLVDPTIGEIFFENIDMGKLTKNELIEIRRHKMGMVFQHFALFPHRTVIENIAFPLEVQGINKKEREKSASEIIELVGLQGRENYFPKELSGGQQQRVGIGRSLAVKPELWFLDEPFSALDPLIRKEMQNEFLKIQNSLKKTIIFITHDFDEAIKLADRIIIMNEGRIVQIGSPEDLIMKPADDYVKEFTEDLPRERLLSVKSIMDDKKVTNNLVKVYEDEKIFSILEKVLSEGSVSVIDKSDNIVGSLSKETVSKFINN

SEQ ID NO: 144169 - protein, 172 aa, Unknown
  Bacterial polypetide isolated from the Sargasso Sea
SLLRMISGLWEPDQGLIKKPKIGELLFIPQKPYMLLGSLREQLCYPTEVKKFSDEHLTSVLHEVNLQTLVDRYPNLDIKQDWPRILSLGEQQRLAFARLLLNSPRFAVLDEATSALDINTEKKLYSLLKERELSLISVGHRPSLKDFHENILELNGQGDWKLLTSDKYNFKD

SEQ ID NO: 144170 - protein, 332 aa, Unknown
  Bacterial polypetide isolated from the Sargasso Sea
MSENNNPDALLEVIHLTKYFPIEEGFLRKQVGAVKAVDDVSLYINKGETFGLVGESGCGKTTLGRCIVRAIDSTSGSIYLKLDTGETLDLSRMTNKELREVRKHFHMIFQDPYGSLDPRMTILDIVAEPIRNNNLATGDEVIEMVKSLLNDVGLEIKHLNRYPHAFSGGQRQRIGIARSLAPRPSLIVCDEPVSALDVSIQAQILNLLEELQEQYNLTYLFIAHDLAVVEHIADRIGVMYVGKLVEMASTADLYSQPLHPYTEALLSAVPSTDPDIKMERIILPGEIADPSSPPTGCYFHPRCPYAQELCAEETPQWKEVAPAHYVACHYAE

SEQ ID NO: 144171 - protein, 215 aa, Unknown
  Bacterial polypetide isolated from the Sargasso Sea
MAKITLKDLSHSYLEKQQSNSDWALRDVNIDWKDGGAYALLGPSGCGKTTLLNIVSGLLKPTKGNVLFNDKDMTLLNPVERDIAQIFQFPVIYDTMTVYENLAFPLKNRNLSDAEVALKVKEIAEMLELTPTLNNRASGLTADGKQKISLGRGLVRSDVNVIMFDEPLTVIDPHLKWVLRSKLKELHQKINRTMIYVTHDQTEALTFADQVVVMH

SEQ ID NO: 144172 - protein, 300 aa, Unknown
  Bacterial polypetide isolated from the Sargasso Sea
MSDYNGPILEIENLSISFFTRLREIPAVMDFSVAVQPGEAVGLVGESGCGKSTVALGIMQDLGVNGKIVDGLIKFKGQDLGKLSPDVLRDIRGNEIAMIYQEPMASLNPAMKIANQLIEVPMIHEGISKDEAYKRALEVVNDVKLPDPERILKSFPHQLSGGQQQRIVIAMALMSKPSLLILDEPTTALDVTVEAAVVDLVKDLGKKYGTSMLFISHNLGLVLETCDRICVMYSGEAVETGSIKDVFNQMQHPYTQALFRSIPLPGADKNARPLVAIPGNFPLPHERPKGCNFGPRCTYF

SEQ ID NO: 144173 - protein, 343 aa, Unknown
  Bacterial polypetide isolated from the Sargasso Sea
MSETVIKCESVYKIFGENAKKMLEESNGNVDAKTFQEKGCIVGVNNASFEVAKGEMLVVMGLSGSGKSTLLRCISRLTDATGGKIFIEGQDLLELNNKELIELRRNKMGMVFQSFALLPHKTVVENIAFPLQIKGTNTEDSINRAMEMVKLVGLDGRENYFPRELSGGQQQRVGIARSLAVEPDIWFLDEPFSALDPLIRKEMQDEFLRLQEKLQKTIMFITHDFDEALKLADRIAIMKDGIIEQLDTPANIVLNPATEYVRKFTEEVPREKVLIIEDVMDASSKDNLGDLKVSKDEIIENVAEKILTQEKLVGVVDSNNNIVGSIKPSKIIDTVFGGRKNGS

SEQ ID NO: 144174 - protein, 343 aa, Unknown
  Bacterial polypetide isolated from the Sargasso Sea
MSETVIKCESVYKIFGENAKKMLEESNGNVDAKTFQEKGCIVGVNNASFEVAKGEMLVVMGLSGSGKSTLLRCISRLTDATGGKIFIEGQDLLELNNKELIELRRSKMGMVFQSFALLPHKTVVENIAFPLQIKGTKTEDSINRAMEMVKLVGLDGRENYFPRELSGGQQQRVGIARSLAVEPDIWFLDEPFSALDPLIRKEMQDEFLRLQEKLQKTIMFITHDFDEALKLADRIAIMKDGIIEQLDTPANIVLNPATEYVRKFTEEVPREKVLVIEDVMDTTSNDNLGDLKVLKDEIIENVAEKILTQEKIVAVVDSENNIVGSIKPSKIIDTVFGGRKNGS

SEQ ID NO: 144175 - protein, 343 aa, Unknown
  Bacterial polypetide isolated from the Sargasso Sea
MSDAVIKCESVYKIFGANAKKMLQDANGNVDAQTFQKNGCIVGVNNASFEVSKGEMLVVMGLSGSGKSTLLRCISRLTDATDGKIYIEGQDLLSLKDKELIELRRSKMGMVFQSFALLPHKTVVENIAFPLQIKGIKTEDSISKAMDMVKLVGLEGRENYFPRELSGGQQQRVGIARSLAVEPDIWFLDEPFSALDPLIRKEMQDEFLRLQEKLKKTIMFITHDFDEALKLADRIAIMKDGIIEQLDTPANIVLNPATEYVKKFTEEVPREKVLIIEDVMDAPTTENLSDIKVSKDEIIENVAEKILTQEKSVNVIDENNKIVGTVRPSKIIHTVFGGRKNNS

SEQ ID NO: 144176 - protein, 228 aa, Unknown
  Bacterial polypetide isolated from the Sargasso Sea
MLKLNFSLKESYLTISTNISLEPNKIYAVVGPSGAGKSTFLNLISGFASISSGSIIWNGQEISNLPPAKRNVSILFQDNNLFPHLSVWRNLALAVTHWPKISRNNEEKLKAVMSEVGILGLESRKPSQLSGGQQSRVALARVLLQKNKILLLDEPFSALGPSLKDQMLELIKKISKNKKLLVLMVTHEPADAKKVASQTLVVKDKKVHPPLSTEKALDPINGPLADYL

SEQ ID NO: 144177 - protein, 191 aa, Unknown
  Bacterial polypetide isolated from the Sargasso Sea
MTSTPVIKCESLYKIFGPNAEKMLKDSNGKVDAKTFQDAGCIVGVNNASFEVLKGEMLVVMGLSGSGKSTLLRCISRLTDATGGKIYIEGQDLLAMNDKQLIELRRSKMGMVFQSFALLPHKTVLENIAFPLQIKGSETEDSIKKAMEMVELVGLKGRENYFPRELSGGQQQRVGIARSLAVEPRYMVFRR

SEQ ID NO: 144178 - protein, 338 aa, Unknown
  Bacterial polypetide isolated from the Sargasso Sea
MSPTISCDSVYKIFGANANKLLADSNGSVDAKQFQEAGCIVGVNNASFDVEKGEMLVVMGLSGSGKSTLLRCISRLTDATAGKILVDGEDICLMNNKQLVELRREKMGMVFQNFALLPHKTVIENIAFPLQVKGVSTENSMYKALEMVELVGLKGRENYFPRELSGGQQQRVGIARSLAVEPDIWFLDEPFSALDPLIRKEMQDEFLRLQGVLNKTIMFVTHDFDEALRLADRIAIMKDGIIEQLDTPGNIVLNPATDYVKKFTEDVPREKVLKIESIMDPKDTNASDNLTVSKDDIIESVAEKILNSKEIIKVIDPKDSSEVGSINPSKVIKVLFGG

SEQ ID NO: 144179 - protein, 267 aa, Unknown
  Bacterial polypetide isolated from the Sargasso Sea
MQNKQLVPDQGVSAAIPELKGNIPPAADQPALLDPLLISMRDLQVRYGDKAVLNGINWDIRAGEFWQLHGPNGAGKSTLVQLINGESTKGYGQQLYLFGRKKGSGESVWDIKKNIGCFTRVMVQNFSSHDSVENMLISGFFDSVGLYQQPSAIHQRLAAQWLELVGMTAYAKLPFAHLGAGQQRLILAMRAMVKHPPLLLLDEPLVGLDDEESAVLIALINRMASARTSAIVYISHRAEMGLTADAVYELMPQVTGSVGRIAVVSRF

SEQ ID NO: 144180 - protein, 239 aa, Unknown
  Bacterial polypetide isolated from the Sargasso Sea
MLKISNVETFYGKIQALRGVDLDVNDGEIVSLIGSNGAGKSTLLMTISGVNKAKRGNIVFNGENIENRQPHKIVDMGICQVPEGRRIFSRLTVEENLRLGAHANEKGKYFENDIKEVYDLFPVLSDRKTQRGGTLSGGEQQMLAIGRALMSKPKVLLLDEPSLGIAPKLVNQIFVSIKNINKEKNVTIFLVEQNAKKALELADRAYVLVNGKVTIKGPGQELLKNKDIQAAYLEGGAKN

SEQ ID NO: 144181 - protein, 360 aa, Unknown
  Bacterial polypetide isolated from the Sargasso Sea
MSQIKIVNLQKSFGDFTAVKNSNLTINDKEFFVLLGPSGCGKTTTLRMIAGLELPTSGEIYLGEEEVGMLRASERDIAFVFQLFALYPHMNVRNNLSFPLKMQGYKKSDIKSRVEEAAKLLRIDHILNSNISSLSGGDRQRVALGRALVRRPKAFLMDEPLGTLDAEFRELMCLELKKLHLDIGATTVYVTHDQLEAMSLADRIAVMDGGEILQADEPNIIYNKPKTKFVASFIGSPGMNFFEVDEGISKDQSLVNIEGTKFNIPKQLEESKGSKNFFGIRPENLTLSNNDGLKGLVFGVEYLGSRKIITVKTSLGEIKVKTDISVNVKLNENVQVKPLNNNIIIFDGETDKSLNSEFIK

SEQ ID NO: 144182 - protein, 273 aa, Unknown
  Bacterial polypetide isolated from the Sargasso Sea
MSEIIQKVKNLSIGFRSKKGEEILILRNISTNIKKGETVGIVGESGSGKSTLALAMMGYVKQGLYTIDGECLFESSNLLKKNNRELEKIRGRKIAMIPQNAGQSLTPNLKIGYQIDEALKLHTSFNKIDRDNRISELLNKVRLPSPETIALRYPHELSGGQQQRVAVAMALAGNPELLLLDEPTTGLDVTTQAHVLELLNFIAKDTGTSMVYVSHDLGAIAQVSDRIIVMYSGEIVLEGPSRSILKKPIHPYTYGLLKSIPKLSLAGLPDSMP

SEQ ID NO: 144183 - protein, 194 aa, Unknown
  Bacterial polypetide isolated from the Sargasso Sea
MTDIIQKVKNLSIGFRSKKGNEILILKNISTNIKKGETVGIVGESGSGKSTLALAMMGYVKHGLYTIGGECQFNSSNLLKMKSKDLEKIRGRKIAMIPQNAGQALTPNLKIGYQIDEALQLHSDLDEREREKKISELLNKVRLPSPETIALRYPHELSGGQQQRVAVAMALAGTPDLLLLDEPTTGLDVTTQAH

SEQ ID NO: 144184 - protein, 198 aa, Unknown
  Bacterial polypetide isolated from the Sargasso Sea
MMLGLIKPTTGDIIIQNKNINTFERNKLLSIMNFASPYVELPKKLSVKQNLQIYGRLYGVKDLSLRIDELAEDLNLKDFINKKTGELSSGQKNRVSLAKSLINKPEILLLDEPTASLDPDIGDYVRSYVQSYKSKNKVTILLASHNMAEVERLCDSVIMMKKGKIIDQGTSKEIINRHGRANLEETFLKIVRSKDEVA

SEQ ID NO: 144185 - protein, 355 aa, Unknown
  Bacterial polypetide isolated from the Sargasso Sea
MAKIDLSNISHSYNPNDANPTYALNPFSMTWENGKRYAILGPSGCGKTTMLNIVSGLVKPSRGNILFDEKDVTNLITEERNIAQVFQFPVIYSTMTVYDNLAFPLKCRNFSKEKIDERVKSVSDTLRLSSFLNLPARKLTADQKQLISLGRGLVREDVAGVLMDEPLTVIDPDLKFRLRRNLKEINEQYKTTLVYVTHDQNEAMTFADNIIVMDQGEIVQVGLPKDLFERPKTTFVGYFIGSPAMNIFESEVCSEYSVKINNIEIKTNSNLTKIKDKNVKLGIRSEFINVAEKEGENTIKASLTRVEDFGNFKLLTANMDNFVIKSKVDRELPISIGDINLYIPPEKCCVYENEK

SEQ ID NO: 144186 - protein, 346 aa, Unknown
  Bacterial polypetide isolated from the Sargasso Sea
MSESLNNSNNTPVIQCESVYKIFGNNASKLLENSNGQVDAKTFQEAGCIVGVNNASFGVNKGEMMVVMGLSGSGKSTLLRCISKLTDATAGKIFIDGEDLLAMSNKQLIELRRNKMGMVFQSFALLPHKTVIENIAFPLQIKGTNTRESMAKALEMVELVGLKGRENYFPRELSGGQQQRVGIARSLAVEPDIWFLDEPFSALDPLIRKEMQDEFLRLQGVLNKTIMFVTHDFDEALRLADRIAIMKDGIIEQLDTPDNIVLNPATEYVKKFTEDVPREKVLKIESIMDTYDSNVSSDIKVSKDAIIETLAESILNSKEILTVVDKNNEIVGSLNPSKVIKVIFGK

SEQ ID NO: 144187 - protein, 360 aa, Unknown
  Bacterial polypetide isolated from the Sargasso Sea
MSKIKIVNLQKSFGDFTAVKNSNLTINDKEFFVLLGPSGCGKTTTLRMIAGLELPTSGEIYLGDEEVGMLRASERDIAFVFQLFALYPHMNVKNNLSFPLKMQGYSRSEIKTRVEEAAKLLRIDHILNSNISSLSGGDRQRVALGRALVRRPKAFLMDEPLGTLDAEFRELMCLELKKLHIDIGATTVYVTHDQLEAMSLADRIAVMDGGEILQADEPSVIYNKPATKFVASFIGSPGMNFISIDQGISNEQSTLNIEGTNFNIPKQYEISKGKKNSFGIRPENLSLTNEGGLKGSVFGVEYLGSRKIVTVKTNFGEIKVKTDISTTVKINENVQLKPSNDNIIIFDGETDKSLKSEFMN

SEQ ID NO: 144188 - protein, 246 aa, Unknown
  Bacterial polypetide isolated from the Sargasso Sea
MTKEFKGFTAVSDVNLAVRRGSIHALIGPNGAGKTTCFNLLTKFLEPTSGVIRFNGHDITREQPAQIARRGVIRSFQISAVFPHLTLIENVRLGLQRKLGTSFHFWRSERTLRQLDDRAMQLLTEVGLEDLADEVTVNLPYGRKRALEIATTLSMEPELMLLDEPTQGMGHEDVDRVTQLIKKVSAGRTILMVEHNMKVVSTIADRITVLQRGAVLAEGPYAEVSNNPQVMEAYMGTTDGQLQGAH

SEQ ID NO: 144189 - protein, 254 aa, Unknown
  Bacterial polypetide isolated from the Sargasso Sea
MNIIEVKDLKKAYLLPSDKTKTFNAVDSISLGIKKGEVYGILGPNGAGKTTTLEMLEGLKEIDDGSAIIDGIDVSKDPYEVKKVIGVQLQSNEYFDKLDLSELLTLFSKLYSTNIDHSKLLDQVNLLDKANAKTQHLSGGQRQRFSIACALVNNPKILFLDEPTTGLDPQAKRNLWNLVKDLNASGMTIVLTTHNMEEAEHLCDRIAIMDEGKLIAEDTPKALIEKYAPKPSDIPLTGNIEDVFLNLTGHSLRD

SEQ ID NO: 144190 - protein, 244 aa, Unknown
  Bacterial polypetide isolated from the Sargasso Sea
MILSARDISKSYRGRKVVNNISIEVNQGEIVGLLGPNGAGKTTSFYMIVGIIKPEKGDIFLDKEVISSYPMYQRAQKGIGYLAQEESVFRKLSVEDNILGVLEFSELSKDQQKEKAQQLMEEFGLINIRKNRGDLLSGGERRRTEIARALANNPNFLLLDEPFAGVDPIAVEDIQSIISVLKKKNIGILITDHNVQETLAITDRTYLMFEGKILKEGIPEDLAKDEIVRKVYLGKNFEFKRKKI

SEQ ID NO: 144191 - protein, 247 aa, Unknown
  Bacterial polypetide isolated from the Sargasso Sea
MNKFQILEDGLYVNKISKTYGNKEVIRDITISIKRGEIVGLLGPNGAGKTTSFYVIVGLVKPDRGSIFLDKLDISELPIYKRGKIGISYLPQEASIFRGMNVEDNLMSIIEIIEKDKNKHDIILQNLLNEFDINHVRKSKSIVLSGGERRRLEIARTLASNPKYLLLDEPLTGIDPVSIEEIKIIIKKLKDKNIGVLITDHNVRETLKIVDKVYIVNEGAIFFEGDPKNAVKDEKIKKFYLGADFIL

SEQ ID NO: 144192 - protein, 306 aa, Unknown
  Bacterial polypetide isolated from the Sargasso Sea
MAVDGVDLDIFRGEVLGLAGESGCGKTTLGKAILRLVEPTDGEVKYISQDDNETELTSLEKKDMDPFRKKLQIVFQDPHSSLNPSFTIFGSLQDPLKKFGIKSKEERRKIIGDLLEAVNMRREYMDRYPHEFSGGQRQRIGIVRALCLEPELIVCDEAVSALDVSIQAQVLKLLMQLKKEKNLTYLFITHDLSVTEYLCDRIAVMYLGRIVELCDSEDLYNNTLHPYSEALISAIPVADLDKQTKRIVLEGDVPSPVNPPKGCPFHPRCPKATDICKTEVPTLKKYSTNGNEHYASCHLIDLPEIS

SEQ ID NO: 144193 - protein, 333 aa, Unknown
  Bacterial polypetide isolated from the Sargasso Sea
MKAVEANNLHKTFTSKKESVEAVKGVSFSVEQGEVFSILGPNGAGKSTTILMLTTLLGISKGTASIMGLDVEKQDKEVRTKIGVALQDTGIDLLLTARELLYTTGRLWGLNKQESNTRTEELLQLVGLTESADRRVKTYSGGMKRRLDLGLSLVNEPEVLFLDEPTTGLDPASRRVIWDEIKRLNNNGVTVILTTQYLEEADELSDRLLIIDKGVVATEGTSDELKASVGGDVVTFDFEKEENVEVAKRLIDNAKVNQKQLRITVENGAEHIPIFMKTFTENKLNVKSVSANKPTLDDVFLKVTGFSMENDNQSEKKQSKKSNYEKRGRRIRR

SEQ ID NO: 144194 - protein, 383 aa, Unknown
  Bacterial polypetide isolated from the Sargasso Sea
MPSYQYIYVMNGLSKTFTGGREILKNINLSFFPGAKIGVLGTNGAGKSTLLKIMAGIDTQFVGEAWAAEGVKVGYLPQEPELEAGKTVHELVMEGMSETKMILDRFNEVSAKFAEEMTDEEMNTLLAEQAELQEKIDAANAWDLDRHVEIAMDALRLPPSDTDVGPLSGGEKRRVALCRLLLSAPDLLLLDEPTNHLDAESVAWLQRFLHDFPGTVVTVTHDRYFLDEVAGWILELDRGQGIPFEGNYSGWLEQKQKRLQQEGKQDAARQRSLANELEWVRASPRGRQAKSKARLTAYEDLLNRNQEKVVDNAKIIIPPGPRLGDLVIESLNLVKGFSERLLVDDLSFKLPPGGIVGVIGPNGAGKTTLFRMITGQDSPDSGS

SEQ ID NO: 144195 - protein, 216 aa, Unknown
  Bacterial polypetide isolated from the Sargasso Sea
MDNLILEIKDLNHAYGESDLTIKDLNFNISVGERVSILGPSGCGKSTLLRLIAGLEKPNSGEIIKKAEVLTSNEIFIPPEKRNVGLVVQEKALFPHLTVYENVCFGIQKNRDKNKIVSDLLELLKIDSLKNKHPHEISGGEQQRVALARSLAPTPDLLMLDEPFSALDEELKKTLYEEVSEVFYEKNSSILLVTHDPYEAEVMTDKQLRMENGKLI

SEQ ID NO: 144196 - protein, 212 aa, Unknown
  Bacterial polypetide isolated from the Sargasso Sea
MLAVSIKNLSHKINNKSILNNVNFELKKDSIACILGPSGSGKTTLLKLIAGLDNVQNGQILINDQEVSSANKHLPTEKRRIGFLFQDYALFPHLTVKENLKYPINFKNSIYKIDDIIDVVKLPDSLDKYPHELSGGEQQRVALARSIISHPDLLLLDEPFSSLDLNLREEIRDDTLHLLQKSNVSTIIVTHDPFEAMFISNQINIMDNSGSI

SEQ ID NO: 144197 - protein, 520 aa, Unknown
  Bacterial polypetide isolated from the Sargasso Sea
MDRARNAIKGLMQLTPEQASVQQADGNWQLTDLKSIALGAVVRVKPGERIALDGEIVAGRSSVDQAPITGESLPVDKTVGDAVFAGTINQAGSFDYRVTAAASNTTLARIIHAVEEAQGTKAPTQRFVDQFARVYTPIVFATALAVAVLPPLLLGGQWHEWVYKALVMLVIACPCALVISTPVTIVSGLAAAARKGILIKGGAYLEQGRKLSRLALDKTGTLTHGKPVQTEFEILADVEVVRCRTLAASLAGRSDHPVSMAIAAAAKNDSVTRATVDVFEALAGRGVRGEIDGLPYWLGNHRLVEELGRCSASLEARLDTLEAQGKTVVMLVDAERVLALFAVADTVKDTSRAAIAELQRLGVHATMLTGDNPHTAAAIAQQVGIEEARGNQLPEDKLNAVDGWSKDGATVGMVGDGINDAPALARADIGFAMGAMGTDTAIETADVALMDDDLRKIPQFIRLSKATHSVLVQNITLALGIKSVFLVLTVMGLGTMWMAVFADVGASLLVVANGLRLLRK

SEQ ID NO: 144198 - protein, 238 aa, Unknown
  Bacterial polypetide isolated from the Sargasso Sea
MNKTVIECNGIAAGYVKGLNILQGIDMIINEKEIVSIIGPNGAGKSTLLKAIMGIINISGGRFFIDGVEKTNTPTHQIVKEGVGYVPQVENVFPSLTIEENLEIGSWSIDTSIKQSISKIFDDFPMLKERRKDKAGNLSGGQRQILALARALTTSPKILLLDEPSAGLSPVAIKEVFEIVKEINSKGVAILLVEQNAKRALNFSDRGYVLDQGRNAYQGKGQELLNDPRVVDLYLGKL

SEQ ID NO: 144199 - protein, 250 aa, Unknown
  Bacterial polypetide isolated from the Sargasso Sea
MKNLKSKNPLLSVKGIAKSYGHVRALQNIDIDIHSGEVLGLLGDNGAGKSTLIKILSGIVRPDKGQIFREGKEINILSRKDSEEKAGVQTIYQDIALVKSMSILRNIFAGQERKTKLGFLKLNEMRDTTMQILNDHVKIAGITSPDLLIEELSGGQAQAVAIARAVHFQRDILLLDEPTSALSVRETNKVHSIMREIADAGNSCVFVTHNLYHAFQVCDRFVVFSHGEVVKSSTKENTSLDELTDLILAN

SEQ ID NO: 144200 - protein, 342 aa, Unknown
  Bacterial polypetide isolated from the Sargasso Sea
MSEPVIKCENVYKIFGANAQKMLQDSNGNVDAKVFQENGCIVGVNNASFEVAKGEMLVVMGLSGSGKSTLLRCISRLTDATDGKIFIEGQDLLQLNNKDLIDLRRNKMGMVFQSFALLPHKTVVENIAFPLQIKGIKTEDSINKAMDMVKLVGLEGRENYFPRELSGGQQQRVGIARSLAVEPDIWFLDEPFSALDPLIRKEMQDEFLRLQDKLQKTIMFITHDFDEALKLADRIAIMKDGIIEQLDTPANIVLNPATEYVRKFTEEVPREKVLLIKDVMDTSKDNLGDLKVSKNEIIENVAEKILTQEKIVAVVDNNNEIIGSINPTKIINTVFGGRKNNN

SEQ ID NO: 144201 - protein, 321 aa, Unknown
  Bacterial polypetide isolated from the Sargasso Sea
MLQDSNGNVDAKTFQENGCIVGVNNASFEVAKGEMLVVMGLSGSGKSTLLRCISRLTDATGGKIFIEGQDLLQLNNKDLIDLRRNKMGMVFQSFALLPHKTVVENIAFPLQIKGIKTEDSINKAMDMVKLVGLDGRENYFPRELSGGQQQRVGIARSLAVEPDIWFLDEPFSALDPLIRKEMQDEFLRLQDKLQKTIMFITHDFDEALKLADRIAIMKDGIIEQLDTPANIVLNPATEYVRKFTEEVPREKVLLIKDVMDTSKDNLGDLKVSKDEIIENVAEKILIQEKIVAVVDNNNEIIGSINPTKIINTVFGGRKNNN

SEQ ID NO: 144202 - protein, 348 aa, Unknown
  Bacterial polypetide isolated from the Sargasso Sea
MIAVEVKDLTHSINNKKILNNINFNLNKDSISCILGPSGSGKTTLLKLIAGLEKVQSGKIIINGEEVSSTAKHLPTEKRKIGFLFQDYALFPHLTVKENLRFPTNAKNSTNNVDEIIELIKLPNSLDKYPHELSGGEQQRVALARSIISQPDLLLLDEPFSSLDLSLREEVRDDTLHLLQKSNVSVIIVTHDPFEAMFISNHINIFDKSGSIVQSGTPNDLYNNPKNSYVTGFFGETNKFEGVVKESHIYTPVGKIKTPGNLEGEKVVVHIRPQGIKLNKQPTPVNGIKGTVMASKLMGSFSFIHLSVLDNNNEVVHVHSHMPADFNPKQSSAVEIEIDNDQAYIFKN

SEQ ID NO: 144203 - protein, 161 aa, Unknown
  Bacterial polypetide isolated from the Sargasso Sea
MAYFEGAKMTAGYGDGPDIISSCSITANRGEIVAILGPNGAGKSTAMKAMLGLLKLKSGSVTLNGEDISKINPQDRVKKGISFVPQTRNVFAELTVRENLEIGGFLTEGSLENKIESIYSLFPILSEKKSQVVGQLSGGQRQQVALGRALMSDPSVLMLDE

SEQ ID NO: 144204 - protein, 220 aa, Unknown
  Bacterial polypetide isolated from the Sargasso Sea
MILEVNKLRKEVSSGDSELTILDDVSFSLEEGQSLAITGPSGSGKSTLLGLLAGLDTATSGEIYLDKVGLHKLDEEDRAILRKEKVGFVFQSFELLPSLTALENVMLPSELKSDDNPRENAEYFLNRVGLSEREHHYPNQLSGGEQQRVAIARAFACSAKILFADEPTGNLDPKNGQVVSDLLFEVNSETDNALVIVTHDLELANRCDKRIDLKLGRIVE

SEQ ID NO: 144205 - protein, 254 aa, Unknown
  Bacterial polypetide isolated from the Sargasso Sea
MNIIEVKDLKKAYLLPGDKSKTFNAVDHISLGIMKGEVYGILGPNGAGKTTTLEMLEGLKEIDDGFAIIDGIDVSKDPYAVKKVIGVQLQSNEYFDKLDLSELLTLFSKLYSTTIDHSKLLDQVNLLDKANAKTQHLSGGQRQRFSIACALVNNPKILFLDEPTTGLDPQAKRNLWTLVKDLNSSGMTIVLTTHNMEEAEYLCDRIAIMDKGKLIAEDTPKALIEKYAPEPSDIPLTGNIEDVFLNLTGHSLRD

SEQ ID NO: 144206 - protein, 230 aa, Unknown
  Bacterial polypetide isolated from the Sargasso Sea
MAKIDLSNISHSYNPNDPNPVYALNPFSMTWENGNRYAILGPSGCGKTTMLNIVSGLVRPSAGRILFDDKDVTDLKTEDRNIAQVFQFPVIYNTMTVYENLAFPLKCRDFSKSKTDERVNSVAETLNLNSFLNSPARKLTADQKQLISLGRGLVREDVAAVLMDEPLTVIDPDLKFRLRRNLKEINEQYKTTLVYVTHDQNEAMTFADNIIVMSEGEVVQTGSPKELFER

SEQ ID NO: 144207 - protein, 235 aa, Unknown
  Bacterial polypetide isolated from the Sargasso Sea
MAFFEGIKMTAGYGDGPDIISSCNINVNRGEIVAILGPNGAGKSTAMKALLGLITLKSGSVCLDGEDISKISPQDRVKKGISFVPQTRNVFAELTVRENLEIGGFLREDGLEEMIKNIYELFPILNEKQSQIVGQLSGGQRQQVALGRALMSEPSVLMLDEPTAGVSPIVMDELFDHIIKVKKTNVAIIMVEQNAKQALNISDRGYVLVTGKNKFEGSGNQLLTDPEVRRSFLGG

SEQ ID NO: 144208 - protein, 577 aa, Unknown
  Bacterial polypetide isolated from the Sargasso Sea
RKLLGMKTSGSLTVLFTDKTGTLTQGELTVSEFLVGDGKHFRNYQEIPDNLRENIAFAVRNNTPAIIDSQEPENIKIVGANPTGIALLRFLGSDAAVQDDVLMEKNIPFQSANKFSASQIKGNENITLVKGAAEIVLEECTNYLNEKGDKVKLDATKLKEEMRVLSKRAMRLIGLAVTDKNLEEENVLPSELTLVGVFGLRDEMRKESLTAVETAHKAGIQVVMITGDAKDTAQAIAKEVGILENEKGLILTSTQLGEFSDQEIKDFLPNLRVVARALPTDKSRLVKLAKSMDWVVGMTGDGVNDAPAVKNADVGFSMGNGTDMTKESSDIVILDNNFNSLTNAVRYGRTLLKSIRKFLIFQLTVNVAAVLVAFLGPFFGTDLPLTMTQLLWINIVMDTLAAFAFSGEAALRRYMNEKPIPKGESLITGDMWSAILVDGVLMAALCLYFLSSDFVAGLFVCDVKRCDDPEVNMVLLTAFFGFFVFINNFNKFNARTESLNLFEHITKNRNFLIVILIIFLLQTTFTYYGGEVLRTVGLTLQEWIYVLTFAFIIIPIDLTRKFLRNLFFGNPVVRENS

SEQ ID NO: 144209 - protein, 332 aa, Unknown
  Bacterial polypetide isolated from the Sargasso Sea
MTNEVSSQGRVAVKAVGLCKRYAKFEALTDLNFELHTGQTLALLGHNGAGKSTLIKMMLGLVSPSHGELFVQGQPLHTKRPNANLPLGYLPENVSFYDNMTAREILSYFAKLKGVASKRVSILLEEFGLMAAKDKRLSTFSKGMRQRLGLAQAVLADPKVLLLDEPTVGLDPLASAFLYQKMAQLKAQGCAIIISTHELGLVQDQMDSALILGQARLLAAGDLSQLRAISALPSLLELHRVSPLQYQQLISLPLFASMRNHSSANRMCFSVPDALKAKVIEQLHLLKIHEFSIAPPSLQDIFHHFMAGLNRHNASTSRPAVGEEQDQRELVA

SEQ ID NO: 144210 - protein, 178 aa, Unknown
  Bacterial polypetide isolated from the Sargasso Sea
MNKPILECNGIAAGYVKGLNILQGIDLVVSEGEIISIIGPNGAGKSTLLKAIMGLINVSAGRFFINGAEKTNLSTHKIINEGIGYVPQVENVFPSLTIEENLEIGAWSLAKNRKSSITKVLKDFPLLNERKKEKAGNLSGGQRQILALARALVTSPNLLLLDEPSAGLSPVAINEVFK

SEQ ID NO: 144211 - protein, 353 aa, Unknown
  Bacterial polypetide isolated from the Sargasso Sea
MDSSSSAIQIQNVWKVFGNTSKEALDAIQNKKISKTEALENYNSVIGVSDVSFDVKQGEIFCVMGLSGSGKSTLVRHINRLLEPTSGKILINGQDVMALDRENLQELRNKKIGMVFQNFALMPHRSVIDNIAMPLEIRGVSKNDRLDAANKILEIVELQGWGNKFAHELSGGMQQRVGLARALAADPEFLLMDEPFSALDPLIRRQLQAEFIKLSKQMKKTTVFITHDLDEAVRVGHRIAIMRDGKVIQIGTPEEIVVSPADEYVADFVKGISRLKVVQAKTIMQSIESYENANGKLDENSNSVGENELLSKLIELSKSSEGPLIVKDDNQNNVGVLTQSDLLKAVIEGGDGE

SEQ ID NO: 144212 - protein, 343 aa, Unknown
  Bacterial polypetide isolated from the Sargasso Sea
MSNPVIKCESVYKIFGENAQKMLQDSNGNVDAKTFQENGCIVGVNNASFEVSKGEMLVVMGLSGSGKSTLLRCISRLTDATGGKIFIEGQDLLQLNNKELIELRRNKMGMVFQSFALLPHKTVVENIAFPLQIKGIKTEDSISKAMDMVKLVGLDGRENYFPRELSGGQQQRVGIARSLAVEPDIWFLDEPFSALDPLIRKEMQDEFLRLQDKLQKTIMFITHDFDEALKLADRIAIMKDGIIEQLDTPANIVLNPATEYVRKFTEEVPREKVLLIEDVMDPSSTENIGDLRVLRDEIIENVAEKILTQEKTVAVIDKNNKIVGSINPTKIINTVFGGRKNNN

SEQ ID NO: 144213 - protein, 242 aa, Unknown
  Bacterial polypetide isolated from the Sargasso Sea
MTIPLEIINLSKTYDSKEAVRNISFKVNKNEIIGILGPNGCGKTTTIGMILGLLKPTQGRVLINGIEIEKQRVELLNELNFISPYIELPKKLTVKQNLEVYGRLYDVKELGKKIDYLCEKLRLNEFINKITGELSSGQKNKVSLAKSIINDPSVLLLDEPTASLDPETGDFVRSFLEEYQKEKRTSILLASHNMAEVERLCSSVLMMNKGSIIDQGTPEELIKKHGRRNMEEVFLKLTRDLI

SEQ ID NO: 144214 - protein, 392 aa, Unknown
  Bacterial polypetide isolated from the Sargasso Sea
MNNFGDPILKVNNLNVEFANESSTFKAVNNLNFNLSEKETLAVVGESGSGKSVTALSIMQLLPYPIAFHSKDSSINFQGTELVNLPKKELEKIRGKRISMIFQEPMTSLNPFIKVGKQIIESIQVHNKRTNKEAKEKAIDLLRKVEIPNPEQKFSSFPHQLSGGQRQRVMIAMALSNNPEILIADEPTTALDVTVEKELLILLNKLKEEENLSIIFITHDLNVVKRFADHVLVMNQGNVIEKGTTAEIFSNPKDSYTKRLIESIPEPKEINSVSDSKILRCEKLNVSYQVREASLLQKEERFDAVKEVSFSLSANSTLGIVGESGSGKSTILKAILGIEEYSGKIFFENEILKKDKLSDLRKKCQVVFQDPFSSLSPRMRVERDHQEVWIFI

SEQ ID NO: 144215 - protein, 242 aa, Unknown
  Bacterial polypetide isolated from the Sargasso Sea
MEKIIVAKDLTKIYGEEGTSVTALNNVNLDFYENKFTAIMGQSGSGKSTLLHCLAGLDKVTSGSIFIKGTDLGNLNDKELTKMRRDSFGFVFQAFNLIPTLTAEENITLPSSIAGKKPDEDWINQIVNAVDIGDRLNHRPNELSGGQQQRVAAARAMATKPEVIFADEPSGNLDSKSSKELLTFMKSVVNELNQTIVMVTHDPYAASFAERVIMLKDGEVASDMEEPTQEEIISRVTSLSDI

SEQ ID NO: 144216 - protein, 360 aa, Unknown
  Bacterial polypetide isolated from the Sargasso Sea
MSQIKIVNLQKSFGDFTAVKNSNLTINDKEFFVLLGPSGCGKTTTLRMIAGLELPTSGEIYLGDEEVGMLRASERDIAFVFQLFALYPHMNVRNNLSFPLKMQGYKKSDIKSRVEEAAKLLRIDHILNSNISSLSGGDRQRVALGRALVRRPKAFLMDEPLGTLDAEFRELMCLELKKLHLDIGATTVYVTHDQLEAMSLADRIAVMDGGEILQADEPNIIYNKPKTKFVASFIGSPGMNFFEVDEGISKDQSFVNIEGTKFNIPKQLEESKGSKNFFGIRPENLTLSNNEGLRGSVFGVEYLGSRKIITVKTSLGEIKVKTDISVNAKLNENVQIKPLNNNIIIFDGETDKSLNSEFIK

SEQ ID NO: 144217 - protein, 198 aa, Unknown
  Bacterial polypetide isolated from the Sargasso Sea
MLALILKFITPNNGDIFIDDKNLKILNTKDIRKNIALVQQQPFLFSGTIIDVIKMGRNFTKEEVIESARKANAHNFIQKLPEKYETEISERGSNFSGGQIQRIAIARAILGNPSILLLDEATSALDAESESEVQKGLNRAMKDRTVIVIAHRLATTQEANKIVVFDKGEIIEVGKHIDLINKPGIYKELCEKQLIKKL

SEQ ID NO: 144218 - protein, 210 aa, Unknown
  Bacterial polypetide isolated from the Sargasso Sea
MNNLILEIKDVSHSYADNETTLENINLQVNKGEKVAILGPSGSGKSTLLRLIAGLEKPQSGSISIKGEIVSTKDLVVAPEKRKLGLVVQEKALFPHLTVKDNITFGIKKRLDKNKTASELCSLFKIDHLADKYPHEISGGEQQRTALARSMAPNPELLMLDEPFSALDQELKRVLYSELNQIFEERKQTILLVSHDLKEAEVLSQRQINI

SEQ ID NO: 144219 - protein, 350 aa, Unknown
  Bacterial polypetide isolated from the Sargasso Sea
METAIQIQNVWKIFGNNSKEALDAIQNKKISKQDALEKYNSVIGVSDVSFDVNKGEIFCVMGLSGSGKSTLVRHINRLLEPTSGKILINNQDVMQFDKDSLQELRNKKIGMVFQNFALMPHRSVLDNIAMPLEIRGVSKNDRLDEANKILNIVELQGWGNKYAHELSGGMQQRVGLARALAADPEFLLMDEPFSALDPLIRRQLQSEFIKLSKKMKKTTVFITHDLDEAVRVGHRIAIMRDGAVVQIGTPEEIVVNPADEYVADFVKGISRLKVVQAKTIMKSIKDYESKFGSLDNDNEIVNENEVLSKLIETSITKDKPIVVTDKNSQKIGVISQSDLLKAVVEGNENE

SEQ ID NO: 144220 - protein, 148 aa, Unknown
  Bacterial polypetide isolated from the Sargasso Sea
MSQKDSFVKFEKVDKSYDGEILVVKDLNLDVPKGEFLTMLGPSGSGKTTVLMMLAGFETPTSGEIYLDGNPISSIPPNKRGIGMVFQNYALFPHMTVKENLAFPLEVRKCKKLKLMKKLEMHLRWLNYKTLEIVCHYNYLVDNSNVSH

SEQ ID NO: 144221 - protein, 237 aa, Unknown
  Bacterial polypetide isolated from the Sargasso Sea
MGGKVIEVENLNKVIGDKLLIENLSFNLPPGGIVGVIGPNGAGKSTLFKVLTGQESKDSGSVTYGDTVQLSYVDQSRDDLKDGETVWEAISGGAEVIELGDAQVNSRAYCSSFNFKGGDQQKKVSLLSGGERNRVHMARLLKSGGNVLLLDEPTNDLDVETLRALEDALVDFAGCAVVISHDRFFLDRICTHILAFEGDAQVEWFEGNFEDYEEDKKRRLGPDALEPKRIKHKKFTR

SEQ ID NO: 144222 - protein, 338 aa, Unknown
  Bacterial polypetide isolated from the Sargasso Sea
MEIKNLVIDFESKDSTFRAVDNISLEIARGKTLSLVGESGSGKSVTALSVLQLLPEGTVRYSKESSIEFEGRQIIGGSKKDITSLRGNKISMIFQEPMTSLNPYQKVGYQIDESLIIHRGFRKKEAREKTLDLLKKVKIPEPEVKVNSYPHQLSGGQRQRIMIAMALANEPELLIADEPTTALDVTVEKALLELLADLQKEFGMSILFITHDLNIVRKFSDDVCVMKDGQIVEAGRVKELFEDPKHPYTIKLLNSIPGKKEKLNTNNELLLSGSEVDINYPVAKNLFGQTTEFLNAVKKVDIKIYSGSTTGLVGESGSGKSSLARALLGIENSEGQII

SEQ ID NO: 144223 - protein, 242 aa, Unknown
  Bacterial polypetide isolated from the Sargasso Sea
MNKIHNNRDKPNNILSNLKKVITGTSFSRFFGLLRDVFTTNLLGASFLHDIFVICLRIPNLFRRFFAEGAFNQAFVPIYAEYEKENNHFKTNEFLNSIAGTLLLCLFVFTLLVLVFAPIFIFLFAPGFYFDPIKQDISVKVLRIMFPYLALISLVAFAGGIQNTHQKFSIPAFTPVVFNLSLIIAAVFIAPKYEIEIFVLAWGVLLAGFVQLLIQIAPLRSINRLPVPKLNFKNEGVKSFLL

SEQ ID NO: 144224 - protein, 242 aa, Unknown
  Bacterial polypetide isolated from the Sargasso Sea
MTDSILEVTDLSKSFGSLKVIDDFDFHLEKGEALGIIGPNGAGKSTLFNLISGTLRANSGIIKFDGKDITLLSSHYRCRMGIGRSYQIPHPFSGMTVFENVLVGGAFGNEQREADCYDKCVQILETTGLIRKANTLAGQLTLLERKRLELARAIATGPRVLLLDEIAGGLTEPEIQELIHTISSIRTENISIIWIEHIVHALMSIVDRLIVINFGKKLDDGNPETVIKSPEIQEVYMGIGVK

SEQ ID NO: 144225 - protein, 585 aa, Unknown
  Bacterial polypetide isolated from the Sargasso Sea
MKENNLKKLFLYSQKQDTKIKRGIIYSILNKLFDLAPPVLIGIAIDIVVEGSDSFLGNLGYEDRRQQLIVLAVLTFVIWGLESTFDYVAAVTWRNISQDIEHKLRTETFNNVLDLDLEFFENKSSGRLMAILNDDVNQLEKFLDTGANKLLQTMTTVLVIGGTFIYISPLIAIFAFIPIPIIIFGSFKFTKTIAKRYTKIRNTIESLNANLSNSLTGILTVKSFNREGRETERITKSSEEVKAANYHAIKLSAAFIPIIRIAILFGFTATLLIGGFMALDGQIKVAMYSVLLFITQRLLWPLTELGDTFDLYQRAMASFKRITTLKDTRPTITNGNSELKNFENSIVFNDVNFSYVEGFSVLNNVSVEINKGQTVAIVGSTGSGKSTMIKLILRLYDVTEGDIKFDNINIKDLDLTSLRSNIALVSQDIFLFEGSVFENIAYGNLEASEDEIWEAARLSESDDFINQLPNKEHTIVGERGQKLSGGQRQRISIARAILKNPEILILDEATSAVDNETEAAIQRSLDTLKEGRTVIAIAHRLSTIRNADKIYVLEDGKIVENGTHDELVTIGKVYSNLWDVQTGNR

SEQ ID NO: 144226 - protein, 244 aa, Unknown
  Bacterial polypetide isolated from the Sargasso Sea
MILSARDISKSYRGRKVVNNISIEVNQGEIVGLLGPNGAGKTTSFYMIVGIIKPEQGNIFLDKEVISTYPMYQRAQKGIGYLAQEESVFRKLSVEDNILGVLEFSDLSKNQQKEKAQQLMEEFGLINIRKNRGDLLSGGERRRTEIARALANNPNFLLLDEPFAGVDPIAVEDIQSIISVLKKKNIGILITDHNVQETLAITDRTYLMFEGKILKEGIPEDLAKDEIVRKLYLGKSFEFKRKKI

SEQ ID NO: 144227 - protein, 345 aa, Unknown
  Bacterial polypetide isolated from the Sargasso Sea
MSSTPVIKCDSVYKIFGTNAKKMLQNANGNVDAKSFQDAGCIVGVNNASFEVSKGEMLVVMGLSGSGKSTLLRCISRLTDATGGKIFIEGQDLLAMNERQLIELRRNKMGMVFQSFALLPHKTVLENIAFPLQIKGSKTNESIQKAVEMVELVGLKGRENYFPRELSGGQQQRVGIARSLAVEPDIWFLDEPFSALDPLIRKEMQDEFLRLQGVLNKTILFITHDFDEALRLADRIAIMKDGLIEQLDTPADIVLNPKTEYVRKFTQEVPREKVLKIEAVMDKSSAGQNADNITVSKDAIIETVAEKILSQDKPVSVIDKNNNVVGSVKPSKIIQTVFGQGKEKK

SEQ ID NO: 144228 - protein, 342 aa, Unknown
  Bacterial polypetide isolated from the Sargasso Sea
MSKPVIKCENVYKIFGANAKKMLQEANGNVDAKTFQENGCIVGVNNASFEVSKGEMLVVMGLSGSGKSTLLRCISRLTDATGGKIFIEGQDLLKLNNKELIDLRRNKMGMVFQSFALLPHKTVVENIAFPLQIKGIKTEDSISKAMDMVKLVGLDGRENYFPRELSGGQQQRVGIARSLAVEPDIWFLDEPFSALDPLIRKEMQDEFLRLQDKLQKTIMFITHDFDEALKLADRIAIMKDGIIEQLDTPANIVLNPATEYVRKFTEEVPREKVLLIEDVMDSSTSNLGELKVLKDEIIENVAEKILTQEKSVAVIDSNNKIIGSINPTKIINTVFGGRKNSN

SEQ ID NO: 144229 - protein, 228 aa, Unknown
  Bacterial polypetide isolated from the Sargasso Sea
MSSAISLEGLTKRFGERVALNAISATIPTGGITGLVGPDGAGKSTLLRLLAGLLIPEAGTIRVLGMDPVSEGDLLRQRLGYMPQQFGLYEDLSVLENLTLYADLRGVLEPERTPTFARLLAFTDLARFTARPAGKLSGGMKQKLGLACALLGTPDVLLLDEPGVGVDPISRRALWQMVRELAKGGMTVLWSTAYLDEAELCDHVLLMADGEVRTSGTPADLMGGMASR

SEQ ID NO: 144230 - protein, 242 aa, Unknown
  Bacterial polypetide isolated from the Sargasso Sea
MNFEIKNVFLTIEGKSIVNDVSIKVFPGEIVGLMGPNGAGKTSTFNLAVGNLKPDKGNILMNSKSIKNLPLPSRAKLGLGYLTQEASIFRDLTVKENIDLALDNSFSSRAIVRNKREKIINEFNLNKVVDNYGYQLSGGERRRCEIARALSVGRQGPKYLLLDEPFAGIDPLAVNDLKKLIIKLSENGMGILITDHNVRETLLITNKSYVLSEGKILAHGSSDELANNQIVKKFYLGDDFQL

SEQ ID NO: 144231 - protein, 241 aa, Unknown
  Bacterial polypetide isolated from the Sargasso Sea
MAKIDLSNISHTYNPKDLEPTYALNPFSMTWENGKRYAILGPSGCGKTTMLNIVSGLIKPTQGRILFDNEDVTSQKTETRNISQVFQFPVIYNTMSVYDNLAFPLKCRDFEKNKIEERVQSVSETLNLSSFLNMPARKLTADQKQLISLGRGLVREDVAAVLMDEPLTVIDPDLKFRLRRNLKEINEEYKTTLVYVTHDQNEAMTFADNIIVMDQGEIVQVGLPKDLFERPKTTFVGYFIG

SEQ ID NO: 144232 - protein, 357 aa, Unknown
  Bacterial polypetide isolated from the Sargasso Sea
MVAKHLTYKPDDQYHLNDVSFNFEKGRLYTILGRTLSGKTTLLKTIAGLLNPDSGNINFEDKNFSKVPVWERNVAMVYQQFINYPHLSVYENISFPLKQRKLNEENIKKNVDDALKTVGLVGFENRKIQELSGGQQQRVALARSLAKKAKILLLDEPLVNLDYKLREQLREEFKTIFNEGLANETILIYSTTDPQEVMELNGEVIVLDEGKVLQTGPAKDIFENPINLKVAEISNDPPMNIINGLKIDGKITFENINIKLPKHLSQLDNKNYNFGIRSSEIKLSDSGEEFEIELAEISGSETLLHLKRGSTKVIALIEEVMNFKIHEKVKVVFNSDKFYVFEEDGKLISSPYRIKNG

SEQ ID NO: 144233 - protein, 530 aa, Unknown
  Bacterial polypetide isolated from the Sargasso Sea
MITTANITMQFGSKPLFENISVKFGGGNRYGLIGANGCGKSTFMKILCGDLEPSSGNVSLDVNERLGKLSQNQFGYEEFTLIDTVIMGHRELWKVKQERDRIYSLPEMSEEDGIAVANLEMEFAEMDGYTAESRAGELLLGVGIGIESHFGLMSEIAPGLKLRVLLAQALFSDPDVLLLDEPTNNLDIDTIRWLQDVLNQRDSTMIIISHDRYFLNSVCTHMADLDYGELRVYPGNYDEYMQAASQARERLLADNAKKKAQISELQTFVARFSANASKAKQATSRARQIDKIKLEEVKASSRVNPFIRFDQEKKLFRNALVVENLAKGYDTPLFKDLNLIVEVGERIAILGENGVGKTTLLRTLIHDIPQDEGLIQWSENSNIGYYAQDHESDFENDMTLFEWMSQWRKPEDDDQAVRGILGRMLFSADDIKKSVKVLSGGEKGRMLFGKLIMQKPNILMLDEPTNHMDMESIESLNNALEKYEGTLLFVSHDRAFVSSLANRILEITPNGVNDFKGTYDEFLVSKGIEG

SEQ ID NO: 144234 - protein, 208 aa, Unknown
  Bacterial polypetide isolated from the Sargasso Sea
MNLIANNLTYKPDNEFHLKDVSFNFKKGNLYTILGRTLSGKTTLLKTIAGLLNPDSGKIQFEEKEFNKIPVWERNVAMVYQQFINYPHLSVYENISFPLKQRKLDKDKIKNDVNEALKTVGLVGFENRKIQELSGGQQQRVALARSLAKKAKILLLDEPLVNLDYKLREQLREEFKRIFSGGFAEDTILIYSTTDPQETMELNGEVIV

SEQ ID NO: 144235 - protein, 282 aa, Unknown
  Bacterial polypetide isolated from the Sargasso Sea
MSKLSHFDGPILEIDNLSISFFTRLREIPAVMDFSVAVQPGEAVGLVGESGCGKSTVALGVMQDLGVNGKIVDGSIKFKGQDLGKLSPEVLRDIRGNEIAMIYQEPMASLNPAMKIANQLMEVPMIHEGISKEEAYKRALEVVNDVKLPDPERILKSFPHQLSGGQQQRIVIAMALMSKPSLLILDEPTTALDVTVEAAVVDLVKDLGKKYGTSMLFISHNLGLVLETCDRICVMYSGEAVETGSIKDVFNQMQHPYTQALFRSIPLPGADKNARPLIAIPG

SEQ ID NO: 144236 - protein, 308 aa, Unknown
  Bacterial polypetide isolated from the Sargasso Sea
MHALSIKDLSKKYKSGVEALKSVSFDVQEGDFFALLGPNGAGKTTAIGIITSLVNKSSGSIEVFGHDLDKELAKAKSCIGVVPQEVNLNLFDYNFNILVNQAGFYGIPRSEGKKRAEQYLKQMQLWEKRKTNARSLSGGMKRRLMVARALVNRPKLLLLDEPTAGVDIETRRMMWDFLRDLNANGTTIILTTHYLEEAEQLCNKVAIIDEGKIIENDSMQNVLKKLKTEVFILNTEKPLDKAPEIHGYATALKSPQEIEITVSQEQGVNDAFSTLQASGVKVLSMRNKNSRLEELFLDLTKGQQGEGE

SEQ ID NO: 144237 - protein, 260 aa, Unknown
  Bacterial polypetide isolated from the Sargasso Sea
MGRVVPPGIDTSHGTILYLEDIEVSFDGFRALKKLSLAIDAGELRCVIGPNGAGKTTMMDVITGKTRPDAGKVFLGQTIDLARMNEPEIARAGIGRKFQKPTVFEQHPVWENLELAMQTDKGWLASLRARLDRTAQAKIEETLALIGLESQAFRAAGELSHGQKQRLEIGMLLMQRPALLLLDEPAAGMTDHETMELAELLNTLRGTCSMMVVEHDMEFVAALAGDTGRVTVIAEGAVLAQGTLDQVKRDDAVIESYLGR

SEQ ID NO: 144238 - protein, 238 aa, Unknown
  Bacterial polypetide isolated from the Sargasso Sea
MNKPILECNGIAAGYVKGLNILQGIDLVVSEGEIISIIGPNGAGKSTLLKAIMGLINVSAGRFFINGVEKTNLSTHKIINEGIGYVPQVENVFPSLTIEENLEIGAWSLAKNRKSSITKVLKDFPLLNERKKEKAGNLSGGQRQILALARALVTSPNLLLLDEPSAGLSPVAINEVFKTINEINENNVSILLVEQNAKRALKFSNRGYVLDQGRNAYQGEGEELLNDPRVVDLYLGKL

SEQ ID NO: 144239 - protein, 354 aa, Unknown
  Bacterial polypetide isolated from the Sargasso Sea
MAKITLKELSHSYLSKQSKDTDWALRGVNIDWKDGGAYALLGPSGCGKTTLLNIISGLLKPTRGEILFDDKEVTALNPVERDIAQIFQFPVIYDTMTVYENLAFPLKNRGLSKTEIDSKVKEIGEMLELTSTLNNKAAGLTADGKQKISLGRGLVRSDVNVIMFDEPLTVIDPHLKWVLRSKLKELHQKINRTMIYVTHDQIEALTFADEVVVMHEGQIVQTGTPVELFEKPKHTFVGHFIGSPGMNILPCEIANGQINFEGKIIPSNNSFKKTNFSKTQLGIRPEFIKFSNDGIKVKIKRVSDTGRHKVIDTECSSGSIKILANTSTEIPSDSAHITFEQKYTYIYGDDWIVE

SEQ ID NO: 144240 - protein, 250 aa, Unknown
  Bacterial polypetide isolated from the Sargasso Sea
MTVKPKLISTNSGLEVNNLRKSLSGKQIVRDISIKVEKGKVIGLLGPNGAGKSTALYCIMGLIVCDSGEIKLNNNDITTLPMWKRAQAGLGYLPQQPSIFRGLSVENNIMAILETTKLNLDQRINRLEELLAEFNLTHLRNAMPYQLSGGERRKCECARLLGTNPSYVLFDEPFSALDPISINDIKSEINRLKEKGISVIITDHQVREVLDISDYSYLLFSGEIIAHGTSDKILGNKEARKFYLGDTFKF

SEQ ID NO: 144241 - protein, 220 aa, Unknown
  Bacterial polypetide isolated from the Sargasso Sea
MILEVNKLRKEVSSGDSELTILDDVSFSLEEGQSLAITGPSGSGKSTLLGLLAGLDTATSGEIYLDKVGLHKLDEEDRATLRKEKVGFVFQSFELLPSLTALENVMLPSELKSEDNPKENAEYFLKRVGLSEREHHYPNQLSGGEQQRVAIARAFACSAKILFADEPTGNLDPKNGQVVSDLLFEVNSETDNALVIVTHDLELANRCDKRIDLKLGRIVE

SEQ ID NO: 144242 - protein, 344 aa, Unknown
  Bacterial polypetide isolated from the Sargasso Sea
MSDNNNLPVIKCESVFKIFGNNAKRLLENSNGNVDAKTFQEAGCIVGVNNASFDVKKGEMLVVMGLSGSGKSTLLRCISRLTDATAGKIFIDGDDLLSMNSKELIELRRNKMGMVFQNFALLPHKTVLENIAFPLQIKGTNTNESIAKAMEMVELVGLKGRENYFPRELSGGQQQRVGIARSLAVEPDIWFLDEPFSALDPLIRKEMQDEFLRLQGVLKKTIMFVTHDFDEALRLADRIAIMKDGIIEQLDTPDNIVLNPATEYVKKFTEDVPREKVLKIESIMDPIDSNASSNIEVSKDAIIETLAESILNSKEILKVVDVNKNNEIVGSLDPAKVIKVLFGK

SEQ ID NO: 144243 - protein, 243 aa, Unknown
  Bacterial polypetide isolated from the Sargasso Sea
MFIQIKNLTKKFKNNLAVNNINFSIEKNNVLGLLGPNGCGKTTSIGMMLGLIKPTSGQIIIDNKNLESFKRNDILARINFASPYIELPKKLTVRQNLEVYGRLYGIKNRKERIEEISEDLDIKDFFDRQTGELSSGQKNRVSLAKSLINKPEILLLDEPTASLDPDIGDFVRTYIQSYSSKNKVTILLASHNMAEVERLCDSIIMMRSGKIIDRGTCKEIIDKHGRNNLEETFLKLARSKDEL

SEQ ID NO: 144244 - protein, 427 aa, Unknown
  Bacterial polypetide isolated from the Sargasso Sea
MQQVVQEIKNLSIGFTSKKGEQISILKNISTIINKGETVGIVGESGSGKSTLALAMMGYVKHGLFTISGECIYQSNDILKMKNRELENIRGRKIAMIPQNAGQSLTPNLKIGYQIDEALRLHTNFQKEDRDVKISELLNKVRLPSPETIAKRYPHELSGGQQQRVAVAMALAGSPDLLLLDEPTTGLDVTTQAHVLELLNFIAKDTGTSMVYVSHDLGAIAQVSDRVIVMYSGEIVLDGPVRTILKNPIHPYTYGLLKSIPKLTLSGLPNSMSGSQPQPGTIKEGCSFYDRCEFAEDKCKINSPELEFVSDLNSSVRCFNHKKLHKKKDEDTKSSKKVLRKLTKNEILDISSVSISYAKQKFIEQLLNKIDDTNPTVKDINIKIDKGETLALVGESGSGKSTILKSIAGLIKAKDGIIKFDKNKIIS

SEQ ID NO: 144245 - protein, 478 aa, Unknown
  Bacterial polypetide isolated from the Sargasso Sea
MEKNKEKIIVVKNLTVKYGLKQQPIIKNFNLEIDSGDHLAIIGPSGCGKTTFAKTLVNILPEKATSKGYLSISSVDPRKINNKDAQLFRRKNFGFIYQDSIKKLNPLMRVGDHLYELFKTHDKTKSSIAIKKLVREVFQKVGIEESRLDSFPHQFSGGMRQRVSIAMALALKPKLLIADEPTTSLDTKTSFEIMKEIIHLCNNFDTTLILISHDINLAAKWCKKIAIIDKGSIVEQGNILDIFQSPKSDIGIKLVNASKIVLKPNTKNNIRNELLLEVDNLRHWYKLNSSIFRNKWNKALNEVSFKLYKNETLGIVGSSGSGKSTLCRALIGLINVRGGEIKIYDKDHESKKNKSYKKYNNMQIIFQDPFSSLNPKMTIKNLLEDIFFIQKISDKRKIEKEIKTIFRNLNLPLNNDFFNSYPSQLSGGQLQRISIARALLLKPKILICDESVNMLDASIKIEILELLRLLQEKMNLTI

SEQ ID NO: 144246 - protein, 227 aa, Unknown
  Bacterial polypetide isolated from the Sargasso Sea
MTGGYGDGPDIINSCSINVDKGEIVAILGPNGAGKSTAMKAMLGLLNLKSGSVVIEDQDISKFSPQERVQRGISFVPQTKNVFSELTVRENLEIGGFLRKDDIDIVINQIYELFPILAEKRDQVVGQLSGGQRQQVALGRALMIQPSVLMLDEPTAGVSPIVMDELFEHIVKVKKTGVAIIMVEQNAKQALSISDRGYVLVTGENKFEGSGKELLNDPEVRRSFLGA

SEQ ID NO: 144247 - protein, 297 aa, Unknown
  Bacterial polypetide isolated from the Sargasso Sea
MTTTPVIKCESVYKIFGANAEKMLQNSNGNVDAKIFQDAGCIVGVNNASFEVSKGEMLVVMGLSGSGKSTLLRCISRLTDATGGKIFIEGQDLLAMNDKQLIELRRSKMGMVFQSFALLPHKTVLENIAFPLQIKGGETDDSIKKAMEMVELVGLKGRENYFPRELSGGQQQRVGIARSLAVEPDIWFLDEPFSALDPLIRKEMQDEFLRLQGVLNKTILFITHDFDEALRLADRIAIMKDGLIEQLDTPANIVLSPKTEYVRKFTEEVPREKVLKIEAIMDKSINEKDNKMISVSK

SEQ ID NO: 144248 - protein, 293 aa, Unknown
  Bacterial polypetide isolated from the Sargasso Sea
ASKRRKTLERELDWVRQGAKGRQTKQKARLQNYDKLLNEDQKALDEKLEIYIPNGPRLGTNVIEAKNVAKAFGDKLLYDNLNFTLPQAGIVGIIGPNGAGKSTIFRMIMKEQEPDSGSFEIGDTVKIAYVDQSHANINPEKSIWENFCDGQELIMMGGRQVNSRAYLSRFNFGGSEQNKKVSTLSGGERNRLHLAMTLKEEGNVLLLDEPTNDLDINTLRALEEGLENFAGCAVIISHDRWFLDRVCTHILAFEGDSEVYYFEGSFSEYEENKRKRLGKEVTPTRIKYKKLIR

SEQ ID NO: 144249 - protein, 231 aa, Unknown
  Bacterial polypetide isolated from the Sargasso Sea
MIDISNLNFYYGSSQILFDVSLKAKNKEITCLMGSNGVGKTSLLKFLSGIYPSKSGNYLFEGDNVTNFSSHQLAKRGLGYVPQGRFIFPLLSVKENLETGFACLKRDKHFIPDEIFDLFPVLKQMINRRGGDLSGGQQQQLAIARAMISKPKLLLMDEPTEGIQPNIIQQIGEVIKYLKDEQGMTILLVEQYFDFAFDLADYVYVMKRGKIITESKKESLDKLSFKNEVSI

SEQ ID NO: 144250 - protein, 159 aa, Unknown
  Bacterial polypetide isolated from the Sargasso Sea
MAFFEGNKMTAGYGDGPDIISSCSINVDRGEIVAILGPNGAGKSTAMKAMLGLLNLKSGSVNIDGKDISKFSPHDRIKQGISFVPQTRNVFAELTVRENLEVGAFLREDDINKVIEEIYELFPILKEKKSQVVGQLSGGQRQQVALGRALMIKPSVLML

SEQ ID NO: 144251 - protein, 176 aa, Unknown
  Bacterial polypetide isolated from the Sargasso Sea
MLKISNVETFYGKIQALRGVDLDVNDGEIVSLIGSNGAGKSTLLMTISGVNKARRGNIVFNGENIENKDPHKIVDMGICQVPEGRRIFSRLTVEENLRLGAHANEKGKHFENDIKEVYDLFPVLSDRKTQRGGTLSGGEQQMLAIGRALMSKPKVLLLDEPSLGIAPKLVNQIFVS

SEQ ID NO: 144252 - protein, 185 aa, Unknown
  Bacterial polypetide isolated from the Sargasso Sea
MTDAVIKCESVYKIFGANAKKMLQEANGNVDAKKFQDNGCIVGVNNASFEVSKGEMLVVMGLSGSGKSTLLRCISRLTDATGGKIYIEGQDLLSLKEKELIELRRNKMGMVFQSFALLPHKTVLENIAFPLQIKGVETEKSINKAMDMVKLVGLDGRENYFPRELSGGQQQRVGIARSLAVEPDI

SEQ ID NO: 144253 - protein, 334 aa, Unknown
  Bacterial polypetide isolated from the Sargasso Sea
METAIQIQNVWKIFGNNSEEALDAIQNKNISKQEALEKYNSVIGVSNVSFDVNKGEIFCVMGLSGSGKSTLVRHINRLLEPTSGKILINDQDVMQFDKDSLQELRNKKIGMVFQNFALMPHRSVLDNIAMPLEIRGVSKNDRLDAANKILNIVELQGWGNKYAHELSGGMQQRVGLARALAADPEFLLMDEPFSALDPLIRRQLQSEFIKLSKQMKKTTVFITHDLDEAVRVGHRIAIMRDGAVVQIGTPEEIVINPADEYVADFVKGISRLKVVQAKTIMRSVKDYESKIGPLDNDNELVSENDVLSKLIETSISKNKPIVVIDKNNQKIGVI

SEQ ID NO: 144254 - protein, 580 aa, Unknown
  Bacterial polypetide isolated from the Sargasso Sea
DLYKYAQQNQTKVKRGILYSILNKLFDLAPPVLIGVAIDIVVEGSDSFIGSFGFEDRRQQLIILAFITFVIWGLESIFDYVAAVTWRNIAQDLQHSLRTETFEKTLDLDLSFFENKSSGRLMAILNDDVNQMEQFLNEAANRLIQTATTVIVIGGTFIYISPLVAVFAFIPIPVIIFGSYKFTQRIAERYSKIRNNIESLNAHLSNSITGVLTVKSFNRKDREYKRIDEASKEVKTANYEAIKLSAAFIPIIRIAILFGFTATLLIGGFLALDGQIKVAMYSVMLFITQRLLWPLTELGMIFDVYQKAMASFRRIINLKETKPLINDGNTFMEELKESIRFENLNFEYVSDFPVLKDINIEIMKGKTTAIVGSTGSGKSTLIKLILRFYEKNSGKIFFDNNEIESLEIDSLRSKVGLVSQDVFLFEGTVFENIAYGNIDASTEDVWNAARLSESDKFISELPNQENTIVGERGQKLSGGQRQRISIARAILKNPEILILDEATSAVDNETEAAIQESLETLKEGRTVIAIAHRLSTIRNADLIYVLESGEIVEYGTHDELLNNQGVYAKLWDVQTGKIKR

SEQ ID NO: 144255 - protein, 348 aa, Unknown
  Bacterial polypetide isolated from the Sargasso Sea
MLAVEVKDLTYSINNKKILNNINFHLNKDSISCILGPSGSGKTTLLKLIAGLEKVQSGKIIINGEEVSSTSKHLPTEKRKIGFLFQDYALFPHLTVKENLRFPINAKSTTSYVDEIIELIKLPNSLDKYPHELSGGEQQRVALARSIISQPDLLLLDEPFSSLDLSLREEVRDDTLHLLQKSNVSVVIVTHDPFEAMFISNHINIFDKSGSIVQSGTPNDLYNKPKNSYVTGFFGETNKFEGVVKESHILTPVGKIKTPENFEGENVVVHIRPQGIKLSKQPTPVNGIKGTVMASKLMGSFSFIHLSVLDNNNEIVHVHSHMPADFNPKQSSAVEIEIDNDQAYIFKN

SEQ ID NO: 144256 - protein, 165 aa, Unknown
  Bacterial polypetide isolated from the Sargasso Sea
MSSFIRLKKINKIFDLKNKVRALKNINLEFNLGKIYSIVGPSGSGKSTLLNMLSLIDSPTSGHIKINTKNIIIGNNNENDNLRASLIGIIYQNYNLLNDFTAIENVALAGLALNKNRRQVLLDAKKIMSNLGLSKRFDHFPSELSGGENQRVAIARALINKPKII

SEQ ID NO: 144257 - protein, 143 aa, Unknown
  Bacterial polypetide isolated from the Sargasso Sea
IFATLSVEENIQTGLENAPTKRVPEEIYALFPVLYEMRARKGGNLSGGQQQQLAIARALVTQPKVLLLDEPTEGIQPSIIKDIARALNEIRKLRDITIVVSEQVLSFALDVADRLFVIEGGRLVHESPRSAVDTAKIREYLSV

SEQ ID NO: 144258 - protein, 249 aa, Unknown
  Bacterial polypetide isolated from the Sargasso Sea
MDQRQTTTSQLQKDCKKETKLSKIIQMNKINKQVQKENKTINILQECSLTVQQGDMIAITGQSGIGKSTLLNIIGCLDEPSSGTYHLNGQDITSLPTEHKSKIRKEIFGYIFQQYWLIKHLTILENVELALHYKGMKNTRKIATETLEALGLLQHQHQLPNQLSGGQQQKSSIARAIATQPKIIIADEPTGALDKKSSHQVMSLLKDINHTTQTTIIVVTHDQDMAKICNKQMAIESLFHTNEIQNATL

SEQ ID NO: 144259 - protein, 85 aa, Unknown
  Bacterial polypetide isolated from the Sargasso Sea
MSEAQQPYLRIEDLTKHFGEFVAVRELSLEINGGEFVCFLGPSGCGKTTLLRAIAGLDPQTTGRITQNGQDISSLPPSERDFGIV

SEQ ID NO: 144260 - protein, 479 aa, Unknown
  Bacterial polypetide isolated from the Sargasso Sea
MAALARQRRQHAEAARARLCVRRRGRFRGRRVDRLVAPDRLLGASGAARARPRARHRAAAAHVLLLPVELFGGRVPDRARYRLPGRGAHVVGRRERQQAVLRRRAHARRERALPRAARRDSGRAAARVRRHLHGAERIVHGAGRRRDDGRQVGARLVPELGAGLGIVREHVCGADRDGAAVFRADRAAVRGARPRARLAERNRQMVSAAVLESSVASSVAAAPAVTAPRGARIDIRRVSHAFDGPGGALPVLDDVTLSVAAGEFVALLGPSGCGKSTLLRLVAGLDAARHGTIAQDGVPIEQPDPSRIVVFQDPTLYPWRRVRANVALGLEACGVARTAQHRVDDALARVGLQEFANVFPHQLSGGMAQRVALARALVNDPRLLILDEPLGKLDSLTRLTMQAELTALWQRDGFSALLVTHDVEEALFLAQRVIVFGPRPARIIAELHVDLPYPRHRGDPRLAELRHDALRHLGLDASW

SEQ ID NO: 144261 - protein, 110 aa, Unknown
  Bacterial polypetide isolated from the Sargasso Sea
EVNLKSLLDRYPNLDIKQDWPRILSLGEQQRLAFARLLLNSPKFAVLDEATSALDINTEKKLYSLLKERELSLISVGHRPSLKDFHENILELNGQGDWKLLTSDKYNFKD

SEQ ID NO: 144262 - protein, 170 aa, Unknown
  Bacterial polypetide isolated from the Sargasso Sea
MLSLQNISKSFGGVKAVSDVSLEIEKGDVLGLIGPNGAGKSTLINLISGLLTPDNGAIYLSGKNITSRKSYERARLGLARTFQNLRIYPNLTVGQNIEVAEISSQYSERKETKNLDEIIHVFDLSDKADLPSDELSYGHLRRLEIVRALALNPLVLLLDEPAAGMKKMRP

SEQ ID NO: 144263 - protein, 97 aa, Unknown
  Bacterial polypetide isolated from the Sargasso Sea
RAALARALCMEPKIMLFDEPTSALDPEMIKEVLDAMVSLAKGGMTMIVVTHEMGFAKEVADEVVFMDEGMIVERAKTNDFFANPKNERTKLFLSQIL

SEQ ID NO: 144264 - protein, 219 aa, Unknown
  Bacterial polypetide isolated from the Sargasso Sea
MNLIGENITYKPDDQFHLNDVSFNFKKGNLYTILGRTLSGKTTFLKTIAGLLNPDSGNLSFEDNDFIKIPVWERNVAMVYQQFINYPHLNVYENIIFPLKQRKISEDQIKKDVEEALKTVGLVGFENRKIQELSGGQQQRVALARSLAKKAKILLLDEPLVNLDYKLREQLREEFKRIFTQGLSEDTILIYSTTDPQEVMELNGEVIVLDEGKVLQKGP

SEQ ID NO: 144265 - protein, 367 aa, Unknown
  Bacterial polypetide isolated from the Sargasso Sea
KYEEIDWMASGATAEKTDNVEPGDVILKIDNLKKYYEVAANALFGSSGSKKVVKANETLSFEAREGETLAIVGESGCGKSTLAKVLMGLETATDGAVLLDNKSIGDTPIESRNTQTVADIQMVFQNPFDTLNPSMAVGRQIIRALEIFRFGKSDKDRNERMLELLDLVKLPRAFAERMPRQLSGGQKQRVGIARAFAGGARIVVADEPVSALDVSVQAAVTDLLMEIQRNEKTTLLFISHDLSIVRYLSDRVMVMYLGHVVELGTTDQVFSPPYHPYTEALLSAVPIADTSVEKEHIVLEGDIPSAMDPPSGCPFQTRCRWKKDVPGDLCEKEIPPQRDIAIGHQIKCHLSETKLSKMTPVIKLAAE

SEQ ID NO: 144266 - protein, 249 aa, Unknown
  Bacterial polypetide isolated from the Sargasso Sea
MSNVVSKNSAINVVNLEKSVTTQEGSLTILKGINLDVKQGESVAILGPSGSGKSTLLGLLAALDTPTAGEIWLDGQALSPLNEEQKAALRKQKVSFIFQSFMLVDTLTALENVMLPAELAGVKNAKEKAEAMLGRVGLSHRLTHLPKQLSGGEQQRVAIARAFICEPKVLFADEPTGNLDSVNGHKIADMLFELNQESHTTLILVTHDLQLAKRCQRQLVMDNGHLQEELNSAQSHNVNNNLELSAKEA

SEQ ID NO: 144267 - protein, 206 aa, Unknown
  Bacterial polypetide isolated from the Sargasso Sea
MSLKVKNLAFSINESLLFENLDFEIGKNKVGLITGTSGIGKSSLLNVLSGLLKPDNGSIICNDIILNNENVFVEPENRNIGYVFQDFALFPHINAEKNIKYAISKDLINFYKEVIISLKLKDHLKKMPFELSGGQKQRVSIARAILMKPSLLLLDEPFSNLDSENIKSAQNLLLLVLEKLKIPCILVSHDTSNLEALDIAQIINLN

SEQ ID NO: 144268 - protein, 348 aa, Unknown
  Bacterial polypetide isolated from the Sargasso Sea
MIAVEVKDLTHSINNKKILNNINFNLNKDSISCILGPSGSGKTTLLKLIAGLEKVQSGKITINGEEVSSIAKHLPTEKRKIGFLFQDYALFPHLTVKENLRFPTNAKNSTNNIDEIIELIKLPNSLDKYPHELSGGEQQRVALARSIISQPDLLLLDEPFSSLDLSLREEVRDDTLHLLQKSNVSVIIVTHDPFEAMFISNHINIFDKSGSIVQSGTPSELYNNPKNSYVTGFFGETNKFEGVVKESHIYTPVGKIKTPGNLEGEKVVVHIRPQGIKLNKQPTPVNGIKGTVMASKLMGSFSFIHLSVLDNNNEVVHVHSHMPADFNPKQSSAVEIEIDNDQAYIFKN

SEQ ID NO: 144269 - protein, 343 aa, Unknown
  Bacterial polypetide isolated from the Sargasso Sea
MSEPVIKCESVYKIFGENAETMLKEANGNVDAKTFQENGCIVGVNNASFEVSKGEMLVVMGLSGSGKSTLLRCISRLTEATGGKIFIEGQDLLNLNNKELIDLRRNKMGMVFQSFALLPHKTVVENIAFPLQIKGINTGESINKAMDMVKLVGLDGRENYFPRELSGGQQQRVGIARSLAVEPDIWFLDEPFSALDPLIRKEMQDEFLRLQEKLQKTIMFITHDFDEALKLADRIAIMKDGIIEQLDTPANIVLNPATEYVRKFTEEVPREKVLLIEDVMDSSTTGNIGDLKVLRDEIIENVAEKILTQEKTVAVIDNNNNIVGSINPTKIINTVFGGRKNNN

SEQ ID NO: 144270 - protein, 350 aa, Unknown
  Bacterial polypetide isolated from the Sargasso Sea
METAIQIQNVWKIFGNNSKEALDAIQNKNISKQEALEKYNSVIGVSDVSFDVNKGEIFCVMGLSGSGKSTLVRHINRLLEPTSGKILINNQDVMQFDKDSLQELRNKKIGMVFQNFALMPHRSVLDNIAMPLEIRGVSKNDRLDEANKILNIVELQGWGNKYAHELSGGMQQRVGLARALAADPDFLLMDEPFSALDPLIRRQLQSEFIKLSKKMKKTTVFITHDLDEAVRVGHRIAIMRDGMVVQIGTPEEIVVNPADEYVADFVKGISRLKVVQAKTIMKSIKEYENKFGKLDNNNELVNENEVLSKLIEISVTKDKPIIVTNKNNEKIGFISQSDLLKAVVEGNENE

SEQ ID NO: 144271 - protein, 320 aa, Unknown
  Bacterial polypetide isolated from the Sargasso Sea
QEANGNVDAKTFQDNGCIVGVNNASFEVSKGEMLVVMGLSGSGKSTLLRCISRLTDATGGKIYIEGQDLLSLKEKELIELRRNKMGMVFQSFALLPHKTVLENIAFPLQIKGIETEKSINKAMDMVKLVGLDGRENYFPRELSGGQQQRVGIARSLAVEPDIWFLDEPFSALDPLIRKEMQDEFLRLQEKLKKTIMFITHDFDEALKLADRIAIMKDGIIEQLDTPAKIVLNPATDYVKKFTEEVPREKVLIIEDVMDAPTSDNLSDLKVSKDEIIENVAEKILSQEKSVGVIDKNNKIVGTVHPSKIIHTVFGGRKENS

SEQ ID NO: 144272 - protein, 347 aa, Unknown
  Bacterial polypetide isolated from the Sargasso Sea
GDFTAVKNSNLTINDKEFFVLLGPSGCGKTTTLRMIAGLELPTSGEIYLGDEEVGMLRASERDIAFVFQLFALYPHMNVRNNLSFPLKMQGYKRRDIKSRVEEAAKLLRIDHILNSNISSLSGGDRQRVALGRALVRRPKAFLMDEPLGTLDAEFRELMCLELKKLHLDIAATTVYVTHDQLEAMSLADRIAVMDGGEILQADEPNIIYNKPKTKFVASFIGSPGMNFFEVNEGISKDQSIVNIEGAKFDIPKQLEDSKGSKNFFGIRPENLTLNNNEGLKGSVFGVEYLGSRKIITIKTSLGEIKVKTDISVSVKLNENVQVKPLNNNIIIFDGQTDKSLNSEFIK

SEQ ID NO: 144273 - protein, 239 aa, Unknown
  Bacterial polypetide isolated from the Sargasso Sea
MVFILKRYQNHIGKKQVVRDISLKINKGEIAGLLGPNGAGKTTTFYMIVGLIKPDTGSIFLDKTDVSTFPIYMRGKKGISYLPQEPSIFRGMNVEDNLMSIIEIIEEDKSKHSIIMENLLNEFDISHVRKSKSIVLSGGERRRLEIARTLASKPQYLLLDEPLTGIDPVSIEEIKIIIKKLKNKNIGILITDHNVRETLKIVDKVYILNEGAIFYEGNPKDAINNEKIKKFYLGKNFSL

SEQ ID NO: 144274 - protein, 216 aa, Unknown
  Bacterial polypetide isolated from the Sargasso Sea
MIEPLIVFRGIKKKYANATILRNVDIALYHGKCILLSGNNGSGKTTLLKIIAGLETPSCAEIEFSGKSLSWKKAIQGVRKEIIYLHQHPYLLSGTVESNVSYGLRFTHLNRKQLRDSVKEALNWAGLADVAKQQAKTLSGGVQQRVAFTRAWILKPKVLLLDEPMANMDLESREKACDLLKRMKSEGMSIVITSHDTNITDGLIDSHFSLSDGKLD

SEQ ID NO: 144275 - protein, 258 aa, Unknown
  Bacterial polypetide isolated from the Sargasso Sea
MNASLGPDNIQPTSLSGNTLLEVDQISLSFGGVKALQDVSFSVEEKQIMAIIGPNGAGKTSMLNVINGFYHPQQGQIHFKGLHRKQMRPHEAAVQGIARTFQNVALFKGMSTLNNIMAGRNLKMKKNLFWQAFYYGPARDEEMRHRLEAEKIIDFLEIQSIRKTPVGRLPYGLQKRVELGRALAMEPDLLLLDEPMAGMNLEEKQDMCRFVLDINEQYGTTIVLIEHDMGVVMDLSERVVVLDYGRKIADGTPDGSKV

SEQ ID NO: 144276 - protein, 261 aa, Unknown
  Bacterial polypetide isolated from the Sargasso Sea
MSLLEIRNLQVTFGGLDALSNLDFSIEEGEIVSVIGPNGAGKTTFFNTISGMIPPTSGEIIFNGESVLGLDPNQITEMGIARTFQNVRLFPNMTVLENVMVSQHCRTSQLLMGALFQTKAFKQEEKEIRERSIEILGFFGTRLIGYRLDQPAFALSYANRRRLEIARAMATQPRLLLLDEPVAGMNPIETAELTGLISRLRDEWGFTIVIIEHDMKVVRDVSDRVVVLDHGVPIAQGAYDEVSTNPDVIEAYLGRPVEAKS

SEQ ID NO: 144277 - protein, 231 aa, Unknown
  Bacterial polypetide isolated from the Sargasso Sea
MALTAHQLMMRFGERDLFQIEQLSIAAGDAIWLRGANGVGKTTLLKILAGLLTPTRGHTNLPSGWRGKLGQWLKRDPGPGRVTYLHQTPYLFDRSVHDNVAWALGHRAADEVRVFEALRRVELESLAREHISILSGGERQRLAMARAWALQPAFLLMDEPTANLDAHSVALMAAMAQDLREQGSGLVIISHQSNDLTDLCERQWTLARGRLHEPTPLKIIERHDLKQRTSY

SEQ ID NO: 144278 - protein, 240 aa, Unknown
  Bacterial polypetide isolated from the Sargasso Sea
MSIEVKNLNKTFKKILAVQDLNFEIKKGSIVGLLGPNGCGKTTTIGMMLGLIKPSSGGILIDGKNIENENIRTKILEKVNFISPYVELPKKLTVEENLIVYGKLYGVEKLEEKVLSLIKDLNLENFKKRKTGELSSGQKNRVSLAKALINDPDILLLDEPTASLDPDVGDYIRSYIENFASKKGTTILLASHNMNEVERLCSEVMMMKNGKIIDKGTCKSLVNKHGRKNLEDTFLKIVRE

SEQ ID NO: 144279 - protein, 100 aa, Unknown
  Bacterial polypetide isolated from the Sargasso Sea
QQQRVAMQRALCMEPKIMLFDEPTSALDPEMIKEVLDVMVNLANQGMTMIVVTHEMGFAKEVADSMIFMDEGKIVEKATTKEFFANPKNERTKLFLSQIL

SEQ ID NO: 144280 - protein, 155 aa, Unknown
  Bacterial polypetide isolated from the Sargasso Sea
RDVFRVDHIGFIFQLFNLLPYLSIEDNVMLPLRFSSIRAKRAGRTKLDRINEARRLLKALGLNEQQAEKSPVIELSVGQQQRVAAARALIGSPELIIADEPTSALDTNLRHSFLELLFGECKKSGSTLLFVSHDSTLSGNFNRQASMDELNNIIN

SEQ ID NO: 144281 - protein, 350 aa, Unknown
  Bacterial polypetide isolated from the Sargasso Sea
MEAAIQIQNVWKIFGNTSKDALDAIQNKKITKQQALEEYNSVIGVSDVSFDVKKGEIFCVMGLSGSGKSTLVRHINRLLEPTSGKILINNRDVMRFDKKNLQDLRNQKIGMVFQNFALMPHRSVLDNIAMPLEIRGVSKNDRLDAANNILNIVELQGWGNKYAHELSGGMQQRVGLARALAADPEFLLMDEPFSALDPLIRRQLQTEFIKLSKQMKKTTVFITHDLDEAVRVGHRIAIMRDGSVVQIGTPEEIVVNPADDYVADFVKGISRLKVVQAKTIMQPLDDYKRNFGENVGNNERVNENDILSKLIETSVSENKPIIVLNNDNKEVGIITQSDLLKAVVEGNDNE

SEQ ID NO: 144282 - protein, 87 aa, Unknown
  Bacterial polypetide isolated from the Sargasso Sea
VLLLDEPTASLDPETGDFVRSFLEDYKKEKKISVLLASHNMEEVKRLCSSVLMMKDGLIVDRGTPEELITKYGRRNLEEVFLEIARK

SEQ ID NO: 144283 - protein, 243 aa, Unknown
  Bacterial polypetide isolated from the Sargasso Sea
MNGKLLEIRDLSAGYSASVNIISDITMWVEDGEILTLIGPNGAGKSTLIKCLCGLLRYSSGSILFKQKEINGLKTHQIISQSIAYVPQTNNVFSRLSVEHNLDLGSLAHPQSHDQRLVHVFELFPDLKRYLGKKAGILSGGQRQMLAIARALMSSPKLLLLDEPSAGLSPLFRRQVFEHVTKIKETGVTVVMVEQNAKAALKISDRGIILAEGKLRLEGTAEEVLQSSEIGEIYFGAQNGSDT

SEQ ID NO: 144284 - protein, 287 aa, Unknown
  Bacterial polypetide isolated from the Sargasso Sea
MPKATEVILKLENLKTYFPVKKGIFRRTVGHVKAVDGVDLEIYRGETLGLVGESGCGKTTLGKSILQLVKSTYGKILLYDGENKIDLRQLDHSNMKPIRKKLQIVFQDPHSSLNPAFTVFGSLQDLLKNFGTRSKTKIREKIGDLLEAVNMRRDQMDHYPHEFSGGQRQRIGIARALCVEPELIVCDEAVSALDVSIQAQVLKLLKEIKDKRGLTYIFITHDLSVVEYISDRVAVMYLGKIMELAESDDLYSNALHPYTKALLSAIPVADLDRKKERIILEGDVPNP

SEQ ID NO: 144285 - protein, 255 aa, Unknown
  Bacterial polypetide isolated from the Sargasso Sea
MTDKLLQISNLDIVLPEGSERDLAVKNLNIDLSNGETLCIVGESGSGKSLTARALMGLLPAPHVRVEKGIISFCGEDLTKASEPRMRQIRGSEISMIFQEPMTALNPVMTIGVQIDEVFRYHADMSKSERRQRAIELLEDVQLPDPKQIVAAYPHELSGGQRQRAMIAMALALEPKILIADEPTTALDVTTQAQILKLISEMQAVHKSGVLFITHDFGVVADIADRVVVMQYGNVVETGTVDKVLNKPEHPYTKA

SEQ ID NO: 144286 - protein, 354 aa, Unknown
  Bacterial polypetide isolated from the Sargasso Sea
MAKVTLKSLSHSYLKIQSSDADWAIRGVDIDWNDGGAYALLGPSGCGKTTLLNIISGLITPTKGDILFDDKVVSGLNPVERNIAQIFQFPVIYDTMTVYDNLAFPLRNRKIPEEEIKVKVHEIAEMLELSSTINNRASGLTADGKQKISLGRGLVRSDVNAIMFDEPLTVIDPHLKWILRSKLKELHQKINRTMIYVTHDQTEALTFADQVVVMHEGQIVQTGTPVDLFEKPKHTFVGYFIGSPGMNVLPCQINGNDVIVNGKKIETHQQVKKNNFSKTEVGVRPEFISFSKDGIPVKVLSVSNTGRHKIVDTESESGKIKIIAKSNENIPSGSAFLKFKKEYTYTYGDSWIIE

SEQ ID NO: 144287 - protein, 921 aa, Unknown
  Bacterial polypetide isolated from the Sargasso Sea
MTTRHNTSQKKQRGFIKAGAGQQNDPRIMRAAQEAARPLEDTLKSLNTSTRGLTYDQAADRLQHYGPNEIAHDKPPHWTRQLLLSFHNPFVYVLLVLAAISFFTDVYFAAPDDRDYVGMTILLTMVTISALLRFVQEFRSLRAAEKLKAMVRTTATVQRAMTDTSEPTRREVPMREIVAGDIVHLSAGDMIPADVRLLASRDLFISQAVLTGEALPVEKYDTLGAVAGKSASTRAADSATDTSASLLDLENVCFMGTNVVSGTATAVVVATGEDTYFGSLARNVVSHKRIETSFDRGVASVSWLLIKFMFVMVPIVFMINGLTKGDWLSALTFALAVAVGLTPEMLPMIVSANLARGAVAMARRKVVVKRLNSVQNFGAMDVLCTDKTGTLTQDKIILEHHLDLSGYKDEEILRLGWLNSFHQSGQKNLIDIAVVARADEIGERVKPQGYKKIDELPFDFVRRRLSVVVEDTHGTHLLICKGAVEEMLAVSTHVQDEDGVRPLDFVARKRLLEQASAYNEDGFRVLVLATRTIPRGDERQQYRTADEHDLVVRGFLTFLDPPKESAAPALAALRENGVAVKVLTGDNPIVTMKVCRQVGLEPGKPMLGTEIEALDDATLAEVVERTTVFAKLTPLQKARIVKALQANGHTVGFLGDGINDAPALRDADVGISVDSGADIAKETADIILLEKSLMVLEEGVIKGRETFGNILKYLNMTASSNFGNVFSVLVASAFLPWEPMLATQLLVLNLIYDTSQMLLPWDKMDPEFLKKPRKWEAGNISRFMLWVGPTSSVFDITTYILMWTVFGAGAMYHLNGGTGGQIVMNSGWFIESLVSQTLVVHLLRTQKIPFLQSTAALPVLLSTFTAIAIGCWLPFSPFAESLGFMHLPGTFWLWLASTMVGYILLAQIVKTIYVRRYKQWL

SEQ ID NO: 144288 - protein, 343 aa, Unknown
  Bacterial polypetide isolated from the Sargasso Sea
MSEAVIKCESVYKIFGENAEKMLKKANGNVDAKTFQENGCIVGVNNASFEVAKGEMLVVMGLSGSGKSTLLRCISRLTDATGGKIFIEGQDLLELNNKELIDLRRNKMGMVFQSFALLPHKTVVENIAFPLQIKGINTDDSISKAMDMVKLVGLDGRENYFPRELSGGQQQRVGIARSLAVEPDIWFLDEPFSALDPLIRKEMQDEFLRLQDKLQKTIMFITHDFDEALKLADRIAIMKDGIIEQLDTPAKIVLNPATEYVRKFTEEVPREKVLLIEDVMEQSTGDNLGDLRVSKHEIIENVAEKILTQDKTVGVIDKNNKVIGSINPTKIINTVFGGRKNGN

SEQ ID NO: 144289 - protein, 343 aa, Unknown
  Bacterial polypetide isolated from the Sargasso Sea
MSEPVIKCQSVYKIFGANAEKMLKEANGNVDAKTFQEKGCIVGVNNASFEVSKGEMLVVMGLSGSGKSTLLRCISRLTDATGGKIFIEGQDLLNLNNKELIDLRRNKMGMVFQSFALLPHKTVLENIAFPLQIKGIKTEDSINKAMDMVKLVGLDGRENYFPRELSGGQQQRVGIARSLAVEPDIWFLDEPFSALDPLIRKEMQDEFLRLQEKLQKTIMFITHDFDEALKLADRIAIMKDGIIEQLDTPANIVLNPATEYVRKFTEEVPREKVLLIKDVMDEITSDDMGDIKVSKDEIIENVAEKILTQEKTVAVIDSKNNIVGSINPAKIINTVFGGRKNNH

SEQ ID NO: 144290 - protein, 324 aa, Unknown
  Bacterial polypetide isolated from the Sargasso Sea
MFLKVENLQKFYSKKLPLIEKLSFSVNKGEIISFIGESGSGKTTFLKCLAGLEGINSGVISLNGEVLNNDNTFVKPHLRKIGFVFQDYPLFPHIDVIQNITLNLEEKFHNKIDYFIELTGLKNLESRYPHELSGGEQQRVCLARALVREPDLLLLDEPFSNLDSNIKSSIQDEIHRIIKKTQTTTILVTHDIRDTFNISDKILIFKAGILQQYDKPIEMYCNPVNCYCAKILGDLNQINTDNKTYYLRPENMKLSNNSKFKAIIEKSLFVGKEYKIRAKADNQIWHFFHDQPISVNEKVYIDFDKKDLLEFDSTCSNYFTINSK

SEQ ID NO: 144291 - protein, 360 aa, Unknown
  Bacterial polypetide isolated from the Sargasso Sea
MSQIKIANLQKSFGDFTAVKNSNLTINDKEFFVLLGPSGCGKTTTLRMIAGLELPTSGEIYLGEEEVGMLRASERDIAFVFQLFALYPHMNVKNNLSFPLKMQGYSRSEIKTRVEEAAKLLRIDHILNSSISSLSGGDRQRVALGRALVRRPKAFLMDEPLGTLDAEFRELMCLELKKLHIDIGATTVYVTHDQLEAMSLADRIAVMDGGEILQADEPAVIYNKPATKFVASFIGSPGMNFINIDQGISNEQSTLNIEGTNFNIPKQYEISKSKKNSFGIRPENLSLTNEGGLKGSVFGVEYLGSRKIVTVKTNFGEIKVKTNISTSVKINENVQIKPSNNNIIIFDGETDRSLKSEFMN

SEQ ID NO: 144292 - protein, 360 aa, Unknown
  Bacterial polypetide isolated from the Sargasso Sea
MAEIEIKNLHKSFGDFVAVKNSNLIIENKEFFVLLGPSGCGKTTTLRMIAGLELPTSGNIYLDKEDVGYLRASQRDIAFVFQLFALYPHMNVRNNLAFPLKMQKLSRSEVDAKVLEAAKLLRIDHLLKSKVSSLAGGDRQRVALGRALVRRPKAFLMDEPLGTLDAEFRELMCLELRKLHDDIDATTVYVTHDQQEAMSMADRIAVMNEGVVLQADSPKVIYNKPKTKFVANFIGSPGMNFIPIKEKISPSQSSIKLLDSSLNIPEQKEGTDSNENFLGVRPENLKLVSENGVKGNVFGVEYLGSRKILTIETQLGNIKIRVDSDTQVNINEQIQFDTLNNNQIIFDGSNDKALQSEFMS

SEQ ID NO: 144293 - protein, 242 aa, Unknown
  Bacterial polypetide isolated from the Sargasso Sea
MSLSLETVSISLGGRQLVNRVSLDLSPGEVVGLLGPNGAGKTTTFNLVIGLLRPDTGVISLDGEVVSTLSMPKRARLGLGYLPQEPSVFRQLTVRQNLEIALDQTDLSSQQRRDRRDQLIEDFHLVAFVDRCGYQLSGGERRRCEVARALAVGSEGPRYLLLDEPFAGVDPLAVADLQELIQELRSRGMGILVTDHNVRETLAITDRAYILNDGSILASGQSETVANDPLVRRHYLGEAFQL

SEQ ID NO: 144294 - protein, 194 aa, Unknown
  Bacterial polypetide isolated from the Sargasso Sea
IGMILGLLKPTSGDVLINGLKIEQNPIEILQKINFISPYIELPKKLTVKQNLIVYGKLYSVKNLSEKIDYLVSKLRLENLLNRVTGELSSGQKNRISLAKAIINDPNVLLLDEPTASLDPEIGDFVRTFLENYKKEKKVSILLASHNMDEVTRLCSSIMMMKNGLIIDQGRPNDLIKKHGRKNLEEVFLKLVRN

SEQ ID NO: 144295 - protein, 249 aa, Unknown
  Bacterial polypetide isolated from the Sargasso Sea
MKKILKINDIYKNFGGIEVIKNFSLSLDSGSKVALIGPNGAGKTTIFNLISGVYPIDRGSIIINDKDITSLPAYKRIRFGIARSFQNIRLMPHLSVIENVLMGQHALASNFATLFRPIHFGEGSKDKLEAKNLLDKFGINVPPEEIVSNLPYGLQKRIEVVRALMAKPSLLLLDEPTAGLNKEESDQLSLMLNQISSDGTTILLVEHNMRFVNNFVEHTVVLNFGEKIYEGPPLLAQKDKQVREAYLGK

SEQ ID NO: 144296 - protein, 306 aa, Unknown
  Bacterial polypetide isolated from the Sargasso Sea
ARRPISQPMDVGVRAINSVITVGQGQRMGLFAGSGVGKSVLLGMMTRGSEADVIVVGLVGERGREVKEFIEEILGEEGRKRSVVVAAPADSSPLMRLKGCESAVTIAEYFRDQGLNVLLLLDSVTRYAMAQREIALAVGEPPATKGYPPSVFAKLPALVERAGNGGEGQGAITAFFTVLSEGDDMQDPIADAARAILDGHIVLSRELADSGHYPAIDIEKSISRVMPQVVSEPHMQQARVLKQVYSMYQQNKDMITLGAYQKGTDPMLDQAINMMPRVNGFLQQGMRDVISYDDGLQGLAQLLGQG

SEQ ID NO: 144297 - protein, 250 aa, Unknown
  Bacterial polypetide isolated from the Sargasso Sea
IEKLTKSFGGLRAIQQLSMEVEAGEIHAVIGPNGAGKTTLIAQLSGSLKPDSGRILFEHQNITHVPEYRRSALGLARSFQITSVLKNFSALDNVALAVQAHAGHSFRFWSKARKAQELREPALEILEKIGLTDRIDMPASSLSHGEQRQLELAMALATRPKLLLLDEPMAGMGVEESQKMVELLQDLKGTHTLVLIEHDMDAVFALADRITVLVYGESIACDTPENIRSNPEVRKAYLGDGEALTEIEEV

SEQ ID NO: 144298 - protein, 192 aa, Unknown
  Bacterial polypetide isolated from the Sargasso Sea
MEEGQSLAITGPSGSGKSTLLGLLAGLDSASSGTIFLDNIPIHEQDEQERALIRKEKVGFVFQSFELLPSLTALENVMLPSELKSEADPKSNAEYFLERVGLKDRQHHYPNQLSGGEQQRVAIARAFACSSKILFADEPTGNLDSKNGKLISDLLFEVNSETDNALVVVTHDHDLAKKCDKTISLQLGKIVE

SEQ ID NO: 144299 - protein, 245 aa, Unknown
  Bacterial polypetide isolated from the Sargasso Sea
MSNSIEVINLSKKYKSKEAVNNINFKINENEIVGLLGPNGCGKTTTIGMILGLLKPTSGKVLINGMDIEKNKISLLNKMNFISPYIELPKKLTVRQNLIVYGKLYNIKKPNERIRYLSNKLRLNELLDKITGELSSGQKNRVSLAKALINDPSVLLLDEPTASLDPETGDFVRTFLENYKKERKISVLLASHNMDEVKRLCSTVLMMKDGSIVNSGTPDHLIKKYGRKNLEEVFLEIARNKNEFN

SEQ ID NO: 144300 - protein, 233 aa, Unknown
  Bacterial polypetide isolated from the Sargasso Sea
MIDFQQVSKIYPGGQMALEEVNFHLQKGEMAFLTGHSGAGKSTLLKLITVIERATTGRVAINGHDIAKISPKHVPYLRRNIGMIFQNHHLLMDRSVFDNVALPLVIEGFSHGEIRKRVAGALDMVGLYGKERHNPIMLSGGEQQRVGIARAIVNKPPLLLADEPTGNLDPKLSMDILRLFETFNDAGTSVLIATHDLGLIARMKYRTFTLKQGRMLGAQELHHGHATARGDGL

SEQ ID NO: 144301 - protein, 345 aa, Unknown
  Bacterial polypetide isolated from the Sargasso Sea
MPKNSVTISCKNVWKLYGSNPSKFLASKNFSPSIAELKESHYIPAVFDASIDVIEGEILVIMGLSGSGKSSLVRCMTRLIEPTSGEIYFEGSDLLKATEKELIEIRRHKMGMVFQNFALMPHRNVLDNIAFPLEVQGVNRDQREKRALEIIDLVGLTGREKYYPRELSGGQQQRVGLARSLAVEPNIWFLDEPFSALDPLIRKEMQNEFIRLQNLLNKTIVFITHDFDEAIRLADRIAIMYEGRIVQIGSAEELITSPANDYVAEFTKDIPRAKLLSVGSIMKPTKKNNKSGFTINKNDKISSVAPKIISSNSIATVVDDSGKICGELTKDQIIDILFIDKQNNA

SEQ ID NO: 144302 - protein, 231 aa, Unknown
  Bacterial polypetide isolated from the Sargasso Sea
MTSLLSVNNLGVKFQSDGSEVIAVDGIDFEINKGEVLALVGESGSGKSVSALSILSLLPNNADVSGSIKLQGNELLGISHKELKSVRGSEVSFIFQEPMTSLNPLHTIEKQLREAVELHSAAYFSNTREYIVELLTRVGIDSPRQRLSAYPHQLSGGQRQRVMIAMALANNPKILIADEPTTALDVTIESQILDLLVELRKDTEMGILFITHDLGLVKRLANRVCVMKNGK

SEQ ID NO: 144303 - protein, 361 aa, Unknown
  Bacterial polypetide isolated from the Sargasso Sea
TNVPESILFYRQYLQWLGGLGIIVLAIAILPTLGIGGMQLYKAEVAGPLKNKLTPRITETAKALWFIYFLLTLTCMLLYWLAGMSLFDAICHSFSTISIGGFSTHNDSFEFFNNHFIEIVAIVFMLLASLNFSLHYLAFSKFSIKPYIQDKECNYFFYIILFITSISVLYFFQNTHIVDYNKIIKNVFQSVSIVTTTGFTNSSYGHFIGFLPIFLILFSFIGGCAGSTAGGMKVIRFSLLIKQGNRELKKLLHPNGKFNVRLGESLVNQRMMETVWGFFAVYISVFIIVMMLLMYSGLDLETSFSAVAATINNLGPGLGEVVNGYNNLSDFNKWLLSFSMIVGRLEVFTLLVILTPEFWRK

SEQ ID NO: 144304 - protein, 221 aa, Unknown
  Bacterial polypetide isolated from the Sargasso Sea
MELLLSAKGISKSFQGRKVLDDIDIEIKKSEIIAISGASGAGKTTLLNILSTLDTPDETTNSSLIIDGENIFNLNNSDLSKLRNTKIGFVFQFHELIPELNVMENICLPGWIKNDSKVTDNANSLISYFGLDKLKNKKPNTLSGGEKQRAAIARAMINNPKIIFADEPTGNLDSTNSKILFDIFFKLRDDYDCSIVIVTHNPENAKKCDRKLQIVDGKIKI

SEQ ID NO: 144305 - protein, 244 aa, Unknown
  Bacterial polypetide isolated from the Sargasso Sea
MKLHAIQIEKSYKSRKVVDGVDIELNQGEIVGLLGPNGAGKTTCFYMIVGLIKSNSGKILIDDIDVSDDPMYKRAINGIGYLAQEASVFRKLTVEDNIKAVLELGDLSKEEQNKKLESLIDEFSLNKVRKNRGDLLSGGERRRTEIARALATDPKFLLLDEPFAGVDPIAVEEIQKIISHLKTKNIGVLITDHNVQETLAITDRTYLMFEGKILKSGKPELLAKDEIVRKLYLGKNFIFRKKNI

SEQ ID NO: 144306 - protein, 103 aa, Unknown
  Bacterial polypetide isolated from the Sargasso Sea
MIDLEIKDLKKSFGSEFILKGLSFSVNSQSLLAIIGSNGAGKSTLLRCCSRLIEPSSGSIKIFDKEITTLNSHKLGQIRRDVAFIFQRHNLVPRLSVLSNVIH

SEQ ID NO: 144307 - protein, 162 aa, Unknown
  Bacterial polypetide isolated from the Sargasso Sea
LFWRVFLNKIPLHELNEEERAKVRKENVAFVFQSFELLPSLTALENVMLPSELKSRKDPESSAEYFLDRVGLKDRQHHYPNQLSGGEQQRVAIARAFACSSKILFADEPTGNLDPKNGKLISDLLFEVNAESDNALVVVTHDHDLAKKCDKTLSLKLGKVAQ

SEQ ID NO: 144308 - protein, 218 aa, Unknown
  Bacterial polypetide isolated from the Sargasso Sea
LIDDLTFSVPKGAIVGIIGPNGAGKSTLFRMMSGQEQPDAGSITLGETVKLASVDQFRDAMDNSKTVWEEVSGGLDIMKIGNTEMPSRAYVGRFNFKGVDQGKRVGELSGGERGRLHLAKLLQVGGNVLLLDEPTNDLDIETLRALENALLEFPGCAMVISHDRWFLDRIATHILDYQDEGKVEFFEGNFTEYEEYKKRTLGADALEPKRIKYKRIAK

SEQ ID NO: 144309 - protein, 236 aa, Unknown
  Bacterial polypetide isolated from the Sargasso Sea
MAKITLKDLSHSYLEKQNSNADWALREVNIDWKNGGAYALLGPSGCGKTTLLNIVSGLLKPTKGSVLFDDKDITAFSPVERDIAQIFQFPVIYDTMTVYDNLAFPLKNRGLSDSEIVSKVKEIAEMLELTSTLNNRASGLTADGKQKISLGRGLVRSDVNVIMFDEPLTVIDPHLKWVLRSKLKELHQKINRTMIYVTHDQTEALTFADQVVVMHEGQIVQTGTPVELFENRNIHL

SEQ ID NO: 144310 - protein, 216 aa, Unknown
  Bacterial polypetide isolated from the Sargasso Sea
MENLILEIKDLNHAYEKSDLTIKGLNLNISIGEKVSILGPSGCGKSTLLRLIAGLEKPKSGEIIKKAEVMTSDKIFIPPEKRNVGLVVQEKALFPHLSVYANICFGIQRNKDKNKIVSDLLELLKIDSLKNKYPHEISGGEQQRVALARSLAPNPDLLMLDEPFSALDEELRKSLYEEVSNVFSDMNSSILLVTHDAYEAEVMTDKQLRMEKGNLI

SEQ ID NO: 144311 - protein, 235 aa, Unknown
  Bacterial polypetide isolated from the Sargasso Sea
MAFFEGNKMTGGYDDGPDIINSCTINANKGEIVAILGPNGAGKSTAMKAMLGLINLKSGNIIINGEDISKLSPQDRVKKGISFVPQTRNVFSELTVQENLEIGAFLREDDISKVIEEIYDLFPILREKKTQIVGQLSGGQRQQVALGRALMTKPSVLMLDEPTAGVSPIVMDELFEHILRVKKTQVAIIMVEQNAKQALSISDRGYVLVTGENKFEGSGEDLLNDQEVRRSFLGA

SEQ ID NO: 144312 - protein, 256 aa, Unknown
  Bacterial polypetide isolated from the Sargasso Sea
MSNKYLEVKNLKKSFGGIKAVDVESLNLNRNELTSIIGPNGAGKTTFFDLISGFQDSDEGKVYLNNKNISKSQPYAIARLGMIRTFQLTKVFDRMTVLENMMFSASTVNNDSFLKSLAKLPSQKTTEKKIRDKSFEIMKELNIDHMANSYAREMSGGQKKLLELGRSIINNPSVLLLDEPLAGVNPKLAEEILQIILNLAGKGISILMVEHNIEAVMKISERVIVLAEGKVIADSTPENIRTDEKVIEAYLGSENE

SEQ ID NO: 144313 - protein, 343 aa, Unknown
  Bacterial polypetide isolated from the Sargasso Sea
MSEPVIKCQSVYKIFGANAERMLKEANGNVDAKTFQEKGCIVGVNNASFEVSKGEMLVVMGLSGSGKSTLLRCISRLTDATGGKIFIEGQDLLNLNNKELIDLRRNKMGMVFQSFALLPHKTVLENIAFPLQIKGIKTEDSINKAMDMVKLVGLDGRENYFPRELSGGQQQRVGIARSLAVEPDIWFLDEPFSALDPLIRKEMQDEFLRLQEKLQKTIMFITHDFDEALKLADRIAIMKDGIIEQLDTPANIVLNPATEYVRKFTEEVPREKVLLIKDVMDEITSDNMGDIKVSKDEIIENVAEKILTQEKTVAVTDGKNNIVGSINPAKIINTVFGGRKNNH

SEQ ID NO: 144314 - protein, 242 aa, Unknown
  Bacterial polypetide isolated from the Sargasso Sea
MTNSIEVINLSKKYKSKNAVNNINFKIGENEIVGLLGPNGCGKTTTIGMILGLLKPSSGQVLINGKNIETNKISLLHKMNFISPYIELPKKLKVKQNLIVYGKLYNVDDLENRIEYLSDQLRLTDLLDKITGELSSGQKNRVSLAKALINDPTVLLLDEPTASLDPETGDFVRTFLENLKKEKKISVLLASHNMDEVKRLCGSVLMMKDGIIVDSGTPNDLILKHGRKNLEEVFLEIARNKK

SEQ ID NO: 144315 - protein, 206 aa, Unknown
  Bacterial polypetide isolated from the Sargasso Sea
MSLEVQNLSYSFKNNLLIKGLNFKIEKNEVGFVSGSSGVGKSTLLNIISGLKRPDSGSIICNNNFFNGDGSFVQPEKRNIGYVFQDFALFPHINAEKNIKYGMHQDNINFFDEVVDTLNLKKHITKMPHELSGGQQQRVAIGRAILIKPQLILLDEPFSNLDKANVNLVKRLIVKVIEDLQIPCLLVTHGSSQSDLGLMSKEIIIS

SEQ ID NO: 144316 - protein, 196 aa, Unknown
  Bacterial polypetide isolated from the Sargasso Sea
MIKLNGVSKQYNNHCALNNIDLEIDSGNMVFLTGHSGAGKSTLLKLILATTQPNQGQICVDGKNLCRLPERHIPEHRRKIGTVFQNPRLLPNRTIYDNVALPLVIASYSPGEIKRRVRAALDKVGLQNKESLFPIELSYGEQQRVGIARAVVNKPKILLADEPTGNLDPHLSTDILNLFTAFNAVGVTVIIATHDL

SEQ ID NO: 144317 - protein, 479 aa, Unknown
  Bacterial polypetide isolated from the Sargasso Sea
MQEHEDAAVDLDIERRVREIHDELKAIGASDAHERARKVLRGLQFSPKQMERPVSTLSGGWRVRVSLARALYVNPDCLLLDEPTNHLDLEACLWLEQYVCDAFEGRTLVVVSHDRSFLNAVCTDILSISNKKLTAYAGDYATFEAVRKEQHARQQKMYDEQQASKKKMEKFIDKHLHKGSSSMFDDGNAKKAKEMAKKMERMGAMGHDGKKWKLSYDGAQKELTAPETETGSFKFSWPDPGPIGANESIQFRDVCFKYDTEDSMTLFKKLSFPFDCNTRLALVGKNGAGKSTLMKLVVGGAGGLEPTAGNVFRSAKLRVAYVTQHHVDQLDLAMTPLEYVLHVSGVERSSSMSPEHEQDARRRLGRFGISGSLQTQTIGLLSGGQRSRVAWTVATWDHPHLLLLDEPTNHLDYESVDALVDAVNAFPGGIVFVSHDEYFVTSVRDVIVLEITGDGEPGAVSFDDDFDAYKRKALKTLKK

SEQ ID NO: 144318 - protein, 244 aa, Unknown
  Bacterial polypetide isolated from the Sargasso Sea
MSEPVIKCEAVYKIFGENAKKMLQDSNGNVDAKTFQENGCIVGVNNASFEVSKGEMLVVMGLSGSGKSTLLRCISRLTDATGGKIFIEGQDLLQLNNKELIELRRNKMGMVFQSFALLPHKTVVENIAFPLQIKGIKTEDSISKAMDMVKLVGLDGRENYFPRELSGGQQQRVGIARSLAVEPDIWFLDEPFSALDPLIRKEMQDEFLRLQDKLQKTIMFITHDFDEALKLADRIAIMKDGNNE

SEQ ID NO: 144319 - protein, 159 aa, Unknown
  Bacterial polypetide isolated from the Sargasso Sea
MSQLNPSEISSVLKEKIAGLDLSAERKNEGIIVSVSDGIVRIHGMGDVMYGELIEFENGVLGLALNLEQDSVGAVVLGDYLDLVEGQKVVCTGKILEVPVGESLLGRVVNAIGVPIDGKGEIKAESSSPVEVVAPGVIARQGVDQPVQIGLKAVDSMGP

SEQ ID NO: 144320 - protein, 124 aa, Unknown
  Bacterial polypetide isolated from the Sargasso Sea
MNKNFIEIKNVSKYFGNVKAVDDVSFSIKQGEFFSLLGPSGCGKTTLLRLLAGFEYPNSGQVFIDGSDVTSLAPNFRDSCMVFQAYAIFPHLNVRKNIEFGMRKENLSKEEMEDRVGEVINLTQ

SEQ ID NO: 144321 - protein, 234 aa, Unknown
  Bacterial polypetide isolated from the Sargasso Sea
MNKFNILNDGLFVNKVSKSYGNKKVIRDISLNINSGQIVGLLGPNGAGKTTTFYSIVGLIKPDNGSIYLDKVDISNLPIYARGKKGISYLPQEPSIFRGMNVEDNLLAVIEMIEKDKSKQEIILNNLLNEFDIHHVKKSKSIVLSGGERRRLEIARTVASKPKYLLLDEPLTGIDPVSIEEIKIIIQKLKLKNIGVLITDHNVRETLKIVDKVYIVNEGAIFFEGHPKEAIQND

SEQ ID NO: 144322 - protein, 252 aa, Unknown
  Bacterial polypetide isolated from the Sargasso Sea
MSLFEVKNITVAFGGVKALNDVSFGVDKGEIFTIIGPNGAGKSTLFNVISRIYEPSKGEIYFENQNISKTKPHNISKLGIARTFQNLELFENATVLQNLLLGRHIYKKTNILSEVFFTPSARKQEHEYRLKVEEVIDFLDLQHYRDTLINGLPYGVRKNVELARALCTDPKLLLLDEPSSGLTNEETIDLGFWIKDIQSLLGITIIMIEHDMSFVNKVSDRILALNYGKILASGLPEEIKNNADVKQAYMGE

SEQ ID NO: 144323 - protein, 295 aa, Unknown
  Bacterial polypetide isolated from the Sargasso Sea
MAKIELSNISHTYNPNDTNPTYALNPFSMTWENGKRYAILGPSGCGKTTMLNIVSGLVKPSKGNILFDENDVTDLITEERNIAQVFQFPVIYNTMTVYDNLAFPLRCRNFSDQKIEERVKSVSDTLRLSSFLKSPARKLTADQKQLISLGRGLVREDVAGVLMDEPLTVIDPDLKFRLRRNLKEINEQYKTTLVYVTHDQNEAMTFADNIIVMDQGEIVQVGLPKDLFEKPRTTFVGYFIGSPAMNLFNSEILSDNSIKFNNDSIKTKTDLSKIKDKNVKLGIRSEFIKIATDQK

SEQ ID NO: 144324 - protein, 279 aa, Unknown
  Bacterial polypetide isolated from the Sargasso Sea
MFVGGCVRKHLSEEEIDDIDIATTLTTEQIKEKFKDTKINIIDSGIKHGTITLVDNKLKLEITTLRKDIKTDGRHAEIAYTDNWFEDSKRRDFTINAIYLDINGKIFDPQSGISDLKNHNIKFIGDPQKRIEEDYLRIIRFIRFSIEYESKVEQSTIEAIKFNLDGIKKISKERILNELLKILKIKNFIKLNSYKNLKPIFSLIFPEFMNIERLNQLELISNQTKIDEKTLLAVLLIDATNNYEYFSHKYNISNDLKEHLKLMAKNFKNFQSDKKFFYK

SEQ ID NO: 144325 - protein, 242 aa, Unknown
  Bacterial polypetide isolated from the Sargasso Sea
MINSIEVINLSKKYKDKEAVSNINFKINENEMVGLLGPNGCGKTTTIGMILGLLKPSSGEILINGMNIEKNKISLLHKMNFISPYIELPKKLKVKQNLIVYGKLYNIENLNDRIDHLANKLRLKDLLNKITGELSSGQKNRVSLAKALINDPTVLLLDEPTASLDPETGDFVRSFLEDYKKEKKISVLLASHNMEEVKRLCSSVLMMKEGLIVDRGTPEDLITKYGRRNLEEVFLEIARKEK

SEQ ID NO: 144326 - protein, 385 aa, Unknown
  Bacterial polypetide isolated from the Sargasso Sea
LLYLIFKKRLEEYGKKNNELSTEKFKNLNHGFNSFKDIVITNSENFFLRIFNNTIRRIADIAYKTEAIHSLPKSFVEVTGILIVVVLVFLNIEEGNNNLNEILPALSLFALAGFRMMPSVHKILNAIHRLKFHKPVTESLTNEIKRFKNSEDIKLKDKDIVEFKKSIDVSNLNFSYSSSNKVLNNLNFKINKGDFILILGRSGCGKSTLINVLLGFLKPQNGNILCDGKEIYNNLFQWRKLVSVVPQDIYLAEETLLANIAFGINESEIDLKRINKIIEICELKDFVNSLPNKIYTSVGEKAFKISGGQKQRIAIARALYREKDIIFLDEATSALDKSTEEGFIKNLLEAFKGKTIIMASHRQSIIQYANKIYQFENENLVEVKK

SEQ ID NO: 144327 - protein, 343 aa, Unknown
  Bacterial polypetide isolated from the Sargasso Sea
MSEPVIKCEAVYKIFGENAKKMLQESNGNVDAKTFQENGCIVGVNNASFDVSKGEMLVVMGLSGSGKSTLLRCISRLTDATGGKIFIEGQDLLQLNNKELIELRRNKMGMVFQSFALLPHKTVVENIAFPLQIKGIKTEDSISKAMDMVKLVGLDGRENYFPRELSGGQQQRVGIARSLAVEPDIWFLDEPFSALDPLIRKEMQDEFLRLQDKLQKTIMFITHDFDEALKLADRIAIMKDGIIEQLDSPANIVLNPATEYVRKFTEEVPREKVLLIQDVMDPSTTDNLGDLKVLKDEIIENVAEKILTQEKAVAVIDNNNKIVGSINPTKIINTVFGGRKNSN

SEQ ID NO: 144328 - protein, 212 aa, Unknown
  Bacterial polypetide isolated from the Sargasso Sea
MVVFRGIEKTFAEAKILRNVDISLYPGKCILLTGNNGSGKTTLLKIIAGLETPSHAEIAFSGKTQSWKSTIRSVRKEIIYLHQQPYLLSGTVESNVSYGLRFTSLNRKQIRELVKEALEWAGLANVAKHQAKTLSGGVKQRVAFTRAWILNPKVLLLDEPLANMDIESRERALDLLKRMKSDGMSIVITSHDANIIDGLIDSHFSLLDGKLN

SEQ ID NO: 144329 - protein, 116 aa, Unknown
  Bacterial polypetide isolated from the Sargasso Sea
NNNELNAINDAKKVLRTLGLNKRINHFPSELSGGETQRVAIARALINQPKILLADEPTGSLDKKNAKQIFKLLLKLKNKNRVIIFATHNMYFANMADCKLQLNNGKIINYHGRVVK

SEQ ID NO: 144330 - protein, 235 aa, Unknown
  Bacterial polypetide isolated from the Sargasso Sea
MLKFDNVSLDYGSFRALDGINLHANDGELVVLLGANGAGKSSIFLATSGLRRAASGSLRLGTRELLGMTPAQIVKNGVIQCPEGRKLFPGMSVLKNLTLGAYVHRGDKAGNQRNLDQVFALFPLLAERKDHPAGSLSGGQQQMVAIGRAMMARPKVLLLDEPSLGLAPLVVKQVFEVIQQINRAGTTVLLAEQNAFAALKIAHRAYVIENGRIVLEGDHASLMNNEAIRRAYIGG

SEQ ID NO: 144331 - protein, 301 aa, Unknown
  Bacterial polypetide isolated from the Sargasso Sea
MTDEIKISCRNIWKLYGENPEKFLNVNNNNPSIEQIKKENYIPAVRDATIDVKTSEILVIMGLSGSGKSTLLRCMSKLIQPTYGQVFFENKDLLKASDKELIEIRRHKMGMVFQHFALLPHRTVLQNVAFPLEVQGLNDVKREKRAKEVIKLVGLEGREKYYPRELSGGQQQRVGLARSLAVEPDVWFLDEPFSALDPLIRKEMQNEFLRLQNMLKKTIVFITHDFDEAIRLADRIAIMYEGLIVQVGTPEELITKPATDYVAEFTKDVPRSKLLNVSSIMNDSDKKSYNSNILFNEKVEK

SEQ ID NO: 144332 - protein, 240 aa, Unknown
  Bacterial polypetide isolated from the Sargasso Sea
MENSIKVIDLKKNYGNKEAVKNINFEIKENEIIGLLGPNGCGKTTTIGMILGLLKPTSGQVLINGFQLEKNRIEILQKINFISPYIELPKKLTVKQNLIVYGKLYSVKNLNSRIDYLVEELRLQNLLDRVTGELSSGQKNRISLAKAIINNPSVLLLDEPTASLDPETGDFVRTFLENYKKEKKVSILLASHNMDEVTRLCSSIMMMKNGLIIDQGKPNDLVKKHGRQNLEEVFLKLVRN

SEQ ID NO: 144333 - protein, 259 aa, Unknown
  Bacterial polypetide isolated from the Sargasso Sea
MNSTSSAIKIKNVWKVFGNTSKEALNAIQNHKISKTEALEKYNSVIGVSDVSFDVKQGEIFCVMGLSGSGKSTLVRHINRLLEPTSGKILINEQDVMTLDRESLQELRNKKIGMVFQNFALMPHRSVVDNIAMPLEIRGISKNDRLDAANKILDVVELQGWGNKFAHELSGGMQQRVGLARALAADPEFLLMDEPFSALDPLIRRQLQSEFIKLSKQMKKTTVFITHDLDEAVRVGHRIAIMRDGKVIQIGTPRRNCSQ

SEQ ID NO: 144334 - protein, 359 aa, Unknown
  Bacterial polypetide isolated from the Sargasso Sea
MNLVAENLSYKPDEQFHLNEVSFKFEKGNIYTILGRTLSGKTTLLKTIAGLLTPDTGAMQFEDKDFLKVPVWERNIAMVYQQFINYPHLNVFENVAFPLKQRKVDDQLINDEVTKSLKSVGLEGYETRKIQELSGGQQQRVSLARSLVKNAKILLLDEPLVNLDYKLREQLREEFKNIFSQGLSEDSIVVFSTTDPREAMEINGEVIVLDEGKVLQVGSAKEIFENPKTLKVAEISNDPPMNILKASIETNKIKFEEIEVELPNHLSNLKEKNFNLGIRASDIKLSDSGFEFEVELAEISGSETLLHLKRGNSRIIISIEEVLNFNIHDKVKISFNINKIYAFNENGVLSSSPFGGSYV

SEQ ID NO: 144335 - protein, 256 aa, Unknown
  Bacterial polypetide isolated from the Sargasso Sea
MSNNLIRVANLKKSFGGVKAVDIDDLSFESKELTSIIGPNGAGKTTLFDLISGFQEEDNGEIFYKDKNITKSQPYRIARLGMVRTFQLTKVFDRMTVLENLMFAGSNVSNDSLFQSFMQLSKQKKYENSLKEEAMKVMKDLNIEQMSDSYARELSGGQKKLLELGRSIIKKPEVLLLDEPLAGVNPKLAEDLLEIIQSLSNQGITILMVEHNIEAVMKISERVVVLAEGALIADGPPQEVRENQKVIEAYLGTGDE

SEQ ID NO: 144336 - protein, 264 aa, Unknown
  Bacterial polypetide isolated from the Sargasso Sea
MNQPMSRDTPAIEMRNVSCRFISPDGKATVALRDFSMSVARGEFVAVVGPTGCGKSTTLSMITGLLKPTTGEVRVMGAPVDGIDPRIGFVFQADAVFPWRSVLDNVAAGPLYRGRSKSAAYDEANEWLRRVGLDKFGKHYPHQLSGGMRKRVALAQTFINKPEILLMDEPFSALDMQTRTLMQDELLQLWGGAGSVVFVTHDLEEAIALADRVFVLTARPATLKKVYEIDLPRPRVTSEIRYEPRFIEISRDIWHDLREEVQIG

SEQ ID NO: 144337 - protein, 105 aa, Unknown
  Bacterial polypetide isolated from the Sargasso Sea
MGTISLKNISKSFGSTQVLNNLNVDINDGEFLTLVGPSGCGKSTLLRIIAGLEQQTSGDVLIDNKNVNRVRASERDLAMVFQSYALYPHLTVRRNLETPLRLRDY

SEQ ID NO: 144338 - protein, 242 aa, Unknown
  Bacterial polypetide isolated from the Sargasso Sea
MSDNNQPSVIKCESVFKIFGNNAKRLLEDSSGNVDAKTFQDAGCIVGVNNASFDVKKGEMLVVMGLSGSGKSTLLRCISRLTEATAGKIFIDGDDLLAMNNKELIELRRNKMGMVFQNFALLPHKTVLENIAFPLQIKGTNTNESIAKAMEMVELVGLKGRENYFPRELSGGQQQRVGIARSLAVEPDIWFLDEPFSALDPLIRKEMQDEFLRLQGVLKKTIMFVTHDFDEALRLADRIAIM

SEQ ID NO: 144339 - protein, 243 aa, Unknown
  Bacterial polypetide isolated from the Sargasso Sea
KIIEVKKLKKLYGSKEAVQNISFNIMENEILGLLGPNGSGKTTTIGMLLGLLKPTSGEILIEGKKIEENRIEILERINFISPYIELPKKLTVKQNLIVYGKLYKIKNLHKTIDYLTEKLRLENLLDRVTGELSSGQKNRVGLAKALINEPNILLLDEPTASLDPEVGDFVRTFLENYKKEKKISILLASHNMNEVTRLCKSVMMMKEGKIIDEGTPQDLINKHGRKNLEEVFLKLSRSNNEFY

SEQ ID NO: 144340 - protein, 255 aa, Unknown
  Bacterial polypetide isolated from the Sargasso Sea
MAEGLLEVEGISIQFGGITALDNLTFTVDPTQICGLIGPNGAGKTTLFNVISRIYDPSQGRIKFNGVDLLSLSPHEISQTGIARTFQNLALWPRMTVAENVMAGAHIKGKQNFFSAMTRIGLQTEERELRHKAYETLEMLNLLEHAEKPCDGLPFGTMKRIELARALVSNPKLLLLDEPATGLTHSEVTELSEVITSIRKHFELTILLVEHHMGMVMSMSEKVVVLDFGEKIAEGTPSEIQNNSLVVSAYLGAPK

SEQ ID NO: 144341 - protein, 161 aa, Unknown
  Bacterial polypetide isolated from the Sargasso Sea
NFISPYVELPKKLSVKENLIVYGKMYEVKNLQNRINTLSNDLNLVDFLNKKTGELSSGQKNRVSLAKSLINNPEILLLDEPTASLDPDTGDYVRSYIENYAKTNNTTILLASHNMSEVERLCENIMMMKQGKIIDEGTCEELISKHGRVNLEETFLKLVRE

SEQ ID NO: 144342 - protein, 543 aa, Unknown
  Bacterial polypetide isolated from the Sargasso Sea
MEPLLAIRELETQFGVGEQASLAVRGISFELYPGETYCLVGESGSGKSVTGLSMVGLLPDLANHPSGAITFYSSVEEADAGISILNSEKSVLEKLRGSRISMIFQEPMTALNPVQTIGEQIMETMSLHLGLEGESAKAKALDLLAQVELPDPEVRISEYPHRLSGGQRQRVMIAIALACEPDLLIADEPTTALDVTIQAQILKLLKKLQEERNTTLLFITHDLSVVAQIADRVGVMQQGQLVEQGTKDEVLYNPKHEYTKELIASLPQKMTRLTTNALVTESPLLSIEQLKVYFPIRKGLLQRHVDDVKAVDGVNLKIYPGRAMAVVGESGSGKTTLGRAILGLIGATEGAVNYQGSDLTKLNRKEMKPFRRDLQFVFQDPQSSLNPRLTIATILTEPMQSHGIGESHLDRLELASQTLEQVGLDRSMLTRFPHEFSGGQRQRIGIARALVLNPKFIVCDEVTSALDVRVQAQVLKLLDELRQQMDLTYLFISHNIEVVRFFCDDVTVMHQGKIVETGLAEQVCEAPQDSYTKRLLDAVPKFD

SEQ ID NO: 144343 - protein, 273 aa, Unknown
  Bacterial polypetide isolated from the Sargasso Sea
MKSYLQLSDVGISFETEQGRFEALSRVNLRIERGEFVSLIGHSGCGKSTVLNLVAGLLEPTTGGIILDGREVAGPGPERAMVFQNHALLPWLSVQQNVALAVGQVEPNRRAVAERVDYYLSLVQMEHASQKMPHELSGGMKQRVGIARALSLSPKVLLMDEPFGALDALTRAHLQDALMAIQAELGNTVIMITHDVDEAVLLSDRIVMMTNGPAATVGEILTVDLPRPRDRVALADDGHYHKLRQQVLRFLYEKQRKVTPLKVAEPVRSQRRA

SEQ ID NO: 144344 - protein, 219 aa, Unknown
  Bacterial polypetide isolated from the Sargasso Sea
MIIDIKQLTKTFIDGNKKLNVLKDINLQIEEGSIITIKGPSGSGKSTLLSIIGTLDSADSGEILINGKKIQDELNIDKLRNKSIGFIFQFHNLIAELTLEENVCLPKMIAKEKIDKNQINKLFEYFDLKDRMKSFPNDLSGGEKQRVAVMRAIINNPSVIIADEPTGNLDKENVLKMISLFQKLNTEKKLTIIIATHDENVFDIGHKKYQLVDGSLEIN

SEQ ID NO: 144345 - protein, 342 aa, Unknown
  Bacterial polypetide isolated from the Sargasso Sea
MSEPVIKCENVYKIFGANAQKMLQDSNGNVDAKTFQENGCIVGVNNASFEVSKGEMLVVMGLSGSGKSTLLRCISRLTDATGGKIFIEGQDLLQLKNKDLIDLRRNKMGMVFQSFALLPHKTVVENIAFPLQIKGVKTEESISKAMDMVKLVGLDGRENYFPRELSGGQQQRVGIARSLAVEPDIWFLDEPFSALDPLIRKEMQDEFLRLQDKLQKTIMFITHDFDEALKLADRIAIMKDGIIEQLDTPANIVLNPATEYVRKFTEEVPREKVLLIEDVMDKTKDNLGDLKVSKDEIIENVAEKILTQEKSVAVVDNNNNIIGSINPAKIINTVFGGRKNNN

SEQ ID NO: 144346 - protein, 155 aa, Unknown
  Bacterial polypetide isolated from the Sargasso Sea
MASIILQNISKWFSSNQVIKNVDLNIKDGEFIVFVGPSGCGKSTLLRIISGLEDLNEGTVLIDDLDVTDKIPYDRGLSMVFQSYALYPHMNVFDNIGFSLKTSGVKSEILKKKVGEVAKILQLEDLLHRLPKQLSGGQKQRVAIGRAIIRKPKAF

SEQ ID NO: 144347 - protein, 181 aa, Unknown
  Bacterial polypetide isolated from the Sargasso Sea
IDDKNLKILNTKDIRKNIALVQQQPFLFSGTIIDVIRMGRDFTKEEVIESARKANAHNFIQKLPEKYETEITERGSNFSGGQIQRIAIARAILGNPSILLLDEATSALDAESESEVQKGLNRAMKNRTVIVIAHRLATTQEANKIVVFDKGEIIEVGKHIDLINKPGIYKELCEKQFIKKL

SEQ ID NO: 144348 - protein, 353 aa, Unknown
  Bacterial polypetide isolated from the Sargasso Sea
MGSLGSAIKIENVWKVFGNNSNEALDAIQNHGISKTEALEKYNSVIGVSDVSFDVKQGEIFCVMGLSGSGKSTLVRHINRLLEPTSGKILINDQDVMELDRENLQELRNKKIGMVFQNFALMPHRSVVDNIAMPLEIRGVSKNDRLDAANKILEIVELQGWGNKFAHELSGGMQQRVGLARALAADPEFLLMDEPFSALDPLIRRQLQTEFIKLSKQMKKTTVFITHDLDEAVRVGHRIAIMRDGKVIQIGTPEQIVVSPADDYVADFVKGISRLKVVQAKSIMQTIQDYEKKNSALSDDLETVHEHDLLSRLIEISKSKQKPLVVKDENKKSVGVITQSDLLRAVVEGGDGE

SEQ ID NO: 144349 - protein, 311 aa, Unknown
  Bacterial polypetide isolated from the Sargasso Sea
MTTNNFRPQQRPDSGSNERINASEQDTIITNPKENVSVKDDVADCNSPANSHNLADSRTVLSLQNVKVASRLSVEGLRAKKGECVHIIGPNGAGKSTLLLILAGLIDADEGTVMLLGKPMNDWSLATLASVRTLLAQQSESGFHLSVKEYLSFYATAQQDELIPPVLEKALEISGFLNQIVTQLSGGERQRVEICRSLLQIWPQLERGEGVVLLDEPLQGLDIRHQYALASLVKFLCDKGNTLLMTSHDIALSANYCDSLWLMQKGRMVAFGKPQEVATQTNLESVFECHFAISKHDNFLEIQVCAPISLE

SEQ ID NO: 144350 - protein, 81 aa, Unknown
  Bacterial polypetide isolated from the Sargasso Sea
TQLSGGEKQRVAIARSIVNKPKILFADEPTGNLDKKSSDSISDLLFSLNEIIQTTLVLVTHDLFLAEKCKEVYELSEGQIL

SEQ ID NO: 144351 - protein, 227 aa, Unknown
  Bacterial polypetide isolated from the Sargasso Sea
MQPQSRFIGITGPSGAGKSSLFRALAGVEKSASVQMPWTSQKVGIVFQQPMLFPHTDVRGNLALAQRHASPNAMSIDACLRGCYCEHLIDKPVQALSGGEAQRVAIARALVNGPDVLLLDESLSAIDIFTRRKIYQFLNNLCVSGQLICLVISHDLDDLALFSDELVFIDQGRTELCGKTRDVLTQVFEKEGFATPSSVLEGFKVTAQSGRTRQQPVTKRRCQLQTR

SEQ ID NO: 144352 - protein, 169 aa, Unknown
  Bacterial polypetide isolated from the Sargasso Sea
MIAVEVKDLTHSINNKKILNNINFNLNKDSISCILGPSGSGKTTLLKLIAGLEKVQSGKIIINGEEVSSTAKHLPTEKRKIGFLFQDYALFPHLTVKENLRFPTNAKNSTNNVDEIIELIKLPNSLDKYPHELSGGEQQRVALARSIISQPDLLLLDEPFSSLDLSLRE

SEQ ID NO: 144353 - protein, 304 aa, Unknown
  Bacterial polypetide isolated from the Sargasso Sea
MTRVDLRSSTPKYDGPLLRLDGLCVHFESEHGEVTEAVKHVSLDLHVGERFALVGESGSGKSVTALSIMRLLADAQYSGRILLEGRDLLAASEREMRGLRGADVAMVFQEPMTALNPLYTIGNQIVETLELHEGLDKRAAKARAIALLERTGIAEAPRRFDAFPHQLSGGQRQRAMIAMALACSPKLLLADEPTTALDVTVRMQILQLLRELQAEFGMAIMLITHDLNMVRAFAERVGVMERGVLVETGNTADVFAAPQHPYTVRLLESRPQRDVLPLVPLAPVLLEADKLTVTYERHRPGFAG

SEQ ID NO: 144354 - protein, 247 aa, Unknown
  Bacterial polypetide isolated from the Sargasso Sea
MSKFNILDNGLSIKKISKTYGNKQIVRDISISINRNEIVGLLGPNGAGKTTTFYIIVGLVKPDSGSIILDKLDVSNLPIYLRGKLGISYLPQEASIFRGMNVEDNLLSIIEIQEKDKSKQNILLQNLLNEFDINHVRKSKSIVLSGGERRRLEIARTLATNPKYLLLDEPLTGIDPVSIEEIKIIIKKLKQRNIGILITDHNVRETLKIVDKVYIVNEGAIFYEGDPISAVKDEKIKKFYLGSNFQL

SEQ ID NO: 144355 - protein, 268 aa, Unknown
  Bacterial polypetide isolated from the Sargasso Sea
MSGAQNRLNVTPTVTTLAVIKSRLSGAVRGHKLLKKKADALTMRYRQILREIVEAKRALKDAMRDAHFAWTRAKYAGGDAVRFSILDGVERASVRVLAHEDNVAGVKIPKFTMTNSGAESRRMELTGLGRGGARVQEAKASYTGAIKLLSELASLQTAFVTLDEAIKTTNRRVNALENYVTPRLQNTVKYILSELDELEREEFFRLKKVQAKKKKDIEEMEETEASERAAMQAVDAELEAFEDVVGGEGGRGAGGNLIEAERDEDLLF

SEQ ID NO: 144356 - protein, 343 aa, Unknown
  Bacterial polypetide isolated from the Sargasso Sea
MSETVIKCESVYKIFGENAKKMLEESNGNVDAKTFQEKGCIVGVNNASFEVAKGEMLVVMGLSGSGKSTLLRCISRLTDATGGKIFIEGQDLLQLNNKELIELRRNKMGMVFQSFALLPHKTVVENIAFPLQIKGIKTEDSISRAMEMVKLVGLDGRENYFPRELSGGQQQRVGIARSLAVEPDIWFLDEPFSALDPLIRKEMQDEFLRLQEKLQKTIMFITHDFDEALKLADRIAIMKDGIIEQLDSPANIVLNPATEYVRKFTEEVPREKVLVIEDVMDSSNKDNLGDIKVSKDDIIENVAEKILTQEKIVGVVDSNNNIIGSIKPSTIIDTVFGGRKNNS

SEQ ID NO: 144357 - protein, 350 aa, Unknown
  Bacterial polypetide isolated from the Sargasso Sea
MEAAIQIQNVWKIFGNTSSDALDAIQNKKISKQEPLEKYNSVIGVSDVSFDVNKGEIFCVMGLSGSGKSTLVRHINRLLEPTSGKILINNQDVMQFNKENLQELRNKKIGMVFQNFALMPHRSVLDNIAMPLEIRGVSKNDRLDAANNILNIVELQGWGNKYAHELSGGMQQRVGLARALAADPEFLLMDEPFSALDPLIRRQLQTEFIKLSKQMKKTTVFITHDLDEAVRVGHRIAIMRDGRVVQIGTPEEIVVNPSDDYVADFVKGISRLKVVQAKTIMQPLEQYKKNFGENLSNNEKVNENDILSKLIETSVSKDKPIVVVNDHNTEVGIITQSDLLKAVVEGNENE

SEQ ID NO: 144358 - protein, 637 aa, Unknown
  Bacterial polypetide isolated from the Sargasso Sea
MISINQAQLIRGSKTLLDEASLTIYPGHKVGLVGANGTGKSSLLALIMGHLSLDKGEFSMPSGWQIASVAQETPALEMSALEYVLDGDKEYRQLEADLHIAQEHNDGHAIATLHGKIDAIGGYAIRARAGALLAGLGFSEAEQNNPVKSFSGGWRMRLNLAQALLCRSDLLLLDEPTNHLDLDTMYWLEGWIKSYQGTLILISHDRDFIDEIVDEIVHVENQKLNFYKGNYSAFERIRAERMAQQQVAFERQQKERAHMQSFVDRFRYKASKAKQAQSRLKALERMTELLPSQADSPFYMEFRPPEALPNPLIKMEQVAVGYGDKQILSKVHLNLVPGARIGLLGRNGAGKSTLIKLLSGQLSPMTGLYEPNPGLNIGYFAQHQIEFLRLDDTPLQHLVRLAPNAREQELRNFLGGFGFNGDMALSPVRPFSGGEKARLVLALLVWQRPNLLLLDEPTNHLDLEMRHALTMALQTFEGAMVIVSHDRHLLRLTCSDYYLVDQGEVQAFDGDLDDYHQWLLDAAKAASANQTANSDDTKPAVDKKQQKRLEAELRQKVSPLKRKQAKLETDQQKLSERLAELEHLLADSELYDQDNKAKLTSVLSERTSLTQTLEESEMQWLELQEEIDAMELELMGQ

SEQ ID NO: 144359 - protein, 335 aa, Unknown
  Bacterial polypetide isolated from the Sargasso Sea
MKKEILKLRDVKVYFPVKAGVFNRTVGHVMAVDGVDLDIYRGEVLGLAGESGCGKTTLGKAILRLVEPTNGEVTYVSKEEDETELTSLEKKDMDPFRKKLQIVFQDPHSSLNPSFTIFGSLQDPLKKFGVNSKEERRKIIGDLLEAVNMRREYMDRYPHEFSGGQRQRIGIVRALCLDPELIVCDEAVSALDVSIQAQVLQLLMQLKKDNNLTYLFITHDLSVTEYLCDRIAVMYLGRIVELCDSEDLYKNTLHPYSEALISAIPVADLDKKTKRIVLEGDVPSPVNPPKGCPFHPRCPKAKDICKTEVPTLKKYSTNGNEHYASCHLIDLPEIS

SEQ ID NO: 144360 - protein, 342 aa, Unknown
  Bacterial polypetide isolated from the Sargasso Sea
MIKLALYKSLNSFDLDINLHLESFTIAGIFGPSGSGKSTLLRCISGLEGEQSVYINDKSVHHLPTEQRGVTLQVQSCPLFPHLDVAGNLAFTQKHCFNRQTDLTEQKVIDVLELHPLLKRNVQSLSGGERQRVVFARTLLAGQKLIILDEPFSALDWPLRFKILSTLSELAATFTIKFIIVSHSLKELLFCCDTLVQLNNGKVINHGPSAQVAKAIYANNKQAPLSLINFKIITFDEKYGVYLLKLHKSEQQLFALPSAVEQGNKLILECEQISVSAEMPLNKNNSNVLICTLHSAELIDKTWQLTLDVDGQSLYCFLSPRVWDQNNYKVGDTLYATIHNLE

SEQ ID NO: 144361 - protein, 122 aa, Unknown
  Bacterial polypetide isolated from the Sargasso Sea
GDVKRVELAIALANRPKLLLMDEPTAGMAPRERNELMALTRRLVTEYKIGVLFTEHSMDVVFAYADRMIVLARGKLIAEGDGETIRNDARVQEVYFGTGKTFQPRAPLHEAAGGHPGQGALQ

SEQ ID NO: 144362 - protein, 240 aa, Unknown
  Bacterial polypetide isolated from the Sargasso Sea
MTNSIEVINLSKKYKDKEAVANINFKINENEMVGLLGPNGCGKTTTIGMILGLLKPSSGKVLINEENIEKNKISLLHKMNFISPYIELPKKLKVKQNLIVYGKLYNIQNLNDRIDYLANKLRLKDLLSKITGELSSGQKNRVSLAKALINDPTVLLLDEPTASLDPETGDFVRSFLEDYKKEKKISVLLASHNMEEVKRLCSSVLMMKDGLIVDRGTPEELITKYGRRNLEEVFLEIARK

SEQ ID NO: 144363 - protein, 95 aa, Unknown
  Bacterial polypetide isolated from the Sargasso Sea
ILNPKFMILDEPTSALDRSIQIQVIDVLKRLQDKYKLTYLFISHDLKVIRSMCDQIFVMSEGKLVEFGKADEVFENPQQEYTQKLLRAALKYSSN

SEQ ID NO: 144364 - protein, 283 aa, Unknown
  Bacterial polypetide isolated from the Sargasso Sea
MANLKDIRDRIKSVRSIQKVTKAMKMVAAAKMRKAQERMEQARPYSNSLSEVIEHLLPDIDRERLPLLNLREIKRKAYVVVCADRGLAGAFNTNLLKIAQKEIDEFGKDQVDIFCIGKKARDHFTYRNYNIVESHVDFWAEMEFENAMMIGRSAIDHFTNGTVDEIHVVYNYFVNVAQQEVRSETLLPLNYETNESGPSDRLYEPSKEELVNTLIPRHLNVQMWKYLLESYASEQAARMLSMENATSNAQDMIKDLTLQFNKARQAAITTEMLEIVGGAEALD

SEQ ID NO: 144365 - protein, 200 aa, Unknown
  Bacterial polypetide isolated from the Sargasso Sea
LTEINKKELKEIRKKMQVVFQDPFSSLNPRMTVFEILKEPLDSFFPSMTKESAQKDIEDGLMEVGLTSDYLGRYPHELSGGQCQRVAIARALMPKPQLLICDEAVSALDASIRGEIIDLLLRIKSEKKLTMIFIAHDLAVVRKICDRVIVMQSGKIVEQGPTEKVFFEPEKEYTANLLSAVPVPDPRKEKEKYIQRTQAD

SEQ ID NO: 144366 - protein, 236 aa, Unknown
  Bacterial polypetide isolated from the Sargasso Sea
NPFDTLNPSHSVGNQIIRTLEKVGVGSTVEERKQRMYELLDLVKLPREFEKRMPRQLSGGQKQRIGIARAFAGSPKIVVADEPVSALDVSVQAAVIELLIDIQEKFDTTMLFISHDLSVVRYVADRVVVMYLGKIAETGTTEQIFSPPYHPYTEALLSAVPIADPDIKKRQILLEGALPSPLNPPKGCVFNTRCPSAISGKCNVIEPPIQKLKNGHTISCHIDIKELSKKDNVFAQ

SEQ ID NO: 144367 - protein, 149 aa, Unknown
  Bacterial polypetide isolated from the Sargasso Sea
MLEIKKISKLIKDKTILNQINIEVKSGDIFGLLGPNGAGKTTTFYIVAGLINFDGGEINFLGQDISKLPMHKRSQLGIKYLPQEPSIFQNLSVYENLLGLAEITFNNNQDIKDFIEKSIEEFDLSNISTLKGRQLSGGQRRKVEIARTL

SEQ ID NO: 144368 - protein, 341 aa, Unknown
  Bacterial polypetide isolated from the Sargasso Sea
MERENSVIKCDSVYKIFGSNPEKMLEGNLGNVDTKNFQEKGYIVGVNNASFEVSKGEILVVMGLSGSGKSTLLRCISRLTEATAGKIYIDGQDLLSLKNKELIELRRSKMGMVFQSFALLPHKTVIENIAFPLLIKGIKTNESISKALEMVKLVGLEGRENYFPRELSGGQQQRVGIARSLAVEPDIWFLDEPFSALDPLIRKEMQDEFLRLQSSLKKTIMFVTHDFDEALKLADRIAIMKDGIIEQLDSPGKIVLNPATEYVKKFTQEVPREKVLKIESVMDEAGEEKNLSDFTVPKDAIIETVAEKILGQEKSVAVTDNEKIVGVVKPAKIIRILFGEN

SEQ ID NO: 144369 - protein, 228 aa, Unknown
  Bacterial polypetide isolated from the Sargasso Sea
GEVLVVLGTNGAGKSTLLATLTGELAPSAGQVLLDQRPLASWTAQERARRMAVLPQSSVLAFAFQVEEVVAMGRMPHASGQRRDAEILREAMAAADVSHLAARSYLSLSGGERQRVHLARVLAQVWDSAEQGCLLLDEPTASLDLAHQHLTLQQAREMAARGLAVLVVLHDLNLAARYADRLLLLHEGRVCAQGSPWEVLQVERLEQVFKVPVRVQPHPLHDCPLVLS

SEQ ID NO: 144370 - protein, 448 aa, Unknown
  Bacterial polypetide isolated from the Sargasso Sea
MQNPKAAVTAAPVQMPPKPPRLGEEILCVKDVCRGFNKTQGELLVLDDVNLSLREGEIVGMLGRSGSGKSTLLRIIAGLIEPTDGEVTYLGKPLEGPAKGVAMVFQTFALFPWLTVLQNVEAGLEAQGVGARERRERALAAIDLIGLDGFENAYPRELSGGMRQRVGFARALVVDPTLLLMDEPFSALDVLTAETLRTDLLDLWTQGRMPIKSVLIVTHNIEEAVFMCDRILVLSSNPGRVIAEIKVPFKHPRNRLDPAFRRLVDDIYAKMTARQTDEATRKGLELGSWLPHVSTNLMAGLIETLAAAPYHGRADMPEIARSLHLEVDDLFPVAEVLQHLGFADVREGDIFLTPPARVFAEFGTQERKMMFAEHLLRHVPLAARIKKVLNERPGHRAPRVRFEQELEDFLSDSAAEETLDAVINWGRYGEIFSYNDQTEIFSLEDVES

SEQ ID NO: 144371 - protein, 371 aa, Unknown
  Bacterial polypetide isolated from the Sargasso Sea
GSRYWFTLEAVGCQLPVGSQCLVQTIEGEIEAEVVGFGDDITYLMPTEAVRGIVPGSRVMPLSRQGGLPVGMGLLGRVVDGNGQPLDGLGEIEAEHRAPTTRPPMNPLIRRPINAAMDVGVRAINALNTVGVGQRMGLFAGSGVGKSVLLGMMTRGCEADVVVVGLVGERGREVKEFIHDILTEEERQRAVVVAAPADTSPLMRLKGCETAVTIAEYFRDKGMKVLLLIDSLTRYAMAQREIALAVGEPPATRGYPPSVFARLPALVERAGNGSEKQGSITAFYTVLTEGDDLQDPVADAARAILDGHVVLSRTLADSGHYPAIDIESSISRVMPPVVSEEHQLMARRIRQVYSPIQQTKILSQLVHMQKA

SEQ ID NO: 144372 - protein, 250 aa, Unknown
  Bacterial polypetide isolated from the Sargasso Sea
MEVDQISLSFGGVKALQDVSFSVEEKQIMAIIGPNGAGKTSMLNVINGFYHPQQGQIHFKGLHRKQLRPHEAAVQGIARTFQNVALFKGMSTLNNIMAGRNLKMKKNLFWQALYYGPARDEEMRHRLEAEKIIDFLEIQSIRKTPVGRLPYGLQKRVELGRALAMEPDLLLLDEPMAGMNLEEKQDMCRFVLDINEQYGTTIVLIEHDMGVVMDLSERVVVLDYGCKIADGTPDEVRSNQTVIDAYLGNN

SEQ ID NO: 144373 - protein, 204 aa, Unknown
  Bacterial polypetide isolated from the Sargasso Sea
MSTIELQHLTKAFGDLIAVDNVSLKVEENEVLCLLGPSGCGKTTTLRMVAGLEVATSGDIFIGNKNVNNLDTRDRNLAMAFQFYALYPSLTVAENLANPLFAENLSSEEVKKKILEVADILQLRDIVNRKPHQLAEGEKQRVAVGRAIIRDPECFLFDEPLSRLDVQLREQMRGQIKEVLSDLKKATVIVTHDQLEALTMATKI

SEQ ID NO: 144374 - protein, 242 aa, Unknown
  Bacterial polypetide isolated from the Sargasso Sea
MTNSIEVINLSKKYKSKNAVSNINFKIGENEIVGLLGPNGCGKTTTIGMILGLLKPSSGQVLINGKNIETNKISLLHKMNFISPYIELPKKLKVKQNLTVYGKLYNVDDLENRIDYLSDQLRLTDLLDKITGELSSGQKNRVSLAKALINDPTVLLLDEPTASLDPETGDFVRTFLENFKKEKKISVLLASHNMDEVKRLCGSVLMMKDGIIVDSGTPNDLILKHGRKNLEEVFLEIARNKK

SEQ ID NO: 144375 - protein, 254 aa, Unknown
  Bacterial polypetide isolated from the Sargasso Sea
MNIIEVKDLKKAYLLPGDKSKTFNAVDHISLGIKKGEVYGILGPNGAGKTTTLEMLEGLKEIDDGFAIIDGIDVSKDPYAVKKVIGVQLQSNEYFDKLDLSELLTLFSKLYSTTIDHSKLLNKVNLLDKANAKTQHLSGGQRQRFSIACALVNNPKILFLDEPTTGLDPQAKRNLWNLVKDLNASGMTIVLTTHNMEEAEYLCDRIAIMDKGKLIAEDTPKALIEKYAPEPSDIPLTGNIEDVFLNLTGHSLRD

SEQ ID NO: 144376 - protein, 255 aa, Unknown
  Bacterial polypetide isolated from the Sargasso Sea
MQVRGLCKTYQNRTGLFRRRAVEAIKPLSFDLEVGQTLAIVGEAGSGKSTLARILAGMIEPSGGEIAIEGQPMIHGDYQTRCKLLRMIFQDPNSSLNRKIRVGQILETPLRLNTEMTEEERRDKVVQTLRMVGMLADHALFYPQMLSAGQQQRVALARALILNPKIVVADEALSTLDISVRSQIINLLLEMQETMGLSYVLVANDLGVVSHISDEVLVMHEGRVVERGKTLKVFADPQHEVTRRLIQNYNNEYRR

SEQ ID NO: 144377 - protein, 246 aa, Unknown
  Bacterial polypetide isolated from the Sargasso Sea
MNQLNYYECKNVSKRYGNLTALDNVDFHIGKNEVVGLLGDNGAGKSTLIKMMSGVVAPDTGNVFVDGKETKISTRKQSEEIAGIETIYQNSALCDDMTIIRNIFMGREITNFFGFMDHKKMEDLSLEVLESGVHISGIDSPLKEIGALSGGQKQAVAIARAVYFKRKILLLDEPTSALSVRETERVLKYVTELKSENVSSVIVTHNLYHAFQVCDRFVVMSHGKVIFEKNKSETNLEEVTEQVIKV

SEQ ID NO: 144378 - protein, 229 aa, Unknown
  Bacterial polypetide isolated from the Sargasso Sea
MIQISNLHKSYKMGSNSLHVLKGINFKIDEGELVAIMGSSGSGKSTLLNILGMLDIADEGNYLLDNVLIKDLTETIAANYRNRFLGFVFQSFNLINYKNALENVALPLYYQGLRRKTRQQKALEYLKKVGLLDWAKHLPSELSGGQKQRVAIARAMASEPKVLLADEPTGALDSNTSREVMSLIQKINDEGKTILVVTHEIDIAKMCKRIITLKDGVIIEDKKTDQILL

SEQ ID NO: 144379 - protein, 249 aa, Unknown
  Bacterial polypetide isolated from the Sargasso Sea
MSNVVSKNSAINVVNLEKSVTTQEGSLTILKGINLDVKQGESVAILGPSGSGKSTLLGLLAALDTPTSGEIWLDGQALSPLNEEQKAALRKQKVSFIFQSFMLVDTLTALENVMLPAELAGVKNAKEKAEAMLGRVGLSHRLTHLPKQLSGGEQQRVAIARAFICEPKVLFADEPTGNLDSVNGHKIADMLFELNQESHTTLILVTHDLQLAKRCQRQLVMDNGHLQEELASASSHSVNDSLELSAKEA

SEQ ID NO: 144380 - protein, 332 aa, Unknown
  Bacterial polypetide isolated from the Sargasso Sea
MTKQTAAQGQVAVKAVGLSKRYAEFEAVKDLNFEVCTGQTLALLGHNGAGKSTLIKMILGLVSPSAGQLFVQGQEVQAKRVNASLSLGYLPENVSFYDNMTAHELLSYFAKLKGVAPVRVNLLLEEFGLMAAKDKRLRTFSKGMRQRLGLAQAVLADPKVLLLDEPTVGLDPLASAFLYQKMAQLKAQGCAIIISTHELGLVQDQMDSALILGQGQMLASGNLLSLRAATSLPSLIELHHFTPLQYQQLLSQALFASLLEPSASDRVCLRVPDALKAKVIQQLHSLKIHEFSIVPPSLQDIFHCYMANLHPQSASSCNTFAGTENLNSELVA

SEQ ID NO: 144381 - protein, 266 aa, Unknown
  Bacterial polypetide isolated from the Sargasso Sea
MSPSTSRVWACTDDTRQHKANRKRVMNSTPIINVKGLGKTVRLGQESLTILEGIDLQVNSGETVALVGASGSGKSTLLGLLAGLDLPSQGDIEILGQSLLQLDEEGRARLRAEQVGFVFQSFLLLPTLSALENVMLPAELRGETRCEPRARELLAAVGLGERLHHLPPRLSGGEQQRVAIARAFMTRPSLLLADEPTGNLDSKTGERVIELLFELNREHGTTLVVVTHDHELAQRCQRQLVMAAGRLAADASASEAASAARVRELS

SEQ ID NO: 144382 - protein, 398 aa, Unknown
  Bacterial polypetide isolated from the Sargasso Sea
EEGLFFLTNFEAPNYRLVKILYTGEVVEIIPETDLALKSISILDDFIITNSINTDMNSMVEFYSKGGELLDFKIPDDIEGTLSSFSMHKDKLRFSVSNFINPTRYIDLDLNTLDYTIVWQDKVSNFNPANYEKTFTYYESKDGTMVPLTYFHRKDLEINSETPIFLYGYGGYNISIRPSFSRKYVGWLELGGVVAIANLRGGGELGKKWHNAGRLKEKQNVFDDFLYASKYLEANNIGNRKSTVISGRSNGGLLVGTSLVQNPNYFGATLPAVGVLDMLRFTEFTEGWGWRGDYGSPLLSKEDFDFNFEISPYHQLKEGECYSPTLVTTGRRDDRVVPSHSYKFTARIQEFQGCNNPVMLIDTVRAGHGSGGGAAMPKWKRIELFTSEQAFALKHVSS

SEQ ID NO: 144383 - protein, 753 aa, Unknown
  Bacterial polypetide isolated from the Sargasso Sea
MSLFRAFKAKLFNTKEKSCAHQDIPLQTSSNPLPSSTFKPYFSLAIQATPAQATHSETHEEFTRHDFDSPQTIELLGWEREHESCTFHETQFDRIEIHGPVQDFYLGQDKTCSLALDSDAATTQARWQVALVNPQELVICRFYIDAGYRVQGDMQDFGSLTGKLQRTFHQIETEQGQNLLRIVTQSPNLTQAVDCNYFGERNGITRQFNALGVLQFEGHFIEEQQLGRQTWYDNEGKINQVEERHAEGMLLTRYYSNGQIKETAEKDSEDNYINPLTRYYESGALWLIRPMQAGKIHGTEHIYYEDGKLQAELSYDMGELVKELWYHTNGNLKQEVHLDAAGKSLETYYEDGQLAWRERLNPQGLNCGLRQEWHPNGVLANQLNFVDGVAHGNSEKWYPNGQLEQCIPFENGHEQGLATWYHENGQLSLEIYLEKGLREGLFRSYYASGVLSAEGQYQRNLSVAPFIEYYENQQIQMYLPHTQGNRDGTARWFYEDGTIKTIAEYFVRDGQGYLKESSSYNKQGVLESFESHSNTRCGYQLEDNQREYYQTGHPDTRIEYYEDGAIRWLLTRLDENLFSSKAFSKQGELLESGFVKVIDNDYQDVGHWQRFTPQGQLQREAWLSDDGRLNETRHYFDAAEQQQTMAAETKVDDNNIVEAVAKSNDTQEPQTSAPILSYHLKFDPDSQLYAMKRYHPNRQIAEEGNLLFQGQEHLWVGIHNQYDKQGQLELSETYTMNGEPIEQSSGSNHRVLN

SEQ ID NO: 144384 - protein, 144 aa, Unknown
  Bacterial polypetide isolated from the Sargasso Sea
AEMEFENAMMIGRSIIDHFTSGSVDEIHVVYNYFTNIAQQEVKSETLLPLSYDKGEYTVSDRLYEPSKEELVEALIPRHLNVQMWKYLLESYASEQAARMLSMENATSNAQDMIKDLTLQFNKARQAAITTEMLEIVGGAEALG

SEQ ID NO: 144385 - protein, 374 aa, Unknown
  Bacterial polypetide isolated from the Sargasso Sea
MNEEEMNELLEKQGTLQNEIDAVDGWQIERTLEIAADALRLPPWEDDVNHLSGGEKRRVALCRLLLSKPDMLLLDEPTNHLDAESVAWLERYLQDYSGTVVAITHDRYFLDNAAGWILELDRGHGIPYEGNYSAWLEAKEKRLAVEEKQQSAHEKTIKSELEWIRANPKGRQSKSKARIARFEELNSQSFQSRNETQELYIPPGTRLGDKVLEVKNLSKGFGSKSLIENLNFSLPKGSILGIVGGNGAGKTTFLRMLVSSEKPDSGTIELGETVKLAYVDQSRDELDGEKTVWQEISDGQDNLVIGNYEIASRAYASRFNFRGGDQQKFVKDLSGGERNRLHMAKLLKKGGNVLLLDEPTNDLDVETLRALEEG

SEQ ID NO: 144386 - protein, 348 aa, Unknown
  Bacterial polypetide isolated from the Sargasso Sea
MHAVKIENLSHKIQKKNILNNINLELKKDKIACLLGPSGSGKTTLLKLIAGLEKVQEGKIFLNNVEVSSSKKHLKTEKRKIGFLFQDYALFPHLTVEENIKYPINFKNSNYTIEDIIDLIKLPNSLNKYPHELSGGEQQRVALARSIIAQPDLLLLDEPFSSLDLNLREEVRDDTLHFLQKSNVSSIIVTHDPFEAMFISNQISIINNTGEIVQTGSPNELYNQPINSYVTEFFGETNLFTGRVTNSFVDTPIGKVKTKVELENKEVTVHVRPKGIKLSKKPTPVNGVKGTVMASKMMGSFSFIHISVLNNNNEIVHVHSHMPSNFIPDESSAVEIEIDESQTFVFQN

SEQ ID NO: 144387 - protein, 308 aa, Unknown
  Bacterial polypetide isolated from the Sargasso Sea
MHALSIKDLSKKYKSGVEALKSVSFDVQEGDFFALLGPNGAGKTTAIGIITSLVNKSSGSIEVFGHDLDKELAKAKSCIGVVPQEVNLNLFDYNFNILVNQAGFYGIPRSEGKKRAEQYLKQMQLWDKRKTNARSLSGGMKRRLMVARALVNRPKLLLLDEPTAGVDIETRRMMWDFLRDLNSNGTTIILTTHYLEEAEQLCNKVAIIDEGKIIENDSMQNVLKKLKTEVFILNTEKPIDKAPEIDGYATALKSPQEIEITVSQEQGVNDAFSTLQERGVKVLSMRNKNSRLEELFLDLTKGQQGEGE

SEQ ID NO: 144388 - protein, 94 aa, Unknown
  Bacterial polypetide isolated from the Sargasso Sea
MSTKNYIKIKNLSKSFGDVEVLKNINLEVEEGEFFSLLGPSGCGKTTLLRILAGFEYPSEGEVFFDDANVTSLPPNLRPSNMVFQNYAIFPHIN

SEQ ID NO: 144389 - protein, 383 aa, Unknown
  Bacterial polypetide isolated from the Sargasso Sea
MVLESTGIVPLMKSSPISVIFISNVSTRVFSCALSIIACLSSPVLCQISAIVYLNRIKLKQHYCFIFIKVQNAFGMHALSIKNLSKKYKSGVEALKSVSFDVQQGDFFALLGPNGAGKTTAIGIITSLVNKSSGSIEVFGHDLDKELAKAKSCIGVVPQEVNLNLFDFNFNILVNQAGFYGIQRSEGKKRAEQYLKKMQLWEKRNTDARSLSGGMKRRLMVARALVNRPKLLLLDEPTAGVDIETRRMMWDFLRDLNASGTTIILTTHYLEEAEQLCNKVAIIDQGKIIENESMQNVLKKLKTEVFILNTEKPLDEAPEIDGYITALKSPQEIEITVSQEQGVNDAFGSLQERGVKVLSMRNKNSRLEELFLDLTKSQSGNES

SEQ ID NO: 144390 - protein, 350 aa, Unknown
  Bacterial polypetide isolated from the Sargasso Sea
MEAAIQIQNVWKIFGNTSNDALDAIQNKKISKQEALEKYNSVIGVSDVSFDVNKGEIFCVMGLSGSGKSTLVRHINRLLEPTSGKILINNQDVMQFNKENLQELRNKKIGMVFQNFALMPHRSVLDNIAMPLEIRGVSKNDRLDAANNILNIVELQGWGNKYAHELSGGMQQRVGLARALAADPEFLLMDEPFSALDPLIRRQLQTEFIKLSKQMKKTTVFITHDLDEAVRVGHRIAIMRDGGVVQIGTPEEIVVNPSDEYVADFVKGISRLKVVQAKTIMQSLEQYKKNFGENFSNNEKVNENDILSKLIETSVSKDKPIVVANDHNKEVGIITQSDLLKAVVEGNENE

SEQ ID NO: 144391 - protein, 245 aa, Unknown; identical to SEQ ID NO: 143498
  Bacterial polypetide isolated from the Sargasso Sea

SEQ ID NO: 144392 - protein, 334 aa, Unknown
  Bacterial polypetide isolated from the Sargasso Sea
NTSAEVLDAVTKQKISKQEALERYNAVIGVFDVSFNVNPGEIFCVMGLSGSGKSTLVRHINRLLEPTLGKILVDGQDVMALEREALQTFRNKKIGMVFQNFALMPHRSVIDNIALPLEIRGINKNQRYKKANDILNIVELGGWGSKFAHELSGGMQQRVGLARALAADPEILLMDEPFSALDPLIRRQLQVEFIKLSRQLKKTTVFITHDLDEAVKVGHRIAIMRDGKVIQVGTPEEIIMDPEDDYVADFVKGISRLEVVKAGSIMTPINMFKSLNGPIPQNCVRMREDDVLSRLVDSLVSSKQPVVIVDGGGQTVGVVSQHDVLASIVENRDD

SEQ ID NO: 144393 - protein, 224 aa, Unknown
  Bacterial polypetide isolated from the Sargasso Sea
MLEITQVSKTFHLHTQQQAEIPVVTNVGFAVQPGECVALTGESGSGKSTVLRLIYGNYLAKTGSITVGGTEIVAADPRTILDLRRTTLGYVTQFLRVLPRVPTTRVVAEPMIQAGHDATAADTHARDLLRRLRIPETLWDLSPLTFSGGEQQRVNIARGFAYDYPALLLDEPTASLDATNRKTVLDMIDAAKQRGCAILGIFHDYAAREAVCDREIDVSQFAVE

SEQ ID NO: 144394 - protein, 213 aa, Unknown
  Bacterial polypetide isolated from the Sargasso Sea
MGDSILELKDLSHSYDGSEISLKNISLIVNKAEKVSVLGPSGSGKSTLLRLIAGLEKPYSGTITIQGKIVSDQDHMVAPEKRNVGLVVQNKALFPHLTVEKNIGFGIRKNQEKTKIIADLLSLFKIEHLSNKYPHEISGGEQQRTAIARSMAPSPELLMLDEPFSALDRELKEELYAELNHIFKERQQTIMLVTHDLDEAKVLSDKQINLENT

SEQ ID NO: 144395 - protein, 225 aa, Unknown
  Bacterial polypetide isolated from the Sargasso Sea
MSEIVISTSNLCKTYVSAALDPVHALKSVEIAIEEGEIVGIMGPSGCGKTTLLNCLSGLDTIDDGDILIQGKSLSDLNDDQLSEFRAKKMGFVFQTYNLLPVLNAVENVELPLLVSGMSAKAARNKAIEKLDEVDLVKQIHQLPGELSGGQRQRVTIARALVNDPAIVWADEPTGNLDSENEIEIMNLLTQMNKENNQTFVIVTHSDYVGGRANRIINMKDGEVV

SEQ ID NO: 144396 - protein, 247 aa, Unknown
  Bacterial polypetide isolated from the Sargasso Sea
MRTALAFENLTLGYDSQAAVNNLEADIAEGSLTAVVGPNGAGKSTLLRGVVGALSPLEGRVAFGTLSRDDIAYLPQQSEIDWTFPMLVIDLVAMGLWREIGPFGQLKGDRLARVEAAVATMGLKGFENRPIGSLSGGQMQRTLFARLLLQDASLILLDEPFSAVDASTIGVLLDLIQRWHEEGRTVLTVLHDHETVRTHFPKTLMLARELVAHGPTEQVLTAENHSRALQMCEACDGPPHVCGRPVA

SEQ ID NO: 144397 - protein, 365 aa, Unknown
  Bacterial polypetide isolated from the Sargasso Sea
MANVQFENLFKNYGDVKAVEDFNLKIADGEFIVLVGPSGCGKSTTLRMIAGLEDITAGNIYIDDSLINKVHPKDRDIAMVFQNYALYPHLSVKDNISFGLRAQKLPKMEVENRVLEASETLGLQGLLSRRPGELSGGQKQRVAMGRAIVRNPKVFLFDEPLSNLDAKLRHKMRAEMKKLHKQVGTTTIYVTHDQIEAMTLADRIVIMKDGVIEQVGTPNEVYKKPNNIFVASFIGTPAMNFFEGKVKSCSKSLTTITLKDQKEIKLSSNIYEKDQDIIFGIRPEDISVNLDKKSKMKDSIELDAEISVIEPMGHETVVICDSNYGELTGKVESSHSLKENMNVKLIIKEEKIYQFDKMSEKNLLL

SEQ ID NO: 144398 - protein, 504 aa, Unknown
  Bacterial polypetide isolated from the Sargasso Sea
RDALFSRVTEHAMRKVGLRVFNHLHQLELSFHLDRQTGGISRDIERGTNGISFLMRFLMFNIVPTLLEILMVAVIFALLFSYWYAVLTFIAVALYVAFTFYVTEWRNKYIREANQADSATNSRAVDSLLNYETVKYFNNEAYEERTYDQFLANWESAKLKNRMSLLALNSGQALIIALAITLMMWMAAKGVLDKELTLGDLAMVNAYMLQLFIPLNFLGFVYREIRRSLTDLENMLGLLKKEAQIKDKTDAPELQLQQGRIEFKQVHFSYQPGRPILNGLSFVVEPGQKLAIVGASGAGKSTIARLLYRFYDIQSGSICIDGQDLRDVTQSSLRQSIAIVPQDTVLFNTSIRENIRYGKPDASEAEVDQVIKLAHLDSFIQSLPQGDQTLVGERGLKVSGGEKQRIAIARVLLKGSPILIFDEATSALDSHSEAAILKALRELAKHHTSVVIAHRLSTITDADAILVLQQGEVAEAGTHQQLLAQQGLYAQLWAKQQEAKTKAE

SEQ ID NO: 144399 - protein, 439 aa, Unknown
  Bacterial polypetide isolated from the Sargasso Sea
MYGDVEDEEDDDDTADVLADCQFTLAYGSKVLLHNTKLKLKRGHKYALLGGNDSGKTSLMRAIANEQVEGFPPASELRTVFVEADIIGELSDLPCVDYILADPRIKDAGITEETVEKMLLNVGFGEMQNGARNLVTFLSGGWRMKLALARAMCLNADILLMDEPTNHLDVMNVKWVEEYLKSLTDVTAVLVSHDTGFVDRVCNNIISIENLKLKQFRGTLTEFVEKNPKARSFFELKSSSGFVMRFPQPGFIDGVKSKGKPLMKMANCTYTYPVNEVPTVKDVTVQVSLASRVACVGPNGVGKSTMIKLLTGEIVPQEGTVWKHPNARVAYVAQHAFHHIEQHLEKTPNEYIRWRYQHGDDKEALVKDTMVLTDEEKERCKQPVKIDIGKDEKGNQMTLKMAIEKLTGGRKQVKKEYEYEVQFVGRDYNSNRYIQATKL

SEQ ID NO: 144400 - protein, 610 aa, Unknown
  Bacterial polypetide isolated from the Sargasso Sea
LLSGVSSGDWMSALTFALAVAVGLTPEMLPMIVSANLARGAVAMAKRKVVVKRLNSVQNFGAMDVLCTDKTGTLTQDKIILEHHYDVRGKRDDRILQLAWLNSFHQSGMKNLMDIAVVEHADALGESCKPANYRKVDELPFDFVRRRLSVIVQDDLGQQLMVSKGAVEEMLAVSSQIADGQEVRELTDADRRALLRQSEEFNAEGYRVLIVATREIPATEYKQSYRTSDEVKLVVRGFLTFFDPPKDSAAPAIRALNDYGVAVKVLTGDNPIITSKVCRDVGLEPGVPLLGKDIEVMDDVALCTVVKHTTIFAKLTPLQKSRVVKALQANGNTVGFLGDGINDAPALRDADVGISVDSGADIAKETADIILLEKSLMVLEEGVIKGRETFGNILKYLNMTASSNFGNVFSVLVASAWLPWAPMLAMQMLIQNLVYDVSQMLLPWDKMDPEFLKRPRKWEASNIKRFMLWLGPTSSVFDISTYCLMWFVFGAGALYATANGSMDPLVNGQAIMNSGWFIEGLVSQTLVVHMLRTRKIPFLQSTATLPVLLSTSIAIAIGCYLPFSPLAEHFGFITLDGPKYFMWLVITMLAYMGLTQTVKSIYIKRHGQWF

SEQ ID NO: 144401 - protein, 509 aa, Unknown
  Bacterial polypetide isolated from the Sargasso Sea
MISVRNVTLRRGVNVVLDNASVTFTPGEKVGLVGRNGAGKSSFFGLLNGTLHEDSGEFSIPAAWRMGQVAQEMPETEQSATDFVIEGDTVLLAAQAEVAAAEASDDGMRMAHAYMALHDAGAHDAPARAQALIQGLGFSAAQLDQPVNSFSGGWRMRLQLARALMCPSDLLLLDEPTNHLDLDALVWLEAWLKRYQGTMVVISHDREFLDAVTQVTVHVDNAKLVRYGGNYSKFEEMRAEQLVLQQAAVARQADKIAHLQKFIDRFKAKASKAKQAQSRVKALERMEKIAPVLADAEFTFEFKEPLNVPNPLLSMLDASFGYPAPDDAPLGTPPTVIVRGINRSVLAGQRIGILGANGQGKSTLVKTVAHELAPIAGEISEGKGLNIGYFAQQELDVLRPLDTPLEHMIRLARDTPAHLRAPGQSGTEQSLRTFLGTFNFSGDMVHQAVGTMSGGEKARLVLCMIVWQRPNLLLLDEPTNHLDLATREALGMALNEFEGTVMLVSHDRS

SEQ ID NO: 144402 - protein, 343 aa, Unknown
  Bacterial polypetide isolated from the Sargasso Sea
MTDAVIKCESVYKIFGANAKKMLQEANGNVDAKTFQKNGCIVGVNNASFEVSKGEMLVVMGLSGSGKSTLLRCISRLTDATGGKIFIEGQDLLSLKEKELIELRRNKMGMVFQSFALLPHKTVLENIAFPLLIKGVETENSINKAMDMVKLVGLDGRENYFPRELSGGQQQRVGIARSLAVEPDIWFLDEPFSALDPLIRKEMQDEFLRLQEKLKKTIMFITHDFDEALKLADRIAIMKDGIIEQLDTPAKIVLNPATEYVKKFTEEVPREKVLIIEDVMDAPTSDNLSNLKVSKDEIIENVAEKILSQEKSVGVIDKNNKIVGTVHPSKIIHTVFGGRKENS

SEQ ID NO: 144403 - protein, 360 aa, Unknown
  Bacterial polypetide isolated from the Sargasso Sea
MSQIKIANLQKSFGDFTAVKNSNLTINDKEFFVLLGPSGCGKTTTLRMIAGLELPTSGEIYLGEEEVGMLRASERDIAFVFQLFALYPHMNVKNNLSFPLKMQGYSRSEIKTRVEEAAKLLRIDHILNSSISSLSGGDRQRVALGRALVRRPKAFLMDEPLGTLDAEFRELMCLELKKLHIDIGATTVYVTHDQLEAMSLADRIAVMDGGEILQADEPAVIYNKPATKFVASFIGSPGMNFINIDQGISNEQSTLNIEGTNFNIPKQYEISKSKNNSFGIRPENLSLTNEGGLKGSVFGVEYLGSRKIVTVKTNFGEIKVKTNISTSVKINENVQVKPSNNNIIIFDGETDRSLKSEFMN

SEQ ID NO: 144404 - protein, 333 aa, Unknown
  Bacterial polypetide isolated from the Sargasso Sea
MKTLLSVRDVKQHFQLGGGLLRKKYHVYAVDGISFDLKQGETLGLVGESGCGKSTLGRTLLKLFEPTAGTITFEGRDITHLPPKEMRSLRQEMQIVFQDPAESLNSRHTVGQILEEPFVIHGKGNAEQRRVWVQELLEKVGLPGSTVERYPHEFSGGQRQRIGIARAIALKPKLLVCDEAVSALDVSVQSQIVNLLLTLQREMNLAIIFIAHDLSVVKHISDRIAVMYLGRIVELAEAQSLYLAPRHPYTQALISAIPVPDPRRRSQRILLTGDVPSPISPPSGCHFHQRCPYAGELCRTKAPSLQPCDGADHQVACHTPLPLAEAIPLGKAV

SEQ ID NO: 144405 - protein, 328 aa, Unknown
  Bacterial polypetide isolated from the Sargasso Sea
MLEFLNISHSYNNQKILNDFSMKLETGEVVSLLGPSGCGKTTLLKLASGIEKLQNGEIKLNNEIVSSPNIHLNSEKRDVGYVFQDCALFPHLTILQNIFFGMKSIEIEKQKNKIQSLMKEINISSLSEKYPHELSGGQQQQVALVRAMASDPKIIFLDEPYSNLDSRLKEKIRDQMLHILSEYNISALLVTHDPEEAMFMSDKIGILNNGSIEQFGSPIDLYLRPKSAFIAEFFGEINVFEGLVEDGSVNTVLGTFKCSNKFNKKKVKIVIRNEAINVFAENKLNLKKYKHPKFVTSPYFGHVMEARLLAGSTLVHLSLKVNQSNFHI

SEQ ID NO: 144406 - protein, 225 aa, Unknown
  Bacterial polypetide isolated from the Sargasso Sea
KNISFQVNQNEIIGILGPNGCGKTTTIGMILGLLKPTKGKILINGLEIEKQRVNLLNNLNFISPYIELPKKLTVRQNLDVYGRLYDVKNLKEKIEYLTEKLRLNEIINKITGELSSGQKNRVSLAKSIINDPIVLLLDEPTASLDPETGDFVRTFLEDYQKERKTSILLASHNMSEVERLCSSVLMMNNGIIIDQGNPKDLIKKHGRKNMEEVFLKLTRGKYESK

SEQ ID NO: 144407 - protein, 235 aa, Unknown
  Bacterial polypetide isolated from the Sargasso Sea
MAFFEGNKMTGGYDDGPDIISSCTINVNRGEIVAILGPNGAGKSTAMKAMLGLLNLKSGNISIDGEDISKLTPQERVKKGISFVPQTRNVFAELTVKENLEVGAFLRTDNINNVIEEIYDLFPILREKKDQVVGQLSGGQRQQVALGRALMIKPSVLMLDELTAGVSPIVMDELFEHIIRVKNTKVAIIMVEQNAKQALSISDRGYVLVTGENKFEGSGMELLNDPEVRRSFLGA

SEQ ID NO: 144408 - protein, 128 aa, Unknown
  Bacterial polypetide isolated from the Sargasso Sea
MGTISLKNISKSFGSTQVLKDLNVDIIEGEFLTLVGPSGCGKSTLLRIIAGLEQQTSGDVLIDNKNVNRIRASERDLAMVFQSYALYPHLTVRRNLETPLRLRDYSSFERLPLIGNLSPNKKQKTESI

SEQ ID NO: 144409 - protein, 237 aa, Unknown
  Bacterial polypetide isolated from the Sargasso Sea
MLKVDSVSKIIKDKKILNGISFSLNFGQICGLLGPNGAGKTTSFYIIAGLTKSDSGQIEFIDQDITNMPMHKRSNLGIKYLPQEPSIFQNLTVYENLYGLAELTFKNNNNIKTSVKKLLDEFDLIEIKDLNGRQLSGGQRRKVEIARTLVSNPKMILLDEPFAGIDPIAIEEIKKVLNTLKNKGIGILITDHNVRETLEICDHAAIINNGEIIAHGTKENLISNQVVKDVYLGNMYN

SEQ ID NO: 144410 - protein, 238 aa, Unknown
  Bacterial polypetide isolated from the Sargasso Sea
MLRTENITSFYGEIQALHGLNLEARKGEITCVLGPNGAGKTTTMFTIAGILKSRTGSIFLEDEELTRQSAQTIVRKGIALVPENRLIFPQMSVEENLNAGAFTRSSNDPSIENDIFKMYQRFPPLEGRRNQLAGTLSGGEQQMLAIARALMAKPKILLMDEPSLGLAPLVVKEIFYIIRQLHEEGVTILLVEQNARMALKVANMVYLLEKGKVSFSGSPEEIHQDEVIKRAYLGTEIK

SEQ ID NO: 144411 - protein, 456 aa, Unknown
  Bacterial polypetide isolated from the Sargasso Sea
LALASALVAEPDGLLLFEPTNHLDALATEWFQGFLQRFKGALVLITHDRYFLERVTDTIIELDAGQLRRYPGNYGAYLQKKDEEEVADAARQRAYRSVMRREIEWLRRGPKARSTKQKARIQRIAEMQQQSFKPAKQNVAMESASRRLGKTVIEVESLQRKLGERWLIRDFSYSFSPEDRVGFIGPNGMGKSTLLDLLSGRQQADGGNVVRGETVVIGRFDQHSEDLKPELKVIEVIQDVAERIDLGNGSSLSASQLLERFLFPPAQQHSPVARLSGGERRRLHLCRLLMAAPNVLLLDEPTNDLDVQTLAVLEDYIEDFRGCVVIVSHDRYFLDRTVDRLFCFQPGGLLERFEGNYSEWLDQQPTRQNAVATKTKPSAAKPKREKPRRRSYKEQRELTELDTKLPQLEEQKAQLESRLAGAEYDTLEALTQELAGLCEQISTAEDRWLELSALPE

SEQ ID NO: 144412 - protein, 143 aa, Unknown
  Bacterial polypetide isolated from the Sargasso Sea
MKNIIEFDKVSKSFGDLKVLNNLSLKVKDGEKLALIGPSGSGKTTILRILMTLEKIDDGFVSVNGEYLWHEKINNKLEHASDNHLEKMRNQIGMVFQQFNLFPHLTAIENVKQPQILVKKKKNSEAKDKAEELFKMIGLSDKI

SEQ ID NO: 144413 - protein, 181 aa, Unknown
  Bacterial polypetide isolated from the Sargasso Sea
MSFFQGNKMTAGYGDGPDIITSCSINVSRGEIVAILGPNGAGKSTAMKAMLGLLKLKSGSVSIDGDDISSLSPQDRVKKGISFVPQTRNVFAELTVRENLEIGAFLREDDINKVIEEIYELFPILKEKRSQIVGQLSGGQRQQVALGRALMIRPSVLMLDEPTAGVSPIVMDELFEHIIKV

SEQ ID NO: 144414 - protein, 213 aa, Unknown
  Bacterial polypetide isolated from the Sargasso Sea
MTDIIQKVKNLSIGFRSKKGEEILILKNINTNIKKGETVGIVGESGSGKSTLALAMMGYVKHGLYTIGGECQFNSSNLLKMKSKDLEKIRGRKIAMIPQNAGQALTPNLKIGYQIDEALQLHSDFDEKEREKKISELLNKVRLPSPETIALRYPHELSGGQQQRVAVAMALAGTPDLLLLDEPTTGLDVTTQAHVLELLNFIAKRYWNIDGLC

SEQ ID NO: 144415 - protein, 336 aa, Unknown
  Bacterial polypetide isolated from the Sargasso Sea
MNKSPKLVCKNVWKLYGDKPKEFLQSHNYNPDKKTIEENGYIQAIRNATLEVYENEILVIMGLSGSGKSTLVRCMSRLVDPTVGEIFFENIDMGRLTKNELIEIRRHKMGMVFQHFALFPHRTVIENIAFPLEVQGINRAEREKSAMEIIDLVGLQGRENYFPKELSGGQQQRVGIGRSLAVKPELWFLDEPFSALDPLIRKEMQNEFLKIQNSLKKTIIFITHDFDEAIKLADRIIIMNEGRIVQIGSPEDLIMKPADDYVKEFTEDLPRERLLSVKSIMNNQKQPSNALTVYEDEKIFSILEKVLSEGSVSVIDRSNNIVGSLNRETVSRFINN

SEQ ID NO: 144416 - protein, 184 aa, Unknown
  Bacterial polypetide isolated from the Sargasso Sea
MILSTKNLRKEVSSGNSNLVILEDINLNVEEGESLAITGPSGSGKSTLLGLLAGLDNPSSGHIFLNKIPLHELNEEERARVRKENVAFVFQSFELLPSLTALENVMLPSELKSKKDPESNAKYFLDRVGLKDRQHHYPNQLSGGEQQRVAIARAFACSSKILFADEPTGNLDPKNGKLISDLLF

SEQ ID NO: 144417 - protein, 156 aa, Unknown
  Bacterial polypetide isolated from the Sargasso Sea
EQIIEPLKIKKLYNKSIKNLSGGELQKVAVTSCLLQKVDLYALDEPSAFLDVEDRIAVGKFLQKFVRSFGKSAIIIDHDLQLMDLVSDSMVIFEGTSGIEGKATKPMPKQTAMNQFLRSLDITFRRDEKSSRPRVNKDGSRLDKTQKDSSNYYYKL

SEQ ID NO: 144418 - protein, 62 aa, Unknown
  Bacterial polypetide isolated from the Sargasso Sea
MNKKNLVKNDALIIDDLHHKYDKRECSNWILNEINLKIENGELLGLLGPSGCGKTTLLRLIA

SEQ ID NO: 144419 - protein, 477 aa, Unknown
  Bacterial polypetide isolated from the Sargasso Sea
PLPAWLHLWHCYKNPFNVLLTVLALISYLTEDHEATVVILAMVVLSTLLRFVQEGRSNRAAERLKSLVSNTATVLRRSDMGGVATPRELPIHQLVPGDHIVLSAGDMIPSDCRVLTAKDLFVSQSAMTGESLPVEKFAERSRPGTSALDATNLLFMGTNVVSGSATALVVATGNHTYFGTLATRVTATDRTPTAFQAGVNSVSWLLIRFALVMVPIVLVVNGFTKGDWLEAFLFALSVAVGLTPEMLPMIVTSTLAKGAVLLSRKKVVVKRLDAIQNFGAMDVLCTDKTGTLTQDKIFLERHTDVLGHNSDEVLAFAYLNSHYQSGLKNLLDHAVLEHVELQTDLRLAQDYRKVDEVPFDFVRRRMSVIVSERNDHHELICKGAVEEMLDVCTQVRVVEDTGVQDLPLDATLRARVLEVTRGLNNEGLRVVAVAMKETPPHQTVYSVADESGLTLIGYVAFLDPPKESTAPALKARP

SEQ ID NO: 144420 - protein, 235 aa, Unknown
  Bacterial polypetide isolated from the Sargasso Sea
MAFFEGNKMTGGYGDGPDIISSCTINVNKGEIVAILGPNGAGKSTAMKAMLGLLNLKSGNVLIEGEDISKLSPQERVKKGISFVPQTRNVFAELTVRENLEVGAFLREDDVLKVIEEIYDLFPILRDKKDQVVGQLSGGQRQQVALGRALMIRPSVLMLDEPTAGVSPIVMDELFDHIVKVKKNDVAIIMVEQNAKQALSISDRGYVLVTGENKFEGSGKELLNDPEVRRSFLGA

SEQ ID NO: 144421 - protein, 100 aa, Unknown
  Bacterial polypetide isolated from the Sargasso Sea
MSKDSIISLQNVNKWFGDFHVLQDVNLEVKKKERIVVCGPSGSGKSTMIRCINRLEEHQEGTIIVDGIELTGNLKNIDSVRKEVGMVFQQFNLFPHLSVK

SEQ ID NO: 144422 - protein, 214 aa, Unknown
  Bacterial polypetide isolated from the Sargasso Sea
IGLLGPNGCGKTTSIGMMLGLIKPTTGDIIIQNKNINTFERNKLLSIMNFASPYVELPKKLSVKQNLQIYGRLYGVKDLSLRIDELAEDLNLKDFINKKTGELSSGQKNRVSLAKSLINKPEILLLDEPTASLDPDIGDYVRSYVQSYKSKNKVTILLASHNMAEVERLCDSVIMMKKGKIIDQGTSKEIINRHGRTNLEETFLKIVRSKDEVA

SEQ ID NO: 144423 - protein, 461 aa, Unknown
  Bacterial polypetide isolated from the Sargasso Sea
SNGAGKSTQFKILIGEEEQTSGTIIKEGNPKIAHLKQEFDCNLNFSVRQELESSFKDIQIVAIKLLEIENKMKSLDIKKNSDELEIFVNQLAKYQAKFEALGGYKMQSDVEKILPKLGFSIEDADKLVGNFSGGWQMKVALGKIILQKPDLLLLDEPTNHLDLETIFWLEEYLSSLKIAVIIISHDRYFLDKLCKKIIFVDRGTSETYNGNYSFFVEQKSLNEESQNKAYQLQQKEIELQKRYIDRFRASATRSSQAKSREKQLKKISKIEAPIAKSKSPVFNFPECPRSGKLVLNIKNLSHSFEDKILFLDINLKISSGEKIAILGPNGCGKSTLLKIIMKKISPEIGEINLGKHNIITSYYEQNQAEALSLDERVIDLICNKSPEWSQKKVRTFLGGFGFQNETVFKFIKQLSGGEKARLALALMIINPSNFLLLDEPTNHLDLQSKENLELAIKKYKG

SEQ ID NO: 144424 - protein, 518 aa, Unknown
  Bacterial polypetide isolated from the Sargasso Sea
MGIVGESGSGKSQTVLSIMGLLETNGSATGSCVFTNKELINLPSGELNKIRGNEIAMIFQDPMSSLNPYITVGKQMSGVLKRHTKMNNKEIKERCIDMLDSVGISKPQERFDGYSFELSGGMRQRVMIASALLTNPKLLIADEPTTALDVTVQEKILDLILDVKERFKMSVIMITHDLGVVARTCDQVLVMKNGELQESGNVEAIFYSPQADYTKELLEKSKEINLDEQQKYSETQDANIKNSLVKSTKAKVNFVLPKKALFSAENILTAVNEISMETLEGEVLGVVGESGSGKSTLAKTILGLQKLSSGQVEVFGQRLTEINKKELKEIRKKMQVVFQDPFSSLNPRMTVFEILKEPLDSFFPSMTKESAQKDIEDGLMEVGLTNEYLGRYPHELSGGQCQRVAIARALMPKPQLLICDEAVSALDASIRGEIIDLLLRIKAEKKLTMIFIAHDLAVVRKICDRVIVMQSGKIVEQGPTEKVFFEPEKEYTANLLSAVPVPDPKMEREKHTKRVQAK

SEQ ID NO: 144425 - protein, 247 aa, Unknown
  Bacterial polypetide isolated from the Sargasso Sea
MNKIIQVRDVNKSFGGVIANRDISIDVEEGKITGLIGPNGSGKTTLFNSIVGYHPIDSGTILFENHEISKLRVQKIARLGVLRTFQQTRIYSKMNCVKNMLISAAHHNTKWMDMFTQYPQELTERAEKLLEFVGLYGKRFLISGDLSFGQQKLLEFAMALMNEPKVLLLDEPTAGINPTLINGLIDRLKRANHEFGITLFVIEHNMRVVMNLADSIYCLAHGEMLAHGTPEKIKQDQKVIDAYLGAH

SEQ ID NO: 144426 - protein, 227 aa, Unknown
  Bacterial polypetide isolated from the Sargasso Sea
MTAGYGDGPDIISSCTIKVNKGEIVAILGPNGAGKSTAMKAMLGLLNLKSGNISIEGEDIGKLSPQERVKKGISFVPQTRNVFAELTVRENLEVGAFLRTNNVSNVIEEIYDLFPVLREKKEQVVGQLSGGQRQQVALGRALMIKPSVLMLDEPTAGVSPIVMDELFEHILKVKKTNVAIIMVEQNAKQALSISDRGYVLVTGENKFEGTGKELLNDPEVRRSFLGV

SEQ ID NO: 144427 - protein, 281 aa, Unknown
  Bacterial polypetide isolated from the Sargasso Sea
FVWFGKSTLLRCISRLTDATGGKIFIEGQDLLQLNNKDLIDLRRNKMGMVFQSFALLPHKTVVENIAFPLQIKGVKTEDSISKAMDMVKLVGLDGRENYFPRELSGGQQQRVGIARSLAVEPDIWFLDEPFSALDPLIRKEMQDEFLRLQEKLQKTIMFITHDFDEALKLADRIAIMKDGIIEQLDTPANIVLNPATEYVRKFTEEVPREKVLLIEDIMDKTKDNLGDLKVSKDEIIENVAEKILTQEKSVAVIDNDNNIIGSINPAKIINTVFGGRKNNI

SEQ ID NO: 144428 - protein, 99 aa, Unknown
  Bacterial polypetide isolated from the Sargasso Sea
MSAASTSVEANAVEAKNLDLVFQTRDSPVHALSEINLEIRRGDFISFIGPSGCGKTTLLRVIADLEKPTGGSIVVNGVSPEQARLQRAYGYVFQSPALF

SEQ ID NO: 144429 - protein, 561 aa, Unknown
  Bacterial polypetide isolated from the Sargasso Sea
MPGPPLKGIFMSSYQYIFSLENLSKTWSGGKTLFENINLSFLPNAKIGIVGVNGSGKSTFLKILSGIDKEYNGEIIAAKGIKVGYLAQEPELDITKNVFENVSEGAKEKLSLIEKYNELSMNYSEEIADDLAKLQDEIEARDLWDLDSKIEQAMDALRCPDKSKDINTLSGGEKRRVAICKLLLEEPDLLLLDEPTNHLDPETVAWLENYLKNYKGTVILITHDRFFLDNITEWILELDRGKAIPYEGNYSRWLIQKQKRIELETKQENARLRRLKSEVNWISSSPKARQSKSKARINNYETLLNKENIQSIDDPQIIIPNAPRLGDLVIELNNLKKVIEDKVLFEDLSFKVPKGAIVGIIGANGAGKTTLFNIISDKLDATDGLVRLGETVNLSYVDQSRETLDSVKTVWEEISEGNDIVEINSTTINTRAYTSAFNFKGSDQQKKVGQLSGGERNRVHLAKVLKSGANVLLLDEPTNDLDVETLYALEYALDKFSGCAMIISHDRWFLDRVCTHILAFEGNSNVEWFEGSYSEYSEDRKRRLGDEGEIPSRIKYKKFSR

SEQ ID NO: 144430 - protein, 229 aa, Unknown
  Bacterial polypetide isolated from the Sargasso Sea
MSENNNNEILNVDNISFSYYKGVNELHVLKNVSFNLKKGEMVALVGPSGSGKSTLLNLIGLLEELKKGKIFLNQKLINPTSVKDRNKIRLNEIGFVFQFHRLLHEFTAIENVAIPQMLTGLNKELSIKRADELLNMMNLNDRMHNKPGQLSGGEQQRVAIARSLSNAPRLLLADEPTGNLDPKTAIEVINHLRLIVNETNLTCLIVTHNIEIASLMDRVLKLQFGTIVE

SEQ ID NO: 144431 - protein, 275 aa, Unknown
  Bacterial polypetide isolated from the Sargasso Sea
KILSPEKRNIGMVFQDYALFPHLNVLENVMFGLKNKKDRSRVDYLLNVVGLDSFIRRYPHELSGGQKQRLAIARALAPGTDFILLDEPFCSLDMHVKLKLRGELPNILKGCNASGLMVTHDPEEAMSICDKVAVMNEGKIHQIDTPINLLNNPKTLFVSSFILGNNIINLQKNGNSYSSCFGEINSSTVLQNGNIKSMSISPKFISIKRSESGNANVISKEFLGEFLIYKVTINGNILRVRTDINNLLNNGDKCFLSLNKNSYYFLYPGAHKVYI

SEQ ID NO: 144432 - protein, 377 aa, Unknown
  Bacterial polypetide isolated from the Sargasso Sea
MSKVLELTRELISKKSVTPDDAGCQSIISTRLEKIGFSVEHLRYGDVDNLWATYGDAGPIFAFLGHTDVVPTGPLEDWESDPFVATDKDSLLVGRGAADMKGSVAAFVTSIEEFLAEEPILSGRIAILLTSDEEGPAVDGVTKVVDYLEEKNEKIEWCLVGEPTADNNVGDVIKIGRRGSVSAKVIVKGTQGHVAYPEKASNPIHNFSSPLAELSKLSWEDETGKFQDSVLQISNLNSGTGATNVIPGSLELSLNVRHSPSTSVQQIKDDVESIINKYNVECEIFWEVGGKPFLTTQEELISAVKSSIKEVTGSEPKCTTDGGTSDGRFIAPTGSQVVELGPGNASIHKVNESVKKEDLEELHKIYKTILSKLLTNL

SEQ ID NO: 144433 - protein, 235 aa, Unknown
  Bacterial polypetide isolated from the Sargasso Sea
MAFFEGNKMTGGYGDGPDIINSCTINVNKGEIVAILGPNGAGKSTAMKAMLGLLNLKSGNVLIEGQDISKLSPQERVKKGISFVPQTRNVFAELTVRENLEVGAFLREDDVLKVIEEIYDLFPILRDKKDQIVGQLSGGQRQQVALGRALMIRPSVLMLDEPTAGVSPIVMDELFEHIVKVKKTDVAIIMVEQNAKQALSISDRGYVLVTGENKFEGSGKELLNDPEVRRSFLGA

SEQ ID NO: 144434 - protein, 206 aa, Unknown
  Bacterial polypetide isolated from the Sargasso Sea
MATKKKKTTTKSSVNTKKTKTKTDKKKIVSSKKKSPVVITSSGVVKIYKSTNVEVTALDGVDISITEGEMVAIMGPSGCGKTTLLNCLSGLDSINSGSIKLQDMELESLSDDKLSEFRAKNMGFVFQSYNLLPVLTTVENVELPLLVSGTSAKDARKKSEAKLDDVGLLEWKQHLPGELSGGQRQRVTLARALVNEPAIVWADEPT

SEQ ID NO: 144435 - protein, 222 aa, Unknown
  Bacterial polypetide isolated from the Sargasso Sea
MNKIKFENVSKAYSGGRQALSDVSLELIEGEVTFLTGHSGAGKSSLLKLIMRDQLATDGVVSVNGVDLTSIKDRNIPYYRRGLGIVFQDHYLLMNRTVFENVAIPLSLIGLSDEVMARRVRAALTIVGLEALSGSKPTELSAGERQRVGIARAVVMRPRILLADEPTGNLDPELSLRAMELFAQFTEIGSIVVVASHDQFLIEQMKARVVELREGRVVHDSR

SEQ ID NO: 144436 - protein, 445 aa, Unknown
  Bacterial polypetide isolated from the Sargasso Sea
MHNPNAVNAPVQTNQPPRLGEEILRVDHVCRGFNKTQGELLVLDDANLSLREGEIVGLLGRSGSGKSTLLRIIAGLIEPTGGEVTYLGKPLTGPAEGVAMVFQTFALFPWLTVLQNVEAGLEALGVGARERRERALAAIDLIGLDGFENAYPRELSGGMRQRVGFARALVVDPTILLMDEPFSALDVLTAETLRTDLLDLWTQGRMPIKSVLIVTHNIEEAVFMCDRILVLSSNPGRVIAEIKVPFKHPRNRLDPAFRKLVDDIYAKMTARQTGEATKKGLELGSWLPQVSTNLMAGLIETLAMAPYHGRADMPEIARTLHLEVDDLFPIAEVLQYLGFADVREGDVFLTPPGRVFAEFGTQERKLMFADHLLKHVPLAARIKKVLNERPGHRAPRVRFEQELEDFLSDGAAEETLDAVIDWGRYGEIFSYNDQTEIFSLEDVES

SEQ ID NO: 144437 - protein, 252 aa, Unknown
  Bacterial polypetide isolated from the Sargasso Sea
MIEIKNFNKTKLVKDINCLEVNNLSSFYKKKKILNDISINVKEGEIVGLLGPNGAGKTTCFQCIAGLQNISHGNIKLNDFNINNLPIYKRAKLGLNYLPQETSIFRGLSVEQNILSIIQLNNSNNDKQNIEFLNELLNEFSLDHIRNASALTLSGGERRRVEIARALASKPKFLLLDEPLAGIDPIALIEIKNIIFKLKEKNIGILITDHNVRETLNTVDRSYILHDGKIISSGSSELLLNDSDVRRVYLGE

SEQ ID NO: 144438 - protein, 108 aa, Unknown
  Bacterial polypetide isolated from the Sargasso Sea
FAQFGSDLDASTQKLLNRGSKLTELQKQKQYSPMTVAEQVISVFCGVKGYLDDVDQKNIAEFENKIIEKCRSEKPEILESIASSGKLEEDSEKSLTEVITELKKNFNS

SEQ ID NO: 144439 - protein, 428 aa, Unknown
  Bacterial polypetide isolated from the Sargasso Sea
MEKIISINNLSIAFSKYAEVVKKVNIDVVKGKTTAIVGESGSGKTLSALSILKLLPNGANIKTGKIIYNNKNLLNLSQKEIQNIRGNKISTIFQEPMTSLNPLHTINKQIEEIITTHNTISKKEAEERTIKLLNEVGLNDISSRPKIYPYELSGGQRQRAMIAMSIANEPDVLIADEPTTALDVTIQLQILDLLQNIQRKMGMSLIFISHDLAVVKKLSDYIYVMKDGKIIEFGTSEKIFNTPKHEYTKELVSNQNNIKENNSSNSKSIINIKNLDVWYPIKKGLLKRTIDYVKAIKNVSFNLNVGETIGIVGESGSGKTSLILAILNLVKSKGEIVINDKNLNNLSKKEILDLRKDIQVVFQDPFSSLSPRMNIEDIISEGLMVHYPAISLKEKKQKVKNILKKVGLEYEYTIEKYPHEFSGGQRQR

SEQ ID NO: 144440 - protein, 174 aa, Unknown
  Bacterial polypetide isolated from the Sargasso Sea
MPSLKDIKTQINSVGSTKKITSAMKMVAASKLRRSQEKAEAARPYSSRLEEMLASLASSASSGEGIIKLLTGTGNDQNYIVVPVSADRGLCGGFNSSINRETFKLVKSLEGDGKNVQIMPVGKKSRDFFNRVMKDQITESFVDLNISNTGYESALQVSNKLQELYFEGKFDKCI

SEQ ID NO: 144441 - protein, 308 aa, Unknown
  Bacterial polypetide isolated from the Sargasso Sea
MHALSIKNLSKKYKSGVEALKSVSFDVQQGDFFALLGPNGAGKTTAIGIITSLVNKSSGSIEVFGHNLDKELAKAKSCIGVVPQEVNLNLFDFNFNILVNQAGFYGIPRSEGMKRAEQYLKKMQLWEKRKTDARSLSGGMKRRLMVARALVNRPKLLLLDEPTAGVDIETRRMMWEFLRELNASGTTIILTTHYLEEAEQLCNKVAIIDEGKIIENDSMQNVLKKLKTEVFILNTEKPLDEAPEIDGYATALKSPQEIEITVSQEQGVNNAFGSLQERGVKVLSMRNKNSRLEELFLDLTRSQSGKES

SEQ ID NO: 144442 - protein, 228 aa, Unknown
  Bacterial polypetide isolated from the Sargasso Sea
MSQIKIANLQKSFGDFTAVKNSNLTINDKEFFVLLGPSGCGKTTTLRMIAGLELPTSGEIYLGEEEVGMLRASERDIAFVFQLFALYPHMNVKNNLSFPLKMQGYSRSEIKTRVEEAAKLLRIDHILNSSISSLSGGDRQRVALGRALVRRPKAFLMDEPLGTLDAEFRELMCLELKKLHVDIGATTVYVTHDQLEAMSLADRIAVMDGGEILQADEPAVIYNKPATK

SEQ ID NO: 144443 - protein, 443 aa, Unknown
  Bacterial polypetide isolated from the Sargasso Sea
MSGVLKRHTKMSNKEIKERCIDMLDSVGISKPQERFDGYSFELSGGMRQRVMIASALLTNPKLLIADEPTTALDVTVQEKILDLILDVKERFKMSVIMITHDLGVVARTCDQVLVMKNGELQESGNVESIFYSPQADYTKELLEKSKEINLDEQQKYSETQDANIKNSLVKSTKAKVNFVLPKKALFSAENILTAVNEISMETLEGEVLGVVGESGSGKSTLAKTILGLQKLSSGQVEVFGQRLTEINKKELKEIRKKMQVVFQDPFSSLNPRMTVFEILKEPLDSFFPSMTKESAQKDIEDGLMEVGLTPEYLGRYPHELSGGQCQRVAIARALMPKPQLLICDEAVSALDASIRGEIIDLLLRIKAEKKLTMIFIAHDLAVVRKICDRVIVMQSGKIVEQGPTEKVFFEPEKEYTANLLSAVPVPDPKMEREKHTKRVQAK

SEQ ID NO: 144444 - protein, 419 aa, Unknown
  Bacterial polypetide isolated from the Sargasso Sea
MKSLLEIRNLGITFEFNGQTVQAVRDSSFKINKGECLAIVGESGSGKSVTALAIMRLIRSNSQLRITGSATYEKKNLLNLDESSLQNIRGKKISMIFQEPMTSLNPLHNIEKQITECLAFNQKSNKSKCIELLKEVGIENPEQRLSHFPHQLSGGQRQRVMIAMAIANNPDLLIADEPTTALDVTIQKQILDLLDKLRKKYKMSLLLITHDLGIVKKISDRVCVMEKGKIVEQNTTSKVFSKPKHTYTKKLINAKPREKKLKKKNNEIILSVKNLSVYYKNTNSFFFKNEDDDFQAVKNLSFEIAKGETLGIVGESGSGKSSIAQALIKLIDSKGNFFFKDKNISNLTEKNFRSYRKNIQIIFQDPFASLSPRLTVQDIVSEGLEVHDKEKSKKEMESLTQKIISDVGLDSSMLSRYPP

SEQ ID NO: 144445 - protein, 162 aa, Unknown
  Bacterial polypetide isolated from the Sargasso Sea
MNFISPYIELPKKLTVEENLKVYGRLYGVKNLNEKIFNLMEKLKLTEFRSRKTGELSSGQKNRVSLAKALINDPEVLLLDEPTASLDPDVGDNIRSFIEEFAANRNATILLASHNMNEVERLCNEVMMMKNGEIIDRGEIKNLIKKHGRENLEEVFLKIVRE

SEQ ID NO: 144446 - protein, 372 aa, Unknown
  Bacterial polypetide isolated from the Sargasso Sea
MTTTEKRDYSTVPSAIGCSNDGDPIIQVRNIRKWYQVNKGLPIIGSFDWLKAVDDVSFDVPAGKTIGLVGESGCGKTTTAKMVLGLENPSTDGEVPVGSIYFQGEDVTQLSGAGKREMRRSVQAVFQDPWSSLNPRMRVNTIISEPLEINTTMTKKERDTRAGDLLAEVGLNPYQGNLYPHEFSGGQRQRIGIARALALNPKLIVLDEPVSALDVSIRAQIMNLLVDLQNEHDLAYILIAHNLATVRYMCHRTAVMYLGVIQEYGDTEEIFAEPTHLYTNALISAALPSHPDIQRDEIVLPGEVVSPVNPPVGDVFMTRTPLPVRKNHKYTKERPPLVEVGKDHYVVETPWSTVTGHDLSEFKLSVDQEMQE

SEQ ID NO: 144447 - protein, 637 aa, Unknown
  Bacterial polypetide isolated from the Sargasso Sea
MISINQAQLIRGSKTLLDEASLTIYPGHKVGLVGANGTGKSSLLALIMGHLSLDKGEFSMPSGWQIATVAQETPALEVSALEYVLDGDKEYRQLEADLHIAQEHNDGHAIATLHGKIDAIGGYAIRARAGALLAGLGFSEAEQNNPVKSFSGGWRMRLNLAQALLCRSDLLLLDEPTNHLDLDTMYWLEGWIKSYQGTLILISHDRDFIDEIVDEIVHVENQKLNYYKGNYSAFERIRAERMAQQQVAYERQQKERAHMQSFVDRFRYKASKAKQAQSRLKALERMTELLPSQADSPFYMEFRPPEALPNPLIKMEQVAVGYGDKQILSRVHLNLVPGARIGLLGRNGAGKSTLIKLLSGQLSAMTGLYEPNPGLNIGYFAQHQIEFLRLDDTPLQHLVRLAPNAREQELRNFLGGFGFHGDMALSPVRPFSGGEKARLVLALLVWQRPNLLLLDEPTNHLDLEMRHALTMALQTFEGAMVIVSHDRHLLRLTCSDYYLVDQGQVQAFDGDLEDYHQWLLDAAKAASANSTVNGDDAKPAVDKKQQKRLEAELRQKVSPLKRKQAKLETDQQKLSERLAELEHLLADSELYDQDNKAKLTSVLSERTSLTQTLEESEMQWLELQEEIDSMELELMGQ

SEQ ID NO: 144448 - protein, 287 aa, Unknown
  Bacterial polypetide isolated from the Sargasso Sea
MNENPMVPDLALPEEPAERSLSGVASMGHAVVPGEIDVSHGTILYLEDVTVSFDGFRALNALSLAIDAGELRCIIGPNGAGKTTMMDVITGKTEPDSGKVFLGQSIDLTRMNEPSIARAGIGRKFQKPTVFEQHPVWENLELAMKADKGWWASLRARLDREAQARIEETLALIGLESEARRLAGELSHGQKQRLEIGMLLMQQPALLLLDEPAAGMTDDETMQLAELLNHLRGTCSMMVVEHDMEFVAALSGNAGKVTVMAEGRVLAHGTLDEVKRDEMVVESYLGR

SEQ ID NO: 144449 - protein, 354 aa, Unknown
  Bacterial polypetide isolated from the Sargasso Sea
MSKISLKNLSHSYLSSQVNKEDWALRNVNIDWNDGGAYALLGPSGCGKTTLLNIISGLINPTEGQILFNGEDVTNKNPVERNIAQIFQFPVIYDTMTVFDNLAFPLKNRGISEQEIKNKVEEIAEMLELTSTLHNRASGLTADGKQKISLGRGLVRSDVNVIMFDEPLTVIDPHLKWILRSKLKELHQKINSTMIYVTHDQTEALTFADQVVVMHEAEIVQIGTPVELFEKPRHTFVGHFIGSPGMNILPCKIDNGAISINGNKIETKIDIKDKSFSKTEVGIRPEFIEFNEKGLPVKILKVSNTGRHKIIDTESESGKIKVIAKSSDNIPTGSAFLNFKKDYTYVYGDNWIIE

SEQ ID NO: 144450 - protein, 271 aa, Unknown
  Bacterial polypetide isolated from the Sargasso Sea
MNASLAPDNIQPTSPSGNTLLEVDQISLSFGGVKALQDVSFSVEEKQIMAIIGPNGAGKTSMLNVINGFYHPQQGQIHFKGLHRKQMRPHEAAVQGIARTFQNVALFKGMSTLNNIMAGRNLKMKKNLFWQALYYGPARDEEMKHRLEAEKIIDFLEIQSIRKTPVGRLPYGLQKRVELGRALAMEPELLLLDEPMAGMNLEEKQDMCRFVLDINEQYGTTIVLIEHDMGVVMDLSERVVVLDYGRKIADGTPDQVRSNQNVIDAYLGVTK

SEQ ID NO: 144451 - protein, 591 aa, Unknown
  Bacterial polypetide isolated from the Sargasso Sea
MASSRAVETALQVATAAILLSLPLWAGDYSANQIGLLLLYGMATQSVALCWGNSGFLPLGQSLFFGLGAYVSAFVLRSAAAAGGEWQIILLPFAIAVPAALAYAIGFIVFARRIDSGPFFSLITLALCMLGFLLANQWSSVTGGFNGLTDIPDLPMTDRYGNLYYVIAAAAVVVTALITWLNRRPIGTLWTAISENEDRLQFFGFATHKLKAAAFGLSGAIAGLGGALYAPHEGLVGPQAVGVALSAQFVIWAAVGGKRSPLGAQLGAVVIGLLAATWRDLFTYWEVLVALIFIGVVRLFPDGLAGAAAALARMAGLRVANSIPEKRIEAHDIAMIDLRPAESTLLSFRKVEVSQGGVNILNGLDLEVGAGVVNCFIGPNGAGKTSTFNAMTGRLPVRSGEIRFRGAEISSSQAWQVSRLGVGRKFQIPTVFAQLSVNENLQIALWANRIRPREMLTAAPLHWNSLQRVRTLEKFGFLESNMAARAGDLSQGMRQMLEFAMVAITEPRLLLLDEPCAGLSAHETRHMMDAITSTVSELDASAIVIEHDMSALEKIADNVVVLHQGRSLAVGSLAQIKMSEDVKAVYSGGRK

SEQ ID NO: 144452 - protein, 714 aa, Unknown
  Bacterial polypetide isolated from the Sargasso Sea
MQAETNRIDELLECLVFLTRFYGVPNSKDALTTGLPLVSGLLTPNLFGRAAERGGLSAREVIQPLAEISPLLLPCVLQMRNGGACILLEWNEDRSQGKVIFPQAGDAAQWLSAAQLGDEYLGRLFFVKKQFKFDERSPKVLETRDGHWFWSTLFESRGIYRDVLIASILINLFAIASPLFTMNVYDKIVPNLAFDSLWVLAVGAMVVFTFDFVMRQLRSYFIDIAGKKSDVLLSAKIFAKVMGMRMESRPASTGAFAKHLQEFESVREFFTSATVSTLIDLPFAVFFLFIIWIFAGVMVVVPIVAMLILIIYSFYIQAPLKQSIEEGSRLASQKNANLIESISGLETVKIFGAESMFQHRWEQAVSHISTWGVQTRRITNSMSSLASYIQQVVTVALVIVGVYQISEGLVTMGGMIAAVMLSSRAIAPMVQLSVLSTRYNQAKSALEILEKIMVTPGEQEEGKQYIHHPVISGRIEFDNVSFKYPGMETSTLHNINLRIEPGEKVAIIGRIGAGKTTLEKILMGLYRPTDGSVRLDGFELDQLPASVIRRNIGCVPQDVTLFFGSVRDNIMLGNPLVDDVRVMRAAKRAGVTNFTNRDPNGLDRQIGEGGRQLSGGQRQAILLARALLNDPPILVMDEPTSNMDNQSEMQVKHELARLGPETTLILITHKTSMLDVASRVIVVEQGQVVADGPKEAVLQQLKEGKVRVQEASNG

SEQ ID NO: 144453 - protein, 110 aa, Unknown
  Bacterial polypetide isolated from the Sargasso Sea
MPFAQFGSDLDASTQKLLNRGSKLTELLKQNQYSPMTVAEQVISVFCGVRGHLDDIEQKDIASFENKIIEKCKAEKPDIIESITASGKLEDDKEKELNEIILQLKKDFNA

SEQ ID NO: 144454 - protein, 343 aa, Unknown
  Bacterial polypetide isolated from the Sargasso Sea
MSDTVIKCESVYKIFGENAKKMLQEANGNVDAKTFQENGCIVGVNNASFEVAKGEMLVVMGLSGSGKSTLLRCISRLTDATGGKIFIEGQDLLELNNKELIDLRRNKMGMVFQSFALLPHKTVVENIAFPLQIKGINTDESISKAMDMVKLVGLDGRENYFPRELSGGQQQRVGIARSLAVEPDIWFLDEPFSALDPLIRKEMQDEFLRLQDKLQKTIMFITHDFDEALKLADRIAIMKDGIIEQLDTPAKIVLNPATEYVRKFTEEVPREKVLLIEDVMDQSSSDNLGDLRVSKDEIIENVAEKILTQEKTVGVIDSNNKIIGSINPTKIINTVFGGRKNGN

SEQ ID NO: 144455 - protein, 511 aa, Unknown
  Bacterial polypetide isolated from the Sargasso Sea
QLSQRMDDEEAWSLEQQCREVLQKLGISDLQRPVADLSGGYRKRVGLASALVACPDVLLLDEPTNHLDAAAVEWLQSWLDRYPGALVLVTHDRYVLDRVTTRMVEVDRGRARTYQGNYSTFLQHKADEEASEASSAAKFRGVLRRELAWLRQGPKARSTKQKARIQRIEAMREAPVQQGRKTLEMASVSRRIGKLVIEAEAVGVTADGRPEGRSLLRDFSYSFSPEDRIGIIGPNGSGKSTLLDLIAGRRQTNSGMLRLGETVHIGYLDQHTEAFTAGKGLQRKVIEFVEEAASRIEVGGEQITASQLLERFLFPPAQQHSPLAKLSGGERRRLTLCRMLIQAPNVLLLDEPTNDLDVRTLSVLEDFLEDFRGCVIVVSHDRYFLDRTVDRLFCFEEGRLQRFEGNYSAFLEQQRQLERQRTSATAPAARGDARQTKAKAAGPRRRSFKETKELQQLDQRLPQLEQHRAALEEKMASNGTDLSELSVELAELIATIQAAEERWLELSELQD

SEQ ID NO: 144456 - protein, 127 aa, Unknown
  Bacterial polypetide isolated from the Sargasso Sea
IDYLVNKLRLENLLNRITGELSSGQKNRISLAKAIINDPTVLLLDEPTASLDPEIGDFVRTFLENYKKENKVSILLASHNMDEVTRLCSSIMMMKNGSIIDEGKPKDLIKKHGRQNLEEVFLKLVRN

SEQ ID NO: 144457 - protein, 269 aa, Unknown
  Bacterial polypetide isolated from the Sargasso Sea
MTPSNGLDSIHASNKNILCVEDISLSFGGITALSDVSFDVLNGEIRAIIGPNGAGKSSMLNCINGFYHPQKGQITFKGKTRKQMQTHEAAEQGIARTFQNIALFKGMSTLDNIMTGRNLKMKKNFLWQALYIGPAVTEELEHRAVAERVIDFLEIESIRKTPVGRLPYGLQKRVELGRALAAEPDLLLLDEPMAGMNYEEKEDMCRFILDVNQQFDTTIVLIEHDMSVVMDISDRVVVLDYGKKIADDTPNNVRTNQNVIDAYLGISHE

SEQ ID NO: 144458 - protein, 218 aa, Unknown
  Bacterial polypetide isolated from the Sargasso Sea
METAIQIQNVWKVFGNNSKEALDAIQNKNISKQEALEKYNSVIGVSNVSFNVNKGEIFCVMGLSGSGKSTLVRHINRLLEPTSGKILINDQDVMQFDKNSLQDLRNKKIGMVFQNFALMPHRSVLDNIAMPLEIRGVSKNDRLDAANKILNIVELQGWGNKYAHELSGGMQQRVGLARALAADPEFLLMDEPFSALDPLIRRQLQSEFIKLSKQRKKQ

SEQ ID NO: 144459 - protein, 354 aa, Unknown
  Bacterial polypetide isolated from the Sargasso Sea
MSKITLEGLSHSYLDKQSSDTDWALRNIDLDWKDGGAYALLGPSGCGKTTLLNIISGLLKPTKGRILFDGKDITTLSPVERNIAQIFQFPVIYDTMSVYDNLAFPLKNRGMSDGEIDTRVKEIAEMLELTSTLNNRAAGLTADGKQKISLGRGLVRANVNVIMFDEPLTVIDPHLKWVLRSKLKELHQKINRTMIYVTHDQTEALTFADQVVVMHEGQIVQTGTPVELFEKPKHTFVGHFIGSPGMNILPCELHDGSAAIDGIKIETGSQIKKTSFTKTEIGIRPEFVSFSKDGIPVKILKVSNTGRHKIIDTECKSGKIKVLSHSSQDIPSGTAHLTFDKKFTYTYGDSWIIE

SEQ ID NO: 144460 - protein, 172 aa, Unknown
  Bacterial polypetide isolated from the Sargasso Sea
MNLLEAKNLYKSFGNINAVSDISISLNVGEVIGFLGPNGAGKSTTMKMLTGFLEADSGSIEIKKIDLSKDPINAKSIIGYLPEGAPSYSDMTVKSFLYFVGKMRGLKDELLEKRLEIMLKDINLSDVQNQIIETLSKGYKRRVGIAQALIHDPDILILDEPTDGLDPNQKLK

SEQ ID NO: 144461 - protein, 341 aa, Unknown
  Bacterial polypetide isolated from the Sargasso Sea
MDSSSSAIQIQNVWKVFGNTSKEALDAIQNKKISKTEALENYNSVIGVSDVSFDVKQGEIFCVMGLSGSGKSTLVRHINRLLEPTSGKILINGQDVMALDRENLQELRNKKIGMVFQNFALMPHRSVVDNIAMPLEIRGVSKNDRLDAANKILEIVELQGWGNKFAHELSGGMQQRVGLARALAADPEFLLMDEPFSALDPLIRRQLQAEFIKLSKQMKKTTVFITHDLDEAVRVGHRIAIMRDGKVIQIGTPEEIVVSPADEYVADFVKGISRLKVVQAKTIMQPIENYKSANGKLDENNLSVGENELLSKLIELSKSSEGPLVVKDNNQNNVGVLTQSD

SEQ ID NO: 144462 - protein, 357 aa, Unknown
  Bacterial polypetide isolated from the Sargasso Sea
MAKIDLSNISHTYNPLDPKPTYALNPFSMTWENGKRYAILGPSGCGKTTMLNIVSGLVRPSKGEILFDETPVTDLKTEDRNIAQVFQFPVIYNTMTVYDNLAFPLRCREFTKEKIEERVKAVSDTLNLSSFLNSPARKLTADQKQLISLGRGLVREDVAAVLMDEPLTVIDPDLKFRLRRNLKEINEQYKTTLVYVTHDQNEAMTFAENIIVMDQGEIVQVGLPKDLFEKPKTTFVGYFIGSPAMNIFHSTVSSDHEVKINDTTIKTNSNLGNLKDKNVKLGIRSEFIELAEKEKSNTVKIKLTRVEDFGNFKLLTGKMGDLVIKSKVEREKPIPDGELNLYFPPEKCCVYSDEKLV

SEQ ID NO: 144463 - protein, 359 aa, Unknown
  Bacterial polypetide isolated from the Sargasso Sea
MNLIGEKISYKPDEQFHLNDVSFNFKKGNLYTILGRTLSGKTTLLKTIAGLLNPDQGSISFEEKDFIKIPVWERNVAMVYQQFINYPHLNVYENITFPLEQRKLSPEQIKKDVDEALKTVGLVGFENRKIQELSGGQQQRVALARSLAKKAKILLLDEPLVNLDYKLREQLREEFKRIFSEGLSQDTILIYSTTDPQEVMELNGEVIVLDEGKVLQKGPAKEIFENPSNLKVAEISNDPPMNVLKGSKNSKNLNFENISLEIPNHFKNLEDKDYNFGIRASEIKLDENGEEFEIELAEISGSETLLHLKRGNSKIIALIEEVMNFKIHEKVKINFNANKFYAFGEDEKLVSSPYGGTNG

SEQ ID NO: 144464 - protein, 358 aa, Unknown
  Bacterial polypetide isolated from the Sargasso Sea
MAKIELSNISHTYNPNDTNPTYALNPFSMTWENGKRYAILGPSGCGKTTMLNIVSGLVRPSKGKILFDENDVTDLITEERNIAQVFQFPVIYNTMTVYDNLAFPLRCRNFTDQKIEERVKSVSDTLRLSPFLNSPARKLTADQKQLISLGRGLVREDVAGVLMDEPLTVIDPDLKFRLRRNLKEINEQYKTTLVYVTHDQNEAMTFADNIIVMDQGEIVQVGLPKDLFEKPRTTFVGYFIGSPAMNLFNSEILSDNSIMFNNDTIKTKTDLSKIKDKNVKLGIRSEFIKIATDQKENIVSVKVTRVEDFGNFKLITGKAGDLEIKSKVEREIPISTEELKLHLPAEKCCIYSNEMLVN

SEQ ID NO: 144465 - protein, 359 aa, Unknown
  Bacterial polypetide isolated from the Sargasso Sea
MNLIGENITYKPDDQFHLNDVSFNFKKGNLYTILGRTLSGKTTFLKTIAGLLNPDSGNLSFEDNDFIKIPVWERNVAMVYQQFINYPHLNVYENIIFPLKQRKISEDQIKKDVEEALKTVGLVGFENRKIQELSGGQQQRVALARSLAKKAKILLLDEPLVNLDYKLREQLREEFKRIFTQGLSEDTILIYSTTDPQEVMELNGEVIVLDEGKVLQKGPAKEIFENPRTLRVAEISNDPPMNILKGTKSSEKLSFENILINSPSHFKNLSDQGYNFGIRASEIKLDDQGEEFEIELAEISGSETLLHLKKGESKVIALIEEVMNFKIHEKVKIKFNENKLYAFDQNEELVSSPYGVSHG

SEQ ID NO: 144466 - protein, 242 aa, Unknown
  Bacterial polypetide isolated from the Sargasso Sea
MSLSLDTVSISLGGRQLVNRVSLDLSAGEVVGLLGPNGAGKTTTFNLVNGLLRPDAGVISLDGQVVSTLSMPKRARLGLGYLPQEPSVFRQLTVRQNLEIALDQTDLSPQHRRDRRDQLIEDFHLVAFADRCGYQLSGGERRRCEVARALAVGAEGPRYLLLDEPFAGVDPLAVADLQDLIQALRSRGMGILVTDHNVRETLAITDRAYILNDGAILASGQSQTVADDPLVRRYYLGEAFQL

SEQ ID NO: 144467 - protein, 235 aa, Unknown
  Bacterial polypetide isolated from the Sargasso Sea
MAFFEGNKMTGGYGDGPDIITSCTINVNKGEIVAILGPNGAGKSTAMKAMLGLLNLKSGKVLIEGEDISKLSPQERVKKGVSFVPQTRNVFAELTVRENLEVGAFLREDDVLKVIEEIYDLFPILRDKKDQVVGQLSGGQRQQVALGRALMIRPSVLMLDEPTAGVSPIVMDELFEHIIKVKKTDVAIIMVEQNAKQALSISDRGYVLVTGENKFEGSGKELLNDPEVRRSFLGA

SEQ ID NO: 144468 - protein, 175 aa, Unknown
  Bacterial polypetide isolated from the Sargasso Sea
MNKSPKLVCKNVWKLYGDKPKEFLQIHNNNPDKKTIEAGGYIQAIRNASLEVYENEILVIMGLSGSGKSTLVRCMSRLVDPTIGEIFFENIDMGKLTENELIEIRRHKMGMVFQHFALFPHRTVIENIAFPLEVQGINRKEREKSAFEIIDLVGLQGRENYFPKELSGGQQQRVG

SEQ ID NO: 144469 - protein, 104 aa, Unknown
  Bacterial polypetide isolated from the Sargasso Sea
QQQRVAIARALAMRPKVMLLDEITSALDPEVVGEVLNVIRSLNKEHNLTMIMVTHQMGFAREISDRVCFFNEGKIFEEGPPEKLFGDPQNERTKQFLHAVLDSH

SEQ ID NO: 144470 - protein, 246 aa, Unknown
  Bacterial polypetide isolated from the Sargasso Sea
MSQLNYYECKNVSKRYGNLTALDNVDFHIGKNEVVGLLGDNGAGKSTLIKMMSGVVAPDTGNVFVDGKETKISTRKQSEEVAGIETIYQNSALCDDMTIIRNIFMGREITNLFGFMDHKKMEDLSLEVLESGVHISGIDSPLKEIGALSGGQKQAVAIARAVYFKRKILLLDEPTSALSVRETERVLKYVTELKSENVSSVIVTHNLYHAFQVCDRFVVMSHGKVIFEKNKSDTNLDEVTEQVIKV

SEQ ID NO: 144471 - protein, 310 aa, Unknown
  Bacterial polypetide isolated from the Sargasso Sea
HNNNPDKEIIKKSGYIQAIRNASLEVYENEILVIMGLSGSGKSTLVRCMSRLVDPTIGEIFFENIDMGKLSKNELIEIRRHKMGMVFQHFALFPHRTVIENIAFPLEVQGIKRKEREKSALEIIDLVGLQGRENYFPKELSGGQQQRVGIGRSLAVKPELWFLDEPFSALDPLIRKEMQNEFLKIQNSLKKTIIFITHDFDEAIKLADRIIIMNEGRIVQIGSPEDLIMKPADDYVKEFTEDLPRERLLSVKSIMDTKKEPNNSSTVYEDEKIFSILEKVLSEGSVSVLDKSNNIIGSLNKETVSKFINN

SEQ ID NO: 144472 - protein, 1207 aa, Unknown
  Bacterial polypetide isolated from the Sargasso Sea
SFSIASTDSTDLNGIISNQYVTSSVSGSYNSFTASADDASSTSGFYLVEPGAPDSVEVASLTNTTMTQLDSLTFAANVYDQFSNLVRLGENVVWSINSVTGSGDGYRLSSDTTATDASGNTTVMLYTDPTDNSLSVGDQVTLTATSGSGSHVSSVVTIIPSDIYNLTLDDGLTTEELGVSADTAYIDFYTALIDTFDNPLQNVEVSWEVVTGSGSGESLSAGTSNTNAQGIASTRLNTNTVADTEYQVRCWVTESSLLNAFGSFEALSNNSSNNSSTASVTSSIISSSSIRSFSKAGKKGASDRLTLIARDEESSLRPSQFVPVQISGSSSLDRSINRVEAYDLDDTSAVVIVWPGVTASLSGVPQEDEDLELDQQFGFTLDAHDQFGNLVRDNTAVAWEIIPSSANISINSQDDVTSSGQAAISLQVASSAAWDFSFKIIATVEGISDSTGSYRIDDVTAPASVSALSISPSVWTSTNDFTLSWTNPSEHSGVAGAYYKIDAGSSQYVAGSNIQTLSFTMTANNSSSVKLWLQDNAENQDESTAMTVTAKWDDTAPSTFSVTQPLAGWYNQTEYRFEWEASSDGTSGLSHYIFSLNDGSETAEISPDSTGFSPAFGLAQGSHSWTVTAYDSAGNAMETSNPQTISVDHTPPGITHNPVQEATENTAVVINAVFTEDGSGQSGIDKAELYYRRGGESNWQPPVDMSTLSSYQIASAYSTSSGIEYYLYAEDVAGNITKKPVDGFTSVSVTIPNGLASTDRWPTGVPNGSDASSYQLWSFPGNPTSSSPVNLIVDDMPDAAFDNTKWRAFAYAGSGAWTEFEQLSSLNSGESYFILIKDPGFSINTGQTYTIETNQPYQINLTSGDWTFIGNPFDFSVPLSSVLTQDSTSLSGDPNFYTYDGGSWTNASSLEPWGGYIYKSSSASSIFINPGNGGGLLGRSVADSEIILEDNEWLINISARNGLGRDPFNEVGLLQGAMDTYDNHDAFEPPLVPGGISVRINNRDWPEHGDTYTRDIRMPKEEGEYWDLEVIAQDDEHNVYLTFEDLDLIPENLDVFAIDITLGTAQDLRWRHVYKYAVTNPSQKHEVRFIAGTRDFLQKNNAGVELFPDRYALSQNYPNPFNPQTSILLTMQDEATISLVVYNLLGEEVAVLANNEYRPAGYHNFIWKGLNKDNERVASGVYFYMARVISPKGELLISDTHKMILVK

SEQ ID NO: 144473 - protein, 446 aa, Unknown
  Bacterial polypetide isolated from the Sargasso Sea
MSNLLEVKNLTVGFKVRDSIFTAVEDASFEINKNETMALVGESGSGKSVSAMSILQLLPEGKTIFSEDSSIKFHHSEILEMSNKQLQSIRGKKISMIFQEPMTSLNPYHRVGNQITESILSHEDISRKDAEKKAKELMELVEIPDLERRYKSYPHELSGGQRQRIMIAMSLINEPELLIADEPTTALDVTIQAQILDLMNRLKEKLGMSILFITHDLGLVEKFSDRVCVMKEGKIVEQGVTTEIFSNPKHEYTIKLLKSEPKEKDNLHVSEDNILDISNLSVFYKIPSKQLFKTDRFCAVSDISLKIPRNSTVGVVGESGSGKSTLGKAIINLLDFEGSIKFNDKSIKDLSSAEKKLLKKDIQIVFQDPYGSLSPRMTVGEIIGEGLDIHFDFSNEEKIEKISNVMKDVGLDDSLIFKYPHEFSGGQRQRIAIARSIILKPEIYDP

SEQ ID NO: 144474 - protein, 173 aa, Unknown
  Bacterial polypetide isolated from the Sargasso Sea
MNLIIKSLNFSYQSEEVFKDLNLNFNSGILNLVSGPSGSGKTTLLNLIAGLEKPSSGLIMLDDDVQSSNDKFIEPENRNIGFIFQDFALFPHLNIKQNIEFSGNRNEELLNKLINKLSIANHLSKYPHELSGGQQQRVSIARALFSEPKILLIDEPISNQDKNNKTEIIRIIF

SEQ ID NO: 144475 - protein, 186 aa, Unknown
  Bacterial polypetide isolated from the Sargasso Sea
MTNSIEVINLSKKYKSKNAVSNINFKIGENEIVGLLGPNGCGKTTTIGMILGLLKPSHGQVLINGENIETNKISLLHKMNFISPYIELPKKLTVKQNLIVYGKLYNIHDLENRINYLSDKLRLSDLLDKITGELSSGQKNRVSLAKALINDPTVLLLDEPTASLDPETGDYVRTFLENYKKEKKIS

SEQ ID NO: 144476 - protein, 171 aa, Unknown
  Bacterial polypetide isolated from the Sargasso Sea
MNGPAPGKSTLAGMTSAVEKPRSAVSASSDWHDFQDHHLLMDRTVFDNVAIPLIIAGASGDDIRRRVSAALDKVGLLDKAKNFPIQLSGGEQQRVGIARAVVNKPAVLLADEPTGNLDDALSEGILRLFEEFNRVGVTVLMATHDIGLISRRSYRQMVLSDGHLHGGLAHE

SEQ ID NO: 144477 - protein, 595 aa, Unknown
  Bacterial polypetide isolated from the Sargasso Sea
NYKRTFNLLTPSQRKRFYVLKILVAIMAVLEIFGVASMIPFMAVVGDMSQLQEDTPIAQIYKSSGITSESQFVFILGVFVLLALSISTIISMFTVWKLSIFAHQIGTELADRLYTHYLKQGWLFHASGSSAQLTKKIATETTRVTANILVPLMHMNSKILLVFLLSLSIIIYNPKVAIIGISIFVATYLILFRIVRTRLASFGKATSDVTEQRFRLMNEGFGGIKDVLLLGRDADFIGRFNKTGNILAYSLGTTNAIIQIPRYLVELIAFGSIILLILYLMVSYEANLGIILPILSIYAVGAIKLLPAFQQIYGSIGVIKANLAAFDSIRDDLNNSFRVEPKKQIIEKKYLNPKQQISLENIAFTYPNKEEPTLNQLSMTIPANSVIGVVGPSGAGKSTLIDIFLGLIEPQEGQLIVDHTIINGQNLRSWQNSIGFVAQSIFLSEGTIAENIAFGISHDQIDLEQVQKVIKLAYLDEFIQTLNDGVDTRVGERGVQLSGGQRQRIGIARALYHKAEVIVFDEATSSLDGVAEKMIMDAIHDFSGQKTIILIAHRLKTVQKCDKIFFVNNGKVDDQGTYQELLENNEHFKNMAMHA

SEQ ID NO: 144478 - protein, 343 aa, Unknown
  Bacterial polypetide isolated from the Sargasso Sea
MSETVIKCESVYKIFGESAKKMLEESNGNVDAKTFQENGCIVGVNNASFEVAKGEMLVVMGLSGSGKSTLLRCISRLTDATGGKIFIEGQDLLQLNNKELIELRRNKMGMVFQSFALLPHKTVVENIAFPLQIKGTKTEDSISRAMEMVKLVGLDGRENYFPRELSGGQQQRVGIARSLAVEPDIWFLDEPFSALDPLIRKEMQDEFLRLQEKLQKTIMFITHDFDEALKLADRIAIMKDGIIEQLDTPANIVLNPATEYVRKFTEEVPREKVLVIEDVMDSSNKDNLGDIKVSKDDIIENVAEKILTQEKIVGVVDSNNNIIGSIKPSTIIDTVFGGRKNIS

SEQ ID NO: 144479 - protein, 235 aa, Unknown
  Bacterial polypetide isolated from the Sargasso Sea
MAFFEGNKMTGGYGDGPDIISSCTINVNRGEIVAILGPNGAGKSTAMKAMLGLLNLKSGNISIDGEDISKLSPQERVKKGISFVPQTRNVFAELTVKENLEVGAFLRTDNVNNVIEEIYDLFPILREKKDQVVGQLSGGQRQQVALGRALMIKPSVLMLDEPTAGVSPIVMDELFEHIIRVKNTKVAIIMVEQNAKQALSISDRGYVLVTGENKFEGSGKELLNDPEVRRSFLGA

SEQ ID NO: 144480 - protein, 187 aa, Unknown
  Bacterial polypetide isolated from the Sargasso Sea
SVAIVGASGSGKTTLLGILAGLDTATSGLVKLMDSEISGMDEEARAVLRGQHVGFVFQSFQLLTSLTALENVMLPVELRGDALAQDQAVELLEKVGLADRLDHYPRQLSGGEQQRVAIARAFASRPTILFADEPTGNLDTANGEKIIDLLFDLNSEFGTTVVLVTHESRLADRCSRTIKLTAGKVDR

SEQ ID NO: 144481 - protein, 192 aa, Unknown
  Bacterial polypetide isolated from the Sargasso Sea
MPAENNRADILLGVDQISLSFGGVRALEDINFDIVKKEIFAIIGPNGAGKTSMLNVINGFYHPQQGKIQFKGLHRTQMRPHEAALQGIARTFQNVALFKGMSTLNNIMSGRNLKMKSNLFWQALYYGPARKEEMENREVVEDIIDFLEIQSIRRTPVGKLPYGLQKRVELGRALAMEPDLLLLDEPMAGMNI

SEQ ID NO: 144482 - protein, 242 aa, Unknown
  Bacterial polypetide isolated from the Sargasso Sea
MNLNIHNVSLSIKGRLIVDDVSITVNPGEVVGLMGPNGAGKTTTFNLAVGNIKPEKGEILMNGKNITNLPLPIRSRLGLGYLTQEASIFRDLTVKDNIDLALQNSSYSRAAIRNRREQLINEFNLNNFVDNYGYQLSGGERRRCEIARALTVGRKGPKYLLLDEPFAGIDPLAVNDLKKLILKLSSDGVGILITDHNVRETLLITNKSYVLSEGKILANGSSRELADNPIVKKYYLGDNFKL

SEQ ID NO: 144483 - protein, 226 aa, Unknown
  Bacterial polypetide isolated from the Sargasso Sea
MTGGYGGADIITSCSINVNQGEIVAILGPNGAGKSTAMKAMLGLLKLKSGTVTIDGKDISNLSPQDRVKQGISFVPQTRNVFTGLTVRENLEMGAFLRSEDLDKIIKEIYELFPILNEKKSQTVGELSGGQRQQVALGRALMTKPSVLMLDEPTAGVSPIVMDELFDHILKVKATNVAIIMVEQNAKQALSISDRGYVLVTGENKFEGSGKELLNDPEVRRSFLGA

SEQ ID NO: 144484 - protein, 196 aa, Unknown
  Bacterial polypetide isolated from the Sargasso Sea
RATSGTVVRPAEGLETTADGEAAIFYVPQRPYLVSGTLRDQVMYPLPGDAARDDEVMECLQLANLTKVVDSSADGLGRSEHDWTDVLSGGEKQRVGLARLYFHRPTFAILDEATSAINPDEEGLLYAHIETLGITAFSIAHRMELKRFHALHLHLQADGTGRYSVTNLRRASWNIQSLPGASSLRRSFDRTTTTER

SEQ ID NO: 144485 - protein, 235 aa, Unknown
  Bacterial polypetide isolated from the Sargasso Sea
MLKLQNISSYYGESVVVKGISMEIAEGSFYGILGKNGMGKTTLLKTMMGLMNKTEGNISLGEKDLTKLSTSDRAKAGLGYVPQGRGIMPQFTVEENMVLGTFARNKNETNDVKNDFDFALELFPILKEFLSRRGGDLSGGQQQQLAIARALLTKPKVLLLDEPTEGIQPNIVEEIEKVLVKLNKELNLTIVIVEQSVGFIKEAANDFVILERGTIVEKGAASTISDEMVNKYLTI

SEQ ID NO: 144486 - protein, 79 aa, Unknown
  Bacterial polypetide isolated from the Sargasso Sea
KQLHRKLGVTTVYVTHDQREALTMSDRIAVINHGKFEQIETPQSIYNKPANPFVADFIGESAMLPMKKNSSGDFFFRTF

SEQ ID NO: 144487 - protein, 216 aa, Unknown
  Bacterial polypetide isolated from the Sargasso Sea
MSNAVIKCQSVYKIFGANAKKMLQEANGNVDAKKFQENGCIVGVNNASFEVSKGEMLVVMGLSGSGKSTLLRCISRLTDATDGKIFIEGQDLLSLNNKELIELRRNKMGMVFQSFALLPHKTVVENIAFPLQIKGIKTEDSISKAMDMVKLVGLDGRENYFPRELSGGQQQRVGIARSLAVEPDIWFLDEPFSALDPLIRKEMQDEFLRLQEKCKK

SEQ ID NO: 144488 - protein, 335 aa, Unknown
  Bacterial polypetide isolated from the Sargasso Sea
AKNNIYADLIRTQPKHIIELIFVIAFTLAVVFFTPLQNDFQSLIPTLGVFLFAAIRLMPTLNQMLASVNVLRIGYYPTTLLFEDMTTKQDLEEDDYKANILKDGFTSMLLKNVFFSYKNDKEHQLNGISLQVDKNKSIGLFGQSGSGKTTLVDVMLGLLEPSKGEIHLNNKIVKNNKEFRNLVAYIPQDIFIINDSVKNNITLTGRDEVIDDVLLEDVVLRSRLKEVINNLPEGINTNIGERGVKLSGGQKQRIAIARALYNKREVLIMDEATSALDNNTEKEIIDEIRKLKGKVTMVVIAHRLTTLQHCDEIYEISNGRISEKYNYEDISKSKK

SEQ ID NO: 144489 - protein, 96 aa, Unknown
  Bacterial polypetide isolated from the Sargasso Sea
MDRVGLKEREHHYPNQLSGGEQQRVAIARAFACSAKILFADEPTGNLDPKNGEMISDLLFEVNSETDNALVVVTHDHDLADRCDKKINLKLGKIVE

SEQ ID NO: 144490 - protein, 208 aa, Unknown
  Bacterial polypetide isolated from the Sargasso Sea
MHALSIKNLSKKYKSGVEALKSVSFDVQQGDFFALLGPNGAGKTTAIGIITSLVNKSSGSIEVFGHNLDKELAKAKSCIGVVPQEVNLNLFDFNFNILVNQAGFYGIPRSEGMKRAEQYLKKMQLWEKRKTDARSLSGGMKRRLMVARALVNRPKLLLLDEPTAGVDIETRRMMWEFLRELNASGTTIILTTHYLEEAEQLCNKGCHY

SEQ ID NO: 144491 - protein, 360 aa, Unknown
  Bacterial polypetide isolated from the Sargasso Sea
MAEIEIKNLHKSFGDFVAVKNSNLLIENKEFFVLLGPSGCGKTTTLRMIAGLELPTSGNILLDKEDVGYLRASQRDIAFVFQLFALYPHMNVRNNLAFPLKMQKFSKTEVDAKVMEAAKLLRIDHLLKSKVSSLAGGDRQRVALGRALVRRPKAFLMDEPLGTLDAEFRELMCLELRKLHDDIDATTVYVTHDQQEAMSMADRIAVMNEGEVLQADSPKIIYNKPKTKFVANFIGSPGMNFIPIKEKITPNQSSIKLLDSSLKIPEQREGTNSNENFLGVRPENLRLVSENGVKGNIFGVEYLGSRKILTVETQLGNIKIRVDSDTKVKINEQIQFDTLNNNQIIFDGSNDMALQSEFMS

SEQ ID NO: 144492 - protein, 143 aa, Unknown
  Bacterial polypetide isolated from the Sargasso Sea
NLYSVKKINERIEYLSHKLRLNEFINNQTGELSSGQKNRVSLAKALINEPTVLLLDEPTASLDPETGDFVRKFIENISKEKKMSILLASHNMDEVKRLCKNVLMMNNGVIIDKGTPDDLIAKHGKKNLEEVFLKLNRKENELQ

SEQ ID NO: 144493 - protein, 218 aa, Unknown
  Bacterial polypetide isolated from the Sargasso Sea
MTEPVIKCEAVYKIFGENAKKMLQESNGNVDAKTFQENGCIVGVNNASFEVSKGEMLVVMGLSGSGKSTLLRCISRLTDATGGKIFIEGQDLLQLNNKELIELRRNKMGMVFQSFALLPHKTVVENIAFPLQIKGIKTEDSISKAMDMVKLVGLDGRENYFPRELSGGQQQRVGIARSLAVEPDIWFLDEPFSALDPLIRKEMQDECLRLQDKLQKTI

SEQ ID NO: 144494 - protein, 332 aa, Unknown
  Bacterial polypetide isolated from the Sargasso Sea
MNKEAKISCKNIWKLYGEAPEKFLKNTNNNPTTEEIKKNNYIPAVRDASIDVNTGEILVIMGLSGSGKSTLLRCMSKLIEPTHGQVFFEGSDLLKASEKELIDIRRHKMGMVFQHFALLPHRTVLQNVAFPLEVQGQEIQKREERAKDVIKLVGLEGREKYYPRELSGGQQQRVGLARSLAVEPDVWFLDEPFSALDPLIRKEMQNEFLRLQSMLKKTIVFITHDFDEAIRLADRIAIMYEGLIVQVGTPEELITKPATDYVAEFTKDIPRSKLLNAESIMNEKDKKPYENTVNYSDKIEKIASKVLKSESIFSVVDDNKEVIGSVSKKRIN

SEQ ID NO: 144495 - protein, 277 aa, Unknown
  Bacterial polypetide isolated from the Sargasso Sea
MTRNSIVFDNVSYNFGKKEIFKNLSFEVPAGQTVGIMGPSGTGKTTLLRLMGGQIQPDTGTVFVEGKDLKKIKRTELFELRKCLGMLFQSGALFSDLTVFENVAFPLKEHTRLNGEMIRYLVLIKLNSVGLRGAAHLFPRELSGGMQRRVALARAMALDPKLIMYDEPFTGLDPIALGVISNLIKDVGSVYECTNVIVSHDIEETARISNLLYVLSEGEIIGQGSPQDLKKDDSPRLRQFLNGLPDGPVPFHYPAPEYMDSLIGVKNTKRTIIKRDD

SEQ ID NO: 144496 - protein, 348 aa, Unknown
  Bacterial polypetide isolated from the Sargasso Sea
MLAVSIKNLSHKINTKPILHDVNFELKKDSIACILGPSGSGKTTLLKLIAGLDKVQNGEISINDQLVSSAKTHLATEKRKIGFLFQDYALFPHLTVKENLKYPINFKNSIYKIDDIIDVVKLPHSLDKYPHELSGGEQQRVALARSIISHPDLLLLDEPFSSLDLNLREEIRDDTLHLLQKSNVSTIIVTHDPFEAMFISNQINIMDNTGSIVQSGAPAELYNNPKNQYVTRFFGETNIFHGEVNNACVSTPVGQVRVNQKYENKNVTIHIRPQGIKLSEQPTPVNGIKGTVMASKLMGAFSFIHLSVLNNKNEVIHVHSHMPPEFNPKQSSAVEISVDEKHTFVFEN

SEQ ID NO: 144497 - protein, 354 aa, Unknown
  Bacterial polypetide isolated from the Sargasso Sea
MAKITLKDLSHSYLEQQNNNSDWALRDVNIDWKDGGAYALLGPSGCGKTTLLNIVSGLLKPTKGSVLFDDKDMTSLNPVERDIAQIFQFPVIYDTMTVYENLAFPLKNRGLSDSEVASKVKEIAEMLELTTTLNNRASGLTADGKQKISLGRGLVRSDVNVIMFDEPLTVIDPHLKWVLRSKLKELHQKINRTMIYVTHDQTEALTFADQVVVMHEGQIVQTGTPVELFEKPKHTFVGHFIGSPGMNILPCEIKNGEINFSGQKIQSHKAIKKSNFSKTQIGIRPEFINFSKDGIPVKIKRVSNTGRHKIVDTECNGGNIKILSNASTEIPSESAHITFNQKYTYVYGDNWIIE

SEQ ID NO: 144498 - protein, 303 aa, Unknown
  Bacterial polypetide isolated from the Sargasso Sea
MTDAVIKCESVYKIFGANAKKMLEEANGNVDAKTFQENGCIVGVNNASFKVSKGEMLVVMGLSGSGKSTLLRCISRLTDATGGKIYIEGQDLLSLKDKELIELRRNKMGMVFQSFALLPHKTVLENIAFPLQIKGIETEKSINKAMDMVKLVGLDGRENYFPRELSGGQQQRVGIARSLAVEPDIWFLDEPFSALDPLIRKEMQDEFLRLQEKLKKTIMFITHDFDEALKLADRIAIMKDGIIEQLDTPAKIVLSPATDYVKKFTEEVPREKVLIIEDVMDAPTSDNLSDLKVSKDEIIEKCS

SEQ ID NO: 144499 - protein, 93 aa, Unknown
  Bacterial polypetide isolated from the Sargasso Sea
AIARALLKDAPILILDEATSALDSESEKLIQKAFDRLMENRTTFVIAHRLSTIEKADRILVLSDGKIVEEGTHQDLLGQDGEYSLLYKMQFND

SEQ ID NO: 144500 - protein, 289 aa, Unknown
  Bacterial polypetide isolated from the Sargasso Sea
MIRVEHFYKNYGPYPAVIDVSFEVLKGEIVGFLGPNGAGKTTTMRTITGYLPPTSGEITVSGYDSVKYSLEARRHIGYLPETVPLYLDMTVTDYLSFMGKIRGMNQKWINERINKVIDHVRLGDYRNTHIGKLSKGYRQRTGIAQAILHEPDVLIMDEPTIGIDPIQVVETRELISELGESHTLLISSHILPEVSAICPRVLVISDGRIVADDKPNNLSQRLSGTERIELGVSGSKSTDIISKIRTIDSVIDVRSDSRAEQIDQANKENYIPIVVDAKTNENSSEKMPK

SEQ ID NO: 144501 - protein, 239 aa, Unknown
  Bacterial polypetide isolated from the Sargasso Sea
MLKISNVETFYGKIQALRGVDIDVNDGEIVSLIGSNGAGKSTLLMTISGVNKARNGNITFNGERIENRDPHKIVDLGICQVPEGRRIFSRLTVEENLRLGAYTNDQGKHFETDIKEVYDLFPVLSDRKTQRGGTLSGGEQQMLAIGRALMSKPKVLLLDEPSLGIAPKLVNQIFASIKNINKEKNVTIFLVEQNAKKALELADRAYVLVNGKVTIMGSGQDLLKNKDIQAAYLEGGTKN

SEQ ID NO: 144502 - protein, 257 aa, Unknown
  Bacterial polypetide isolated from the Sargasso Sea
MQFNKENLQELRNKKIGMVFQNFALMPHRSVLDNIAMPLEIRGVSKNDRLDAANNILNIVELQGWGNKYAHELSGGMQQRVGLARALAADPEFLLMDEPFSALDPLIRRQLQTEFIKLSKQMKKTTVFITHDLDEAVRVGHRIAIMRDGRVVQIGTPEEIVVNPSDDYVADFVKGISRLKVVQAKTIMQPLEQYKKNFGENLSNNEKVNENDILSKLIETSVSKDKPIVVINDHNIEVGIITQSDLLKAVVEGNDNE

SEQ ID NO: 144503 - protein, 88 aa, Unknown
  Bacterial polypetide isolated from the Sargasso Sea
MEPKIMLFDEPTSALDPEMIKEVLDAMVNLAKAGMTMIVVTHEMGFAKEVADEVVFMDEGMIVERAKTKDFFANPKNERTKLFLSQIL

SEQ ID NO: 144504 - protein, 247 aa, Unknown
  Bacterial polypetide isolated from the Sargasso Sea
MNQIIEVHSVSKSFGGVQANQDISLSVKEGIITGLIGPNGSGKTTLFNSIVGQHPIDNGNILFQGKEISKLRVGEIARLGLLRTFQQTRIYNKMNCVDNMEISVSHRGRRFGSMFSSRKGEILDRAEELLDFVGLYSKRFLISGDFSFGQQKLLEFAMALMNDPKVLLLDEPTAGINPTLINGLIDRLKRANEEMGVTLFVIEHNMRVVMNLASHVFCLAHGKLLAGGPPSEIQNDQKVIDAYLGAH

SEQ ID NO: 144505 - protein, 224 aa, Unknown
  Bacterial polypetide isolated from the Sargasso Sea
MQIEVSGLHKSFLDGEGHQLHILKGLNFKLEAGASASIVGASGTGKSTFLHILGTLDEGDSGRICFENTDLMQMKREESSAFRNKTIGFIFQFHQLLQDFNALENVMIPALILGNSRTTAMERSKMLLDQVGLFDRMHHKPSQLSGGEQQRVAIARALTNSPKLLLADEPTGNLDEETGRQVMELLLKLNQENRTTLVMITHNQKLAMETNSKFRLENGLLNQE

SEQ ID NO: 144506 - protein, 343 aa, Unknown
  Bacterial polypetide isolated from the Sargasso Sea
MSDAVIKCESVYKIFGENAEKMLQEANGNVDAKTFQENGCIVGVNNASFEVAKGEMLVVMGLSGSGKSTLLRCISRLTDATGGKIFIEGQDLLQLNNKELIDLRRNKMGMVFQSFALLPHKTVVENIAFPLQIKGIDTDDSISKAMDMVKLVGLDGRENYFPRELSGGQQQRVGIARSLAVEPDIWFLDEPFSALDPLIRKEMQDEFLRLQDKLQKTIMFITHDFDEALKLADRIAIMKDGIIEQLDTPAKIVLNPATEYVRKFTEEVPREKVLLIEDVMEQSTGDNLGDLRVSKHEIIENVAEKILTQDKTVGVIDKNNKVIGSINPTKIINTVFGGRKNGN

SEQ ID NO: 144507 - protein, 206 aa, Unknown
  Bacterial polypetide isolated from the Sargasso Sea
VVVTSDRGLAGSFNTSILRKAHNDIDDFGKENVDIFCIGKKANDYFKSRKYNIVGSYFDFWNELNFNQSMKIGSTIINHFLDQSVDEIRVVFNEFVNVATQAVITEKLLPIELDEDELTNIDYLYEPSKKKIVKSLIPRYLNAQVWKYLLESYASEQAARMIAMENATSNSEDMIKSLTLEFNKARQAAITTEMLEIVSGAEALKE

SEQ ID NO: 144508 - protein, 181 aa, Unknown
  Bacterial polypetide isolated from the Sargasso Sea
IAGIDLPDQGEVRIDGKSLGQMSEKNRTLLRRRTMGFVFQSFNLIPTLNVYENLMLPLELNQILKNSGIISQMLEALGLKGREESHPDRLSGGEQQRVAIARALMHQPSLLLADEPTGNLDAETSKETLKLINHLVHRSRTTMIMATHSQEVIEWVDRVLGIEDGKLIELKTSEAIQKLAS

SEQ ID NO: 144509 - protein, 251 aa, Unknown
  Bacterial polypetide isolated from the Sargasso Sea
MNELVLQLEGLEKSFGALRATRDVSLDVEHGEIHALIGPNGAGKTTLVRQIYGSETSDAGVVKLRGEVVNGLTVPQRVARGIGRSFQISNVLMDFTVLQNAILAEQARLGESFRFFRPAFDDQALIDGASVMLDRVGLGDRAATPVADLAHGERRLLELALALAAEPALLLLDEPMAGAGSEETKHMIEIIAGLKSRAGILLIEHDMDAVFQLADRVTVIVEGGVIASGPPDAISADSAVREAYLGSEEHA

SEQ ID NO: 144510 - protein, 404 aa, Unknown
  Bacterial polypetide isolated from the Sargasso Sea
MISKVKLAPQPGIKIGYLPQEPKLNPEHTVRESVEEAVAEVVNALKGLDEVYAKYAEPDADFDKLAAQQGKFEEIIQAHDGHNLNVQLERAADALRLPDWDAKIENLSGGERRRVALCRLLLEKPDMLLLDEPTNHLDAESVAWLERFLHDFEGTVVAITHDRYFLDNVAGWILELDRGEGIPWEGNYSSWLEQKDQRLAQEASQEAARRKSIEKELEWVRQGAKGRQSKGKARLARFEELNNTEYQKRNETNELFIPPGARLGDKVVEVTNLRKSYGDRVLIDDLSFSVPKGAIVGIIGPNGAGKSTLFRMMSGQEQPDSGTITLGETVKLASVDQFRDAMDNSKTVWEEVSGGLDIMKIGNTEMPSRAYVGRFNFKGVDQGKRVGELSGGERGRLHLAKLLQ

SEQ ID NO: 144511 - protein, 181 aa, Unknown
  Bacterial polypetide isolated from the Sargasso Sea
MSIEIKNLSKKFNEVYAVKNINFTIGVNKTIGLLGPNGCGKTTSIGMMLGLIKPTTGDIIIQNKNINTFERNKLLSIMNFASPYVELPKKLSVKQNLQIYGRLYGVNDLSLRIDELAEDLNLKDFINKKTGELSSGQKNRVSLAKSLINKPEILLLDEPTASLDPDIGDYVRSYVQTYKSK

SEQ ID NO: 144512 - protein, 603 aa, Unknown
  Bacterial polypetide isolated from the Sargasso Sea
MVSDLIFSLRETSVSFGKKIIFDNLDVNIHRKDLIALIGKNGVGKSTLMRIISDKQDLDQGEVWKLNNIRVSFFSQKFELEESYSIENELLNILDNKEDSFKIDIFCNNLQLNKKDIIKNLSGGQKRRVGLIKSLINESDILLLDEPTNHLDLECIIWLENYLKTFKGSIICVSHDRTFLSNFTNKVFWLDRGNLRVSPSGFKNFDRWSQEMFEQEARELKNRKQFVNIEVEWANKGVKARVKRNVKRLERAKELKDQLEKDESSYRKAIQTVKINKIIPGLDNSKFIAEFHKVSIGYEIPKKTILKDINLKINKKDRIGLIGKNGTGKSTFLKALLGEIKSQKGTIKLKKNMNFSYFDQLRNDLNTDNSLKKILVPSGGDYLKVQGKDRHVCSYLKDFMFDPSKATDSISTLSGGQQNRLLLAKVLANPQTGLILDEPTNDLDLETMDLLTEMLSNYSGTLLIVSHDRDFLDQTVNKILYFDEKGQVSIFLGGYSDFLKSQQNEKIIKSISKKKNNYKVVSSKNNKKLSFKYKYELENLPKEIEDLENKINDITKELKNSNLYLSDANRFNEITSEMLELKKVLSIKEERWLFLLEMEEKNE

SEQ ID NO: 144513 - protein, 101 aa, Unknown
  Bacterial polypetide isolated from the Sargasso Sea
MNLIIKSLNFSYQSEGVFKDLNLNFNSGILNLVSGPSGSGKTTLLNLIAGLEKPSSGLIMLDDNIQSSIDKFVEPENRNIGFVFQDFALFPHLNVKQNIEF

SEQ ID NO: 144514 - protein, 103 aa, Unknown
  Bacterial polypetide isolated from the Sargasso Sea
MPSLKDIKTQINSVGSTKKITSAMKMVAASKLRRSQEKAEAARPYSSRLEEMLSSLATSASSGEGIIKLLTGTGEDQNYIVVPVSADRGLCGGFNSSINRETF

SEQ ID NO: 144515 - protein, 342 aa, Unknown
  Bacterial polypetide isolated from the Sargasso Sea
MSEPVIKCENVYKIFGANAQKMLQDSNGNVDAKTFQENGCIVGVNNASFEVSKGEMLVVMGLSGSGKSTLLRCISRLTDATGGKIFIEGQDLLQLNNKDLIDLRRNKMGMVFQSFALLPHKTVVENIAFPLQIKGIKTEDSISKAMDMVKLVGLDGRENYFPRELSGGQQQRVGIARSLAVEPDIWFLDEPFSALDPLIRKEMQDEFLRLQDKLQKTIMFITHDFDEALKLADRIAIMKDGIIEQLDTPANIVLNPATEYVRKFTEEVPREKVLLIEDVMEVSKDNLGDLKVSKDEIIENVAEKILTQEKSVAVVDNNNNIIGSINPTKIINTVFGGRKNNN

SEQ ID NO: 144516 - protein, 200 aa, Unknown
  Bacterial polypetide isolated from the Sargasso Sea
MARALAVQPRVLLLDEPLTALDARLRDTLRSEMNTLLRELGITTVYVTHDQAEAMELGDRIVVMSAGRIEQIGSPRDIYYRPANRTVAQFVGTINRLAGERREGLLTTTGGTVPLPSGPGHASAAHEFFFRPEDAYLADPATAQLRGNIESTAFLGERTRLTIGGAAPDALLIDVAGRVELARGTPVGISIAQDALIALS

SEQ ID NO: 144517 - protein, 440 aa, Unknown
  Bacterial polypetide isolated from the Sargasso Sea
LCKVLVRKLLGIETSGILTVLFTDKTGTLTQGELNVSEFLLGDGKHFLNYQDISSTLRETIAFAIRNNTPAIIDSKDPKNLKIVGANPTGIALLRFLGLDAAVQDDVKMEKNIPFQSANKFSASQIKGEQNVTLIKGAAEIVLKGCTHFLNQKGEKVKLDDTKLKEEMRGLSERAMRLIGLAVSDKDLGGENILPSELTLVGVFGLRDEMRKESLTAVETAQKAGIQVVMITGDAKDTAEAIAKEVGILETEKGLILSSYQLGEFSDQEIKDMLPDLRVVARALPTDKSRLVKLAKSMDWVVGMTGDGVNDAPAVKNADVGFSMGNGTDMTKESSDIVILDNNFNSLTNAVRYGRTLLKSIRKFLIFQLTVNVAAVLVAFLGPFFGTDLPLTMTQLLWINIVMDTLAAFAFSGEAALKRYMNEKPIPKGESLITGDMWSA

SEQ ID NO: 144518 - protein, 240 aa, Unknown
  Bacterial polypetide isolated from the Sargasso Sea
MTNSIEVINLSKKYKDKEAVANINFKINENEMVGLLGPNGCGKTTTIGMILGLLKPSSGEVLINGENIEKNKISLLHKMNFISPYIELPKKLKVKQNLIVYGKLYNIQNLNDRIDHLANKLRLKDLLNKITGELSSGQKNRVSLAKALINDPTVLLLDEPTASLDPETGDFVRSFLEDYKKEKKISVLLASHNMEEVKRLCSSVLMMKDGLIVDRGTPEELITKYGRRNLEEVFLEIVRK

SEQ ID NO: 144519 - protein, 199 aa, Unknown
  Bacterial polypetide isolated from the Sargasso Sea
MLYNEILLSCENITKIFGDFKANDNVNFSISKGEIHALLGENGAGKSTFVKIIYGLLKPDSGNVIWKNKIIEINGPKHARELGIGMVFQHFSLFEALTVLENISLALPEKNQSDDLENRIETISNEYGLQIDPRSRVFNLSVGEQQRVEIIRCLLQNPELLIMDEPTSVLTPQEISKLFEVLEKLSKSGCSILFITHKA

SEQ ID NO: 144520 - protein, 190 aa, Unknown
  Bacterial polypetide isolated from the Sargasso Sea
MKKTVHLSCEGLTKKYTDKTVVSEVSIKVDTGKVVGLLGPNGAGKTTTFYMLVGLIRCDQGQIYMGDENITNSPMHIRSDLGISYLPQEASIFRNLSVEDNIMAILQTRKSLSDIQIKNKFDYLINILQIENILDNTGASLSGGERRRVEIARALSIEPKFLLLDEPFAGIDPISVIEIQKIIKSLTSSS

SEQ ID NO: 144521 - protein, 233 aa, Unknown
  Bacterial polypetide isolated from the Sargasso Sea
MIDFQQVSKIYPGGQMALEEVNFHLQKGEMAFLTGHSGAGKSTLLKLITVIERATTGRVAINGHDIAKISPKHVPYLRRNIGMIFQNHHLLMDRSVFDNVALPLVIEGFSHGEIRKRVAGALDMVGLYGKERHNPIMLSGGEQQRVGIARAIVNKPPLLLADEPTGNLDPKLSMDILRLFETFNDAGTSVLIATHDLGLIARMKYRTFTLKQGRMLGAQELHHGHATARGNAL

SEQ ID NO: 144522 - protein, 345 aa, Unknown
  Bacterial polypetide isolated from the Sargasso Sea
MSSQPVIKCESVYKIFGVNAEKMLQESNGNVDAQTFQEAGCIVGVNNASFEVSKGEMLVVMGLSGSGKSTLLRCISRLTDATGGKIFVEGQDLLSLKNKELIDLRRNKMGMVFQSFALLPHKTVLENIAFPLQIKGIKTEDSISKAMDMVKLVGLDGRENYFPRELSGGQQQRVGIARSLAVEPDIWFLDEPFSALDPLIRKEMQDEFLRLQGVLKKTIMFITHDFDEALRLADRIAIMKDGIIEQLDTSDNIVLNPATEYVRKFTQEVPREKVLKIEAVMDPISDDQNLSDLIVSQDVIIEEVAEQILSQEKPVQVIDSNNKTVGIVKPSKIIHTVFGARKENS

SEQ ID NO: 144523 - protein, 144 aa, Unknown; identical to SEQ ID NO: 143673
  Bacterial polypetide isolated from the Sargasso Sea

SEQ ID NO: 144524 - protein, 413 aa, Unknown
  Bacterial polypetide isolated from the Sargasso Sea
FSLFDSLSVKENLILGIDEKMSYSDLENKLENISSRYNLPLDLDAPITALSAGEKQRVEIVRILLQDPQILIMDEPTSVLTPQEVENLFVTLNALVKEGRTILYITHKLEEVISICDTVTIMRSGEIIDTSSTSNQTAKTLATKMLGQKLDDLKTNYTHIKDEVNFEVKNISCYFNDPFLTDLKNISFQVRVGEIYGIAGVAGNGQSELMDILTGENINIKSGSITFDSKKIEKYGPQKRRDLSISFVPENRLGHSAVPELSLSENILLSQFPKNNFIKNGIILKNNVDDFANNVINEFKVITPGNDAKASSLSGGNLQKYVIGREISSKPKILIISHPTWGIDAGAEHSIRESLIELSQNGTSIIVISQDLDELIEITHKISVIYDGKLSKPFRTNEVEIEKLGLLMGGNNE

SEQ ID NO: 144525 - protein, 254 aa, Unknown
  Bacterial polypetide isolated from the Sargasso Sea
QDKIKTDVEVALKTVGLIGFENRKIQELSGGQQQRVALARSLAKKAKILLLDEPLVNLDYKLREQLREEFKKIFSEGMSQETILIYSTTDPQEVMELNGEVIVLDEGKVLQKGPAKEIFENPLNLKVAEISNDPPMNILKGLKNSDNLNFENISIKSPKHFKNLENQNYNFGIRASEIKLDDNGEEFEIELAEISGSETLLHLKKGNSKLIALIEEVMNYKIHQKVKIIFNSNKFYAFNQSGELVSSPYRINNG

SEQ ID NO: 144526 - protein, 242 aa, Unknown
  Bacterial polypetide isolated from the Sargasso Sea
MTNSIEVINLSKKYKDKVAVTNINFKINENEMVGLLGPNGCGKTTTIGMILGLLKPSSGEVLINGENIEKNKISLLHKMNFISPYIELPKKLKVKQNLIVYGKLYNIQNLNDRIDHLANKLRLKDLLNKITGELSSGQKNRVSLGKALINDPTVLLLDEPTASLDPEIGDFVRSFLEEYKKEKKISVLLASHNMEEVKRLCSSVLMMKDGLIVDRGTPEELITKYGRRNLEEVFLEIARKKK

SEQ ID NO: 144527 - protein, 226 aa, Unknown
  Bacterial polypetide isolated from the Sargasso Sea
MLKVHNLKKSFGGVKAVDIDEIFFEQNQLTSIIGPNGAGKTTFFDLISGFTEGDKGKVFLNDKNITNSQPYTIAREGMVRTFQLTKVFDRMTVVENMMFSGSDLKNDSLFSSFIQLPAQKKKENLLRKKAFDIMKDLNIDHMADSYARELSGGQKKLLELGRSIINEPSILLLDEPLAGVNPKLAEEILSIIQKLSDSGITILMVEHNIEAVMKISERVVVWQKEL

SEQ ID NO: 144528 - protein, 612 aa, Unknown
  Bacterial polypetide isolated from the Sargasso Sea
MTPGARTANRRGVGPKWAGQMGQHFIRMLMTPNTASSPALPPDEKVSAWSLIKPYWVSEERKTAWGLLVAIIVMNLLVVWINVRLNRWSADFYNALQTKNVHDFPHLLMVFTGLAFGFIILAVYGRYLRQMLGFRWRQWLTTRYLNEWLRDSAFYRIERDRLADNPDQRISDDLQSFATTTLSLTLDLLSTVVTLVSFITILWSLAGALTISLGGMPIQVPGYMVWAAALYAVVGSLIIQKVGHPLVPINYQAQKVEADFRFGLIRLRENAEQIAFYNGMETEKTNAHTLFGRIRDNWWQVMKYTKRLTFVLSFYGQIAIIFPIVVAAPRYFAGAFSFGVLMQISQAFGTVSDSFSWFINSYGTLVEWRATVNRLREFKRIVHAPRLKESVSPATAHGGINLHFVDEDRLSTDGLQLALPNGNPLSRIRDIAITPGSRWLVRGPSGSGKSTLMRALAGLWPFGDGSIDAPVNARMMFIPQVSYMPIGTLKAALAYPSPADTYTDEECREALVTCHLSEYAERLQESGHWTRILSPGEQQRLAGARVLLHKPDYLFLDEATSALDAENEARLYHLFTERLPKAAIVSVAHRESLAAFHGDTLDVERSGEPIAA

SEQ ID NO: 144529 - protein, 130 aa, Unknown
  Bacterial polypetide isolated from the Sargasso Sea
MLSVNNLSVNYGSTRVVDKLNLELGQDEILMLVGPTGCGKTTILQALAGLIPISEGAMSLGEWESTANKHVPPEKRNVGMVFQDFALFPHLTVQQNVCFRLKDTKLADHWLQLLGLDNFRDAKPARLSGG

SEQ ID NO: 144530 - protein, 220 aa, Unknown
  Bacterial polypetide isolated from the Sargasso Sea
MILEVNKLRKEVSSGDSKLVILDDVSFNLLEGQSLAITGPSGSGKSTLLGLLAGLDTATSGEIYLNGEGLHELDEEQRALLRKEKVGFVFQSFELLPSLTALENVMLPSELKDEDEPEGRAKYFLDRVGLKEREHHYPNQLSGGEQQRVAIARAFACSAKILFADEPTGNLDPKNGEMVSDLLFEVNSETDNALVVVTHDHDLADRCDKKINLKLGKIVE

SEQ ID NO: 144531 - protein, 325 aa, Unknown
  Bacterial polypetide isolated from the Sargasso Sea
NFWNNALKLLQNSNGQVDAKAFQDAGCIVGVNNASFGVKKGEMMVVMGLSGSGKSTLLRCISRLTDATAGKIFIDGEDLLSMNSKQLIELRRNKMGMVFQSFALLPHKTVIENIAFPLQVKGTNTRESMAKALEMVELVGLKGRENYFPRELSGGQQQRVGIARSLAVEPDIWFLDEPFSALDPLIRKEMQDEFLRLQAVLNKTIMFVTHDFDEALRLADRIAIMKDGIIEQLDTPDNIVLNPATEYVKKFTEDVPREKVLKIESIMDNYDPNNASSTKVSKDAIIETLAESILNSKEILTVVDNNNEIVGSLNPTKVIKVIFGK

SEQ ID NO: 144532 - protein, 354 aa, Unknown
  Bacterial polypetide isolated from the Sargasso Sea
MAKITLKDLSHSYLEKQNSNADWALREVNIDWKDGGAYALLGPSGCGKTTLLNIISGLLKPTKGSVLFDDRDITTFNPVERDIAQIFQFPVIYDTMTVYDNLAFPLKNRGLSESEISSKVKEIAEMLELTSTLNNRASGLTADGKQKISLGRGLVRSDVNVIMFDEPLTVIDPHLKWILRSKLKELHQKINRTMIYVTHDQTEALTFADQVVVMHEGQIVQTGTPVELFEKPKHTFVGHFIGSPGMNILPCEIKNGEVNFSGQKIQSHKTIKKSSFNKTQLGIRPEFINFSNNGIPVKIKRVSNTGRHKIIDTESSGGNIKILSNSSTEIPSGSAHITFNQKYTYVYEDNWIIE

SEQ ID NO: 144533 - protein, 506 aa, Unknown
  Bacterial polypetide isolated from the Sargasso Sea
MRLEKISKIYPTGEVLKDVSWEIRNGERIGLVGVNGAGKSTQLKIIAGLEEATDGSLISEGDPTIAYLKQEFDVDLSRTVREELFVAFKEASDLLHSQKLVQENMESELASKDLDYLDLLIKELSVIQSKFESINGYDLESKVEKLLPTIGFNQNEADRLVGDFSGGWQMRIALGKILLQSPDLLLLDEPTNHLDLETIEWLENYLLNQKIAMVIVSHDRSFLDKVCTRIVNTERGKSKSYLGNYTSYLQQRDFELESTKVAYEKQQKDIQVQKAYIERFRASATRSTQAKSREKLLDKVEKIKAPENNLKGPNFKFLEAPRAGRDILNIKDLSHSYEDKILFLGAFLELEPGERIAFLGPNGSGKSTLLRLIMGLEDPDEGSITIGKYNIIPSYFEQNQAEALELDKTVIETISQSVPDWTQTEIRSLLGSFGLTNDSVFKEVSQISGGEKARLALALMIIKPSNLLILDEPTNHLDIPSKQMLEQALSNYNGTALIVSHDRYFI

SEQ ID NO: 144534 - protein, 97 aa, Unknown
  Bacterial polypetide isolated from the Sargasso Sea
SYSTRLLVCDEPTSALDVSIQAQILNLLKDLQEQLNLTILFISHDLPVVRQMCDKIAVLKDGKLCEVSETEELFKNPKHNYTKELLKLMPKIESIYN

SEQ ID NO: 144535 - protein, 272 aa, Unknown
  Bacterial polypetide isolated from the Sargasso Sea
MNLIGKNITYKPDNQFHLNDVSFDFKKGNLYTILGRTLSGKTTFLKTIAGLLNPDTGELFFEDKDFSKIPVWERNVAMVYQQFINYPHLNVYENIIFPLKQRKLSEEQIKMDVEDALKTVGLVGFENRKIQELSGGQQQRVALARSLAKKAKILLLDEPLVNLDYKLREQLREEFKRIFSAGLSQDTILIYSTTDPQEVMELNGEVIVLHEGKVLQKGDAKEIFENPKNLRVAEISNDPPMNILTGSKSSDQLTFENISINLPAYLKDLKSQ

SEQ ID NO: 144536 - protein, 186 aa, Unknown
  Bacterial polypetide isolated from the Sargasso Sea
MHFQLHCGCGRLFAPPPSNQKPVSAIVESMQPIVSVTNLSKTYATGFHALKNINLAINRGEIFALLGPNGAGKTTLISIICGIVNASEGSVTVDGRDIAQDYRGARSLIGLVPQELTTDSFETVWATVSFSRGLFGKPKNPAYIEKVLRDLSLWEKRNSKIITLSGGMKRRVLIAKALSHEPRVLF

SEQ ID NO: 144537 - protein, 285 aa, Unknown
  Bacterial polypetide isolated from the Sargasso Sea
MANLKNLSERIKSVTSIQQVTKAMKMVAAAKVKKAQDKMEISRPYSKNTQELICRILPQISSTDISLVEKRDIKNIGIIVISSDRGFAGSFNSSVIRKVEKEIEKIGKDKVYLFCIGKKSSEYFSKRDFNVKETFFDFWKDMNYETASEISNSFIRAFEQNDIDEVHVVYNRFKTLASQELMMEKVLPVDFTTDYNAKDYNYDYEPGQKEIVSTLIPKHVTVQMWQQLLESYSSEEAARMIAMDNATENAKEIIKELKLEFNKARQAAITTEMLEIVGGAEALVD

SEQ ID NO: 144538 - protein, 242 aa, Unknown
  Bacterial polypetide isolated from the Sargasso Sea
MINPIEVKNVYKNYSDKNAVNGINFSISDNEIVGLLGPNGCGKTTTIAIMLGLLRASSGQVFIKGKDIEKNRIELLHKMNFISPYIELPKKLTVKENLIVYARLYNVNKLNDRIDYLVETLNLKNFINQKTGELSSGQKNRVSLAKSLINTPSILLLDEPTASLDPDTGDFVRSFLEKYIKENTVSILLASHNMNEVKRLCSNVLMMKNGKIVDEGTPNQLLKKHGQDNLEEVFLKLSRNEK

SEQ ID NO: 144539 - protein, 199 aa, Unknown
  Bacterial polypetide isolated from the Sargasso Sea
MQQVSKDFGIKTLLDQVDLEIGPQDRLGLIGINGSGKSTLLRVIAGLEPVGDGRVQINPRNRVVYVDQNPSLDPERTVLEQVFADCGEKMQLVERYETVSQQLEQQPDDQALLGELSQISNRMDEAKAWELERQCQEVLSRLGIRDHNRKVGELSGGYRKRLALASALVAEPDGLLLDEPTNHLDALATEWLQGFLQRF

SEQ ID NO: 144540 - protein, 620 aa, Unknown
  Bacterial polypetide isolated from the Sargasso Sea
MNEKSNVLKSIFTFHNRHISSGSIKEVINSKPDIKSFETFKEIIDELEFELVELQTSDKSNIEKLDNAICFFEEGSFALISTRQDGTISLSFKSKRKVEVSIDDLVKTKKIKIFSVFPKFESSKNVNNRIKLLNPLTNLGGINFFWVALASFTSNVLGLATSIFIMVVYDRVLPNQADQSLYALAIGVGIAIVFDQLFKSARGAILENSAVNKDKKSNDQIFEQFVETKTDLTKRSIGSLTTISRDYETYKEFVSSAGLILLIDLPFILVFVLVIYYIGDLLFLVPLISVPAVIIGILIMQPFLFRTSKRVSKVNQSKQGLLIEILSGLDALRVNGAYSFIKKKFSAQADDYSKVINNAKRFNQITTNYVSIIQQLAQIAIIVYGFHLFVEQRISMGAIIATMILSGKTLGPLAKMAQTLGRANSAYVARNNLVEFFSQQRRERFSKVGLENVRKNLAIDVQNASVKLSADSKPIFTNLSFDVKKGEKIAVIGRSGAGKTTLLRTICGLLEPETGSVQINGDQASSIPRDELFRHVGVVLQESWLFSGTLRDNLTLGYEDFNDEQISEALNEAGAHFLGENKGEMLEFPILDRGSNLSGGQKQAICIARVLLQKPYILLL

SEQ ID NO: 144541 - protein, 127 aa, Unknown
  Bacterial polypetide isolated from the Sargasso Sea
MGAIDIKSAGKIYPNGTRALEDVSITINDGEFVVLVGPSGCGKTTLLRMVAGLEDITEGEIAIGDKTVNEVAPKDRDIAMVFQNYALYPHMSVYDNMAFSLKLRKLPKDEIEQKVKDAAKTLEISEL

SEQ ID NO: 144542 - protein, 271 aa, Unknown
  Bacterial polypetide isolated from the Sargasso Sea
MPLNPSFPPSSKITRFGLCSLSNFGSLYRPPDVVSPLIPALMILILISRAFKFLSRTDGHDSSIFTPYPALKLSPKTTAIYSLFLNCSDEFTDEESVSRIPKSKAMDILKNFILEVKNITKEVNSPEGLLTIVKDINLSVEQGKPISLVGPSGSGKTTLLAIMAGLDLPTSGTVTLMGSQITTLDEDKRAQIRGKDVGFVFQSFHLMPRLTALDNVMLPLEISGDPYSMDKAQEALKQVGLSKRAKHFATQLSGGEKQRVAIARSIVNKPK

SEQ ID NO: 144543 - protein, 113 aa, Unknown
  Bacterial polypetide isolated from the Sargasso Sea
MSKIIELKNVNKWFDKFQVLKDIDLEVAPQEKIVICGPSGSGKSTLIRCINRLEEHQEGNIIVDGTELSESTKNIEKIRAEVGMVFQQFNLFPHLSILDNCSLAPIWVKKLPK

SEQ ID NO: 144544 - protein, 235 aa, Unknown
  Bacterial polypetide isolated from the Sargasso Sea
MAFFEGNKMTGGYGDGPDIINSCSINVNKGEIVAILGPNGAGKSTAMKAMLGLLKLKSGNISIGGEDISSLSPQERVKKGISFVPQTRNVFAELTVRENLEIGAYLRTDDIYKVIDEIYDLFPILKEKKDQIVGQLSGGQRQQVALGRALMIKPSVLMLDEPTAGVSPIVMDELFEHILRVKETKVGIIMVEQNAKQALSISDRGYVLVTGENKFEGSGNELLNDPEVRRSFLGA

SEQ ID NO: 144545 - protein, 111 aa, Unknown
  Bacterial polypetide isolated from the Sargasso Sea
MLEEAQRLLTALGLSEPLKEGRPVVELSVGQQQRVAAARALIGRPELVIADEPTSALDSDLREVFLNLLFAECDKAGSALLFVSHDSELSRFFGRSLSLPQINRVSSLEAA

SEQ ID NO: 144546 - protein, 319 aa, Unknown
  Bacterial polypetide isolated from the Sargasso Sea
MSNNLIEVRNLVKHFEVSKSVFSRNKKIVKAVDGISFDIKAGETLGLVGQSGCGKTTTARSLCLLDPKTSGSVNFYNPDTQNMESIDNIDEDGMRIFRRNMQMIFQDPYESLNPRWTIKDIIKEPLDIHNIGSFDEREEAVMEILRTVGLTPPENYLNRYPHEISGGQRQRVSIARTLVMKPKFVICDEPTSMLDVSIRISIMDLMLNLAKELDVSYLYITHDLAVARYMCNRIAVMFNGKIVEIAETEELLQNPIHPYTKRLISSIPIPDPKYVRERYEINFDELDKIVKDNPNEQMVDVGNNHFVATHETKEYLIES

SEQ ID NO: 144547 - protein, 232 aa, Unknown
  Bacterial polypetide isolated from the Sargasso Sea
MIEIKNLHKSYEMGANSLHVLKGINFSVKDGELVAIMGSSGSGKSTLLNILGMLDTADAGTYHLDNIKIANMDETKAANYRNKFLGFVFQSFNLINYKDALENVALPLYYQGLPRKDRQKVGLEYLDKVGLKEWSDHLPSELSGGQKQRVAIARAMASNPKVLLADEPTGALDSTTSREVMALIQRINNEGKTILVVTHENDIANMCKRIVHLKDGIIVEDKKIKQNIIKDV

SEQ ID NO: 144548 - protein, 226 aa, Unknown
  Bacterial polypetide isolated from the Sargasso Sea
MTEKLISISNLSKEFLVNKNKTCILKNINFSIVKGDIISIAGPSGSGKSTFLNILGLLDSVFSGTYDFLDFNVNLLTNNEKNIIRNKSIGFVHQFFYLIPELTVLENVSLPNLILNNQMRKSNDLAKEIIVNCGLENRMYSKPTYLSGGEQQRVAIARALINNPELIIADEMTGNLDEKTADTVFEFFLDKISSNNQTLIYVTHNEKYAKKANTAFEISNNQIHKI

SEQ ID NO: 144549 - protein, 530 aa, Unknown
  Bacterial polypetide isolated from the Sargasso Sea
MITTANITMQFGAKPLFENISVKFGGGNRYGLIGANGCGKSTFMKILCGDLEPSSGNVSLDVNERLGKLSQNQFGYEEYTLIDTVIMGHRELWKVKQERDRIYSLPEMSEEDGIAVANLEMEFAEMDGYTAESRAGELLLGVGIGIESHFGLMSEIAPGLKLRVLLAQALFSDPDVLLLDEPTNNLDIDTIRWLQDVLNQRDSTMIIISHDRYFLNSVCTHMADLDYGELRVYPGNYDEYMLAATQARERLLADNAKKKAQISELQTFVARFSANASKAKQATSRARQIDKIKLDEVKASSRVNPFIRFEQEKKLFRNALVVENLAKGYDTPLFKDLNLIVEVGERIAILGENGVGKTTLLRTLIHDIPQDEGHIQWSENSNIGYYAQDHESDFENDMTLFEWMSQWRKPEDDDQAVRGILGRMLFSADDIKKSVKVLSGGEKGRMLFGKLIMQKPNILMLDEPTNHMDMESIESLNNALEKYEGTLLFVSHDRAFVSSLANRILEITPNGVNDFKGTYDEFLASKGIEG

SEQ ID NO: 144550 - protein, 121 aa, Unknown
  Bacterial polypetide isolated from the Sargasso Sea
RLYEFVDKLTGELSSGQKNRVSLAKSIINNPRVLLLDEPTASLDPETGDFVRSFLEEYQQENKTSILLASHNMAEVERLCSSVLMMNKGSIIDEGRPEELIKKHGRKNMEEVFLKLTREKV

SEQ ID NO: 144551 - protein, 239 aa, Unknown
  Bacterial polypetide isolated from the Sargasso Sea
MLKISNVETFYGKIQALRGVDLDVNDGEIVSLIGSNGAGKSTLLMTISGVNKAKRGNIIFNGKNIENQAPHKIVDMGICQVPEGRRIFSRLTVEENLRLGAHANEKGKYFENDIKEVYDLFPVLSDRKTQRGGTLSGGEQQMLAIGRALMSKPKVLLLDEPSLGIAPKLVNQIFVSIKNINKEKNVTIFLVEQNAKKALELADRAYVLVNGKVTIKGPGQELLKNKDIQAAYLEGGSKN

SEQ ID NO: 144552 - protein, 247 aa, Unknown
  Bacterial polypetide isolated from the Sargasso Sea
MEEIIEVNNVSKSFGGVKANIDISLKVKKGSITGIIGPNGCGKTTLFNSIVGYHPIDNGSIIFDNNEISKLLVGDIARLGMLRTFQQTRIYSKMNCVDNMQISVSHRKDSKDSMFASRKGEIKERAENLLEFVGLYSKRNLISGDLSFGQQKLLEFAMALMNDPKVLLLDEPTAGINPTLINGLIDRLRKANEELGITLCVIEHNMRVIMNLASHIYCLANGKVLANGSPSELQKDQRVIDAYLGGH

SEQ ID NO: 144553 - protein, 599 aa, Unknown
  Bacterial polypetide isolated from the Sargasso Sea
MESIVSQQSSHTSVRQRAVLPWIWQFLKPYRLRVVAAIVFLLIGSLAWLSLGQGVRLMVDEGFIKDNAQRLNEIILLVLLITAVSGTAVFCRFYLMTWLGERVSADIRLAVYNQLLKLSPAFYAKVRTGEVISRFTADSTLLQTVVGSSLSMALRSGVTVIGGLAMMGITSVKMTLLVLLAVPLVLGPVGFFGRKVRTLARESQDRVADLGAYVDETLHEIHTVQAYGHEDKDRSLFNGRVEDVMTAASGRIRYRALLISSVMFLSIAAIALVTWVGAHDVMSGKMTGGELSAFMFYAVMVAGAVATISEVVGEIQRASGAAERLIELAETEVDIPAPLVPKTLPDKVCGELQLQQLNFHYPEQTQLVLSDLDLVINAGERVALVGPSGAGKSTLFQLLQRFYVPSSGSILLDGIDIAALSPQDLRAQFALVPQDSVIFATSVLENVRYGRVDANEQEVIDACIAARAHEFISEFNEGYQTYLGERGVRLSGGQKQRIAIARAILADRPILLLDEATSALDALSEQKVKQALDELMAGKTTLIIAHRLATVINADRIIVFDKGRIVASGKHQTLMQTNALYREFASLQLLTDEVNPLSE

SEQ ID NO: 144554 - protein, 581 aa, Unknown
  Bacterial polypetide isolated from the Sargasso Sea
MLTPSQAGFRRLLPLLRPHLRQLLMGGLCMVIYVGSFPLLVRLAGELFPALGSQNLSRVLQLIGQGVLIFAVQKLAQFGQDSLLADPALRVSQRLRRELFSTLQTVELGALEKLSAGDLTYRLTEDADRVSEVLYKSIHDTVPSVLQLLVVLGTMVWLDWKLTLAILLLAPLIIWLISLFGAKVMVATERSQKKVSELAGLLGEAIEGLPLVRAFAAEPWLQERFEQEIDQHRQARQRTYSLVALQHPVVGIIEVIGLFSVLGLAAWRIQSGDLDIAGLSSYLTGLIVLIDPIAHVTNNFNEFQQGQASLRRLREIEREPREPVDPPDAVNLGQLRGDLRLEGVSFGYAVGDPVLQQLDLDVPAGTVMALVGPSGAGKSTLFSLLLRFNAAQQGRIVLDGHDLSTLRARDLRRQLALVPQRTTVFSGSIAEAIRFGRHATDAQVMEAALLANADGFIRDLPDGYNTQLEERGTNLSGGQLQRIAIARAVLGNPAVLLLDEATSALDAEAEAAVQLGLRRAMRGRTVLVIAHRLATVQEADQIVVLERGRIVDRGTHDSLMQRGGRYRDLCERQFIRDLQNG

SEQ ID NO: 144555 - protein, 308 aa, Unknown
  Bacterial polypetide isolated from the Sargasso Sea
MERDMPMHPAPSSAPLCEIDGLKIGFRGHDGTVTDAVRDLSLTLAPGERLGIVGESGSGKSLTGRALLGLLPDAARWSARTMRFAGHDLLAMPPGERRRLCGSQMGMILQDPKYSLNPVMTVAKQMGEAFRLHEPGLRGRALRERIVDALAAVQIRDPARVADAYPHELSGGMGQRVMIAMMVSTGPRLLIADEPTSALDVAVSMQVLAVLDAMIARHGTGLMFISHDLPLVMSFCDRVAVMYAGRVVETCAARDLRDASHPYTRGLLAANPPLANPPDELPVLRRDPAWLEPASHAGTPADRQEAAR

SEQ ID NO: 144556 - protein, 285 aa, Unknown
  Bacterial polypetide isolated from the Sargasso Sea
MTTNRPLLDVQGLTRRFDGVTALDGASLSLADGELLSVIGPNGAGKSTLFNLIAGADRPDAGRVTFDGRDITGTAPERLATLGIARTFQHGRVFGNLSVLDNVLIGAHARLRAARPGWPALGAAAEVLRALVRPAAVRREEAALRDEARAIVAGFGERLTPRIDHPAHSLSYANRRRVEIGRALALHPRLLLLDEPTAGMNETETAEMLQLIQSLKARGLTILLIEHKLELVMRVSDRVMVLDNGVKIAEGAPRDVRHDPRVIEAYLGRRHAGGAPADRTAQAAA

SEQ ID NO: 144557 - protein, 619 aa, Unknown
  Bacterial polypetide isolated from the Sargasso Sea
MVNKPLTEPTESSTLPPRSLSESTMSHNAANSSIRQRAVLPWIWQFLKPYRLRVVAAIVFLLIGSLAWLSLGQGVRLMVDEGFIKDNAQRLNEIILLVLLITAVSGTAVFCRFYLMTWLGERVSADIRLTVYNQLLKLSPAFYAKVRTGEVISRFTADSTLLQTVVGSSLSMALRSGVTVIGGLAMMGITSVKMTLLVLLAVPLVLGPVGFFGRKVRTLARESQDRVADLGAYVDETLHEIHTVQAYGHEDKDRSLFNGRVEDVMTAASGRIRYRAMLISSVMFLSIAAIASVTWVGAHDVMSGKMTGGELSAFMFYAVMVAGAVATISEVVGEIQRASGAAERLIELAETEVDIPAPLVPKTLPTKVRGELQLQQLNFHYPEQTQLVLSDLELTITAGERVALVGPSGAGKSTLFQLLQRFYVPSSGSIHLDGIDIAELSPKDLRAQFALVPQDSVIFATSVLENVRYGRVDASEQEVIDACIAARAHEFISEFSEGYQTYLGERGVRLSGGQKQRIAIARAILADRPILLLDEATSALDALSEQKVKLALDELMTGKTTLIIAHRLATVINADRIIVFDKGRIVASGKHQTLIQTNALYREFASLQLLTDEVSALSE

SEQ ID NO: 144558 - protein, 281 aa, Unknown
  Bacterial polypetide isolated from the Sargasso Sea
MRKRTVSSVSPTPTESLLELRDVDFGYGDRLVLSNLNLRFGRGQVVAVMGGSGCGKTTVLRLIGGLVRARRGQVLFDGADVGAQTRDGLYALRRKMGMLFQFGALFTDMSVFENVAFALREHTDLPEDLIRDLVLMKLNAVGLRGARDLMPSEVSGGMARRIALARAIALDPQLIMYDEPFAGLDPISLGITANLIRTLNQALGATSILVTHDVPESFAIADYVYFLANGGVLAQGTPDELRASTDPSVRQFIDGAPDGPFKFHYTSPPLAADFGLGGGRA

SEQ ID NO: 144559 - protein, 637 aa, Unknown
  Bacterial polypetide isolated from the Sargasso Sea
MISINQAQLIRGSKTLLDEASLTIYPGHKVGLVGANGTGKSSLLALIMGHLSLDKGEFSMPSGWQIATVAQETPALEVSALEYVLDGDKEYRQLEADLHIAQEHNDGHAIATLHGKIDAIGGYAIRARAGALLAGLGFSEAEQNNPVKSFSGGWRMRLNLAQALLCRSDLLLLDEPTNHLDLDTMYWLEGWIKSYQGTLILISHDRDFIDEIVDEIVHVENQKLNYYKGNYSAFERIRAERMAQQQVAYERQQKERAHMQSFVDRFRYKASKAKQAQSRLKALERMTELLPSQADSPFYMEFRPPEALPNPLIKMEQVAVGYGDKQILSKVHLNLVPGARIGLLGRNGAGKSTLIKLLSGQLSPMTGLYEPNPGLNIGYFAQHQIEFLRLDDTPLQHLMRLAPNAREQELRNFLGGFGFHGDMALSPVRPFSGGEKARLVLALLVWQRPNLLLLDEPTNHLDLEMRHALTMALQTFEGAMVIVSHDRHLLRLTCSDYYLVDQGQVQAFDGDLEDYHQWLLDAAKAASANSTANGDDAKPAVDKKQQKRLEAELRQKVSPLKRKQAKLETDQQKLSERLAELEHLLADSELYDQDNKAKLTSVLSERTSLTQTLEESEMQWLELQEEIDAMELELMGQ

SEQ ID NO: 144560 - protein, 284 aa, Unknown
  Bacterial polypetide isolated from the Sargasso Sea
MTGPASPRCDALLTRRINAMNQAVSPSTPAIEFRNVSCRFISPEGKATVALRDFSMSVARGEFIAIVGPTGCGKSTTLNLITGLLKPATGEVRVMGRPVDGIDPRIGFVFQADAVFPWRNVIDNVAAGPLFRGRSKDVAYTQAEEWIRKVGLDKFTKHYPHQLSGGMRKRVALAQTFINQPEILLMDEPFSALDMQTRTLMQDELLQLWSANKGSVVFVTHDLEEAIALADRVFVLTARPATLKRVYEIDLPRPRVTSEIRYDTRFIEISKDIWHDLREEVQIG

SEQ ID NO: 144561 - protein, 591 aa, Unknown
  Bacterial polypetide isolated from the Sargasso Sea
MVRNKTFWVFLVVLFALPVLPGALQVPEYWITLLNYIGLYAIVAIGLVLLTGVGGMTSFGQAAFVGIGAYATAFLTTRYGVSPWLALIVGVVLTALVALVLGAVTMRLSGHFLPLGTIAWGLALFYLFGNLELLGKYDGINGIPALNLFGITLESGRSLYFLIWAVVLAAIVSVQNLLNSRPGRAIRALRGGGVMAEAMGVNTAWMRVVIFVYAAVLAAVSGFLYAHLQRAVNPTPFGLNHGIEFLFMAVVGGVSHVWGAVLGAAILTVLQDYLQTLLPKLLGSEGNFEIIVFGVLMVLLLQYARQGVWPFVARLFPHGPRAHVPEHADPLPQRAKPAAGEPLLVVDNARKQFGGLVAVNDVSFDVKAGQIIGLIGPNGAGKSTTFNLVTGVLKPTGGTITFRGERIDGLTSRQIVRRGIGRTFQHVKLLPAMTVLENVAIGAHLRGHTGVWRSVARLNAHEEAQLLAEAAQQIRRVGLEKHMYDEAGSLALGQQRILEIARALCCDPTLLLLDEPAAGLRYQEKQQLADLLRRLKAEGMSVLLVEHDMDFVMNLTDRLVVMEFGTRIAEGLPQDVQQDPAVLEAYLGGVE

SEQ ID NO: 144562 - protein, 448 aa, Unknown
  Bacterial polypetide isolated from the Sargasso Sea
MQNSTVINAPAKPSQPLQPPRLGDEILRVEHVNRGFNKSQGELLVLDDANLSLREGEIVGLLGRSGSGKSTLLRIIAGLIEPTGGEVTYLGKPLTGPAEGVAMVFQTFALFPWLTVLQNVEAGLEALGVGARERRERALAAIDLIGLDGFENAYPRELSGGMRQRVGFARALVVDPTILLMDEPFSALDVLTAETLRTDLLDLWTQGRMPIKSVLIVTHNIEEAVFMCDRILVLSSNPGRVIAEIKVPFKHPRNRLDTDFRKLVDDIYAKMTARQTNEATKKGLELGSWMPRVSTNLMAGLIETLAMAPYHGRADMPEIARTLHLEVDELFPIAEVLQYLGFADVREGDVFLTPPARVFAEFGTQERKLMFAEHLLKHVPLAARIRKVLNERPGHRAPRVRFEQELEDFLSDEAAEETLDAVIDWGRYGEVFSYNDKTEVFSLEDVES

SEQ ID NO: 144563 - protein, 170 aa, Unknown
  Bacterial polypetide isolated from the Sargasso Sea
WHGAPVERAAIPRYRRNVAYIRQRPALLDGSVEDNLRYPYELRTYRDVRFDRARAASLAAQAGRGNDFLDKRASELSGGEAQITALIRVLQLAPEVLLLDEPTASLDPESSHAIEALVHAWFAADPARHASMWVSHDPAQAARMSVRHLTMRAGVLDESVATPVQQELGQ

SEQ ID NO: 144564 - protein, 250 aa, Unknown
  Bacterial polypetide isolated from the Sargasso Sea
MNGNAIALHGVVQRFGAQTVLDGVELSIAAGERHALIGPNGAGKSTLFGVIAGAVRPTRGRVVLHGVELRGRGPVVASRLGIGRSFQQTSAFARLTVFDNLRCAALHAPAERRRWWNRLRESASVDLAAARVLHDIGLDAHRDTLAGELSYAEQRALDLGIALASGARTLLLDEPTAGMSRAQAARMIALIRATTQGRTVLLIEHDMDAVFGFAERITVLVRGTVVATGAPDAIRTDPAVRAAYLGEGGP

SEQ ID NO: 144565 - protein, 294 aa, Unknown
  Bacterial polypetide isolated from the Sargasso Sea
VKKSYGEKRVVDGLSFHVNRGECFGLLGPNGAGKTTTLRMLLGIATPDAGTIRLCGEPIPGRARIARARVGVVPQFDNLDPDFTVRENLLVFGRYFGLSAAQCRAMVPSLLEFARLESKADARVSELSGGMKRRLTLARALVNDPDVLIMDEPTTGLDPQARHLIWERLRSLLVRGKTILLTTHFMEEAERLCHRLCVIEEGRKIAEGAPRELIASEIGCDVIEIFGPDPVALREELAPLVERTEISGETLFCYVNDPQPVHARLKQRADLRYLHRPANLEDVFLRLTGREMQD

SEQ ID NO: 144566 - protein, 316 aa, Unknown
  Bacterial polypetide isolated from the Sargasso Sea
TGTLTEGAPTVTGIISLKPGGEEALLRVTAAVEKGSQHPLGMAVVNAAREKGITVPAVSDFNAPSGKGVSGDVEGLRVIIGNELAMQENSIVIDSQKATADALRREGATVIYVATDGQLAGLIAISDPLKATTPDALKALREAGIRIVMLTGDNQLTAEAVAHKLGIEEVEAGVLPDGKKAVISRLKASGHVVAMAGDGVNDAPALAAADVGIAMGTGTDVAIESAGITLLKGDLMMLNKARQLSEITMKNIRQNLFFAFIYNALGVPVAAGLLYPAYGILLSPVIAAAAMALSSVSVIVNALRLRSIRLGKEAHE

SEQ ID NO: 144567 - protein, 107 aa, Unknown
  Bacterial polypetide isolated from the Sargasso Sea
GQRQRIAIARSLIMNPSFMILDEPTSALDRSIQIQVINLLKDIQDEYKLTYLFISHDLKVIRSMSDYIFVMKDGKIVESGLSDQVFDYPKEKYTKKLLSAALRYASD

SEQ ID NO: 144568 - protein, 232 aa, Unknown
  Bacterial polypetide isolated from the Sargasso Sea
PNGGGKSTLLKLLAGQEQQQAGEILLKGKPLTSYGKKALARELAYLPQRPLVPAGIQVEQLVQYGRHPHQGWFNQWSEEDARMVRWACERMQLGDILQQSASSLSGGQAQRVWLAMVLAQDADIILLDEPTSALDIGHQTEVMEAIHQITAEGKTVLIVIHDLATAARYCDELIALGDGGIQAMGPAREVVTKSLIDRLYQTDVDILHAPGDGAPIIVPRRRPHAFAMRQPA

SEQ ID NO: 144569 - protein, 342 aa, Unknown
  Bacterial polypetide isolated from the Sargasso Sea
NVWKIFGNNSKEALDAIQNQKISKQQALEKYNSVIGVSNVSFDVNKGEIFCVMGLSGSGKSTLVRHINRLLEPTSGKILINNQDVMQFDKENLQELRNKKIGMVFQNFALMPHRSVLDNIAMPLEIRGVSKNDRLDTANNILNIVELQGWGNKYAHELSGGMQQRVGLARALAADPEFLLMDEPFSALDPLIRRQLQTEFIKLSKKMKKTTVFITHDLDEAVRVGHRIAIMRDGAVVQIGTPEEIVVNPADEYVSDFVKGISRLKVVQAKTIMKSIKDYENKFGSLDNDSEIVNENDVLSKLIETSISKDKPIIVTDKNNQKIGAISQSDLLKAVVEGSENE

SEQ ID NO: 144570 - protein, 403 aa, Unknown
  Bacterial polypetide isolated from the Sargasso Sea
PPSDADVGPLSGGEKRRVALCRLLLSAPDLLLLDEPTNHLDAESVAWLQRFLHDFPGTVVTVTHDRYFLDEVAGWILELDRGQGIPYEGNYSGWLEQKQKRLQQEGRQDAARQRSLANELEWVRASPRGRQAKSKARLTAYEDLLKQSQENGIDNAKIVIPPGPRLGDLVIESLNLVKGYSDKLLVDDLSFKLPPGGIVGVIGPNGAGKTTLFRMITGQDSPDGGSINVGETVKLGYVDQSRDDLNPNSTVWEEISDGLEEIELGKRKMQSRAYCGMFNFRGADQQKKVGQLSGGERNRVHLAKMLKSGANLILLDEPTNDLDVDTLRALEEALLDFAGCAVVISHDRWFLDKIATHILAFEGDSSIQWFEGNYQAYEEDRRRRLGAEAEQPHRIKYKPIIRA

SEQ ID NO: 144571 - protein, 574 aa, Unknown
  Bacterial polypetide isolated from the Sargasso Sea
DRTAIDYVVDGDKHFRNLQAQLEAAEKSGDGVKIGQIHGQLEQAGAYDVEARAATILSGLGFTNVQLSAPVSDFSGGWRMRLNLAQALLCPSDLLLLDEPTNHLDLDAVIWLEKWLQRYAGTLLLISHDKAFIDNTVAQIISVEQQKLITYTGNYSSYETQRAERIRLQNIEYEKQQQKVAHLNSFITRFKAKASKAKQAQSRIKQLEKMETLLPAHMASPFSFSFAPPSALPNPLVQMEKIQLGYDDHIVLQQVKLNLVPGSRIGLLGRNGQGKSTLIKLLAGVHAPKQGIFNTAKGLKIGYFAQHQLETLDADATPLLHLQRIDEKATEQQLRDYLGGFGFNGDEALAPVAPMSGGEKARLVLALIVYQKPNLLLLDEPTNHLDLEMRHALNIALQGFEGAMVLVSHDRFLLSSVCEDFYLVDSGEVEPFKGDLDDYRDWILKQQAAEKAKANSDAKNEEQQETGAQSKPERKLDRKEEKRREAEFRQRVAPLKKAIEKHEKAMEKCGAALAEVEASLADTSLYSEDKKAQLMGLLDKQTQLKQQLEEEEMAWLDAQEQIELKREEYDNANA

SEQ ID NO: 144572 - protein, 435 aa, Unknown
  Bacterial polypetide isolated from the Sargasso Sea
MNIRNVYLFLIVVLSLGLFFEWSSEKKNLSIENHLLDAKSSVFDIGDGYVVVENEELYVVVEVQTGKMVETRIKKHLVENVDGSLGYRVFGKSNDSLFEYYFKSGFRVRDGDDYRVLAPLYEVVDMGPGFVELQDTSLGVSKKISFLEKSYEVSILDTIINQDKAQAFAALYRTDGKALDLRRDALSGGMMNNSSYEGVAISSAADPYSTSRLRSIDKDIRDESRAGWVAFIQKYFFAAIIGSDEYIYSYFAAPKDEGGLFKMGYFVENSSALSGELKHEHRLFVGPKIRKDLMDRADNLELSIDMGWFWFLSQPMVWFMDVLNGYLNNWGLTIIVFTILIKLLFWPVTAKSFRSMANLRKITPELNEIKERYKDDRQKQSQETMKLMKRHGANPLGGCLPMLIQMPFFIGFFFALREMVELRHSELVIWSDLSS

SEQ ID NO: 144573 - protein, 256 aa, Unknown
  Bacterial polypetide isolated from the Sargasso Sea
MATLVAENLTFAYAKKSKPVLNKVSVEIKPGTLTALVGPNGAGKSTLLRILQGQNTPDKGEIKIDGENLYRSRALVALMPQRSSMNWKFPITVEKLVSLGQIKYSKSRSNNPFQIKTLLAYPNSWINKCCELEATMQRVGISSLANRRLDSLSGGQQQRALLAKTLMSPAKIFLLDEPCAALDPPAKEDFLKIVRQLADTGLSLLVSSHDWGDSLNNYDQVIVLDKSVLAVGSPDQIQDKLEAINISSINENKMCD

SEQ ID NO: 144574 - protein, 199 aa, Unknown
  Bacterial polypetide isolated from the Sargasso Sea
VNDISLSLEEGVFASILGPSGSGKTTLLAIMAGLDLPSSGSVKLLDKEITSLNEDKRAQIRSKDVGFVFQSFHLLPRLSALDNVMMPLEILGAKDAKERALKALDEVGLSKRTGHVPHQLSGGEKQRVAIARAMVKAPSILFADEPTGNLDQSSTDNILELLLGINKQTKTTLVVVTHDQQLASRSDMVFELQEGKLKC

SEQ ID NO: 144575 - protein, 162 aa, Unknown
  Bacterial polypetide isolated from the Sargasso Sea
FQQFNLFPHMTALQNCIEAPIEVLGLKKEEAEERALELLELVGLTDKKDQHPSRLSGGQQQRVAIARALAMRPKVMLLDEITSALDPEVVGEVLNVIRSLNKEHNLTMIMVTHQMGFAREISDRVCFFNEGRIFEEGPPEKLFGDPQNERTKQFLHAVLDSH

SEQ ID NO: 144576 - protein, 241 aa, Unknown
  Bacterial polypetide isolated from the Sargasso Sea
VDELLSLVGLLDHSAKYPSQLSGGEQQRIALARAIATSPNLLLLDEPLSALDAKVRVHLRQELKNFHRRLGLTTVMVTHDQEEALSIADRIFVMDSGKIMQSGTPEDIYANSSNPFVANFIGMTNFIEGHVLNKNSIKVDNKQIAINSHSYKKGTKVIIAARPEYVQLAEKSSSNTFVGRVVDVEFLGSFHRIHLETSIMPDQPLIADKPMIDNFSKSIAIGDNLSFALSPNHLNVYERDN

SEQ ID NO: 144577 - protein, 184 aa, Unknown
  Bacterial polypetide isolated from the Sargasso Sea
ILGPSGSGKTTLLAIMAGLDLPSSGSVKLLDKEITSLNEDKRAQIRSKDVGFVFQSFHLLPRLSALDNVMMPLEILGAKDAKERALKALDEVGLSKRTGHVPHQLSGGEKQRVAIARAMVKAPSILFADEPTGNLDQSSTDNILELLLGINKQTKTTLVVVTHDQQLASRSDMVFELQEGKLKC

SEQ ID NO: 144578 - protein, 142 aa, Unknown
  Bacterial polypetide isolated from the Sargasso Sea
SLAPIWVRKLPKVEAREKAMEYLKRVQIDDQAHKYPAQLSGGQQQRAAIARALCMEPRIMLFDEPTSALDPEMIKEVLDVMVGLAEGGMTMLVVTHEMGFAKEVADKIIFMDEGQIVESKNPTDFFANPESERTKTFLSQIL

SEQ ID NO: 144579 - protein, 238 aa, Unknown
  Bacterial polypetide isolated from the Sargasso Sea
MENKKSEETIVKFDEVTKQYGDLIVLDKLNLEIKKNEMVSIIGPSGSGKTTVLRVLMTLEKINGGVIHLDGETLTHMNANGKLVEADEKYLRERRSKIGMVFQQFNLFPHMTALQNCVEAPVEVLGMKKEEAEKRALELLELVGLTDKKDEHPSRLSGGQQQRVAIARALAMRPKVMLLDEITSALDPEVVGEVLNVIRSLNKEHNLTMIMVTHQMGFAREISDRVCFFNEGKIFEQG

SEQ ID NO: 144580 - protein, 251 aa, Unknown
  Bacterial polypetide isolated from the Sargasso Sea
MKVWYPIKKGILKRTVNYVKAVKNLSFSLRKGESIGIVGESGSGKTSLILAILKLIKSEGEVFIENQDINQLKHNQILNIRKQIQIVFQDPFSSLSPRMNVEEIISEGLNIHYPKMDRDLKISKLKNVLNNVGLNFSETIEKYPHEFSGGQRQRIAIARALILEPKVLILDEPTSALDITVQNQIINLLNNLQNKLSLSYIFISHDMKVIRSIADKVIVLKNGIVVEENNSDEIFNNPKSEYTKKLIKSVL

SEQ ID NO: 144581 - protein, 156 aa, Unknown
  Bacterial polypetide isolated from the Sargasso Sea
FQQFNLFPHLSILDNCTLAPIWVKKMPKKDAEELALKHLERVQILDQAQKYPGQLSGGQQQRAAIARALCMEPKIMLFDEPTSALDPEMIKEVLDVMVNLAKQGMTMIVVTHEMGFAKEVADQMIFMDEGMIVEKADTKEFFANPKSDRTKLFLSQ

SEQ ID NO: 144582 - protein, 179 aa, Unknown
  Bacterial polypetide isolated from the Sargasso Sea
KFRKQIQMIFQDPYSSLNGRLKVKDIVAEPIKLHNPSISSKDIDSYIYDLLESVELTQQSAERYPHEFSGGQRQRISIARALATQPRLLVCDEPTSALDVSIQAQILNLLKDLQEQLNLTILFISHDLPVVRQMCDRIAVLKNGKICEVSMTEELFKNPNHEYTKELLTLMPKIESIYN

SEQ ID NO: 144583 - protein, 253 aa, Unknown
  Bacterial polypetide isolated from the Sargasso Sea
KISKSETQEKVQKALDMVELGNFGTRFPAQLSGGQQQRVALARALVFEPRLVLMDEPLGALDKNLREQMQYEIKHIHDRIGITVVYVTHDQSEALTMSNRIAVFNDGVVQQLSTPDILYEKPENSFVAKFIGENNTLNGVVKEINDSICEVDLDNNHGTVKALKVNVSEVGEKTQLSIRPERVSIDSSDNSLNSFTGKIEELIYLGDHIRARLDVCGNNEFIVKVPNEGSFNHKEGDTLNLSWNSEDVRALDI

SEQ ID NO: 144584 - protein, 248 aa, Unknown
  Bacterial polypetide isolated from the Sargasso Sea
MVKNLSKQFGDKTVLEDINFSMQSGEFVTFVGSSGCGKSTLLRLIAGLDHPSSGSIHVDGSTVQGPGPDRGMVFQKYSLYPWLNAADNVSFGMRLQGMTSNDVRDRTSYFLEVVGLQDAATKLPRELSGGMQQRVAIARALATNPSVLLLDEPFGALDLQIRETMQDFLLNLWQRTGLTVLLITHDVEEALVLAQRVHVLAPNPGRIIRSLDVILDKSDLDQLRLSSDFLQLRRSLATSLRQLEPTIG

SEQ ID NO: 144585 - protein, 267 aa, Unknown
  Bacterial polypetide isolated from the Sargasso Sea
KLLDFKNVTKIFDEQSIIMSKKEKDKLKALDNVSFEIYEGESFGLVGESGSGKSTIAKIITNLVKPTAGEVFFENISLHDPKNKKIKNKYRGQIQMIFQDPYSSLNPRFKVKDIIAEPIKFFQRNISSTDIGKNVNDLIDIVGMTRQSLDRYPHEFSGGQRQRISIARALATRPRLLICDEPTSALDVSIQAQVLNLLKDLQDELNLTILFISHDLPVIRQMCDRIAVLKNGLLCEIAATESLFNNPNHSYTKELLDLMPKIESIHN

SEQ ID NO: 144586 - protein, 280 aa, Unknown
  Bacterial polypetide isolated from the Sargasso Sea
VFQGFALFPHMSVSENIGYGLKIQSIENNIIKNKVSRMMDLVGLTGLSKRKPHELSGGQQQRVQLARALILENDVLLLDEPLSALDAQLRKDMCIELKRLQKTVGISFVHVTHNQEEAMSVADRIAIIADGEMIEQGTPKEIYSNPKKKFTAEFIGEKNIFNGKVLDVNKSTILVDIESDKIEVTNKNYKINKGQDVSLSIKSESIKVDKLKVSKQPQEKKAIKGKITEITFLGQFVRYLVLLNNNQEIQVRSHDEVSNINVNDDVMLSWRLEDFLVHEG

SEQ ID NO: 144587 - protein, 319 aa, Unknown
  Bacterial polypetide isolated from the Sargasso Sea
MNLVEIDDVERRFYSYPHELSGGQRQRIMIAMALVNKPQLLIADEPTTALDVTIQAQILDLMSKLKRELGMSILFITHDLGLVREFSDQVCVMQNGNIVENGNTADVFDNPIHAYTQKLLNAEPKPKTIINHKEDPLIKIENLDVFYNMPRTSFFKSNRFHAVKDTSINIYKNTTIGLVGESGSGKSTLGKAIANLTPYEGKIYYDGQDIASSSKEIKKHIQIVFQDPYGSLSPRMTIGEIVGEGLGVHFNLSKKESDLKIDKVLTDVGIELNAKNKYPHEFSGGQRQRIAIARSLIMNPNFMILDEPTSALDRSIQIQ

SEQ ID NO: 144588 - protein, 296 aa, Unknown
  Bacterial polypetide isolated from the Sargasso Sea
RRLHDVSHERCVYRRRPRGVHAAVHGPRGCRRLREQRSAHARRRCGEPRRKLPATLRHDRAAECTAGNRCGRAGGAYALDRRIQPDMDAAHARHQDAAGRPCRHLRVIAHRNRQRLHDSVFHHDDAAARRDAMARRRCDRPAQRGEKTRRLPFEAFTDVHAMKLDSVPITLTQCAKTFRGTRVLEPLDLHIGAGETLVLLGPSGCGKTTTLRMIAGLETPDTGGSIAFGDEDVTALPIEKRQVGMVFQSYALFPNLTVRGNIGYGLKIKRVPVETARQRVDEKLAMMRLTAHAEKP

SEQ ID NO: 144589 - protein, 216 aa, Unknown
  Bacterial polypetide isolated from the Sargasso Sea
LIKQPKVLLLDEPLGALDKKLREQMQIELRQLQQQIGITFLFVTHDQEEALTLSDRIAVMSEGAVMEIASPGQLYESPGSPFVADFIGSMNFFEGEILSSTDSAITVQTSTLGTVSVTNSDAQVTAGQKAWVAIRPEKMQPVFSDPGERANTTGGTMGPSAYLGDRSHFYVHLSERDDPVLVALQNLERSMEQLHKPNQPVWLQWASDAVVVLPRD

SEQ ID NO: 144590 - protein, 173 aa, Unknown
  Bacterial polypetide isolated from the Sargasso Sea
GCLDTPTNGTYFLNNKSVSELTDDELAHIRNDEIGFVFQSFHLLARNSALENVMLPLKYAGENKKNAIKRSNDALDKVGLSDRSNHSPSELSGGQQQRVAIARALVNRPSILFADEPTGNLDSKTGEDVMNLFKELNEKGQTIILITHEDSIAQQSNRIITIMDGLIKSDIRE

SEQ ID NO: 144591 - protein, 167 aa, Unknown
  Bacterial polypetide isolated from the Sargasso Sea
MKTLKIDELSKNFGTTEVLRKINLEIDEGNFLVLLGPSGCGKSTLLNIIAGLETINEGNVYIDDYNVSKVEPKDRNIAMVFQSYALYPSMNVRENMIFGLKQAKVSKEKIEEQLQKVSKFLQVDALLERKPSQLSGGQRQRVAIGRALVREPRIFLFDEPLSNLDAK

SEQ ID NO: 144592 - protein, 254 aa, Unknown
  Bacterial polypetide isolated from the Sargasso Sea
MISTENLEKHYEVGPEKVFALKGINLSIDKGEFVSIMGPSGSGKTTLMNIIGCLDSPSKGDYFLNGKLVSELNDDELAQIRNKEIGFIFQSFNLLARNSALSNVLLPTKYAGLDEKKSLSRAKEMLELVGLSDRTDHAPSELSGGQQQRVAIARALVNKPSIIFADEPTGNLDSKTGQDVMNLLKNLNNNGQTIIIITHEDNIASQSNRIIKIKDGLIEVDNKKCLNLCTLYYFLFCCQVVAVVTMLQKMNFIK

SEQ ID NO: 144593 - protein, 102 aa, Unknown
  Bacterial polypetide isolated from the Sargasso Sea
RLSRAERREKVQAMMQQVGLRPEHYQRYPHMFSGGQRQRIALARAMMLQPQVLVADEPTSALDVSIQAQVLNLFMDLQEQYQTGYVFISHNLSVVRHVADDV

SEQ ID NO: 144594 - protein, 188 aa, Unknown
  Bacterial polypetide isolated from the Sargasso Sea
MKNLIEVQNIKKNYGKKKAVKGISFNVEEDEILGLLGPNGSGKTTTIGMLLGLLQPTSGQIFINNLKLEENRIQILEMINFISPYIELPKKLTVKQNLYVYSKLYKVENIKERIEYLSEKLRIGELLNSITGELSSGQKNRVSLAKALVNEPKVLLLDEPTASLDPEVGDFVRTFLEDYKKKKKFRYF

SEQ ID NO: 144595 - protein, 182 aa, Unknown
  Bacterial polypetide isolated from the Sargasso Sea
MLRFEQVTKSYSGGFVALDRVSFHLEKGEMAFLTGHSGAGKSTLLKLISLIERPSTGKVFINGVDLSRVNKGQVPYVRRDIGMIFQNHKLLMNHSVFDNVALPLVIEGFSGKDMTKRVHAALDKVGLLDKVRCLPHTLSGGEQQRVGIARAVVNRPPLLLADEPTGNLDPDLSKDIMNVFEA

SEQ ID NO: 144596 - protein, 245 aa, Unknown
  Bacterial polypetide isolated from the Sargasso Sea
SFGGNRAVDDVSFILGKGELLALIGPNGAGKSTCFNMLYGILAPDKGSVCLDGRELIGMKPRDIWRLGVGRTFQITAVYASMSVVENVQMALISHNRKAFSAFTGAAKLYRDDAMALLDLIGMKDQADRAANILAYGDLKRLELAVALAHDPVLLLMDEPTAGMAPGERRALMKLTADIVAERGVSVLFTEHDMDVVFENAHRVLVLNRGQLLAEGSVDDVRANPAVQEVYLGGGTTFGGDGDHA

SEQ ID NO: 144597 - protein, 94 aa, Unknown
  Bacterial polypetide isolated from the Sargasso Sea
RSDHKPEQLSGGQRQRVAIARSIVMEPDVLLADEPTGNLDTSSGNEVVKLIEELNIAGLTLIVVTHDREMGERSNRLIELRDGKIINDQNQKKA

SEQ ID NO: 144598 - protein, 81 aa, Unknown
  Bacterial polypetide isolated from the Sargasso Sea
RKSKIRELSVGEAQRVAIARAIVSKPKVIFADEPTSALDDNNSEKVIKLLFTQAEKNNTTLIVSSHDSRIKKKFSNFLELD

SEQ ID NO: 144599 - protein, 191 aa, Unknown
  Bacterial polypetide isolated from the Sargasso Sea
MKTLKIEELSKNFGSTEVLKKINLEIDEGNFLVLLGPSGCGKSTLLNIIAGLETINEGDVFIDDYNVSKVEPKDRNIAMVFQSYALYPSMNVKENMIFGLKQAKTSKEKIQEQLEKVSKFLQVDQLLERKPSQLSGGQRQRVAIGRALVREPRIFLFDEPLSNLDAKLRVEMRREIKKLHQQLKTTVVYVT

SEQ ID NO: 144600 - protein, 229 aa, Unknown
  Bacterial polypetide isolated from the Sargasso Sea
MAATPTPLEVRNIKKRFGDTEVLKGLSLEAQKGDVITLIGASGSGKSTFLRCMNLLEQPDDGELYVHGEQIRFKTTKHGREPADWKQVVQMRAKLSMVFQSFNLWAHMTLLENIIEAPIHVLGKPKKEAIEHAHALLDRVGLSARANAYPAQMSGGQQQRGAIARALAMDPEVMLFDEPTSALDPELVGDVLKVMRDLANEGRTMVVVTHEMSFARDVSSKVIYLHQGL

SEQ ID NO: 144601 - protein, 112 aa, Unknown
  Bacterial polypetide isolated from the Sargasso Sea
QTKVGDQGILLSGGQRQRIAIARALLKDAPILILDEATSALDSESEKLIQKAFDRLMENRTTFVIAHRLSTIEKADRILVLSDGKIVEEGTHQDLLSQDGEYSLLYKMQFND

SEQ ID NO: 144602 - protein, 283 aa, Unknown
  Bacterial polypetide isolated from the Sargasso Sea
DNPKHAYTQKLLNAEPKTKTIINHKEDPLIKIENLDVFYNMPRTSFFKSNRFHAVKDTSINIYKNTTIGLVGESGSGKSTLGKAIANLTPYEGKIYYDGQDIASSSKEIKKHIQIVFQDPYGSLSPRMTIGEIVGEGLGVHFNLSKKESDLKIDKVLTDVGIELNAKNKYPHEFSGGQRQRIAIARSLIMNPNFMILDEPTSALDRSIQIQVINLLKDIQNEYELTYLFISHDLKVIRSMSDYIFVMKDGIIVESGLSNDVFDYPKEKYTKKLLSAALRYATD

SEQ ID NO: 144603 - protein, 37 aa, Unknown
  Bacterial polypetide isolated from the Sargasso Sea
MNNRPNQLSGGQQQRVAIARAIINNPAILLADEPTEH

SEQ ID NO: 144604 - protein, 147 aa, Unknown
  Bacterial polypetide isolated from the Sargasso Sea
MSEAIIKIANMNKWFGDFQVLKDINLEVEKNKKIVVCGPSGSGKSTLIRCINRLEEHQKGSIVVDGTELNENTKNIEQIRAEVGMVFQQFNLFPHLSILDNCTLAPIWVRKMPKVQAQELAMKQLEKVQIADQAQKFPGQLSGGQQQ

SEQ ID NO: 144605 - protein, 147 aa, Unknown
  Bacterial polypetide isolated from the Sargasso Sea
LHNPDIKSSDLDSYIYDLLESVELTQQSAIRYPHEFSGGQRQRISIARALATQPRLLVCDEPTSALDVSIQAQILNLLKDLQEQLNLTILFISHDLPVVRQMCDKIAVLKDGKLCEVSETEELFKNPKHNYTKELLKLMPKIESIYN

SEQ ID NO: 144606 - protein, 153 aa, Unknown
  Bacterial polypetide isolated from the Sargasso Sea
IFDQSLEDNIRYAKPEATDAEVFKAAKEAKIEVLIEKRSGAPVGPKGSQLSGGQKQRVALARTFLKPAPILLLDEATSALDSITEASIAKGLMKLSKNRTTIVVAHKLDLIKDADMIFVLEDGRVAESGNHKKLSKSGKLYTSLLEAQKPKNK

SEQ ID NO: 144607 - protein, 310 aa, Unknown
  Bacterial polypetide isolated from the Sargasso Sea
ALDILTAKQILELFNHLQGETLISALYISHDLGLVSQVADKVSVLKAGEIVESGPRSEVFGSPREQYTKALLGSLPNPKNWLGATEPPPKAQALISAEAITVEYGRQSRVGQLLSPKPTHRGAQDVDLKVLEGELVGLVGESGSGKSTIAKVLSGLQDFDGVIRFSKKNFVSRSKIDRNYRRNVQIVFQHPDASLNPRQRVHEILSRPLKLYDIVPPEKRAGRVEELLEKVRLPIEFADRFPHQLSGGEKQRVAIARAFAAEPKLVICDEITAALDVSVQASVADLLVKLQQQTGTACLFITHDLNLVPQ

SEQ ID NO: 144608 - protein, 191 aa, Unknown
  Bacterial polypetide isolated from the Sargasso Sea
MASKKDFVKFDKVDKSYDGKILVVKDLQLDIAEGEFITMLGPSGSGKTTCLMMLAGFETPTNGEIYLDGNAISSIPPHKRGIGMVFQNYALFPHMTVYENLAFPLRVRKIPKDEADKKIDKALSMVSLQGFAARMPGQLSGGQQQRVAVARSLVFDPQLVLMDEPLGALDKNLRESMQYEIKHIHESIGVT

SEQ ID NO: 144609 - protein, 114 aa, Unknown
  Bacterial polypetide isolated from the Sargasso Sea
LDQAQKFPGQLLGGQQQRVAIARALCMEPKIMLFDEPTSALDPEMIKEVLDVMVNLANQGMTMIVVTHEMGFAKEVADSMIFMDEGKIVEKADTKEFFANPKSERTKLFLSQIL

SEQ ID NO: 144610 - protein, 214 aa, Unknown
  Bacterial polypetide isolated from the Sargasso Sea
MADSTSQAVAELSGVSKVYGQGDLEVRALDQLDLTVRSGDYLAVMGASGSGKSTAMNILGCLDRPTGGRYRLNGIAVEQLDDDELAELRNQSLGFVFQQFHLLPHASAMDNVMLPMVYAGIPLDERKDRAASALDRVGLSQRLDNRPNQLSGGQQQRVAIARAIINHPSLLLADEPTGALDSNTTAEVLELFDELHQQGITLVMVTHEDDVAAR

SEQ ID NO: 144611 - protein, 242 aa, Unknown
  Bacterial polypetide isolated from the Sargasso Sea
MINLVELKNIKKNYGSKEAVKDLSFQIKENEVLGLLGPNGCGKTTTIGMMLGLLKPTSGEILIDNKKIEENRIEILKKINFISPYIELPKKLTVKQNLIVYGKLYNIKNLNNSIDYLVEKLRLEELLNKITGELSSGQKNRVSLAKALINSPKVLLLDEPTASLDPEVGDYIRTFLENYKKERNISILLASHNMNEVKRLCKFVLMMKDGVIIDKGSPSELIEKHGQKNLEEVFLKLSRSKK

SEQ ID NO: 144612 - protein, 176 aa, Unknown
  Bacterial polypetide isolated from the Sargasso Sea
DTSLLHRSIRDNIAYTSPEISDENVIEAAKKANAWEFIQDLEDSFGRKGLEAHVGERGVKLSGGQRQRIAIARMFLKDAPILVLDEATSALDSEVEAAIQENLFELMEGKTVIAIAHRLSTIAQLDRLVVIDAGAVIETGTHEELVRNSLIYADLWNRQSGGFLAPEEYKKKSEAA

SEQ ID NO: 144613 - protein, 196 aa, Unknown
  Bacterial polypetide isolated from the Sargasso Sea
MIIETKDLYKEYQVGSQKIKAINNIDLSVEKGEFISIMGPSGSGKTTLMNIIGCLDSPTSGSYHLNGKLVSQLSDDELANIRNEEIGFVFQSFHLLSKNSALDNVMLPLKYAGTNKVDAIERSNAVLKQVGLSDRAKHSPAELSGGQQQRVAIARALVNKPSILFADEPTGNLDSKTGADVMNLFKELNKDGQTII

SEQ ID NO: 144614 - protein, 140 aa, Unknown
  Bacterial polypetide isolated from the Sargasso Sea
MVFDNLIIRARSLSKSYGSEDVLTDFNIDIWYGSIFGILGVSGSGKTTALRLLAGFENPDQGTIEMHNKVIFDEKTNLPPEKRKIGMVFQDYALFPHLTVEKNIAFGLSKEEIKNGRLDEVIGMTNLSSYRKKFPQDISG

SEQ ID NO: 144615 - protein, 268 aa, Unknown
  Bacterial polypetide isolated from the Sargasso Sea
MAGVRFEALCKSYPGRRGGRPVDVIRSLDLMIEDGEFLVLVGPSGCGKSTLLRLLAGLELPSAGEILIGDRPVSRVRPAQRDVAMVFQSYALYPHLSVRDNLSFGLRRSRSLSPLQRLQDQLHRSARHLPPSLQVPSPRERRIETRVGEVAESLELTDLLDRLPKELSGGQKQRVALGRAMARQPKVFLMDEPLSNLDAKLRNSTRTRIVELQKQLGTTTLYVTHDQVEAMTMGHRIAVLNQGYLQQLGTPMELYRWPSNLFVAQFIG

SEQ ID NO: 144616 - protein, 291 aa, Unknown
  Bacterial polypetide isolated from the Sargasso Sea
QINNEVINEMHPSKRHTAMVFQSYALYPHMNVYDNMSFGLKIEKKTKEEIHTKVLSAAKTLKIEDLLERRPKELSGGQRQRVAIGRAITRNPKIFLFDEPLSNLDAALRAEMRVEISRLHKKIKTNMIYVTHDQVEAMTLADRIVILNNGNIEQVGTPNEIYTNPDNIFVAQFIGTPKMNIFKINSENIISNNRINILGNSISFSGINLDKKNYYLGIRPEHLTFNGNQEFNFTPKIELIENLGNEKIVYMVSENNQLCAKISSDIQINNKLGFNLKNVLLFDENGLRIRQ

SEQ ID NO: 144617 - protein, 164 aa, Unknown
  Bacterial polypetide isolated from the Sargasso Sea
MVFQQFNLFPHMTALQNCIEAPVEVLGMKKEKAEERALELLELVGLTDKKDQHPSRLSGGQQQRVAIARALAMRPKVMLLDEITSALDPEVVGEVLNVIRSLNKEHSLTMIMVTHQMGFAREISDRVCFFNEGKIFEQGPPEQLFGDPKNERTKQFLHAVLDAN

SEQ ID NO: 144618 - protein, 250 aa, Unknown
  Bacterial polypetide isolated from the Sargasso Sea
SLLRLVEPLSGEVRMAGKDVLKLPKDELRNIRSDMQMVFQDPFASLDPQMLLLDQVAEPMRNFSTMAERSIEERVEGLFERVELPKSFLRRYPHELSGGQRQRVAIARALALNPKLIIADEAVSALDVSVQAQVLNLMMELQSELELSFLFISHDMAVVERVSHDVGVMYLGRLVEIGSRQAVFSNPQHAYTKALMSAVPIVDPSKKVLEGDLKFKQIPSPIHPLDYEAEKPKYKEVTEGHFVLTSDCGY

SEQ ID NO: 144619 - protein, 318 aa, Unknown
  Bacterial polypetide isolated from the Sargasso Sea
EADFRYGLVHIRDNAESIAFYSGENPERSETERRLGEVVRNFNLLIIWRVIIDVMRRSINYAGNFFPYLIMAIPYFKGDIDYGRFIQASFAFGMVEGSLFFIVNQIEELAKFTAGIGRLEGFQSKVESISQTNPTSNQNVISDYPSILINNADLCPPGSNKTIIKNLNLSIENNQSLLVVGPSGCGKTSLLRMISGLWEPDRGVIKKPKIGELLFIPQKPYMLLGSLREQLCYPTEVKKFSDEHLTSVLHEVNLKTLLDRYPNLDIKQDWPRILSLGEQQRLAFARLLLNSPRFAVLDEATSALDINTEKKLYSLLKE

SEQ ID NO: 144620 - protein, 289 aa, Unknown
  Bacterial polypetide isolated from the Sargasso Sea
MAVVTTGAILAGNHSLDQAILPLLTILAMAAFLPVSEIAQVGRQLADTLGSTRRIYALEHEPVTIKDGLRKISSETASELSISNVGFHYPGRSQKVLENISFTIQGGQMVALVGPSGAGKTTLAQLLMRFWDPSEGTILLSGNDIREYGLEALRSKIALVAQDTYLFNSTLKENILIAKPNAGYPEMKRAIQMASLMELVETLPQGFDTKVGERGTSLSGGQRQRVAIARAFLKDAPILILDEATSHLDALSESEVRGALDKLKEDRTTIIIAHRLSTFEMQTTLSFSM

SEQ ID NO: 144621 - protein, 116 aa, Unknown
  Bacterial polypetide isolated from the Sargasso Sea
MNKKKLVKNDALIIDDLHHKYDKRECSNWILNEINLTIENGELLGLLGPSGCGKTTLLRLIAGFEYPSRGRISLNDKEISSKKKILSPEKRNIGMVFQDYALFPHFTVFGKCNFLV

SEQ ID NO: 144622 - protein, 57 aa, Unknown
  Bacterial polypetide isolated from the Sargasso Sea
EDGDIIFFVAGLDLTYAPPHKRNLGLLFQNYALFPHLTVFENVAFGLRARGMASSEV

SEQ ID NO: 144623 - protein, 105 aa, Unknown
  Bacterial polypetide isolated from the Sargasso Sea
SGGQQQRCAIARSLAMNPSIMLFDEPTSALDPEMINEVLDVMTDLANLGMTMIVVTHEMGFAKKLASKVIFMDNGMIVENNTPDNFFNYPKEDRTKTFLKQILKH

SEQ ID NO: 144624 - protein, 246 aa, Unknown
  Bacterial polypetide isolated from the Sargasso Sea
FNNALPIISVYVFAGYRLLPALQQMYSSFTQLTFVVPSLDELNNDLRNLQSLNKSLGHIRLAFNKTITLKNIHYNYPNSSIKALKNISINIPINSTIGLVGATGSGKTTLIDVILGLLEPQKGSLEIDGKVITNLNTRSWQRYIGFVPQHIYLSDDTVAANIAFGMDQKDINQGAVERASKIASLHEFIKDELPMQYQTTIGERGIRLSGGQRQRIGIARALYHDPKVLIFDEATSALDGTTEKIV

SEQ ID NO: 144625 - protein, 120 aa, Unknown
  Bacterial polypetide isolated from the Sargasso Sea
VTPHEFSGGQRQRIAIARALIMEPALLVLDEPTSALDRSVQHQILELLKALQQRRGLSYLFISHDLKVIRAICHRVLVMKDGKPVEQGDTEAIFENPQQPYTQTLIDAAFANSRKQTVAL

SEQ ID NO: 144626 - protein, 145 aa, Unknown
  Bacterial polypetide isolated from the Sargasso Sea
QTIFLSDSSIKENIAFGIPKNKIDDELVKDSARKAQISETIESWEKKYDTSVGERGVKLSGGQRQRIGIARALYNNANVLIFDEATSALDNKTEKQVMSELEDLDDNLTILMVAHRLTTLKSCDLIVELDNGKIKSIGTYSEIIN

SEQ ID NO: 144627 - protein, 175 aa, Unknown
  Bacterial polypetide isolated from the Sargasso Sea
MFQQNPMSTLNPKKTIYSTIALPLKIHKIVENNKYKTKVEELLSFVGLESNFMDRYPDTLSGGQKQRVAIARALATEPKVLILDEPTSALDVIVQSKVLNLLLDIKKKFDLTYIFITHDLSVVKNIANKVVVMNKGKIEETGNTIEIFQNPKSEYTKTLIRAIPTVTDEEDATKP

SEQ ID NO: 144628 - protein, 278 aa, Unknown
  Bacterial polypetide isolated from the Sargasso Sea
RVLPSANRITHYFSSLRQTAPLLDAIYPDLENAARFSSYESELKTARRQDAGKMVMSHELVLRNVTYRYPNAPETTLAKINMTVSKGETVAFVGRTGAGKSTLIDIVLGLLPPTEGEILIDGQAVEYGPNIWKGRIGYVPQNIYLMDDTLRRNIAIGIPDHEIDEGRLQTVMRLAHLDDVLASLNEGLDSEIGERGMRLSGGQRQRIGIARALYNDPEVLVLDEATSALDSSTERDIANAIEQLSGSKTVFVIAHRLGTVRRCDKLFYLEEGTITASG

SEQ ID NO: 144629 - protein, 266 aa, Unknown
  Bacterial polypetide isolated from the Sargasso Sea
FNLLKEKNNIDDSGSENLKKENSEIIFKNIFFGYEKKRTIIKNISFTIPEGKSLAIVGPTGAGKSTISKLLFRFYDPDSGEIIINKKNIKKYKQNSLRQMIGVVPQDTVLFNDTIFYNISYGLIDSSEEDVINAAKIAGIHNFIESIPNKYNTIVGERGLKLSGGEKQRVSIARAVLKNPSIFFFDEATSALDTNTEKEINKNLNKISQGKTTLIIAHRLSSVSNADKIIVIDKGNIIEEGDHFSLLKKNGLYALMWNKQKHEINH

SEQ ID NO: 144630 - protein, 182 aa, Unknown
  Bacterial polypetide isolated from the Sargasso Sea
MASVVVENLTKEFGEVKAVNDINLRVNDGEFLVLLGPSGCGKSTLLRMISGLEFPTYGKILIGDNDVTRTIPKDRNISMVFQNYALYPHMTIGENIKFPLESRGYNKSEINEKVEWASTLLKISDLLDRKPRETSGGQRQRTALARALVRDPDAFLMDEPLSNLDAKLRHSAREEIRQFQNQ

SEQ ID NO: 144631 - protein, 134 aa, Unknown
  Bacterial polypetide isolated from the Sargasso Sea
KTPKKKAEELAMKQLEQVQIADQAAKFPGQLSGGQQQRAALARALCMEPKIMLFDEPTSALDPEMIKEVLDAMVNLAKAGMTMIVVTHEMGFAKEVADEVVFMDEGMIVERAKTKDFFANPKNERTKLFLSQIL

SEQ ID NO: 144632 - protein, 252 aa, Unknown
  Bacterial polypetide isolated from the Sargasso Sea
MSLSKIKNIPFGKNIIELKNISLSFGGVKALTEVSFEVKRGEVFAIIGPNGAGKSSMLNVINGFYKPTSGKINFAGQERLQMEPEFAAKSGIARTFQNIALFKGMSTLDNLMTGRLLKQKQNLFMQALYIGPAEKEETFHREKVERVIDFLDLQSIRRTPVGSLPYGLQKRVELGRALAMEPEILLLDEPMAGMNVEEKQDMSRFVLTANHELKTTIVLIEHDMSVVMDISDRIVVLDYGKKIGSSKPEEIR

SEQ ID NO: 144633 - protein, 133 aa, Unknown
  Bacterial polypetide isolated from the Sargasso Sea
MFLEVSQLEVRYAGRAQAAVQGVTLSLKAGDIGVLIGPSGCGKTTLLRAVAGLEPVTGGEIRLTKSVVSSATLSVPPELRRIGMVFQDYALFPHLSVGRNVAFGIHQLPRAEQAARVAEVLKLVGLEGSEHRY

SEQ ID NO: 144634 - protein, 263 aa, Unknown
  Bacterial polypetide isolated from the Sargasso Sea
MENKNSDEIIVKFEDVTKQYGDLVVLDKLNLEIKKNEMVSIIGPSGSGKTTVLRVLMTLEKINGGVIHLDGEPLTHMNSEGKLTVANEKYLRDRRSKIGMVFQQFNLFPHMTALQNCIEAPVEVLGMKKEEAEERALELLELVGLTDKKDQHPSRLSGGQQQRVAIARALAMRPKVMLLDEITSALDPEVVGEVLNVIRSLNKEHNLTMIMVTHQMGFAREISDRVCFFNEGKIFEQGPPEKLFGNPQNERTKQFLHAVLDAN

SEQ ID NO: 144635 - protein, 164 aa, Unknown
  Bacterial polypetide isolated from the Sargasso Sea
GVVPQDSLLFDGTVQANIALTRPDASFEEITGAAQVACAHDFIQSLPGGYSSSVGERGSALSGGQRQRMALARMVLKRPRLLVLDEATSALDVDTEQQVTRNLAEVYRGSTVLWITHRLGSLRHADRILVMHQGSLVEQGTHSELMQLGGRYATLYRQQEAGLA

SEQ ID NO: 144636 - protein, 221 aa, Unknown
  Bacterial polypetide isolated from the Sargasso Sea
MSHTLVTFKNVCKNFEKNPAVKDINFDIGKGEFLAIMGPSGCGKTTTLRMLAGLEIPSSGEIRFNNRLMNTVKPHERDTPLVWQSLALFPFLNVQENVEFGLKMRGLSPKIRNKKSLDWLEKLEVKELAKRDISTLSGGQKQRVALARSLVMEPEILLLDEPLSALDAHLVIRMQAVLTQLQKELNITFVYVTHSQSEAFAMADRVIIMNVGGVSQIGTPK

SEQ ID NO: 144637 - protein, 262 aa, Unknown
  Bacterial polypetide isolated from the Sargasso Sea
MDKNSQEIIVKFDEVTKQYGDLVVLDKLNLNIKKNEMVSIIGPSGSGKTTVLRVLMTLEKINGGVIHLDGEPLTHMDTNGKLIEANEKYLRDRRSKIGMVFQQFNLFPHMTALQNCIEAPVEVLGMKKEEAEERALELLELVGLTDKKDQHPSRLSGGQQQRVAIARALAMRPKVMLLDEITSALDPEVVGEVLNVIRSLNKEHSLTMIMVTHQMGFAREISDRVCFFNEGKIFEQGPPEQLFGDPKNERTKQFLHAVLDAN

SEQ ID NO: 144638 - protein, 293 aa, Unknown
  Bacterial polypetide isolated from the Sargasso Sea
LKGIDFAYGNNTVYTGMECEVERGQRTVLVGPNGAGKSTLLKLMAGVLEPQAGRRELGHNVKAGYFSQNRVDVLNPAATVLEEATDCPQALTEERARTILGTFLFRGDDVFKRVSVLSGGEKSRLALVKLLLDPPNLLLMDEPTTHLDMASIDALIAALELYEGTLVFISHDVHFIRAISAHTIHVNAGKLRNFPGGYDYYLQKTRAETARAGLTLGSNGAPVKAAPAKVKVDRRAQKRAEAETRQARSRERRGVEKEVKRLEGEIQKAEQKITELTTELEKPETYENPARAM

SEQ ID NO: 144639 - protein, 74 aa, Unknown
  Bacterial polypetide isolated from the Sargasso Sea
MQCPADTTTTWRGGEQAVGGQKQRVAIARAIIRKPKILLLDEATSALDNESEKIVQESLDALLADNKNAGRTMV

SEQ ID NO: 144640 - protein, 182 aa, Unknown
  Bacterial polypetide isolated from the Sargasso Sea
QSGSGKSTFLNMIGLLDSITDGSIEIEGKDVSELSDNELSKFRGEKIGFIFQSFFLLPGLTAQENVAEGLLYQGISRSERLEKAKEVLEQVGLGDRLTHLPKELSGGQQQRVAIARALVQDPAFVLADEPTGNLDKESGINILNILKDLNNQGKTVIMITHNQEHARMFKKVIELVDGKIVN

SEQ ID NO: 144641 - protein, 162 aa, Unknown
  Bacterial polypetide isolated from the Sargasso Sea
MIKINSLSKEYVMGENKLLALNQVSIEILSGEFVSIMGSSGSGKSTLMNIIGCLDEPSSGEYFFKDNKISGYSSNKLAELRNKDIGFIFQNFNLLPRLNALENVILPLLYSGKTLKVRNKLALEALESVGLSDRIYHKPNQLSGGQQQRVSIARAIAGSPKI

SEQ ID NO: 144642 - protein, 305 aa, Unknown
  Bacterial polypetide isolated from the Sargasso Sea
DVSIQSQILDLIKRLTKERNLAVILITHDMGVISETTSRVAVMKNGDLVEIGTTKEILTQPKEIYTRALISSVPPTNKKINRFKIIEKENKNEGQTNIKILNRWTKKEIIEQDLVKVKNLSKTFDDNFFTESSKNSVMAVDDVSFAIKEGESFGLVGESGSGKSTIAKMIVNLYSPSAGDIDFDNVCITKIKNNKEMMKFRKQIQMIFQDPYSSLNGRLKVKDIVSEPIKLHNPSISSKDLDNYIYDLLESVELTQKSAERYPHEFSGGQRQRISIARALATQPRLLVCDEPTSALDVSIQAQIL

SEQ ID NO: 144643 - protein, 224 aa, Unknown
  Bacterial polypetide isolated from the Sargasso Sea
EISQQGLVAVIGPNGAGKSTMIKAVLGLTPTLAGNIRAFGKPVKHARKRIAYVPQRTSVDWDFPASAEDVVAMGLYGKIGWCRPVRRRHRGSAREHLDRVGMADFASRQIGQLSGGQQQRVFLARALAQEADLYLMDEPFAGVDAATERAIVDVMRDVRSNGATLVCVHHDLQTVGDYFDSAVILNIRRIAAGPVTDVFTEENLRAAYGGRLATTEIRAIADSA

SEQ ID NO: 144644 - protein, 282 aa, Unknown
  Bacterial polypetide isolated from the Sargasso Sea
RITSGEILIEGKEVSNIPASERGLAMVFQSYALYPHMSVYKNMAFSLENLKIDKKTIEQKVNSAAKLLQIEDYLQRKPKALSGGQRQRVAIGRAIVRDPKAFLFDEPLSNLDAELRVTMRKELSALHEKIGGTMIYVTHDQVEAMTLADQIVVLNEGYVAQAGAPLDLYNNPSDIFVAGFIGSPKMNFINVKSSMENNGISLKSKSLNIQSFIEVEVNKDFTLGIRPEHIYISKKDESDLEVTVDYSEQLGSETYFYCNTNDSSQLIVHQTGQYKVTKGDKL

SEQ ID NO: 144645 - protein, 202 aa, Unknown
  Bacterial polypetide isolated from the Sargasso Sea
MENPHDGQILVAGEELKLKRARQGELVAADNRQINRLRARVGFVFQSFNLWPHMSILDNIIEAPRRVLGQSKAEAVEAAEAFLAKVGIADKRHAFPAQLSGGQQQRAAIARTLAMQPRVILFDEPTSALDPEMVQEVLSVIRTLADEGRTMLLVTHELGFARQVSSQVVFLHQGQVEEIGTPDQVFDNPGSERCRQFMSSHK

SEQ ID NO: 144646 - protein, 140 aa, Unknown
  Bacterial polypetide isolated from the Sargasso Sea
MQLNSTEISELIKKRIEQFEVVSEARNEGTIVAVTDGIIRINGLADCMQGEMIELPGNRYAIALNLERNSVGAVVMGPYADLREGTKVKSTGRILEVPVGPGLLGRVVNTLGEPIDGKGPIDAAGFAPVEKIAPGVIDRR

SEQ ID NO: 144647 - protein, 266 aa, Unknown
  Bacterial polypetide isolated from the Sargasso Sea
PKINIKLKEDPLIEIKNLDVFYEMPSINFFKKNRFHAVKDTSLNIYKNTTIGLVGESGSGKSTLGKAIANLTKYEGNIFFDGLEISSSSKQIKKHIQIVFQDPYGSLSPRMTIDEIVGEGLSVHFKLSKKESQFKIDKVLSDVGIELSAKNKYPHEFSGGQRQRIAIARSLIISPAFMILDEPTSALDRSIQIQVINLLKNIQDEYKLTYLFISHDLKVIRSMSDYIFVMKDGKIVESGIANNVFEYPKEKYTKKLLSAALRYASE

SEQ ID NO: 144648 - protein, 267 aa, Unknown
  Bacterial polypetide isolated from the Sargasso Sea
VNVHLLEQETEIVDKPNAKPINVTKGHVKFSNVHFSYDSKRPILNDLSVEIQGGAKVAIVGSSGSGKSTIGRLLFRFYDVSGGSVSIDGQDIKNITQSSLHSAIGVVPQDTVLFNDSIFYNIAYGKDNATKAEVEEAARAAQIHEFIASLPDGYGTTVGERGLKLSGGEKQRVGIARTLLKDPPILLLDEATSALDSETEREINDALENAGKGRTVISIAHRLSTISDADKIVVLERGEIVEIGKHSSLLKNRSRYFELWNMQLKAG

SEQ ID NO: 144649 - protein, 223 aa, Unknown
  Bacterial polypetide isolated from the Sargasso Sea
MTLRDIEVRRGERVTLALDELHLEGDRFTVILGHNGSGKSTLMNLLARQLQPTRGSLQLDGRTLAGFSARDFAQRVAFLPQHLPDVAGLTVRELVRLGRFPWRGLLGRWRAEDHAAVDQALAQTDVAHYADHLADSLSGGERQRAWIAMLLAQQSPLLLLDEPTSALDLAHQYELMGLLRQLNRDSGRGIVAILHDINLTARHADTGDRPQTGADLLRRQPGR

SEQ ID NO: 144650 - protein, 207 aa, Unknown
  Bacterial polypetide isolated from the Sargasso Sea
STLLRCINWLEEPDRGSIHIAGQRIGVDVQGKRMNNRDLAAIRAKTGMVFQSFNLWPHLNVLQNVMEAPMQVKKMRKDEARAIAQTLLEKVGMEQKAEAFPYTLSGGQKQRVAIARALAMSPEVILFDEPTSALDPERVGEVLTVMKNLSSEGYTMIVVTHEMEFARAVSDQVVFLEKGLLIEKSAPEKFFTNPETERVRKFLELSA

SEQ ID NO: 144651 - protein, 86 aa, Unknown
  Bacterial polypetide isolated from the Sargasso Sea
LVGEPVHALSIGQQQRVAIARALIGHPEIIIADEPTSALDNTRKKQFIELLIEHCKASKSTLIFVSHDLELKPYFSSTYHINDIIH

SEQ ID NO: 144652 - protein, 223 aa, Unknown
  Bacterial polypetide isolated from the Sargasso Sea
VKDVSFEVNQNEIIGILGPNGCGKTTTIGMILGLLKPSKGKVLINGVEIENKRVNLLNQLNFISPYIELPKKLTVRQNLEVYGRLYDVNKHKARIEYLCEKLRLYEFIDKLTGELSSGQKNRVSLAKSVINNPKVLLLDEPTASLDPETGDFVRSFLEEYQQENKTSILLASHNMAEVERLCSSVFMMNKGSIIDEGRPEELIKKHGRKNMEEVFLKLTREKE

SEQ ID NO: 144653 - protein, 101 aa, Unknown
  Bacterial polypetide isolated from the Sargasso Sea
LDKVGLEDRVEHKPNELSGGQQQRVAIARALVNNPSIIFADEPTGNLDTKTGEEIMSLFKELHKNGQTIIVITHETDIADQTDRVINIKDGLIESDMRRNV

SEQ ID NO: 144654 - protein, 216 aa, Unknown
  Bacterial polypetide isolated from the Sargasso Sea
GESGSGKSTLGKALAGLIDFKGSVLFEGRNIGQLNSRESKLIKKDIQIVFQDPYGSLSPRMTIGEIVGEGLDVHFNLKKNQKDERIAESLKSVEINPDDRFKYPHEFSGGQRQRIAIARSLILNPSFMILDEPTSALDRSIQMQIIELLKNIQTDFKLTYLFISHDLKVVQSMSDYIFVMQNGYIVESGPAKQVFSNPEEVYTDKLLNAALRYSTI

SEQ ID NO: 144655 - protein, 249 aa, Unknown
  Bacterial polypetide isolated from the Sargasso Sea
MVELKFKDKIEFKKVIFRYPSSKKNIIEIDNLEINKKKFIGITGGTGAGKSTFIDLLMGLIDPDYGSITIDDKKINDTWKKNINYIPQSIFLADDTILNNIALGIRPEEINLDKVKKACNIADLKDFIENDLPDKYKTLVGENGIRLSGGQRQRVGIARAIYNDANEILIMDESTNSLDLLTENKIINKILEANIFKTVFFITHRIQSLKKSEMIVFFETGKISAFSSYDEAKKLNINFKEFDRISYEK

SEQ ID NO: 144656 - protein, 244 aa, Unknown
  Bacterial polypetide isolated from the Sargasso Sea
MDKNSQEIIVKFDEVTKQYGDLVVLDKLNLNIKKNEMVSIIGPSGSGKTTVLRVLMTLEKINGGVIHLDGEPLTHMDTNGTLVEANEKYLRDRRSKIGMVFQQFNLFPHMTALQNCIEAPVEVLGMKKEEAEERALELLELVGLTDKKDQHPSRLSGGQQQRVAIARALAMRPKVMLLDEITSALDPEVVGEVLNVIRSLNKEHSLTMIMVTHQMGFAREISDRVCFFNEGKIFEQGPPEQLFG

SEQ ID NO: 144657 - protein, 267 aa, Unknown
  Bacterial polypetide isolated from the Sargasso Sea
MLGDARQSDVRLEARNLSMGYAQTRIIEDLDLLIPSGQVSAIVGPNGCGKSTLLAGLARLHKPISGSVLLDGKAIGSLPSREVARRLALLPQDASAPDGLTVSELIRFGRQPHQSLLRQWSEEDQAIVDAALVAADLVELADRPLESMSGGQRQRAWIAMAIAQATPLLLLDEPTSALDLGHQIEVFELIRQLAAAGKTIVMVVHDLSSACRYADHLIAMHQGRIVASGRPDEIVTSALVERLYGVRCTLLRDPMSGTPVIAGVSRL

SEQ ID NO: 144658 - protein, 257 aa, Unknown
  Bacterial polypetide isolated from the Sargasso Sea
MSKIEFRNINKSFGENKVINNFNININSGEFVVLVGPSGCGKSTLLRMVSGLETIDKGEILLNDKILNDLIPSKREIAMVFQSYALYPHMNVYENMSFGLKMENKNKNQIDKKVKEAAKMLQIEDLLERKPRELSGGQKQRVAIGRAITRNPKIFLFDEPLSNLDAALRSEMRVEISKLHKKINTNMIYVTHDQVEAMTLADRIVILNKGNIEQFSTPNEVYSDPNNVFVAEFIGTPKMNIIKLEKKYIKSNIINFF

SEQ ID NO: 144659 - protein, 233 aa, Unknown
  Bacterial polypetide isolated from the Sargasso Sea
MSQKDSFVKFEKVDKSYDGEILVVKDLNLDVPKGEFLTMLGPSGSGKTTVLMMLAGFETPTNGEIYLDGNPISSIPPNKRGIGMVFQNYALFPHMTVKENLAFPLEVRKMKQSEIDKKVSNALAMVELQDFGNRMPLQLSGGQQQRVALARSLVFEPRLVLMDEPLGALDKNLREQMQYEIKHIHEKIGITVVYVTHDKSEALTMSNRIAVFNDGKISTISSADVLYEKPIVL

SEQ ID NO: 144660 - protein, 142 aa, Unknown
  Bacterial polypetide isolated from the Sargasso Sea
TLAPIWVKKLPKKEAEEVAMKNLTRVQIDDQALKFPGQLSGGQQQRAAIARALCMEPKIMLFDEPTSALDPEMIKEVLDVMVDLAKGGMTMIVVTHEMGFAKEVADYMIFMDEGKIVERAKTKEFFENPKSDRTKLFLSQIL

SEQ ID NO: 144661 - protein, 140 aa, Unknown
  Bacterial polypetide isolated from the Sargasso Sea
VLGMKKEEAEERALELLELVGLTDKKDQHPSRLSGGQQQRVAIARALAMRPKVMLLDEITSALDPEVVGEVLNVIRSLNKEHNLTMIMVTHQMGFAREISDRVCFFNEGKIFEQGPPEELFGDPKNERTKQFLHAVLDAH

SEQ ID NO: 144662 - protein, 144 aa, Unknown
  Bacterial polypetide isolated from the Sargasso Sea
MAQVELKNVDKAFGQTKVIKDVDLSIEKGEFVVFVGPSGCGKSTLLRLIAGLESLSDGKIIIADRPVMDLPPSERGIAMVFQSYALYPHMSVFQNMAFSLSLQKFSKDQIRTRVEAAAKILQMEHLLDRRPAALSGGQRQRVAI

SEQ ID NO: 144663 - protein, 241 aa, Unknown
  Bacterial polypetide isolated from the Sargasso Sea
MEKKSSDIIVNFSEVTKQYGDLVVLDKLNLEIKKNEMVSIIGPSGSGKTTVLRVLMTLEKINQGVIYLDNEPLTHMDSNGQLIEANEKYLRERRSKIGMVFQQFNLFPHMTALQNCIEAPIEVLGMKKEEAEQRALDLLELVGLTDKKDEHPSRLSGGQQQRVAIARALAMRPKVMLLDEITSALDPEVVGEVLNVIRSLNKEHNLTMIMVTHQMGFAREISDRVCFFNEGKIFEQGPPEQ

SEQ ID NO: 144664 - protein, 178 aa, Unknown
  Bacterial polypetide isolated from the Sargasso Sea
WREIELKSLEQINFISPYIELPKKLTVKQNLTVYGKLYKIHNINERIEFLSEKLRLGGLLNGITGELSSGQKNRVSLAKALINEPKVLLLDEPTASLDPEVGDFVRSFLEDYKKEKKISILLASHNMNEVTRLCKSILMMKEGIIIDKGNPEELINKHGRKNLEEVFLKLSRSKNELN

SEQ ID NO: 144665 - protein, 208 aa, Unknown
  Bacterial polypetide isolated from the Sargasso Sea
ILLLDEPLSALDRKLRQSMQLELKNIQNELGIAFIFVTHDQEEALTMSDKIIVMNQGKIIQKGTPTQIYDNPSSKFTAQFIGESNFFEGKIININEKITIKSNCSNTIYLKNLDKYKFEIDKNVTILLRPEEFSLSPYETNNECFIEGNVEQIFFLGTDFKILIRISNEKVIHCSLRDSTRYEIKKFKSGAKVKLFYDPMNIKVLNNE

SEQ ID NO: 144666 - protein, 217 aa, Unknown
  Bacterial polypetide isolated from the Sargasso Sea
AIYLLGLIKNSSGQISFLDKDINHYLKEERINFRKNIQMIFQDPYGSLNPRKTIGSTLSLALKIHFKLKDEVLKKKVFELLNMVELSPPKDFFDRHPHELSGGQQQRVAIARAISTKPKLIISDEAVASLDMSIRSDILKLLKKINKETKVSMIMISHDLSVLRNMCSRIAIMHLGKIVEIGNKKEIFDNPKKNYTKSLISATLEIPNKERKVNYEK

SEQ ID NO: 144667 - protein, 153 aa, Unknown
  Bacterial polypetide isolated from the Sargasso Sea
MIEFNNISVTYPGGVQALNNVTLDIEEGDFVIIVGMSGAGKSTLLRTVNNLVKPTEGEVIVDSRNVTTASKKELKEIRSDIGMIFQTFNLVNRSSVLKNVLTGRLSQVSTLRSVFGLWPKEDKDIAFESLNKVEILEKAYVRGSNLSGGQQQR

SEQ ID NO: 144668 - protein, 263 aa, Unknown
  Bacterial polypetide isolated from the Sargasso Sea
PLKVRKMGQAEVEERVQRALDMVQLSDFGGRRPAQLSGGQQQRVAVARALVFGPKLVLMDEPLGALDKQLREQMQYEIKHIHENLGITVVYVTHDQSEALTMSNRIAVFNDGVIQQLAPPAELYERPENSFVAQFIGENNKLTGIVIAQEEKSCLVELNSGERVNALPVATDGAGTATMLSLRPERVALNPAEGECDTTVFGKVEELIYLGDHIRTRMSVCGRDDFIVKVPNASEPSGLTPGIEIPLGWRREDCRALDLPAEG

SEQ ID NO: 144669 - protein, 185 aa, Unknown
  Bacterial polypetide isolated from the Sargasso Sea
IFINNLKLEENRIEILEMINFISPYIELPKKLTVKQNLYVYSKLYKVQNIKERIEYLSEKLRISELLNSITGELSSGQKNRVSLAKALVNEPKVLLLDEPTASLDPEVGDFVRSFLEEYKKEKKISILLASHNMNEVTRLCKSVLMMKNGEIIDQGKPEDLITKHGRTNLEEVFLKLSRSKSEFN

SEQ ID NO: 144670 - protein, 246 aa, Unknown
  Bacterial polypetide isolated from the Sargasso Sea
KMKNLIEVKNIKKNYGKKEAVKGISFNVEEDEILGLLGPNGSGKTTTIGMLLGLLKPTSGQIFINNLKLEENRIKILEMINFISPYIELPKKLTVRQNLYVYSKLYKVKNIKERIEYLSEKLRIGELLNSITGELSSGQKNRVSLAKALVNEPKVLLLDEPTASLDPEVGDFVRTFLEEYKKEKKISILLASHNMNEVTRLCKSVLMMKNGEIIDQGKPEDLITKHGRTNLEEVFLKLSRSKSEFN

SEQ ID NO: 144671 - protein, 109 aa, Unknown
  Bacterial polypetide isolated from the Sargasso Sea
LGERGVRLSGGQRQRISIARAILSNPSVLLLDEATSALDAESERQVQQALDNAAQNRTTLVIAHRLATVLAADRIVVLEAGRIVAQGTHTELLQSSELYARLAALQFSH

SEQ ID NO: 144672 - protein, 207 aa, Unknown
  Bacterial polypetide isolated from the Sargasso Sea
ARLGDATLSGVPPWRQQAQVAYLPQQLPQAVSLLAYESLLAAARARCPQLASHELTARVEAILQRLGIEHLALQRMDRLSGGQRQLLGLAQALVGEPQLLLLDEPTSALDLHWQLRVLDCVAERCRTERAIALVACHDLNLALRFCTHLLLLAPGGAYRFGAPAEVLDAAWLRRAYAIEARIEHCSLGQPLVLADSPLLKEAPPHAQ

SEQ ID NO: 144673 - protein, 254 aa, Unknown
  Bacterial polypetide isolated from the Sargasso Sea
MGHGNAPVSAAPSLYCRGSAAFGAVPVFDAIELEIAAGQWTCLLGSSGVGKSTILKLFAGLGDKVTFIGNLGASDGQPDGRVAMMAQSDLLLPWLSVSQNVCLGATLRGEARDDDRVAEVLNRVELSEKSESKPGQLSGGQRQRVALARTLMEDRPIVLLDEPFSALDARTRAQMQELAAEVLVGRTVLLVTHDPAEAARLGHVIKIMSANGIEDVVPPAGAVPRRFDADDVLRVQAGLLGRLREDDACVQANI

SEQ ID NO: 144674 - protein, 245 aa, Unknown
  Bacterial polypetide isolated from the Sargasso Sea
FEALNFKINPGEKVGLVCRSGSVKSSIVNLLLRLYDLDDGQILIDDNDISQVSQDSLRSNIAVVTQDTALLHRSIKDNILYGNPNADDEELFKAAKQAEAYDFILDLEDKDGRKGFDAYVGERGVRLSGGQRQRIAIARVILKNAPILVLDEATSALDSEVESAIQTQLTNILENRTSLVIAHRLSTINKLDRLIVMDQGKIIEVGTHNELIKNKGHYSKLWSLQSGGFLPTADDPKLRKKTNII

SEQ ID NO: 144675 - protein, 221 aa, Unknown
  Bacterial polypetide isolated from the Sargasso Sea
MQILLSAKNISKTFQGKRVLDNINIEIKKAEIVAISGASGAGKTTLLNILSTLDKPDNSDISSLFIDDEEVFNLGKNDLANLRNQKIGFVFQFHELIPELNVLENVCLPGWINKDNNVKNKAEELLKYFGLKDFANKKPLTLSGGEKQRVAIARSLINNPKIIFADEPTGNLDSKNSKILFDLFFKLRDDYNCSVVIVTHDENSANICDRKLLIVDGKIKN

SEQ ID NO: 144676 - protein, 258 aa, Unknown
  Bacterial polypetide isolated from the Sargasso Sea
RWLQFLPVSEIAQVGRQLADTLGSTRRIYALEHEPVTIKDGPRKISSETTSELSISNVGFHYPGRSQKVLENVSFTIQGGQTVALVGPSGAGKTTLAQLLMRFWDPSEGAILLSGNDIREYGLEALRSKIALVAQDTYLFNSTLKENILIAKPNASYPEMKKAIQMASLTELVETLPQGFDTKVGERGTSLSGGQRQRVAIARAFLKDAPILILDEATSHLDALSESEVRGALDKLKEDRTTIIIAHRLSTIRNADNI

SEQ ID NO: 144677 - protein, 288 aa, Unknown
  Bacterial polypetide isolated from the Sargasso Sea
AYDPVKKLVNLNAQLQEGLAASERIFGVLDIKPKIVDRSDAIQLKEVTGEILIENLHFSYDGTPPILSNLSMQIPAGQTIALVGHSGSGKSTLLNLITRFFAPSSGLILLDDKDIQTVTLSSLRQNFAIVSQDVSLFNETIKANICYGNPEASDEKIVEAAKNAAAHEFITQLPNGYETEVGENGVKLSGGQRQRIVIARAMLKDAPILLLDEATSALDSESEKSVQFALQKLMNNRTTIVIAHRLSTIQSADRIYVLDEGKVAEFGKHAELLKRNGVYANLYKLPVF

SEQ ID NO: 144678 - protein, 333 aa, Unknown
  Bacterial polypetide isolated from the Sargasso Sea
AISHAKREAGYARDGMDDFFVTVHRQMRLSTTYHILIYLNNAFLVFTISALAIWLWMSSIVSTGSIAIAIAMCLRINGMSQWIMWEVSSLFENIGVVHDGMSMMAKPLEVVDHEQASTLKISSGKVDFDHVGFHYGRQGGIMEDFSLTITAGEKVGVVGRSGAGKTTLMNLLLRFYDLEKGEIRVDGQNISGVTQESLRAQIGVVTQDTSLLHRSIRDNIAYTSPEISDENVIEAAKKANAWEFIQDLEDSFGRKRLEAHVGERGVKLSGGQRQRIAIARMFLKDAPILVLDEATSALDSEVEAAIQENLFELMEGKTVIAIAHRLSTIAQLT

SEQ ID NO: 144679 - protein, 190 aa, Unknown
  Bacterial polypetide isolated from the Sargasso Sea
MNKKDAYVSFQSVQKSYDGETLVIKNLNLETERGEFLTMLGPSGSGKTTCLMMLAGFETATHGEIILDGIPINNVPPHKRNIGMVFQNYALFPHMTVNENLAFPLQVRKLKKSEIEDRVKKALDMVQLGSFGSRRPMQLSGGQQQRVAVARALVFEPKLVLMDEPLGALDKQLREQMQYEIKHIHENLEV

SEQ ID NO: 144680 - protein, 281 aa, Unknown
  Bacterial polypetide isolated from the Sargasso Sea
NIKILNRWTKKEIINQDLIQIKNLSKTFDDSFFTESSKNAVMAVDDVSFNIKEGQSFGLVGESGSGKSTIAKMIVNLFRPSSGDIYFDNVCITKIKSNKEMMKFRKQIQMIFQDPYSSLNGRLKVKDIVAEPIKLHNPSISSKDLNDYIYDLLESVELSQQSADRYPHEFSGGQRQRISIARALATQPRLLVCDEPTSALDVSIQAQILNLLKDLQDQLNLTILFISHDLPVVRQMCDRIAVLKNGKLCEVSMTEELFKNPSHDYTKELLTLMPKIESIYN

SEQ ID NO: 144681 - protein, 221 aa, Unknown
  Bacterial polypetide isolated from the Sargasso Sea
QRQRVAIGRAITRKPKVFLFDEPLSNLDAALRVQMRVELAKLHDQLNATMIYVTHDQTEAMTLADDIVVLDQGIVSQKGSPLKLYNEPENLFVGGFIGSPKMNFINTKVISSNSSSTEVEISGQGKIIVPKTSDKVSPGDSIKIGIRPEHILINTAEKCWESKVFVIEKLGSSTFLYLEKEGEPLVVQTDGASKVNVGDNLSLSFDLNKCHLFDSNNLAFK

SEQ ID NO: 144682 - protein, 246 aa, Unknown
  Bacterial polypetide isolated from the Sargasso Sea
IDGISIHDYKLSHLRRYISIVNQSPTLFNDTIEKNIAYGESDIDQDKLIEAAEMSGCNEFISKLPEGYKSEIGDDGVLLSGGQRQRIAIARAFYKDSPIIILDEATSALDNESELIVQEAIEKLINNRTTIVIAHRLSTIENADKILVLDQGSVAESGTHSILLDKDGIYKSLYQNKFNDSDEIDKSSRGIARQEHLPTFTEEPVEQGYLIDAWYRKSFWLYLLTPLTFLFTSFIKFRKKSYIKNS

SEQ ID NO: 144683 - protein, 300 aa, Unknown
  Bacterial polypetide isolated from the Sargasso Sea
VFQSYALYPTMSVRENIEFGLKIRKMPQADIDAEVARVAKLLQIEHLLNRKPGQLSGGQQQRVAMGRALARRPKIYLFDEPLSNLDAKLRVEMRTEMKLMHQRLKTTTVYVTHDQIEAMTLGDKVAVMKDGIIQQFGTPKEIYNDPANLFVASFIGSPPMNFVPMRLKRQNGGLVALLDSGQARCELPLGVNDAGLEDRDVILGLRPEQIVLAAGEGNGSSSIRAEVQVTEPTGPDTLVFVQLNDTKVCCRLAPDVAPQVGETLTLQFDPAKVLLFDAKTGERLGAVASLPAQGHADNVT

SEQ ID NO: 144684 - protein, 262 aa, Unknown
  Bacterial polypetide isolated from the Sargasso Sea
EVTKIFDDNSLSSGFSFISNKSLNDKIVKAVDNVSFELFEGETLGLVGESGSGKSTIAKIITGLIAPNKGDLIYNKEPLYNSNKKYQIHNSRGQIQMIFQDPYSSLNPRFKVKDIIAEPIKFFQKNISNNELLQNVYDLIDIVGMTRQSLDRYPHEFSGGQRQRISIARALATRPRLLICDEPTSALDVSIQAQILNLLKDIQDELHLTMLFISHDLPVIRQMCNRIIVLKNGAVCETKDTEELFNTPEHEYTKELIRLMPK

SEQ ID NO: 144685 - protein, 271 aa, Unknown
  Bacterial polypetide isolated from the Sargasso Sea
EIKGEIQFSKVSFAYAKSSQNILNNINLEIDIGESVAFVGKSGAGKTTLMSLLPRFYDDYEGEIKIDGVLLNEFEIKNLRSHIALVSQNITLFNDTIANNINYGSEERSLDEIKSAAQKANAHDFIEALPDGYATIAGDDGVLLSGGQRQRIAIARALLKDAPILILDEATSALDSESENYIQEALLELTKNRTTLVIAHRLSTIENSDKIVVLESGSVVEIGSHESLISQDGHYAELHKNQFKDDEEDGQRREPQINFFEENTDDLSSAS

SEQ ID NO: 144686 - protein, 164 aa, Unknown
  Bacterial polypetide isolated from the Sargasso Sea
ENRNIGLVVQERALFPFLTIIRNVMFGIKETKSKKYEIAMRLLKLFKVDKYAYNFPNEISSGEQQRVAIARAMAPNPGILLMDEPFGTLDQSLTRQLRTETRKILKDNNTTAIIVSHDFDDAISMSDKVIVIDDGQIVQSGSAKDITHISPEKSVKLGSIISNS

SEQ ID NO: 144687 - protein, 240 aa, Unknown
  Bacterial polypetide isolated from the Sargasso Sea
MAVDDVTFDIKEGQSFGLVGESGSGKSTIAKMIVNLFRPSSGDIYFDNVCITKIKSNKEMMKFRKQIQMIFQDPYSSLNGRLKVKDIVAEPIKLHNPSISSKDIDSYIYDLLESVELTQQSAERYPHEFSGGQRQRISIARALATQPRLLVCDEPTSALDVSIQAQILNLLKDLQEQLNLTILFISHDLPVVRQMCDRIAVLKNGKLCEISMTEELFKNPSHEYTKELLTLMPKIESIYN

SEQ ID NO: 144688 - protein, 171 aa, Unknown
  Bacterial polypetide isolated from the Sargasso Sea
ILVTHDQEEALTMSDFIAVMFDGKVEQIASPKELYERPSSRRVASFIGAMNFVNAVILESNGKVKVKSDLLGKFEISKKQVSGNHLNKEITLGIRPELISINPEKSNSKSLIKGEIIEISYLGETTYYKIGFSKNNLQLDVAAQNSFGTINYEIGNKVKINFDKENIVGFV

SEQ ID NO: 144689 - protein, 146 aa, Unknown
  Bacterial polypetide isolated from the Sargasso Sea
MSNDHFVRFENVDKSYDGKQLVVKGLNLDIEEGEFVTMLGPSGSGKTTCLMMLAGFETPTNGQIYLDNKVISDIPPHKRGIGMVFQNYALFPHMTVYENLAFPLRVRKIPKDEADKKVDKALSMVSLQGFEARMPMQLSGGQQQRV

SEQ ID NO: 144690 - protein, 258 aa, Unknown
  Bacterial polypetide isolated from the Sargasso Sea
MLQVQGLQVFLKQRNRRLTVVEDLNFSLGFGERLGIVGESGCGKSVTALALLNLLPSTMSMAGRIHLASRDGQTEDLNQLSEARLCEIRGKKIGMVFQEPMSALNPVQTIGHQVSESLLLHHSLSRHEADQKASRMLDRVGLPDSRFARKLYPHQLSGGQRQRVVIAIAMACGPDLLVADEPTTALDVTIQAQILRLLSELVEEEKMSLILITHDLGVISENTDRMLVMYAGRCVESGLTEDVFSKLKHPYTRGLFEA

SEQ ID NO: 144691 - protein, 148 aa, Unknown
  Bacterial polypetide isolated from the Sargasso Sea
MGAINISNVGKVYPNGTRALEDVNIEINDGEFVVLVGPSGCGKTTLLRMVAGLEDITEGEISIADNVVNEVAPKDRDIAMVFQNYALYPHMSVYDNMAFSLKLRKLSKEEIDKKVKEAAKTLEIDELLDRKPKALSGGQRQRVAMGRA

SEQ ID NO: 144692 - protein, 306 aa, Unknown
  Bacterial polypetide isolated from the Sargasso Sea
FLVLQQEISPGMLIAGSILIGRALQPVEIAVGAWKGFVDSREQYLRLVDWLANSRPDTEKMALPAIAGNISVKNVAMAAPGSRKPALSGVTFDIPAGATCMIFGSSGAGKSTLLRGILGLWPTQAGEIRIDGTEAFKCQRSELGPQLGYLPQDIELLEGSVSQNISRFGKVDPDLVIQAAEDAGIHEFILALPNGYDTELGQVGGVLSPGQRQRVALARALYARPRLVILDEPNSNLDEAGEAALGRAIQILKDNGSTVLIVSHRQNILPLTDYLLVLAGGQIVDFGGSDDVLHRLNSRFKGDTGG

SEQ ID NO: 144693 - protein, 180 aa, Unknown
  Bacterial polypetide isolated from the Sargasso Sea
MSDPIIKIQNMNKWFGDFQVLKNINLEVEANKKIVVCGPSGSGKSTLIRCINRLEEHQEGDIIVDGNELSEKTKDIEKIRAEVGMVFQQFNLFPHLSILDNCTLAPIWVKKMPKKEAQELALDQLKKVQIDDQANKFPGQLSGGQQQRCAIARALCMQPKIMLFDEPTSAIDPEMIKEVL

SEQ ID NO: 144694 - protein, 140 aa, Unknown
  Bacterial polypetide isolated from the Sargasso Sea
MDVELKAFTKSFGKVIAVNNMNLQIEHGEFLVLLGPSGCGKTTALRMIAGLETIENGELYIGGKLMNDVLPKYRDVAMVFQSYALYPHMIVEDNIGYPLKMKGIKGEEKKDAILKAAKQVQLEKFLNRYPKQLSGGQRQR

SEQ ID NO: 144695 - protein, 101 aa, Unknown
  Bacterial polypetide isolated from the Sargasso Sea
EIGDDGVLLSGGQRQRLAIARAFYKNSPIIILDEATSALDTESEELVQESLEKLISDRTTIVIAHRLSTIENADQIVVLDDGLISQQGKHSDLLEEEGIYA

SEQ ID NO: 144696 - protein, 245 aa, Unknown
  Bacterial polypetide isolated from the Sargasso Sea
MLDLRGVTVPGRQRPRLHALSLQLKPGERVALLGPSGAGKSTLLAVATGLITPPEGRVLWFGEPASRRPQLRRRQQARIGTLWQDLRLVDELSVQQNLNAGCLARWSWGQVLLNLFSAQDSQACRLALARVELDHGLLMQPLDRLSGGQRQRVAIARLLRQDAQLLLADEPLAQLDPPLARRLLQLLLELGQAPRALLLSLHRPDLLEGFDRVIGLRCGELLFDQPPASLTSADLQQLYSTHGQP

SEQ ID NO: 144697 - protein, 123 aa, Unknown
  Bacterial polypetide isolated from the Sargasso Sea
YDTFLGERGVRLSGGQRQRIAIARAILKNPPILLLDEATSALDAASERLVQKALDNAAQNRTTLVIAHRLATVQQADRIVVLEQGRIVAQGRHAELLLSSPLYAQLAALQFGEPAGLAAQGAL

SEQ ID NO: 144698 - protein, 131 aa, Unknown
  Bacterial polypetide isolated from the Sargasso Sea
RIACAHDFIMEQPQGYNSPVGERGAGLSGGQRQRMALARAVLQNPRLLILDEATSALDARTERQVCLNLFDAFRGRTVFFITHRLATVRPADMIVLMDQGAVMEVGDHTELMQRQGWYYGLHQSQHQEGVS

SEQ ID NO: 144699 - protein, 222 aa, Unknown
  Bacterial polypetide isolated from the Sargasso Sea
IIIEDYPSILIHNADLCPPGSNKTIIKNLNLSIDANQSLLVVGPSGCGKTSLLRMISGLWEPNHGLIKKPKFGELLFIPQKPYMLLGSLREQLCYPTEVKKFSDEHLNSVLHEVNLKTLVDRYPNLDIKQDWPRILSLGEQQRLAFARLLLNSPRFAVLDEATSALDIDTEKKLYSLLKERELSLVSVGHRPSLKDFHENILELNGQGDWKLVTSDKYNFKD

SEQ ID NO: 144700 - protein, 135 aa, Unknown
  Bacterial polypetide isolated from the Sargasso Sea
MKLLTNGEIYLDGNPISNIPPHKRGIGMVFQNYALFPHMTVYENLAFPLKVRKFSKDDTDKKVEKALSMVSLSGFGSRMPGQLSGGQQQRVAVARALVFDPAVVLMDEPLGALDKNLRESMQYEIKHIHESIGVT

SEQ ID NO: 144701 - protein, 150 aa, Unknown
  Bacterial polypetide isolated from the Sargasso Sea
KQAEAYDFILELEDKDGRKGFDAYVGERGVRLSGGQRQRIAIARVILKNAPILVLDEATSALDSEVESAIQTQLTNILENRTSLVIAHRLSTINKLDRLIVMDQGKIIEVGTHNELIKNKGHYSKLWSLQSGGFLPTADDPKLTKKTNII

SEQ ID NO: 144702 - protein, 268 aa, Unknown
  Bacterial polypetide isolated from the Sargasso Sea
KSTEDIFNNAKHQYTKELINSKPIRLLRNAPLDDELLKINNLHCKYLTKNSFFESNKKYFNALKNIDITLNQGETIGIVGESGSGKTTLAMAILQLLRYEGEINFLGKNLNECADSELRKIRNQFQIVFQDPYSSLSPRMTIRQILSEGIVEYENISSSKLNERCELLIKEVGLDPTMLDRYPHQFSGGQRQRIAIARALSLRPKMIIFDEPTSALDVIVQKNILDLIVSLQEKYSISYVFITHDLKVIRAISHRTYVLRDAEIVESN

SEQ ID NO: 144703 - protein, 31 aa, Unknown
  Bacterial polypetide isolated from the Sargasso Sea
MSAFVYLEQAGKFPAQLSGGQQQRVAIARSL

SEQ ID NO: 144704 - protein, 154 aa, Unknown
  Bacterial polypetide isolated from the Sargasso Sea
MTDILRFEDVGLRYGLGPEILQDISFGLQEGSFHFLMGPSGAGKSSLLKLMYLALKPTRGLIHIFGEEISTINRKRAPSLRRNIGVVYQEFRLIPHISAFDNVALPLRITKLKESLIKKNVEELLEWVGLKDYMLSKPPTLSGGQQQRVAIARA

SEQ ID NO: 144705 - protein, 202 aa, Unknown
  Bacterial polypetide isolated from the Sargasso Sea
MKNNNSDEVIVKFENVTKQYGDLVVLDKLNLEIKKNEMVSIIGPSGSGKTTVLRVLMTLEKINGGVIHLDGEPLTHTNINGSFVEANERYLRERRSKIGMVFQQFNLFPHMTALQNCIEAPVEVLGMKKEQAEKRALELLELVGLTDKKDQHPSRLSGGQQQRVAIARALAMRPKVMLLDEITSALDPEVVGEVLNVIRSLN

SEQ ID NO: 144706 - protein, 123 aa, Unknown
  Bacterial polypetide isolated from the Sargasso Sea
MAPFLEVKELWHRYASSDWTLQNIDFSLEAGQLLGLLGPSGCGKTTLLRLIAGFERHSQGSIAIAGREVASTRRWLPPERRQVGMLFQDYALFPHLTAWQNACFGLKPNADRGRAQWLLELLG

SEQ ID NO: 144707 - protein, 287 aa, Unknown
  Bacterial polypetide isolated from the Sargasso Sea
WKFLHYYFRSSKLRLMSSPIIETIGVSMAVILLWLGGSEVMVGSSLSSEDFLRFMFLLFSMLGPVRSLSNVHITLQNGYASAERIFEVLDEKTEVVDSGENELMYLESELKFENVSFNYGEGSFQLININFQMKKGETIAVVGASGAGKSTIADLIPRFYDVSKGKIIIDGKDIREYKIDSLRKMMGIVTQETIMLNTSIRDNITYGSNEIDEKKMLEAANGANACEFIDNLELQYDTIIGERGVKLSGGQQQRIAIARAIYKNPSLLILDEATSALDTKSERLVQN

SEQ ID NO: 144708 - protein, 233 aa, Unknown
  Bacterial polypetide isolated from the Sargasso Sea
MEMLSLVEMEELKNRLPSQLSGGQQQRVALARALVGNPDILLLDEPLSALDPFLRRQMRAELKQLQRKLNITFVHVTHSQEEAMALADLVVVMRDGQIEQADNPRTVFKEPVNEFVAEFLGDQNILIGQIISAKGKTLTVEGPGNLRFPISSTNFSIGDTIKFALRSDGLALGQIPKGSHRSKAKLIQTEYAGSNVQVKLRSDDGQEFNAICGEDHFFSHNWHEGDDIYISLD

SEQ ID NO: 144709 - protein, 308 aa, Unknown
  Bacterial polypetide isolated from the Sargasso Sea
MILGVISKVSDEIIVMKDGKIIEEGITKKILKSPKKDYTLGLLKCLWKLEKGNPSLYTDKKVPFIEVKNIKKEYQLPNRLFSKRKKLSAVEDVSFSVFKGDSVAIVGESGSGKTTIAKIINGLEYPDSGEILINNCPINKIDLFKRARLIQPIFQDPYSTLNPNHTIGYVISRPLIIQKRFSSKEIYQNAIKMLKLVELPDTFFYRFPNQLSGGQRQRVSIARALILEPQLLICDEPTSALDVTIQDQILDLLENLKKKLSITIIIISHDISVVKYLSKRIFVIKDGKIVESGFTKDVLENPQSSYTK

SEQ ID NO: 144710 - protein, 275 aa, Unknown
  Bacterial polypetide isolated from the Sargasso Sea
CRFSLSDYALFPHLSVLDNVKFGLRRDRSRITESKAVHALEMVHMEKFLTKYPHMLSGGEQQRVALARALAPQPDVMLLDEPYSGLDARLREKIRDEVLHLLREQGCATLMVTHDAEEAMFMADKIVVMNDGRVLQVGSPDELYFQPVNSFVAGVFGELNKLNGLVRENKAITPLVDFPVEEFASGTEVEVVIRPEALCLLPLEGSNIYLEASVVESRLLGRVSYIHLSSKCPDRDGENIHLHCKMPGRVLPSSGEMVRVYIDIEQTFVFEKNKQ

SEQ ID NO: 144711 - protein, 97 aa, Unknown
  Bacterial polypetide isolated from the Sargasso Sea
MTRKSLDRYPHEFSGGQRQRISIARALATKPRLLICDEPTSALDVSIQAQILNLLKDIQDELHLTILFISHDLPVIRQMCNRIIVLKNGIICETNET

SEQ ID NO: 144712 - protein, 168 aa, Unknown
  Bacterial polypetide isolated from the Sargasso Sea
SGGQRQRISIARALASQPDFLVCDEPTSALDVSVQAQILNLMKKLQKELGLTYLFISHDLAVVSHLSDKVGVMYLGRLVEWADTKTLFRAPKHPYTKMLLDAIPDLNLSGKARTPLAGEVPSPINPPSGCHFHPRCPWSNERCRTELPTLMDQQQQSVACHAVDENRI

SEQ ID NO: 144713 - protein, 275 aa, Unknown
  Bacterial polypetide isolated from the Sargasso Sea
TLVKILYGLLASDQGYINYNGGKLEISSPSEARKNGIGMVFQHFSLFESLTVRENLILGIDNQISYNDLKIQLEDISSKYNLPLDLDAPITSLSAGEKQRVEIVRILLQDPQLLIMDEPTSVLTPQEVKNLFVTLNALVKEGRTILYITHKLEEVITICNEVTIMRNGKVIDSCSTSNQTAKTLATKMLGEKLDELKTDYTQVKNSINFSAKNISCSFNDPFYTDLKNVSFQVNVGEIFGIAGVAGNGQTELMDILVGENTSLDSGELVFNEKNI

SEQ ID NO: 144714 - protein, 92 aa, Unknown
  Bacterial polypetide isolated from the Sargasso Sea
PSIGCLQTSALSTGQQQRVAIARALINQPKLLIADEPTSALDMENRDSFMSLITELATTYKTTLLFVSHDLSLSHYFDRVEGLSSFCRNGEN

SEQ ID NO: 144715 - protein, 100 aa, Unknown
  Bacterial polypetide isolated from the Sargasso Sea
MLNRRVVVPRATAEDLLVDSLSVAYDGPQVLHDVTLDVAAGEMVALLGPSGCGKTTLLRTIAGLERQMSGTVRLGERVLGDGHYFVPPEKRRIGMVFQDG

SEQ ID NO: 144716 - protein, 189 aa, Unknown
  Bacterial polypetide isolated from the Sargasso Sea
MAAENDTLVRFIEVQKSYDGETLVVKNLNLDVERGEFLTMLGPSGSGKTTCLMMLAGFEPATHGEITLDGVPINNVPPHKRGIGMVFQNYALFPHMTVAENLAFPLQVRKMHKTEIESRVNRALDMVQLGGFGSRRPAQLSGGQQQRVAVARALVFDPALVLMDEPSGALDKQLREQMQYEIKHIHEKS

SEQ ID NO: 144717 - protein, 287 aa, Unknown
  Bacterial polypetide isolated from the Sargasso Sea
ERNLAVILITHDMGVIAETTNRVAVMKNGNLVEIGPTKEILTNPKEVYTKSLVSSVPPTNKKILRFKIIEKENNNQNETNIKILNRWQKKEIINQNLVEVKNLSKTFDDNFFTESSKNSVMAVNNVSFNIKEGESFGLVGESGSGKSTIAKMIVNLYSPSSGDINFDNVCITKINNKREMMKFRKQIQMIFQDPYSSLNGRLKVKDIVSEPIKLHNPSISSNDLNNYIYDLLESVELSQQSAERYPHEFSGGQRQRISIARALATQPRLLVCDEPTSALDVSIQAQI

SEQ ID NO: 144718 - protein, 314 aa, Unknown
  Bacterial polypetide isolated from the Sargasso Sea
MNKKNLVKNDALIIDDLHHKYDKRECSNWILNAINLKIKNGELLGLLGPSGCGKTTLLRLIAGFEFPSRGRISLNDKEISSGKKILSPEKRNIGMVFQDYALFPHLTVLENVIFGLKNKKDRSRVDYLLNVVGLDSFIGRYPHELSGGQKQRLAIARALAPGTNFILLDEPFCSLDMHVKIKLRSELPNILKGCNASGLMVTHDPEEAMSICDKVAVMNEGKIHQIDTPINLLNNPKTLFVSSFILGNNIINLQKNGNSYMSCLGEINSSVVLQNANIKSMSISPKFISIKKSESGNANVISKEFLGEFLIYKV

SEQ ID NO: 144719 - protein, 155 aa, Unknown
  Bacterial polypetide isolated from the Sargasso Sea
LFNDSIFYNIAYGKDNATKAEVEKAAKAAQIHEFIASLPDGYGTTVGERGLKLSGGEKQRVGIARTLLKDPPILLLDEATSALDSETEREIHDALENAGKGRTVISIAHRLSTISDADKIVVLERGEIVEIGQHSNLLKNRNRYFQLWNMQLKAG

SEQ ID NO: 144720 - protein, 241 aa, Unknown
  Bacterial polypetide isolated from the Sargasso Sea
MLLANASLEIVPGEILALVGPNGAGKSTLLRTLAGDLKPTSGNVFYDSRNLNQLSVRERAIPRSVMSQTQPMIFDFTAREVLQMGWLHADHNYYNEYFESAVDNLACACEIEQLMEQKFNTLSGGEQKFIHFARSLLQLWAPDDLKDNRYLLLDEPVAGLDMGRELHMLNVIKEHAKYMGVLIILHDLNLAARFADSVLLLEEGQILKAGPPQAVFTEHIISNVYKVPVMITQDPLTIRYY

SEQ ID NO: 144721 - protein, 310 aa, Unknown
  Bacterial polypetide isolated from the Sargasso Sea
RTKRFRVKVHYLRIIAGFENISSGKVKLNGLIVDDRSTIVQPQNRNVGIIFQDLALFPHLSCKDNILFGITNYSADHKRQRLDRLCNLLDITSINDKFPHEISGGQQQRIAIARALAPGPEILLLDEPFSALDEELKETLMHDVKNLLKEEKITTIVITHNIKEAFQLSDKIAFLDNKKIIQFDTAYNLYHKPYTKEIANFCGIGSFINGTVIDNNHVSTILGNLFGDTSKFKVGSNVSVMIRPDDIIHDDDSPQSAKVLEKIFFGSDFLYKLELTEGEKIFCYTPSHHNHAINEVIGIKPVIDHLILFD

SEQ ID NO: 144722 - protein, 299 aa, Unknown
  Bacterial polypetide isolated from the Sargasso Sea
SRSFLGGQRQRIMIAMALVNQPKLLIADEPTTALDVTIQAQILDLMSKLKKELGMSILFITHDLGLVREFSDQVCVMQNGHIVEKGNTVDVFKNPEHSYTKKLLNAEPQPKLDINTEEIPLIKIENVDVFYDMPSINFFNKNRFHAVKNASLNIFKNTTIGVVGESGSGKSTLGKAIANLIKYEGDIFYNGKDIRYSSKEIKKHIQIVFQDPYGSLSPRMTVGEIVGEGLGVHFNLTKLETQKRIDKVLDDVGIEIDAKNKYPHEFSGGQRQRIAIARSLIMNPAFMILDEPTSALDRS

SEQ ID NO: 144723 - protein, 183 aa, Unknown
  Bacterial polypetide isolated from the Sargasso Sea
MFQDSRLLPWKRVADNVALGLPPERRGAAAHVLARVGLGDRLNEWPARLSGGQRQRVALARALVHNPRLLLLDEPLGALDALTRIEMHRLIEGLWRTSGFTALLVTHDVQEAVALADRVILIEDGQIALDQRIDLPRPRSHGDAAFAAIEKRILDRVLQKPDGDPAHEAPWPGVPAHGLRWAV

SEQ ID NO: 144724 - protein, 220 aa, Unknown
  Bacterial polypetide isolated from the Sargasso Sea
MILKVNGLKKEVTSGESLLTILDNVSFELQEGQSLAITGPSGSGKSTLLGLLAGLDIATSGEIYLDGIGLHLLDEERRAGIRKEKIGFVFQSFELLPSLTALENVMLPSELKSETKPMENAEYFLERVGLKDRQHHYPNQLSGGEQQRVAIARAFACKSKILFADEPTGNLDPKNGELISKLLFEVNAESDNALVIVTHDHELANNCDKKIELKLGQIVE

SEQ ID NO: 144725 - protein, 274 aa, Unknown
  Bacterial polypetide isolated from the Sargasso Sea
AILTEPKETYTKSLVSSVPPTNKKISRFKIIEKESNNQENINLKILNRWNKREILKKDLVQIKNLCKTFNEGFFTEKSQNNVLAVDTVSFNIQEGKSFGLVGESGSGKTTIAKMIVNLFKPTSGEIYFDDACINNIKSNKELLKFRKQIQMIFQDPYSSLNGRLKVKDIIAEPIKLHDANISSNELNEYINDLLDSVELSKSSAERYPHEFSGGQRQRISIARALATKPRLLVCDEPTSALDVSIQAQILNLLKDLQEQLNLTILFISHDLPVV

SEQ ID NO: 144726 - protein, 232 aa, Unknown
  Bacterial polypetide isolated from the Sargasso Sea
LKNIYYKHPNAPKDTLNDINLTIPSCTTVGLVGITGSGKTTLVDIILGLLDAHKGQIEVDGTIINKDNLRAWQRNIGYVPQQIYLADTSISNNIAFGVNSTNIKQEDIEIAAKIANIHDFVINELPLKYNTIVGEQGVRLSGGQRQRIGIARALYHNPKLLILDEATSALDNLTEQSVINEIYKLRKNMTIIMISHRLSTIEKCDKIFLLEGGKLKNQGQYNEIISTSGKFK

SEQ ID NO: 144727 - protein, 284 aa, Unknown
  Bacterial polypetide isolated from the Sargasso Sea
MPSLKDLRNRISSVKSTKKITSAMKMVAAAKLKRAQDNAEKTRPYARKMSEIVNSLVENNKSKEFKFSEKKTKTRNILLVVCSADRGLCGGFNGSIIKFSKKLSEKIINDGGQVSYIFVGKKAYQSLQRFCGESILDFFSDIANPSIKFELASSLRDKILELFLNGSMDECYLIYTEFKSAISQTVQSLKLLPLNALETSDNNSSNKSYDFEPSEEEILNEIIPKNIAIQIHTALLENLASEQGSRMTAMDNATRNANDMIDNLTLFYNRSRQALITKELIEII

SEQ ID NO: 144728 - protein, 315 aa, Unknown
  Bacterial polypetide isolated from the Sargasso Sea
IADEPTTGLDVTTQKATMDLVRDLTQERNMSVVLITHDLGMAVAYCDRIVVMEKGAVVETAPVAELFSNPQHTYTKKLIAGSPGPHSTLAELAPETPTPTSATVLPGSSVKLPENGIRGGENILEVFNLVKEFPIQRAAGGHWPWRKASQPDRSFRAVDDISFSLKRGESLGLVGESGCGKSTTSSIITRLMDPTSGDIIFDGKNITAYRAQTFGLRPERQQIQMVFQDPTDSLNPRYSSYDSIAEPLKRLTGLRDRTLIRENVEVLAERVGLPKALLSRFPHQLSGGQKARVGIARAIAVNPKLLILDEPTSAL

SEQ ID NO: 144729 - protein, 237 aa, Unknown
  Bacterial polypetide isolated from the Sargasso Sea
MTEKLPIIEIHDLHKSYDKLDVLKGVDLVAHEGCVVSLIGASGSGKSTLLRCANLLENSQHGEVIFHGDKVKWAGHGTARHPSDKHQLRRIRSKLSMVFQQFNLWSHLTILQNINEAPITVLQESPDEVEARSRALLKKVGILDKADMYPAQLSGGEQQRAGIARALAMNPKAILLDEPTSALDPEMEQEVVQVIKALADEGRTMILVTHDMNLAYDVSDHVVFLHEGRILEEGSPQ

SEQ ID NO: 144730 - protein, 279 aa, Unknown
  Bacterial polypetide isolated from the Sargasso Sea
IQKNFLKAVSASGPKSVPAHSKIILSAQDTKVWFPVYKGFLKRTVGHIKALNSATFNVRMGETLGIVGESGSGKSTIALALMRLIDFEGEINFDGKDIGSLKTRELRRMRSDMQIVFQDPFGSLSPRMTCAQIISEGLEVHQSESFEDTQLFVDDVMQEVGLDPAFKHRYPHEFSGGQRQRIAIARAMVLKPKLVILDEPTSALDRTVQFQIVQLLKQLQEKYGLAYIFISHDLAVIRAMSHRVLVMKQGDIVESGYTDQIFQDPKESYTRDLLMAANS

SEQ ID NO: 144731 - protein, 234 aa, Unknown
  Bacterial polypetide isolated from the Sargasso Sea
FGYGEKNVLENINLKIPKGKRVALVGLSGSGKSTIANIIARFFDNYNGDITIDSQNIKKMHLIDLRNNISMVTQETVLFNDTIANNIKYGKLEANNDEINKVAKLAGITEFSDLLEKKLDTVIGESGVKLSGGQRQRVAIARAIIKDSPILIMDEATSSLDNITEKEIYKTIKNLMKNKTILIIAHRLSTIEDSDIIYVIDKGRIENFGSHTDLLNKSEIYKKLQLKEKLENEF

SEQ ID NO: 144732 - protein, 218 aa, Unknown
  Bacterial polypetide isolated from the Sargasso Sea
GVPAPVPEGAQVVAETQDLRVWFPIQKGFLKRTVGHVKAVNAATLSVRAGETLGIVGESGSGKTTLALAIMRLIASQGAIRFGGEDVQGWSTRDLRKRRAQMQIVFQDPFGSLSPRMTCAQIIAEGLGVHGNPGGRPQRDLVAEVMEEVGLNPATMDRYPHEFSGGQRQRIAIARAMILRPKLVVLDEPTSALDMTVQVQIVDLLRDLQVKYGLAYLF

SEQ ID NO: 144733 - protein, 131 aa, Unknown
  Bacterial polypetide isolated from the Sargasso Sea
QAATLAHAMEFIEQLPEGLDTQVGENGVLLSGGQRQRIAIARAMLRDAPVLILDEATSALDTESEKAIQQGLDNLRQNRTSVVIAHRLSTIESADQILVVDQGRIVERGTHKSLLELGGMYAKLYQMQFGS

SEQ ID NO: 144734 - protein, 294 aa, Unknown
  Bacterial polypetide isolated from the Sargasso Sea
VIVEKENNNKKENNIKILNRWSKKEIINQDLVQIKNLNKSFDDNFFTENSKNSVMAVNNVSFEIKESESFGLVGESGSGKSTIAKMIVNLFKPSSGDIFFDNVCITKIKHRSELMKFRKQIQMIFQDPYSSLNGRLKVKDIIAEPIRLHNPSISNIDLNNYIYDLLESVELTQKSADRYPHEFSGGQRQRISIARALATQPRLLVCDEPTSALDVSIQAQILNLLKDLQEQLNLTILFISHDLPVVRQMCDRIGVLKDGKLCEVSNTEDLFLKPTHEYTKELLRLMPKIESIYN

SEQ ID NO: 144735 - protein, 126 aa, Unknown
  Bacterial polypetide isolated from the Sargasso Sea
MRKSALSCLQVENVSCRYNGRNVLEQLSLTVADNEIVCLLGASGCGKTTLLKAIAGLLPLAEGTIRLGDTLLDGPDTSVPPEARNIGMIFQDYALFPHLTVADNVGFGLTKLDRRARQQQVDEALA

SEQ ID NO: 144736 - protein, 161 aa, Unknown
  Bacterial polypetide isolated from the Sargasso Sea
MSKNTEFVKFDKVDKSYDGKVLVVKDLNLNISEGEFITMLGPSGSGKTTCLMMLAGFETPTNGEIYLDSNPISNIPPHKRGIGMVFQNYALFPHMTVYENLAFPLRVRKVQKDEIDKKVDKALSMVSLSGFESRMPAQLSGGQQQRVAVARALVFDPAVVL

SEQ ID NO: 144737 - protein, 210 aa, Unknown
  Bacterial polypetide isolated from the Sargasso Sea
MNKKNLVKNDALIIDDLHHKYDKRECSNWILNAINLKIENGELLGLLGPSGCGKTTLLRLIAGFEYPSRGRISLNDKEISSGKKILSPEKRNIGMVFQDYALFPHLTVLENVIFGLKNKKDRTRVDYLLNVVGLDSFIGRYPHELSGGQKQRLAIARALAPGTNFILLDEPFCSLDMHVKLKLRSELPNILKGCNASGLMVTHDPEEAMS

SEQ ID NO: 144738 - protein, 192 aa, Unknown
  Bacterial polypetide isolated from the Sargasso Sea
MLSVEIKKALETLTLDVRFEVNAGTVTALFGKSGAGKTTTVHSIAGLIKPDDGEITLNNKVLFNHNLRTNLPVYRRKIGFVFQSARLFPHMTVKKNLLFGLPRPNKIHIKITLDMVTKLLDLSSLLDRRPQTLSGGERQRVSIGRALLSQPDLLLMDEPLSSIDLHLRGEILPFIQKVVAEVQIPVIYVTHS

SEQ ID NO: 144739 - protein, 244 aa, Unknown
  Bacterial polypetide isolated from the Sargasso Sea
DKQTIEQKVNDAAKLLQISDFLQRKPSMLSGGQRQRVAMGRAIVRNPKIFLFDEPLSNLDAKLRIQMRLEIKKLQQKVGVTSIFVTHDQVEAMTLADRLAVINNGIIEQLGTPIEIYNSPKSLFVAGFIGSPQMNFIEGELKNKILSADGFEIKDIKSDYNGEAILGIRPEHLLQSDNGLINLKVELVEQLGSDNLVYGQLKDKKDFCYRCPGNQTIEKGSTLKLNIENNNYYVFDKSSGKRVN

SEQ ID NO: 144740 - protein, 242 aa, Unknown
  Bacterial polypetide isolated from the Sargasso Sea
EYDLSFLRKSISIVTQSPTLFNDTIERNIAYGDDEFDSERVMESARLAGCLDFIDKLPEGINSEIGDDGVLLSGGQRQRLAIARAFYKNSPIIILDEATSALDTESEELVQESLEKLISDRTTIVIAHRLSTIENADQIVVLDNGLISQQGKHSDLLEEEGIYASLYKNVPIESKKSSSTSLQKVSYLQPIDDVENNSSFVINAWYQKHLWLYLLLPFSWIFTFLTNRRRRKYLKNQISSFK

SEQ ID NO: 144741 - protein, 274 aa, Unknown
  Bacterial polypetide isolated from the Sargasso Sea
MRPILKVKNLSKHFDVSPPLITRLVSREEKSILKAVEGIGFEIKQGETVSLVGESGCGKSTVARLVVKLYEPTNGEIFFGNQNFSSIKSRKELKPIRRRIQMIFQDPYASLNPRWRVFDIIAEPLRAHGIISDKQGLKRRITELLEQVSLSSADSEKFPHEFSGGQRQRISIARALASQPDFLVCDEPTSALDVSVQAQILNLMKKLQKELGLTYLFISHDLAVVSHLSDKVGVMYLGRLVEWADTKTLFRAPKHPYTKKLLDAIPDLNLSGKP

SEQ ID NO: 144742 - protein, 185 aa, Unknown
  Bacterial polypetide isolated from the Sargasso Sea
MANIQFKGIHKSFGSNKIITDFNLDGKEDEFLVLVGPSGCGKSTLLRMIAGLEQIDNGEIFINDQKINELHPSKRQTAMVFQSYALYPHMNVFENMSFGLKIEKRPKEEIASKVKEAAKILKIEELLDRRPKELSGGQRQRVAIGRAITRNPKIFLFDEPLSNLDAALRAEMRVEISKLHNQIKT

SEQ ID NO: 144743 - protein, 262 aa, Unknown
  Bacterial polypetide isolated from the Sargasso Sea
KIFPDQTKAVTDLNLEIKSGEFMVLVGPSGCGKSTTLSMIAGLEEPSSGEIFIDGQIINALPPKDRDISMVFQNYALYPHMNVFDNMAFSLKLRKWSKSDIKKRVKEAANTLELENYLDRYPKALSGGQRQRVALGRAIVRKPKVFLFDEPLSNLDAKMRTVMRVELKKLHEQIGATMIYVTHDQTEAMTLGQRICIMNEGILQQVDTPIETYNSPKNTFVGSFIGSPQMNFINGKLNLINDKYYFSSETFNMHLDKKFISG

SEQ ID NO: 144744 - protein, 268 aa, Unknown
  Bacterial polypetide isolated from the Sargasso Sea
IQRLLPSFQQAYNSWVIITTSTNSVLNLLKLLDQNPYLEKKKSKDFLFKNKITLKNISFSYKKNSRKIIKSFNLEIFKGDRIGIIGPSGGGKSTLADLLMGLLKPTQGIIEIDGIDLHRNNKYFKKDWYRNISHVPQDIFLIDSSIAENIAFGVPFEKIDKKKLMLVIHLSRLSNFIKNIDDAFSTNVGERGLKLSGGQRQRIGIARALYKGGNILILDEATSALDQDTEASIMQTIDNLNSSITVIVITHRLSTLKKCDRIIDLGKN

SEQ ID NO: 144745 - protein, 107 aa, Unknown
  Bacterial polypetide isolated from the Sargasso Sea
SGGQQQRVAIARALAMRPKVMLLDEITSALDPEVVGEVLNVIRSLNKEHNLTMIMVTHQMGFAREISDRVCFFNDGKIFEEGPPEKLFGDPQNERTKQFLHAVLDSH

SEQ ID NO: 144746 - protein, 108 aa, Unknown
  Bacterial polypetide isolated from the Sargasso Sea
KARRAQSREWLRAVGLEDHFSKLPHDLSGGQKQRVAIARALAARPKLLLADEPTSALDSSTGREIVDLLKKLALEQSCSVLMVTHDPRILDVADRLLRMEDGQILPSV

SEQ ID NO: 144747 - protein, 137 aa, Unknown
  Bacterial polypetide isolated from the Sargasso Sea
MKKEEAEERALELLELVGLTDKKDQHPSRLSGGQQQRVAIARALAMRPKVMLLDEITSALDPEVVGEVLNVIRSLNKEHSLTMIMVTHQMGFAREISDRVCFFNEGKIFEQGPPEQLFGDPKNERTKQFLHAVLDAN

SEQ ID NO: 144748 - protein, 249 aa, Unknown
  Bacterial polypetide isolated from the Sargasso Sea
FLVKKNIVQALDNVSLEIEENDCFAIVGESGSGKTTLANIILGIYNYDKGEIWLDNNKLFSKRNLALRKLIQFVQQNPMSTLNPKKTIFKTISLPLKIHKIVNNDMIIERVETLLSYVGLGTEFMYRYPDTLSGGQKQRVAIARALASEPKVLILDEPTSALDVIVQSKVLNLLLDIKEKLNLTYIFITHDLSVVKNIANKVMVMNKGKIDEFGVTKEVFSNPKSKYTKTLIRAIPTVTDEEDAIKPKL

SEQ ID NO: 144749 - protein, 263 aa, Unknown
  Bacterial polypetide isolated from the Sargasso Sea
VHETSLSIDEGEFMVFVGPSGCGKSTLLRMVAGLEDITEGDINLDGKLMNEVDPSERDVAMVFQNYALYPHMNVYNNLAYGLKNRGIDKETIEQKVNDAAKLLQISDYLQRKPSMLSGGQRQRVAMGRAIVRNPKIFLFDEPLSNLDAKLRIQMRLEIKKLQQKVGVTSIFVTHDQVEAMTLADRLAVINNGIIEQLGTPIEIYDNPKSLFVAGFIGSPQMNFLDGNLKNKTLSAEGFEIKDINSDYEGEVTLGIRPEHLSQS

SEQ ID NO: 144750 - protein, 200 aa, Unknown
  Bacterial polypetide isolated from the Sargasso Sea
MELSVHNLSKRYGDKTILQGINFSMQSGDFVTFVGSSGCGKSTLLRLIAGLDQPSSGSIHVDGSPVQAPGPDRGMVFQKYSLYPWLNAADNVAFGMRLQGLKPADVRERTAYFLEVVGLQEAATKLPRELSGGMQQRVAIARALATNPSVLLLDEPFGALDLQIRETMQDFLLKLWQRTGLTVLLITHDVEEALVLAQRV

SEQ ID NO: 144751 - protein, 121 aa, Unknown
  Bacterial polypetide isolated from the Sargasso Sea
MNKKNLVKNDALIIDDLHHKYDKQECSNWILNAINLKIEKGELLGLLGPSGCGKTTLLRLIAGFEYPSRGRISLNDKEISSGKKILSPEKRNIGMVFQDYALFPHLTVLENVIFGLKNKKD

SEQ ID NO: 144752 - protein, 174 aa, Unknown
  Bacterial polypetide isolated from the Sargasso Sea
MSALIEFQGFNKFFGEAQVLKGIDLSVQRGEVVVILGPSGCGKSTLLRCLNGLEVAHSGSLRFAGKELLDKTTDWRQVRQDIGMVFQSYHLFPHMSVLDNILLGPLKVQKRDPREAREQAEKLLERVGLADKRDAFPRQLSGGQQQRIAIVRSLCMNPQVMLFDEVTAAPRPEM

SEQ ID NO: 144753 - protein, 195 aa, Unknown
  Bacterial polypetide isolated from the Sargasso Sea
IRFQGQQLQGLSQQEVRPLRRQMQVVFQDPFGSLSPRMSVSQIVGEGLRIHGMGNEAEQEQAIIDALLEVGLDPQTRHRYPHEFSGGQRQRIAIARALVLKPALILLDEPTSALDRTVQRQVVELLRGLQAKYNLTYLFISHDLAVVRALSHQLMVVKQGQVVEQGSAESIFSAPQHPYTQQLLEAAFLAPATAH

SEQ ID NO: 144754 - protein, 238 aa, Unknown
  Bacterial polypetide isolated from the Sargasso Sea
AVDNVSFELLKGETLGLVGESGSGKSTIAKIITGLVKPNNGDIYYNDLTLYNSKKKYQIDKSRGQIQMIFQDPYSSLNPRFKVRDIISEPIKFFQRNISKDELIQNVYDLIDIVGMTRQSLDRYPHEFSGGQRQRISIARALATRPRLLICDEPTSALDVSIQAQILNLLKDIQDELHLTILFISHDLPVIRQMCNRIIVLKNGRVCETKNTEELFNNPEHNYTKELIRLMPKIESIV

SEQ ID NO: 144755 - protein, 225 aa, Unknown
  Bacterial polypetide isolated from the Sargasso Sea
MGWLEKVGLRKSTLARLIAGLYTPKSGDINIFGHNVLQKTQKTKTSLIRRKMQMIFQDPYSSLNSRMTVEDIISEPIRFHRSTENSSETTEVVRDLISFVGMPTTSLKKYPHEFSGGQRQRISIARALASRPEILICDEPTSALDVSVQANILNLLKDLQEELSLTMLFISHDLPVIRQMCDRVAVMQNGKICEIAQTDELFDHPEHEYSKHLLGLMPRMDLFRL

SEQ ID NO: 144756 - protein, 194 aa, Unknown
  Bacterial polypetide isolated from the Sargasso Sea
TLDVYSDSGATVPRVGYVFQNARLLNWLTVEDNMTFALESQEIPKDLWKERVDKYLEMVGLEGQQKNYPLNLSGGMQQRVAIARALAIEPDILLMDEPFSHLDEITARKMRFDLMEILMRANPTILFITHDLGEAVFLADNIYMMSTKPARIFKQINVEVPRPRKPEDPKIFDLEKELVREFFSVLDAQNLEDG

SEQ ID NO: 144757 - protein, 158 aa, Unknown
  Bacterial polypetide isolated from the Sargasso Sea
YLFNSTLKENILIAKPDASYPEMKKAIQMASLTELVETLPQGFDTKVGERGTSLSGGQRQRVAIARAFLKDAPILILDEATSHLDALSESEVRGALDKLKEDRTTIIIAHRLSTIRNADNIIVLDGGKIKESGNHDQLLKKNGLYSQLVYKQMNFARG

SEQ ID NO: 144758 - protein, 215 aa, Unknown
  Bacterial polypetide isolated from the Sargasso Sea
MENKKTEEIIVKFDEVTKQYGDLVVLDKLNLDIKKNEMVSIIGPSGSGKTTVLRVLMTLEKINGGVIHLDGETLTHMNSNGKLVDADEKYLRERRSKIGMVFQQFNLFPHMTALQNCIEAPVEVLGMKKEEAEERALDLLELVGLTDKKDQHPSRLSGGQQQRVAIARALAMRPKVMLLDEITSALDPEVVGEVLNVIRSLNKEHSLTMIMVTHQ

SEQ ID NO: 144759 - protein, 194 aa, Unknown
  Bacterial polypetide isolated from the Sargasso Sea
LDIILGLLDPEKGSISIDDNKINSKEMLNAWHLSISHVPQDVYLSDISLAENIANSNEINNDLLETVTKKAEIFDHIQSLPDKFESLAGENGSNLSGGQRQRIGIARALYKNSEVIILDEATSALDGITADKIIKNILKDKTKTIIMVSHSMKSIQNCDLIFEVESGEIKSFGTYDYLKESSDSFKKLTISDLS

SEQ ID NO: 144760 - protein, 201 aa, Unknown
  Bacterial polypetide isolated from the Sargasso Sea
SGGQRQRVAIGRAIVRKPRAFLFDEPLSSLDAELRVNMRLEIANLHRQLDTTTIYVTHDQIEAMTLADRIVVLNNGEIEQVGTPDDIYQNPVNTFVASFIGSPKMNFIDGDAASEFEAERIGIRPEHLEINKEKGKWSMEILHYENLGAESYIYLSNKTIGSFTVRCEPSSNWEIGNSVYITPQLVHVHRFDKSGKRLNKQ

SEQ ID NO: 144761 - protein, 255 aa, Unknown
  Bacterial polypetide isolated from the Sargasso Sea
VRKIDKAEIEERINRTLKMVSLTGFENRMPAQLSGGQQQRVAVARALVFDPKLVLMDEPLGALDKNLRESMQYELKHIHESLGVTVVYVTHDQGEALTMSNRIAVFNDGKVQQLSGPNELYETPVNSFVASFIGENNTFTGTVTEITSGSAKIQTDSGDTIFANPIAVNSSGDKSRISLRPERVSIDPNEHLENQFTSVIREIIYHGDHTRVRVNLLGNDEFILKVPNASSDLDFNIGDKLDLGWSSHDCRALDY

SEQ ID NO: 144762 - protein, 159 aa, Unknown
  Bacterial polypetide isolated from the Sargasso Sea
VFQQFNLFPHLSILDNCSLAPIWVKKLPKKQAEEIAMNNLKRVQIDDQALKFPGQLSGGQQQRAAIARALCMEPKIMLFDEPTSALDPEMIKEVLDVMVDLAKGGMTMIVVTHEMGFAKEVADYMIFMDEGKIVERAKTKEFFENPKSDRTKLFLSQIL

SEQ ID NO: 144763 - protein, 206 aa, Unknown
  Bacterial polypetide isolated from the Sargasso Sea
MTDTKEVVIRCSQVNKSYSQGSTQINVLRDINLSVSSGDEIAIVGISGSGKTTLLNLLGGLDLPSSGVISVAGKNLNKISESDRGFLRNKYLGFVFQFHHLLGEFNALENVAMPLFIAGCGREEAEVRSETILKRVGLINRVAHKPSELSGGERQRVAIARALINNPQCVLLDEPTGNLDKFTAAEIRDLHTDLNGTFRTSFITVT

SEQ ID NO: 144764 - protein, 202 aa, Unknown
  Bacterial polypetide isolated from the Sargasso Sea
GASGAGKTTLLSLANGSLQPDQGQVQWRGQPIRTLPRRRRLEIGTLWQDLRLIEELTVSRNVNAGALGRHSLLWALRNLLQPLERRECLAAVTAAGLEPELMDTTVSRLSGGQRQRVALARLLRQQPLLVLADEPLSALDPVLAEEVMLGLLDQAGCLVSLHRPDLVHRFDRVIGLRQGRLVLDKSTGDVTSDAIACLYQSL

SEQ ID NO: 144765 - protein, 141 aa, Unknown
  Bacterial polypetide isolated from the Sargasso Sea
QNFHLLPRNSALDNVMLPLKYAGIRKENQMNIAKKALSQVGLESRMNHQPSELSGGQQQRVAIARALVNNPSILFADEPTGNLDSKTGNDVIELFHNLHKQGQTIILITHEKNIAAEAQRTIYIKDGLIESDSYREKHATL

SEQ ID NO: 144766 - protein, 244 aa, Unknown
  Bacterial polypetide isolated from the Sargasso Sea
HVPRGQTLAVVGESGSGKSTLARVITGLLPPFQGSVKFGDEELSNAQKDRSRDHLRRIQLIYQMADTAMNPRQTVGQIIGRPLQFYFGKRGAERKKEVIKLLDEIEMGEAFYDRYPAELSGGQKQRVAIARALAAQPELILCDEPTSALDPLVAEGILDLLLRLQKERQVSYLFITHDIAIVRAIADSVAVMLQGKLVDFGPRSEVLNPPFDDYTDLLLKSVPEMELGWLEKVLASRKMESAGH

SEQ ID NO: 144767 - protein, 326 aa, Unknown
  Bacterial polypetide isolated from the Sargasso Sea
SMKATDWRTQFVKQMNEADSTTNSRAVDSLLNFETVKYFNNERFEANRYDEDLAAWEVARRRNRLSLFTLNAGQASIIAVAMTAMMANAALGVLNEEMTIGDFVLINAFTMQIFMPLNFLGFVYREIRGSLANIDKLFNLLAQVPKIKDTENPETLKTTNPTVSFKDVHFSYGEKRKILSGITFTVPAGKKIAVVGASGAGKSTIMKLLFRFYEPNEGKIFIDGKDIKQLSQDSLRAHIGIVPQDTVLFNTSLKENIRYGNPKATDDEISQVIKLAHLEAFIEKLPEGLETTVGERGLKLSGGEKQRVAIARALLKGASIIFSRSD

SEQ ID NO: 144768 - protein, 106 aa, Unknown
  Bacterial polypetide isolated from the Sargasso Sea
DPDAFEKARNALVQVGLGSRVKNFATQLSGGEKQRVAIARAIVNQPRILFADEPTGNLDTKSSSAITDLLFSINELIKTTLVLVTHDLSLAKKCDEIYELSDGSIL

SEQ ID NO: 144769 - protein, 189 aa, Unknown
  Bacterial polypetide isolated from the Sargasso Sea
IEPLDGHLKVDGQSITAANRRQWQRNIGYVPQHIYLADDSVAANIAFGVKPEDIDQQAVELAAGIANMHDFVCNELPQGYATTVGERGVRLSGGQRQRIGIARALYHKPKVLVLDEATSALDNRTELAVMEAVNNLGREITIILIAHRLSTLQQCDKIYLLERGEIKGSGTYAELSSSSHQFADMAGNS

SEQ ID NO: 144770 - protein, 172 aa, Unknown
  Bacterial polypetide isolated from the Sargasso Sea
MIFQDPYSSLNGRLKVKDIVAEPIKLHNPSISSKDIDSYIYDLLESVELTQQSAERYPHEFSGGQRQRISIARALATQPRLLVCDEPTSALDVSIQAQILNLLKDLQEQLNLTILFISHDLPVVRQMCDRIGVLKNGKLCEISETENLFNNPSHDYSRELLKLMPKIESIYK

SEQ ID NO: 144771 - protein, 248 aa, Unknown
  Bacterial polypetide isolated from the Sargasso Sea
MTVYDNIAFPIRASGQDSENLDDEVKRIASMLQIESLLDRKPGELSGGEQQRVSLGRAIIKKPKIFLMDEPLSNLDASLRAELRAEIKKLHKELGITFIYVTHDQTEAMSMADRIALIKDGKLLQVDKPEVIYNTPNHSWIGSFLGMPAMNLANSSDLGDSISAKKGASVVGIRPENITISSEKSKLTGSVISIEYLGDSQILNVKVGKSVMKVKVPNDSKYSVGADVNLDFSDDSLRFFSDDGQYVK

SEQ ID NO: 144772 - protein, 144 aa, Unknown
  Bacterial polypetide isolated from the Sargasso Sea
MHIIAPIWVKKMPKKDAEDLAMKQLEQVQIVDQAQKFPGQLSGGQQQRCAIARALCMEPKIMLFDEPTSALDPEMIKEVLDAMVNLAKAGMTMIVVTHEMGFAKEVADEVIFMDEGMIVEKAETKEFFANPKSDRTKLFLSQIL

SEQ ID NO: 144773 - protein, 104 aa, Unknown
  Bacterial polypetide isolated from the Sargasso Sea
LSGGQQQRVAMARAWAMQPKIMLFDEPTSALDPEMIKEVLDVMKELAASGMTMIVVTHEMGFAKEAADRFYFFDEGLLVEEGTPEHFFTNPKEDRTKLFLSQIL

SEQ ID NO: 144774 - protein, 176 aa, Unknown
  Bacterial polypetide isolated from the Sargasso Sea
KTTLLAIMAGLDLPSSGSVKLLDKEITSLNEDKRAQIRSKDVGFVFQSFHLLPRLSALDNVMMPLEILGAKDAKERALKALDEVGLSKRTGHVPHQLSGGEKQRVAIARAMVKAPSILFADEPTGNLDQSSTDNILDLLLGINQQTKTTLVVVTHDQQLAARSDMVFELQEGKLKC

SEQ ID NO: 144775 - protein, 264 aa, Unknown
  Bacterial polypetide isolated from the Sargasso Sea
YENLAFPLRVRKMKKDEIDKKVDKALSMVSLNGFETRMPGQLSGGQQQRVAVARALVFDPAVVLMDEPLGALDKNLRESMQYEIKHIHESIGVTVVYVTHDQSEALTMSNRIAVFNDGKVQQLSNPSELYEKPVNSFVAEFIGENNTFNGEVSDISGDECKVKLSNGEIIASAISVKSKGEKTTVSLRPERALIEPSEKMDNMFSGKIEEVIYHGDHTRVRINLLGNPEFILKVPNSTSNLELKVKQDIKIGWNSSDARALDPK

SEQ ID NO: 144776 - protein, 197 aa, Unknown
  Bacterial polypetide isolated from the Sargasso Sea
MNKLIASDLYKSYQSGGHYSEVLSGVSITISEGQAIGVIGSSGSGKTTLLQILAGLEHPDQGNIFFNEINLLSNNLENFNSMRNALFGYAYQFHYLLDDLTVFENCNLVFKIANNKKITKNSQKILQTLDELGIIELQNKYPYMLSGGERQRVAIARAVVHEPEFILMDEPTGNLDQENAEIIQDLTIKLAKDHNIG

SEQ ID NO: 144777 - protein, 305 aa, Unknown
  Bacterial polypetide isolated from the Sargasso Sea
TTDKVIVMRYGHIVEQGETKELLTNPKSTEARSLVISVPPTNKKIDRFKLISPDGKEITSSSKDLTQNIIKTWGVRENKNQKLLKLEEVTKVFDDNSLGNGFSFISNKSSNDKIVKAVDNVSFELFEGETLGLVGESGSGKSTIAKIITGLIAPKKGDLIYNNEPLYNSNKKYQIHNSRGQIQMIFQDPYSSLNPRFKVKDIIAEPIKFFQKNISNNELLQNVYDLIDIVGMTRQSLDRYPHEFSGGQRQRISIARALATRPRLLICDEPTSALDVSIQAQILNLLKDIQDELHLTMLFISHDLP

SEQ ID NO: 144778 - protein, 261 aa, Unknown
  Bacterial polypetide isolated from the Sargasso Sea
MNDTAVTEDLPLRVRDLNVAYRRKVVLWDACAEFPAGQLVAIVGPNGAGKSTLLKAAMDLIPSVSGSVTFWGQSYQDMRHRVAYVPQRESVDWDFPVNAREVVAMGLYRKVGWFRPVRKSHREQAQAALERVGLADFGDRQISQLSGGQQQRVFLARALVQQADLYLMDEPFASVDAATEQAIVRVLQDLKDQGKSVVCVHHDLETIRDFFDYAVLLNMRVVTQGSIETVMTRENLAIAYGGKHHLLDRVAREIREEELRR

SEQ ID NO: 144779 - protein, 144 aa, Unknown
  Bacterial polypetide isolated from the Sargasso Sea
PSISNIDLNNYIYDLLESVELTQKSADRYPHEFSGGQRQRISIARALATQPRLLVCDEPTSALDVSIQAQILNLLKDLQEQLNLTILFISHDLPVVRQMCDRIGVLKDGKLCEVSNTEDLFLKPTHEYTKELLRLMPKIESIYN

SEQ ID NO: 144780 - protein, 221 aa, Unknown
  Bacterial polypetide isolated from the Sargasso Sea
MSGVSKVYGQGDLEVRALDQLDLTVRSGDYLAVMGASGSGKSTAMNILGCLDRPTGGRYRLNGIAVEQLDDDELADLRNQSLGFVFQQFHLLPHASAMENVMLPMVYAGIPLDERKERAASALDRVGLSQRLDNRPNQLSGGQQQRVAIARAIINRPSLLLADEPTGALDSNTTAEVLELFDELHQQGITLVMVTHEDDVAARAHRIARFQDGRIVNEASQ

SEQ ID NO: 144781 - protein, 166 aa, Unknown
  Bacterial polypetide isolated from the Sargasso Sea
SSGAVLFKGQDIHRWDSRTQAKFRNQELGFVYQFHHLLSEFTALENAAMPLLIAGESVKSATDKASRMLGRVGLSHRLNHRPSELSGGERQRVAIARALVNEPSLVLADEPTGNLDHASATAVYELLCELNRELGTAFVVVTHDLSLAAKLHRRVTLVSGVMAEVA

SEQ ID NO: 144782 - protein, 207 aa, Unknown
  Bacterial polypetide isolated from the Sargasso Sea
MVQEKPQQFGMMLGLLKPSNGEIIIDGKKIEDNRIEILKKINFISPYIELPKKLTVKQNLIVYGKLYSVSDIKKRIEYLSEKLRLGDLLNKITGELSSGQKNRVSLAKALINKPKVLLLDEPTASLDPEIGDFVRTFLEEYKKEMKISILLASHNMNEVTRLCKSILMMKDGIIIDSGSPNELISKHGRQNLEEVFLKLTRDENEYN

SEQ ID NO: 144783 - protein, 276 aa, Unknown
  Bacterial polypetide isolated from the Sargasso Sea
VEIGPTKEILTKPKEIYTKALVSSVPPTNKKIDRFKIIEKENKTQDETNIKILNRWTKKEIIDQDLVKVKNLSKTFDDSFFIESTKNSVMAVDDVSFNIKEGESFGLVGESGSGKSTIAKMIVNLYSPSKGDIDFDNVCITKIKSNKEMMKFRKQIQMIFQDPYSSLNGRLKVKDIVSEPIKLHNPSISSKDVDSYIYDLLESVELTQQSAERYPHEFSGGQRQRISIARALATQPRLLVCDEPTSALDVSIQAQILNLLKDLQEQLNLTILFISH

SEQ ID NO: 144784 - protein, 90 aa, Unknown
  Bacterial polypetide isolated from the Sargasso Sea
TDELAHGYDTLIGERGIMLSGGQRQRVGIARALYRDPPVLLFDEATSALDMETEAAIGEAIEGMMGKKTVIVIAHREGALRGCDRVVSLS

SEQ ID NO: 144785 - protein, 150 aa, Unknown
  Bacterial polypetide isolated from the Sargasso Sea
PITLHKPSISNIDLNNYIYDLLESVELTQKSADRYPHEFSGGQRQRISIARALATQPRLLVCDEPTSALDVSIQAQILNLLKDLQEQLNLTILFISHDLPVVRQMCDRIGVLKDGKLCEVSKTEDLFLKPGHEYTRELLRLMPKIESIYK

SEQ ID NO: 144786 - protein, 276 aa, Unknown
  Bacterial polypetide isolated from the Sargasso Sea
TEVFHNPRHPFTQHLLDSEPKGELKHPACKSEISIECSDLKVWYPIKRGILRKVVGHIKAVDGVSLEIRKGHTLGVVGESGSGKSSLGRSLVRLEESMGLIKFNGKEIQNLTNDQLRPHRKHIQIVFQDPFSSLSPRLSVGQIVEEGLIVHKIGGNSHERRKLISAVLNEVGLEPSMQDRYPHEFSGGQRQRIAISRALVLKPELIIFDEPTSALDVSVQAQIIDLLKNLQENYNITYMFISHDLRVVRAISHNLAVMKQGKIVEAGPTQTIIKNQ

SEQ ID NO: 144787 - protein, 216 aa, Unknown
  Bacterial polypetide isolated from the Sargasso Sea
LKFTAGIGRLEGFLSKVESISQINPTSNQKIISDYPSILINNADLCPPGSNKTIIKNLNLSINTNQSLLVVGPSGCGKTSLLRMISGLWEPNYGVIKKPKIGELLFIPQKPYMLLGSLREQLCYPTEVKKFSDEHLTSVLHEVNLKTLVDRYPNLDIKQDWPRILSLGEQQRLAFARLLLNSPRFAVLDEATSALDIDTEKNYIVYSSNENFLLLV

SEQ ID NO: 144788 - protein, 195 aa, Unknown
  Bacterial polypetide isolated from the Sargasso Sea
INLELQEGETVAVIGQSGSGKSTLLSLMAGLDRQTSGFLRLRNKEISEMSEVKLTQFRAENIGIIFQQFYLMPHLTALENVSLPLEMFGYDDYLNRAKEALKQVGLSDREKHFPHQLSGGESQRVAIARAVVTKPSILLADEPTGNLDNDTGIQVANLLFDLVNATGMTMLLVTHNTEMADRCSKQLTLQNGTFK

SEQ ID NO: 144789 - protein, 75 aa, Unknown
  Bacterial polypetide isolated from the Sargasso Sea
NIAAEHSGSSVFAGVGERTREGNDFFHEMTEAKVIDKVALVNGQMNEPPGNRLRVALTGITMAEHFRDNGSDTLL

SEQ ID NO: 144790 - protein, 187 aa, Unknown
  Bacterial polypetide isolated from the Sargasso Sea
MADPAPIVATNVSHSYGTGSMRREVLQDINFRVDPGEVVLLTGPSGCGKTTLLTLVGALRSLQHGQLQVLGVPLARAGRGDRRRLRQRIGMIFQGHNLLRCLTAEQNVQMGADLLPGLSYGQRRGQAREWLRAVGLGDQLSKVPHDLSGGQKQRVAIARALAARPRLLLADEPTAALDGRTGREIVE

SEQ ID NO: 144791 - protein, 136 aa, Unknown
  Bacterial polypetide isolated from the Sargasso Sea
NNYIYDLLESVELTQRSADRYPHEFSGGQRQRISIARALATQPRLLVCDEPTSALDVSIQAQILNLLKDLQEQLNLTILFISHDLPVVRQMCDRIGVLKNGKLCEVSNSEELFLKPSHDYTKELLHLMPKIESIYN

SEQ ID NO: 144792 - protein, 192 aa, Unknown
  Bacterial polypetide isolated from the Sargasso Sea
FYETEQVEILLDGINTKDCTLDSLRSQMAVVSQHVVLFNDTIANNIAYGYRGELSPERLLEVAEKAHVMEFVHQMPDGLDTEIGENGVTLSGGQRQRIAIARALLRLAPVLILDEATSALDTESERKIQGALDELFKGRTSIVIAHRLSTIENADQILVMDQGQIVEQGNHQSLLAQNGYYAQLYKMQFSEV

SEQ ID NO: 144793 - protein, 145 aa, Unknown
  Bacterial polypetide isolated from the Sargasso Sea
MSDPIIKIQNMNKWFGDFQVLKNINLEVEANKKIVVCGPSGSGKSTLIRCINRLEEHQEGDIIVDGNELSEKTKDIEKIRAEVGMVFQQFNLFPHLSILDNCTLAPIWVKKMPKKEAQELALDQLKKVQIDDQANKFPGQLSGGQ

SEQ ID NO: 144794 - protein, 239 aa, Unknown
  Bacterial polypetide isolated from the Sargasso Sea
MNKEKKSNDNLVTFSEVTKQYGDLVVLDKLNLEIKKNEMVSIIGPSGSGKTTVLRVLMTLEKINNGVIYLDNEPLTHMQENGKLIEANEKYIRERRSKIGMVFQQFNLFPHMTALQNCIEAPVHVLGLKKEEAEQRALELLELVGLTDKKDEHPTRLSGGQQQRVAIARALAMRPKVMLLDEITSALDPEVVGEVLNVIRSLNKEHNLTMIMVTHQMGFAREISDRVCFFYEGKILNKD

SEQ ID NO: 144795 - protein, 140 aa, Unknown
  Bacterial polypetide isolated from the Sargasso Sea
SYDEIENIAKLTGITEFSDSLDQNLETVIGESGVKLSGGQRQRVAIARAMIKDAPILIMDEATSSLDNITERKIYKTIKELMKNKTTLIIAHRLSTIEDSDIIYVLDKGKIENFGSHQDLLNKSAIYKKLQLKEKLENEF

SEQ ID NO: 144796 - protein, 260 aa, Unknown
  Bacterial polypetide isolated from the Sargasso Sea
MNVYNNLAYGLKNRGIDKETIEQKVNDAAKLLQISDYLQRKPSMLSGGQRQRVAMGRAIVRNPKIFLFDEPLSNLDAKLRIQMRLEIKKLQQKVGVTSIFVTHDQVEAMTLADRLAVINNGIIEQLGTPIEIYDNPKSLFVAGFIGSPQMNFLDGNLKNKTLSAEGFEIKDINSDYEGEVTLGIRPEHLSQTENGLINLKVDLVEQLGSDNLVYGQLKNKKDFCYRCPGNQTIEKGANLRLNIENNKYYIFDKSTGKRVN

SEQ ID NO: 144797 - protein, 150 aa, Unknown
  Bacterial polypetide isolated from the Sargasso Sea
MSQKDSFVKFDNVDKSYDGEVLVVKGLNLDIPQGEFLTMLGPSGSGKTTTLMMLAGFETPTSGEIYLEGEPISSIPPYKRGIGMVFQNYALFPHMTVNENLAFPLEVRKLPKAEINEKVHKALSMVELQDFGTRMPLQLSGGQQQRVAFS

SEQ ID NO: 144798 - protein, 274 aa, Unknown
  Bacterial polypetide isolated from the Sargasso Sea
SLYAFAGYRLMPALQQIFTGASHIRFVEASLDSIHNDLNNLSNLNSFRGKSDDISLNKKIVLDSVFYSYPDDPKLVLGGINLSINKGTSVAFVGETGSGKTTIVDIIMGLLTPKKGSLFVDETKIDPTNLFSWQQSIGYVPQDIYLSDDSIASNIAFGIEKESIDHEFVKEASKIAQLENFIQLELRDGHETIVGERGVRLSGGQRQRIGIARAIYKKPKILILDEATSALDSLTESKVIEGIKKVDKNVTIISIAHRINTIIDSDCIFVLDKG

SEQ ID NO: 144799 - protein, 198 aa, Unknown
  Bacterial polypetide isolated from the Sargasso Sea
IQVLEDLSLDLKKGESLALVGASGSGKSTLLHVICGLEKPNKGNVYIKGVNITDLSTDERSLFRGKEVGFVYQFHHLLPDLTALENIALPAMLSGIGKEEAFEISASLLEQVNLNDKKENRPNELSGGERQRVAIARAMSNNPSCLIMDEPTGNLDKKNVENFMNLLMDMVSTREIALIIATHDNNVSSRLDKLLNLE

SEQ ID NO: 144800 - protein, 280 aa, Unknown
  Bacterial polypetide isolated from the Sargasso Sea
ISKAIPLLGALAFGAQRMLPILQQFYFSWSTIQGVIASMQDVLELLEQPMPEQQKLTRDALQFEKMIELKNLDFEYNPAAGRVIRDANLIISKGSKVGFIGETGSGKSTMLDIIMALLQPTKGHLIVDGNVIDDQSGKAWQYNIAHVPQSIFLSDNSVEENIAFGLPTEKIDHQRVKWAASHAQIDRVIEKLPNQYKTLVGERGVRLSGGQRQRIGIARALYKDTEVIIFDEATSALDNQTEAAVMQAIEGLHEKLTVLIIAHRLTTLKNCDMIVELDNG

SEQ ID NO: 144801 - protein, 175 aa, Unknown
  Bacterial polypetide isolated from the Sargasso Sea
MILEINKLYKSFPQADLGKIDVLKNINLELHEGETVAVIGQSGSGKSTLLSLMAGLDRQTSGSLRLRDKEISEMSEVKLTQFRAENIGIIFQQFYLMPHLTALENVSLPLEMFGHDDYLNRAKEALQQVGLSDREKHFPHQLSGGESQRVAIARAVVTRPSILLADEPTGNLTTI

SEQ ID NO: 144802 - protein, 184 aa, Unknown
  Bacterial polypetide isolated from the Sargasso Sea
MKTLKIDELSKNFGTTEVLRKINLEIDEGNFLVLLGPSGCGKSTLLNIIAGLETINEGNVYIDDYNVSKVEPKDRNIAMVFQSYALYPSMNVRENMIFGLKQAKVSKEKIEEQLQKVSKFLQVDALLERKPSQLSGGQRQRVAIGRALVREPRIFLFDEPLSNLDAKLRVEMRREIKKLHQQLK

SEQ ID NO: 144803 - protein, 140 aa, Unknown
  Bacterial polypetide isolated from the Sargasso Sea
LQEFTSFFPHQLSGGLLQRVAIARALLFYPNLLLLDEPFAALDNLSREIISGELVSIIKKNSLTVLMVTHSIEEAALLSDEVLITGKAPIRVIKKFTPPKCEYNESWQTLGLRKSLQDKSFNTYLKLIRDTSYLALEREK

SEQ ID NO: 144804 - protein, 219 aa, Unknown
  Bacterial polypetide isolated from the Sargasso Sea
QRVALARALVRQPKVLLLDEPLGALDKKLRDEMQLELRTLQKNIGITFVFVTHDQQEAISMSDRVAVMNDGKIQQLSAPNELYKNPKNIFVSDFIGETNFLKAETKSSDGEYINVSIEGLGEFKIKNNLNIAANSSDVVCSVRPESMMISKVKSDWDICLDAKITQTSYLGEMTRFYVEAKGISKTITVSSQHFDNKSFENNECFISISLEDISLLNKK

SEQ ID NO: 144805 - protein, 315 aa, Unknown
  Bacterial polypetide isolated from the Sargasso Sea
KKGNLAVILITHDMGVISETTDRVAVMKSGDLVEIGTTKEILTKPKELYTKALVSSVPPTNKKIDRFKIIEKENKTVGETNIKILNRWTKKKIIDQDLIKVKNLSKTFDDNFFTESTKNSVMAVDDVSFNIKEGESFGLVGESGSGKSTIAKMIVNLYSPSTGDIDFDNVCITKIKSNKEMMKFRKQIQMIFQDPYSSLNGRLKVKDIVSEPIKLHNPSISSKDLDSYIYDLLESVELTQQSAERYPHEFSGGQRQRISIARALATQPRLLVCDEPTSALDVSIQAQILNLLKDLQEQLNLTILFISHDLPVVRQ

SEQ ID NO: 144806 - protein, 195 aa, Unknown
  Bacterial polypetide isolated from the Sargasso Sea
MKTLKIEELSKNFGATEVLRKINLEIDEGNFLVLLGPSGCGKSTLLNIIAGLETINEGNVYIDDYNVSKVEPKDRNIAMVFQSYALYPSMNVRENMIFGLKQAKVSKEKIEEQLGKVSKFLQVDALLERKPSQLSGGQRQRVAIGRALVREPRIFLFDEPLSNLDAKLRVEMRREIKKLHQQLKTTSGLCNSRSN

SEQ ID NO: 144807 - protein, 282 aa, Unknown
  Bacterial polypetide isolated from the Sargasso Sea
EYTIKLLKSEPQEKDHLHVSEDNILDISNLSVFYKIPSKQLFKTDRFCAVFNISLKIPRNSTVGVVGESGSGKSTLGKAIINLLDFEGSIKFNGKSIKDLSSAEKKLLKKDIQIVFQDPYGSLSPRMTVGEIIGEGLDIHFDFSKEEKIEKISNVMKDVGLDDNLIFKYPHEFSGGQRQRIAIARSIILNPKFMILDEPTSALDRSIQIQVIDVLKRLQDKYELTYLFISHDLKVIRSMCDQIFVMSEGKLVEYGKADEVFENPQQEYTQKLLRAALKYSSN

SEQ ID NO: 144808 - protein, 135 aa, Unknown
  Bacterial polypetide isolated from the Sargasso Sea
VGFVFQSFHLLPRLSALDNVMMPLEILGAKDAKERALKALDEVGLSKRTGHVPHQLSGGEKQRVAIARAMVKAPSILFADEPTGNLDQSSTDNILELLLGINKQTKTTLVVVTHDQQLASRSDMVFELQEGKLKC

SEQ ID NO: 144809 - protein, 238 aa, Unknown
  Bacterial polypetide isolated from the Sargasso Sea
MGRAIVKLENIDSGDIIVDSLNINSSKSDDLKNLRSNAQIIFQDPYSSLDPRYSVGRSIAEPILIQRQCSRSEAKDRVSVLLKRVGLTNEMANRYPHEFSGGQRQRIAIARALASEPKFIVADEPTSALDVTIQAQILELLNNLKNEKNISLLFITHDLAVVRQISNQVAVMCQGKILEIGPTDSVLDNPQNDYTKSLLSAAPYPDPEKRKKLKRNINLKSFNTGPLIEIAKNHWAAS

SEQ ID NO: 144810 - protein, 183 aa, Unknown
  Bacterial polypetide isolated from the Sargasso Sea
LNYIKKNQLKKIRKDIQIVFQDPFSSLSPRMNVYQILSEGIDVHFPKFSEFEKREMIRNILIETGMNFENDHNKFPHEFSGGQRQRIAISRALILKPKILILDEPTSALDITIQNQILNLLKNLQEKYSLSYIFISHDMNVIRSVSDKIMVLKNGKIIEHGNAESIFTNPEKNYTKNLIKTVI

SEQ ID NO: 144811 - protein, 206 aa, Unknown
  Bacterial polypetide isolated from the Sargasso Sea
MSNLIEVQSVNKTYKRGEETLVVLDDLSLEVQKGDFLALMGPSGSGKSTLLNLIGGLDTPTSGQIVVNEQHLETMNASALSTWRANNVGFIFQFYNLLPVLTAHKNVEIPLLLTGLSGSQRKEHVSTALNVVGLSDRGGHKPNELSGGQQQRVAIARALVSDPDILVCDEPTGDLDRNTATEILDLLQILNRDHGKTILMVTHDPV

SEQ ID NO: 144812 - protein, 240 aa, Unknown
  Bacterial polypetide isolated from the Sargasso Sea
MLQVQGLQVFLKQRNRRLTVVEDLNFSLGFGERLGIVGESGCGKSVTALALLNLLPSTMSMAGSIHLASRDGQREDLNQLSEARLCEIRGKKIGMVFQEPMSALNPVQTIGHQVSESLLLHHSLSRHEADQKASRMLDRVGLPVSRFARKLYPHQLSGGQRQRVVIAIAMACGPDLLIADEPTTALDVTIQAQILRLLSELVEEEKMSLILITHDLGVIAENTDRMLIMYAGRCVESGLT

SEQ ID NO: 144813 - protein, 214 aa, Unknown
  Bacterial polypetide isolated from the Sargasso Sea
KSTIAKIITGLVRPTVGEIEYNNFSLYDKKKKYQIHKSRGQIQMIFQDPYSSLNPRFKVKDIIAEPLKFFQKNMSKQDLDQNVFDLIDIVGMTRQSLDRYPHEFSGGQRQRISIARALATRPRLLLCDEPTSALDVSIQAQILNLLKDIQDELHLTMLFISHDLPVIRQMCNRIVVLKNGIVCETNDTEELFNQPTHQYTKELIRLMPKIESIV

SEQ ID NO: 144814 - protein, 147 aa, Unknown
  Bacterial polypetide isolated from the Sargasso Sea
MSNAIIQMKEVNKWFGDFQVLKDINLEVGEKQKIVVCGPSGSGKSTLIRCINRLEEHQKGQIIVDGSELSEKTKDIEKIRAEVGMVFQQFNLFPHLSILDNCTLAPIWVKKTPKKQAEELAMKQLEQVQIADQAMKFPGQCPEDNNR

SEQ ID NO: 144815 - protein, 140 aa, Unknown
  Bacterial polypetide isolated from the Sargasso Sea
IRSKDVGFVFQSFHLLPRLSALDNVMMPLEILGAKDAKERALKALDEVGLSKRTGHVPHQLSGGEKQRVAIARAMVKAPGILFADEPTGNLDQSSTDNILELLLGINKQTKTTLVVVTHDQQLASRSDMVFELQEGKLKC

SEQ ID NO: 144816 - protein, 160 aa, Unknown
  Bacterial polypetide isolated from the Sargasso Sea
RLKVKEIIAEPIKLHNPDIKSSELDSYIYDLLESVELTQQSAIRYPHEFSGGQRQRISIARALATQPRLLVCDEPTSALDVSIQAQILNLLKDLQEQLNLTILFISHDLPVVRQMCDKIAVLKDGKLCEVSETEELFKNPKHNYTKELLKLMPKIESIYN

SEQ ID NO: 144817 - protein, 159 aa, Unknown
  Bacterial polypetide isolated from the Sargasso Sea
MSVKNDFVKFDKVDKSYDGKVLVVKDLQLDIAEGEFITMLGPSGSGKTTCLMMLAGFETPTNGEIYLDGNAISSIPPHKRGIGMVFQNYALFPHMTVYENLAFPLRVRKIPKDEADKKIDKALSMVSLQGFAQRMPGQLSGGQQQRVAVARSLVFDPQL

SEQ ID NO: 144818 - protein, 221 aa, Unknown
  Bacterial polypetide isolated from the Sargasso Sea
MEILLSAKNISKTFQGKKVLDDINIEIKGAEIIAISGASGAGKTTLLNILSTLDKPDDTNKSTLIIENQEIFVLGKNDLANLRNQKIGFVFQFHELIPELSVLENVCLPGWIKKDNDVKKKAEELLKYFGLEEFTHKKPLTLSGGEKQRVAIARSLVNNPKIIFADEPTGNLDSKNSKILFDLFFKLREDYNCSVVIVTHDEKSANICDRKLLIVDGKIKN

SEQ ID NO: 144819 - protein, 251 aa, Unknown
  Bacterial polypetide isolated from the Sargasso Sea
GPSGCGKSTLLRLIAGLEEVTNGEIYINNERVTTTVPKDRDISMVFQNYALYPQMTVYENMAFGLKMRNESSGFIKEKIQWASKKLSLEELLSRKPKELSGGQKQRVALGRAIVREPKVFLFDEPLSNLDAKLRIQMRSVIKRLHEELDATMVYVTHDQVEAMTLGTKIIALNEGVIHQVDSPINLYSDPADTFVGKFIGNPGINLIPLTISENFEINIEGKKNNPITSEEIDTEAIFKNYSKKKVILGIR

SEQ ID NO: 144820 - protein, 167 aa, Unknown
  Bacterial polypetide isolated from the Sargasso Sea
MSLIKVKNLKKKYFLGSQSVDALKGLSFEINQGEFLSIMGPSGSGKTTLMNIIGCLDTPSSGEYILDNNKVQELDDNELANIRNKKIGFVFQSFNLLSRNNALNNVMLPLSYAGFSSANAKKRASEVLSLVGLNDRVDHKPSELSGGQQQRVAIARALVNNPKYNFC

SEQ ID NO: 144821 - protein, 177 aa, Unknown
  Bacterial polypetide isolated from the Sargasso Sea
MSKVELIKLNKVFESKIGEDVIAVNNFNMNIEHGEIVALLGSSGCGKTTTLRMIAGFEKCTDGEIKLDGEMINHLKPSERNVAMAFEGYALYPPLTVSENIAFGLIREKISKSEINKKVDEVINLLEIKDIVDRYPPTISAGQQQRVSLARALVRNSKVLLLDEPMSQLEPQFTSCF

SEQ ID NO: 144822 - protein, 161 aa, Unknown
  Bacterial polypetide isolated from the Sargasso Sea
MTKVRFDDLFKSYDKTEVIHGINLEVNSGEFIVFVGPSGCGKSTLLRMVAGLEDITSGNMYIGENLVNDVAPAQREVAMVFQSYALYPHMTVYKNMAFGLQLAKKPKKEIEEKVIKAAKILQIEDYLDRLPKHLSGGQRQRVAIGRAIVRDPKVFLFDEPL

SEQ ID NO: 144823 - protein, 217 aa, Unknown
  Bacterial polypetide isolated from the Sargasso Sea
MSDETTASPLLSVRGIRKNYRSGGGVLEVLQGVDFHVLPGEFVAIVGQSGSGKSTLLHLMGLLDAPDAGEVWLEGKRIDHLPAAQRDGLRNTVIGMVFQAYHLLPELSALENVLAPLLVRHGVMEWLKAGTHARDQAKMLLDRFGLGERMRHKPRQLSGGEMQRVAIARALITHPHVLLADEPTGNLDESTGVDILDAICELNRRDGLSIVLGHTTL

SEQ ID NO: 144824 - protein, 147 aa, Unknown
  Bacterial polypetide isolated from the Sargasso Sea
MVTDEVVIEISNMNKWFGHFHVLRDIDLIVNKGERIVICGPSGSGKSTLIRCINRLEEHQKGIIKVDGVELNDDVKKIDKIRSEVGMVFQSFNLFPHLTALENCTLAPVWVRKLPKKDADEIAMKYLEIVKIPEQALKYPGQLSGGQ

SEQ ID NO: 144825 - protein, 303 aa, Unknown
  Bacterial polypetide isolated from the Sargasso Sea
EVEAAAKLANAHSFISGLEHGYHTDVGSGGSKISGGQKQRVAIARAIIRKPTVLLLDEATSALDNESEKVVQAALNELLAKTKSAKEATTTIVIAHRLTTITNSDTIFVISAGELAEQGTHDELLEKGGVYALLSKKQGLGKTGDAVAPPASAPEMGGDASDKLQADVTPAAKVQAVGSPGLKQRTAGKRTASVAPIVESAAAGGIEDPVEKKKREKAEAEAMQKEAEKAKGRIWAMQEDDKLYNIGGFFGAVGNGLVFPVMAVTFAGMLFMLLNRSGTFMRNQSYVLAGMFAAISVLLCVPS

SEQ ID NO: 144826 - protein, 116 aa, Unknown
  Bacterial polypetide isolated from the Sargasso Sea
MLYRYPQEFSGGQRQRIAIARALVLQPKLLILDEPTSALDVLVQDSVVKLLINLQSKFNLSYCFISHDLNLIKKMCHRTYVMKDSIIIEQGTTKKIFKNPQEAYTRSLLESSFISY

SEQ ID NO: 144827 - protein, 255 aa, Unknown
  Bacterial polypetide isolated from the Sargasso Sea
MSSVISFKDVSLNFGGVQALDDISFDIEEGSLFAIIGPNGAGKTSAFNCINGIYRPTTGSVNIFDKDISDMKPDQIADLGISRTFQNIELFENMTALDNILIGAHRHIDYGSVAGLLFTKKAREEEDRAREIAEDIIDFLEIEEYRFSFILSLPYGIQKRIELARALAMKPKVLLLDEPAAGMNNEETEDIARFILDIHEELGVTVVLVDHDMNMVMDIATDLIAMDFGKKLFDGKPEDAAKDKTVIEAYLGVSD

SEQ ID NO: 144828 - protein, 241 aa, Unknown
  Bacterial polypetide isolated from the Sargasso Sea
KALAMVSLVGLQNRMPGQLSGGQQQRVAVARALVFDPAVVLMDEPLGALDKNLRESMQYEIKHIHESIGVTVVYVTHDQGEALTMSNRIAVFNDGKVQQLSSPDKLYEEPVNSFVAEFIGENNTFGGEVSEISNGTCKVKLENGEIIANPISVKSVGEKTTVSIRPERALINPKDKMDNNQKGKIEEVIYHGDHTRVRLNLLGNSEFILKVPNSSQNLDIKLGNEINIGWNSHDARALDPK

SEQ ID NO: 144829 - protein, 167 aa, Unknown
  Bacterial polypetide isolated from the Sargasso Sea
LFEPKLEWFFNNLTFFLHLSILDNCTLAPIWVKKMPKKEAESLAMKQLEQVQIVDQALKFPGQLSGGQQQRCAIARALCMEPKIMLFDEPTSALDPEMIKEVLDAMVNLAKAGMTMIVVTHEMGFAKEVADEVIFMDEGMIVEKAVTKEFFANPKSDRTKLFLSQIL

SEQ ID NO: 144830 - protein, 136 aa, Unknown
  Bacterial polypetide isolated from the Sargasso Sea
MEQYLSVKNINKFFGDFQALNNVSFDVKEGEFVCILGPSGCGKTTLLRVVAGLESQSEGLINQNNKDISLLPPDQRDFGIVFQSYALFPNLSVKNNISFGLKTRKQNNETIDKRVDELLKLVGLSDHINKFPAQLS

SEQ ID NO: 144831 - protein, 167 aa, Unknown
  Bacterial polypetide isolated from the Sargasso Sea
MILNDISLDIEEDKITCILGPSGSGKTTLLKLIAGLEKTQKGEIHIKDKLVSSSDTHLKTESRNIGFLFQDFALFPHLSVRENLKFAINGKSDANIEIDEIMKLIKLPNSLPKYPHELSGGEQQRVALARAIISKPQLLLLDEPFSNLDLSLKEEIRDDTLHLLQKF

SEQ ID NO: 144832 - protein, 231 aa, Unknown
  Bacterial polypetide isolated from the Sargasso Sea
ALNPRMLIKDIVGEPLVIHGKTENMRERVIELLNNVGLGKEHLYRYPHEFSGGQRQRIVIARALALEPKVLVLDEPTSALDVSVQAQILNLLNDLQKKFNLTYIFISHDLSVIEYMCDRLAVMYLGKVVEEADTKDLFSNPYHPYTKALLSATPSFEKDRKKIMILGDVPSPITYLDESKVKLATEMTEQERLEIEAIEGKNIDYIVRSSLNEVLPLVKLTETHYARVEND

SEQ ID NO: 144833 - protein, 89 aa, Unknown
  Bacterial polypetide isolated from the Sargasso Sea
MVNGKVSDAEITAASEQAHAHDFVSSFPDGYGTLVGERGIRLSGGQKQRLALARAILVDPKVLLLDEATSALDATSEVLVQDALATQYS

SEQ ID NO: 144834 - protein, 282 aa, Unknown
  Bacterial polypetide isolated from the Sargasso Sea
TIYREIRQSLVDMENMFNLLKEKNNIDDSGSDNLKNNNAEIIFKNIFFGYENNRTIIKNISFSIPEGRSLAIVGPTGAGKSTISKLLFRFYDPDSGEILINKKNIKKYKQNSLRQMIGVVPQDTVLFNDTIFYNISYGLIDSSEEDVINAAKIAGIHDFIESIPNKYNTIVGERGLKLSGGEKQRVSIARAVLKNPSIFFFDEATSALDTNTEKEINKNLNIISQGKTTLIIAHRLSSVSNADKIIVIDKGNIIEEGDHLSLLKKNGLYALMWNKPKHEINI

SEQ ID NO: 144835 - protein, 267 aa, Unknown
  Bacterial polypetide isolated from the Sargasso Sea
MGVYKILDASPSVIEKKIENIETVLEPSVSFNSVKFKYPGHSHVVHSSLSFNIKKGERVGIVGSSGCGKSSIVKLLLRFHDPVQGSVHIGGIDLRDISFDQIRGMISVVHQDTFLFHGTIEDNIKMGNHKANEDEIIKAAKNANIHEFVSTLPEGYKTLIGEKGIKLSGGQRQRVAIARALLRDKPILILDEALSAVDAENEFIIQQALDRLMKDRTTLVLAHRLSSIVKCDRILVIDKGIIAESGSHQSLMLQNGIYSVLMSQQVR

SEQ ID NO: 144836 - protein, 259 aa, Unknown
  Bacterial polypetide isolated from the Sargasso Sea
TRRIYALEHEPVTIKDGPRKISSETASELSISNIGFHYPGRSQKVLENVSFTIHGGQTVALVGPSGAGKTTLAQLLMRFWDPSEGAILLSGNDIREFGLEALRSKIALVAQDTYLFNSTLKENILIAKPNASYLEMKKAIQMASLTELVETLPQGFDTKVGERGTSLSGGQRQRVAIARAFLKDAPILILDEATSHLDALSESEVRGALDKLKEDRTTIIIAHRLSTIRNADNIIVLDGGSIKESGNHDQLLKMNGLYS

SEQ ID NO: 144837 - protein, 224 aa, Unknown
  Bacterial polypetide isolated from the Sargasso Sea
DLFYNQTLGIVGESGSGKTSLILALLKLISFKGKILFNDLDISKLKSKDLIKIRKDMQIIFQDPFSSLSPRMTVEEIVREGLDIHMKEVPIKEKQQMIIDILNEVGLNYDDVRNRFPHEFSGGQRQRIAIARAIILKPKLLILDEPTSALDVSIQNQIIKLLIKLQKKYELSYIFISHDIRVIRSVSDYIIVLKKGEIVEEGSAEDVFSLPKSNYTKELLTAVI

SEQ ID NO: 144838 - protein, 121 aa, Unknown
  Bacterial polypetide isolated from the Sargasso Sea
MSDPIIKINNMNKWFGDFQVLKDINLDVEKNKKIVVCGPSGSGKSTLIRCINRLEEHQKGSIIVDGTELTEETKNIEQIRAEVGMVFQQFNLFPHLSILDNCTLAPIWVKKMPKKQAEELA

SEQ ID NO: 144839 - protein, 121 aa, Unknown
  Bacterial polypetide isolated from the Sargasso Sea
FIDELPEGLQTKVCDQGILLSGGQRQRIAIARALLKDAPILILDEATSALDSESEKFIQKAFDRLMENRTTFVIAHRLSTIENADKILVLSNGKIVEEGTHEELLNQDGEYSFLHKMQFND

SEQ ID NO: 144840 - protein, 285 aa, Unknown
  Bacterial polypetide isolated from the Sargasso Sea
IAQVGRQLADTLGSTRRIYALEHEPVTIKDGPRKKSSETASELSISKVDFHYPGRSQKVLENVSFTIQVGQTVALVGPSGAGKTTLAQLLMRFWDPSEGTILFSGNDIREYELEAIRSKIALVAQDTYLFNSTLKENILIAKPDAGYPEMKKAIQMASLTELVENLPQGFDTKVGERGTSLSGGQRQRVAIARAFLKDAPILILDEATSHLDALSESEVRGALDKLKEDRTTIIIAHRLSTIRNADNIIVLDGGSIKESGNHEQLLKKNGLYSQLVYKQMNFSGG

SEQ ID NO: 144841 - protein, 148 aa, Unknown
  Bacterial polypetide isolated from the Sargasso Sea
EPQMDEDERRAAVSNVLKEVGLSPEFLDRYPHEFSGGQRQRIAVARALILKPQLLVLDEPTSALDMSVQAQIVELLRDLQKRHELTYLFISHDLKVVRALSNHVIVMKDGVIVESGTSDQIFDAPETDYTKALIAAAFDLEVAGGVSQ

SEQ ID NO: 144842 - protein, 192 aa, Unknown
  Bacterial polypetide isolated from the Sargasso Sea
RFYDPDAGTVKIGGHDLKDLRLEDIRGQIAVVNQDTYLFHGTVADNLRVGKPDATAEELEAACRAANAHEFVSLLPQGYDTVIGERGIRLSGGQRQRVAIARAILRDAPILILDEALSAVDAENESIIQDALDRLMRGRTTLIFAHRLSSVIDADRILVLNEGGIAEEGTHAELMAKRGVYPQLMAAQAEES

SEQ ID NO: 144843 - protein, 147 aa, Unknown
  Bacterial polypetide isolated from the Sargasso Sea
MKNVNKWFGDFQVLKDVNLDVSQKQKIVVCGPSGSGKSTLIRCINRLEEHQKGEIIVDGNELTEDTKNIEKIRAEVGMVFQQFNLFPHLSILDNCTLAPIWVKKMPKKQAEEMAMNELKKVQIADQAKKFPGQLSGGQQQRCAIARA

SEQ ID NO: 144844 - protein, 203 aa, Unknown
  Bacterial polypetide isolated from the Sargasso Sea
QGYENRLPHQLSGGQRQRIALARALITKPSVLLLDEPLSALDPALRVLMRTELKQMQRELNITFIHVTHSQEEALALASIAVVMNEGKVEQIDNPLTVYNKPKSAFVSEFVGGHNIIQEENKLFSIRTDNIRLEKNNKTKKNTEKMKITDIEFQGNSVKIILNNTKYKHFNVILGDSEFFTKDLKISDDVYCSWDIKKLHELQ

SEQ ID NO: 144845 - protein, 213 aa, Unknown
  Bacterial polypetide isolated from the Sargasso Sea
MRVPSRPRPCAMSESMNQNAMKQHNAVLSCRNLSKRYDEGPESVVVLDGLELELFPGERVAIVGSSGSGKSTLLNMLGGLDTPSEGSVWLAGEQLSALSETARGLLRNRALGFVYQFHHLLAEFTALENVCMPLLIGKTSISEARERATKLLERVGLGHRLNHKPSELSGGERQRVAIARALVNRPGLVLLDEPTGNLDQHTAEGIQELMREL

SEQ ID NO: 144846 - protein, 151 aa, Unknown
  Bacterial polypetide isolated from the Sargasso Sea
MSKNTEFVKFDKVDKSYDGKVLVVKDLNLNISEGEFITMLGPSGSGKTTCLMMLAGFETPTNGEIYLDSNPISNIPPHKRGIGMVFQNYALFPHMTVYENLAFPLRVRKVQKDEIDKKVDKALSMVSLSGFESRMPAQLSGGQQQRVAVAR

SEQ ID NO: 144847 - protein, 223 aa, Unknown
  Bacterial polypetide isolated from the Sargasso Sea
MSQFKKKYSHELSGGQQQRIALARAMAPKPSLLLMDEPLSSLDEELREQLAREIRIILQQEKISAILVTHDQNEAFAVGDHISVMHQGRVQQNDSAYNLYHHPLNRFVAEFIGEGTLLSGFVSSEDTISTDLGDIAVNLPEDFKYQEKVDVLIRPENVILSHDNEIKAIITARYFRGSSYLYNLKTSRGAELLCLLNDSESLQIDQLIGVRLQIERPVIFSYP

SEQ ID NO: 144848 - protein, 152 aa, Unknown
  Bacterial polypetide isolated from the Sargasso Sea
MKDRSKEDEVADININTINKYYGDVHVIKDISLDIKSQSFTVLVGPSGCGKSTMLRMIAGLEDINSGTISIDGEVVNDLPPKQRNIAMVFQSYALYPHMTVFDNMAFGLKLEKRSKDEINERVQEAARILQIEEYLQRKPKQLSGGQRQRVA

SEQ ID NO: 144849 - protein, 189 aa, Unknown
  Bacterial polypetide isolated from the Sargasso Sea
MKAIDCKNVSVNLGGYEVLKGIDLEVEVGGWTTIVGPNGAGKSTLIRATGGIVKSSGNIKIVDRNVQDLGHRELAKFVAVVSQKPVIPMGMRVIDYVLLGRISHLGFFESEGEQDIETAVLALGSLDAAHLSDRFVGTLSGGEKQRVVVARALAQSSPVLLLDEPTTALDMKHQQETLELINQLRVERN

SEQ ID NO: 144850 - protein, 187 aa, Unknown
  Bacterial polypetide isolated from the Sargasso Sea
LYRYPHEFSGGQRQRIVIARALALDPKILVLDEPTSALDVSVQAQILNLLNDLQKKYDLTYVFISHDLSVIEYMCDRLAVMYLGRVVEEADTEDLFSNPQHPYTRALLSATPSFEKQKEKIMILGDVPSPITYLDESKAKLATEITEQERLEIKAIEGKGIEYIVRSSLNEHLSLKEVAPSHYARVK

SEQ ID NO: 144851 - protein, 267 aa, Unknown
  Bacterial polypetide isolated from the Sargasso Sea
MPWEHEPVTIKDGPRKISSETASELSISNVGFHYPGRSQKVLENVSFTIQGGQTVALVGPSGAGKTTLAQLLMRFWDPSEGAILLSGNDIREYGLEALRSKIALVAQDTYLFNSTLKENILIAKPDASYPEMKKAIQMASLTELVETLPQGFDTKVGERGTSLSGGQRQRVAIARAFLKDAPILILDEATSHLDALSESEVRGALDKLKEDRTTIIIAHRLSTIRNADNIIVLDGGSIKESGNHDQLLKKNGLYSQLVYKQMNFSRG

SEQ ID NO: 144852 - protein, 150 aa, Unknown
  Bacterial polypetide isolated from the Sargasso Sea
MFQLKNIDKSFRDRDEEIYVARDLSWSLEAGESAALSGESGVGKTTLLNIIAGLDGAESGEVIIDGIDIRRLSHSNLANFRRDRLGLIFQRFHLVPSLSAWDNAALQARLGQCFDTDFADYLFDALSINGLAQRYPSQLSGGQQQRVAIA

SEQ ID NO: 144853 - protein, 234 aa, Unknown
  Bacterial polypetide isolated from the Sargasso Sea
MNAAADTVVKLVGVSRLYRQGASVVHALQHINLEIRKGDFAVLVGPSGSGKTTLLNVIGGLDSPTEGHVWVDGSEIGTLGKAALSDIRLRKIGFVFQEFNLIPVLSALENVEFVMLLQGVPEMQRRDRAMTLLKELGLEGMEHRRPQQLSGGQQQRVAVARAIAAEPIIVLPDEPTANLDSKAGAALMDMMKAMNERRGVTFVFSTHDPMVVERARRVIRLRDGRIEADERRPP

SEQ ID NO: 144854 - protein, 245 aa, Unknown
  Bacterial polypetide isolated from the Sargasso Sea
MKNLIEVKNIKKNYGKKEAVKGISFNVEEDEILGLLGPNGSGKTTTIGMLLGLLKPTSGQIFINNLKLEENRIEILEMINFISPYIELPKKLTVKQNLYVYSKLYKVQNIRERIEYLSEKLRIGELLNSITGELSSGQKNRVSLAKALVNEPKVLLLDEPTASLDPEVGDFVRTFLEEYKKEKKISILLASHNMNEVTRLCKSVLMMKNGEIIDQGKPEDLITKHGRTNLEEVFLKLSRSKSEFN

SEQ ID NO: 144855 - protein, 150 aa, Unknown
  Bacterial polypetide isolated from the Sargasso Sea
MSDKIIQIKEMNKWFGDFQVLKNINLDVEKNKKIVVCGPSGSGKSTLIRCINRLEEHQEGSIVVDGTELTEETKNIEQIRAEVGMVFQQFNLFPHLSILDNCTLAPIWVKKMPKKDAEALALKHLEKVQIADQAYKYPGQLSGGQHKDVQ

SEQ ID NO: 144856 - protein, 322 aa, Unknown
  Bacterial polypetide isolated from the Sargasso Sea
RVVISLALCCEPELLIADEPTTALDVSIQSQIIELIKKLTKERNLAVILITHDMGVIAETADRVAVMKSGNLVEIGETKKILTNPQENYTKSLVSSVPPTNKKITRFVIVEKEKNNNKENNIKILNRWSKKEIVNQDLVEVKNLNKSFDDNFFTESSKNSVMAVNDVSFEIKEGESFGLVGESGSGKSTIAKMIVNLFKPTSGDIFFDNVCITKIKQRSELMKFRKQIQMIFQDPYSSLNGRLKVKDIIAEPITLHNPSISTLDLNNYIYDLLESVELTQKSANRYPHEFSGGQRQRISIARALATQTRLLVCDEPTSALDV

SEQ ID NO: 144857 - protein, 185 aa, Unknown
  Bacterial polypetide isolated from the Sargasso Sea
MAEIQLRNLSKSWGNFVAVKNFNLTIADKEFLVLLGPSGCGKTTTMRMIAGLEDISEGEIFIDGKLVNNLEPKDRDISMVFQSYALYPNMNVYENIRFPLKVRKIEKKIQDSKVKKAAQMVELTEYLDRKPAELSGGQKQRVALARAIVREPNVFLMDEPLSNLDAKLKVSTRAQIKNLSHELAI

SEQ ID NO: 144858 - protein, 285 aa, Unknown
  Bacterial polypetide isolated from the Sargasso Sea
FVGPSGCGKSTLLRMVAGLEDITEGDINLDGQLINEVDPSERDVAMVFQNYALYPHMNVYNNLAYGLKNRGIDKETIEQKVNDAAKLLQISDFLQRKPSMLSGGQRQRVAMGRAIVRNPKIFLFDEPLSNLDAKLRIQMRLEIKKLQQKVGVTSIFVTHDQVEAMTLADRLAVINDGIIEQLGTPIEIYNNPKSLFVAGFIGSPQMNFLDANLNNKTLSAENFEIKNIESDYNGEVTLGIRPEHLIESENGLINLKVELVEQLGSDNLVYGQNKNIKDFCYRSPG

SEQ ID NO: 144859 - protein, 268 aa, Unknown
  Bacterial polypetide isolated from the Sargasso Sea
NYALYPHMNVYNNLAYGLKNRGLAKDVIEKKVKAAAKLLQISDYLERRPALLSGGQRQRVAMGRAIVRSPKIFLFDEPLSNLDAKLRIQMRLEIKKLQRKVGVTSIFVTHDQVEAMTLADRLAVINNGIIEQLGTPIEIYNNPTSVFVAGFIGSPQMNFIEGELKNKKLKTQAFEIKGIKSDFNGKVILGIRPEHMVQAYNGLIKFNVDLVEKLGSDNLVYGEIKGKKDLLCYRTPGNEKINSGSKLELNIQDNKLYIFNKKTGKRII

SEQ ID NO: 144860 - protein, 197 aa, Unknown
  Bacterial polypetide isolated from the Sargasso Sea
MENKNSDEIIVKFDEVTKQYGDLVVLDKLNLNIKKNEMVSIIGPSGSGKTTVLRVLMTLEKINGGVIHLDGETLTHMNLDGKLVEANEKYLRERRSKIGMVFQQFNLFPHMTALQNCIQAPVEVLGMKKEDAEERALELLELVGLTDKKDQHPTRLSGGQQQRVAIARALAMRPKVMLLDEITSSLDPEVVGEVLNV

SEQ ID NO: 144861 - protein, 243 aa, Unknown
  Bacterial polypetide isolated from the Sargasso Sea
MSALLKLQNIHKAFADVHVLEDVSLSLAAGEVVSLLGPSGCGKSTLLRIAAGLDQDYQGGLELNPLLNFGRGSGIGVVFQEPRLMPWLSVAQNVGFADGWVADDQWIEQLLRDVGLHGRGDALPKHLSGGQAQRVAIARALYGKPQVLLLDEPFSAVDAFTRMKLQDLVVVLAARYEIAVLLVTHDLDEAFYLSDRVLILGGTPSRLQRELAVPLTRPRDRRSAELAYLRGEALTELYQSHML

SEQ ID NO: 144862 - protein, 113 aa, Unknown
  Bacterial polypetide isolated from the Sargasso Sea
MSNSIINIENVNKWFGDFQVLKDINLEVQPKQKIVVCGPSGSGKSTLIRCINRLEEHQEGKIIVDGTELSENTKNIEQIRAEVGMVFQQFNLFPHLSILDNCTLAPIWVKKMP

SEQ ID NO: 144863 - protein, 288 aa, Unknown
  Bacterial polypetide isolated from the Sargasso Sea
ERGNVTAGDIAAAGAISLRLSQMTGWVSFTLMTLYANLGEVEDGVKTLSTSYKLGDKDKAPDLLVSKGSINFKNVCFTYGKNLSAVKNISLSIAPGEKIGLVGASGAGKSTLVSLLLRLYEPQKGVISIDDININDITQSSLRKQIAMVTQETALFNRSARDNIMYGNPNATENTLIRASRQAEAHDFILGLEDHKGRKGYDAHLGEQGVKLSGGQRQRIALARSILKDSPILVLDEATSALDSEVESSIQNALELVMENKTVLAIAHRLSTLAKMDRIIVLSNGQVV

SEQ ID NO: 144864 - protein, 256 aa, Unknown
  Bacterial polypetide isolated from the Sargasso Sea
KLRRAQESAEKGRPYSEKMNNVILNLSNGISDKENAPKLLSGTGQEKTHLCVVMTSDRGLCGGFNSNIIKKAKSYFAKIVDEGKELKIITVGSKGNDQLKRVYGDKIIENISFKESKNANYFDADKVGKMVIEKFEAGEFDVCTIFYNQFKNVITQIPQAQQIIPLNNEGEESSSEESYEFEPDEDEILSNLLPKNISTQIFKAMLENSASEQGSRMSAMDNATRNAREMVDKLTIEYNRSRQAAITKELIEIISG

SEQ ID NO: 144865 - protein, 226 aa, Unknown
  Bacterial polypetide isolated from the Sargasso Sea
MKTSTKTVISINNISKVYEGPPPVRALDGVSLEIKEGDFVSIVGQSGSGKSTFLNMIGLLDSITDGSIEIEGKDVSELSDNELSKFRGEKIGFIFQSFFLLPGLTAQENVAEGLLYQGISRSERLEKAKEVLEQVGLGDRLTHLPKELSGGQQQRVAIARALVQDPAFVLADEPTGNLDKESGINILNILKDLNNQGKTVIMITHNQEHASMFKKVIELVDGKIVN

SEQ ID NO: 144866 - protein, 301 aa, Unknown
  Bacterial polypetide isolated from the Sargasso Sea
SEGFFFNKNISLVKAVDGINFSIKRGETLGLVGESGCGKTTTGRCILQLEKATEGKIVFEGQDLTQLDSSELSPLRQKIQVIFQDPYSSLNPRLKIGDTISEPMKVHNIQSDPKLRNKRVAELLNICGLPSVMADRYPHEMSGGQRQRVGIARALSLNPEFIICDEAVSALDVSIQAQVINLLEDLREEFNLTYLFIAHDLSVVRHLCQKVAVMYLGKIVEMADCDELYDNPQHPYTKALLNAVPVPDPEVEKNREHNIMTGEVPSPINPPSGCVFHPRCSLAVESCKSDIPVWKINVQAI

SEQ ID NO: 144867 - protein, 118 aa, Unknown
  Bacterial polypetide isolated from the Sargasso Sea
QLSTGMKQRVAIARALVMDPDVLLMDEPFAALDSQTRDLLLVEMQMIWQKTKKTIIFVTHNVPEAAVLGSRVAVFSHRPSVVKKSLDIDYKRPRVAEDENLGQFEKQILAALRHQGPK

SEQ ID NO: 144868 - protein, 162 aa, Unknown
  Bacterial polypetide isolated from the Sargasso Sea
MSILLKLNKVNLKYQTGKDNIKVLKNINLTTKKKETISIVGESGSGKTSLIMLIGGLEKASSGKIFFQNHEITKLSEDEVSEIRRKNIGIIFQSFYLIPNYTAVENVALTLELNKFKNPEKEAKQLLDRFRLNHRFNNLPSQLSGGEQQRVAIARAIAMKPE

SEQ ID NO: 144869 - protein, 261 aa, Unknown
  Bacterial polypetide isolated from the Sargasso Sea
TAKQIVDQKVRDAAEVLQITELLERKPKELSGGQRQRVAIGRAIVRDPKVFLFDEPLSNLDAKLRVQMRIELTKLHRELNATMVYVTHDQIEAMTMADKIVVLREGYVEQVGAPLDLYHKPANLFVAGFIGSPAMNFLDGKISGISDQTIEFELTNQKKIQIHCQPGEKVKAGSSAKAGIRPEHIELTGDSDPTLQAKVFAVERLGGETYLYVKTENNEELTVHASSDKVIRVDDLVSIGFAQESCHLFNEQGQVFEKLAA

SEQ ID NO: 144870 - protein, 227 aa, Unknown
  Bacterial polypetide isolated from the Sargasso Sea
MRFENIGMRYGIGPEVLRDISFTLAPGSFHFLTGSSGAGKTTLLKLMYLALRPTRGLVHLFDNDISVTPRDELPALRRRIGVVFQDFRLIDHLTAVENVALPLRVNGVRHGEIDTHVRELLSWVGLGERLDARPSTLSGGQQQRVAIARAVINRPRLLLADEPTGNVDDHIAVRLMHLFEELNKAGTTIVIATHNNVLVEEFGYPVLQLDDGELTVRRIRQPAAEVV

SEQ ID NO: 144871 - protein, 256 aa, Unknown
  Bacterial polypetide isolated from the Sargasso Sea
RKLNKSDIEEKVKKTLEMVELGEFGNRMPLQLSGGQQQRVALARSLVFEPRLVLMDEPLGALDKKLREQMQYEIKHIHERIGITVVYVTHDQSEALTMSNRIAVFNDGKIQQISSPDILYEKPENAFVANFIGENNQLKGKVKSINGKNCVVTTDQGDDITSLKINVNAVGDASTVSLRPERVEINSTESNFENSFNAKVKELIYLGDHIRTRVEVCGNDQFIVKVPNSYKGANLKEGATVKLSWKASDSRALDLR

SEQ ID NO: 144872 - protein, 284 aa, Unknown
  Bacterial polypetide isolated from the Sargasso Sea
WSSKMLPIVQHSFDSWSKLTGGRATLSDTLILLEQPLQEKSVSNNNSRMNFDSEIVFDHITFSYSGSKQNVINDISLKIKKGDRIGLVGETGSGKSTFIDIFMGLLVPQNGEIRVDGVILNKSNAHSWQQNISHVPQSIFLIDATIKENIAFGVDKDKIDIEKVVAASKIAQIHSIVNEMPNQYLSNVGEKAVQISGGQRQRIAIARALYKNLKIIVLDEATSALDTTTENRLMEAIDKVDKDITMLMVAHRLSTLKDCNKIIEFENGKIKRIGSYEEIITSQL

SEQ ID NO: 144873 - protein, 192 aa, Unknown
  Bacterial polypetide isolated from the Sargasso Sea
DQDISHVSQDSLRSKISVVAQDTSMFNRSAYDNILYGNPIASYDDVIDSAKKAQAYPFIMDLTDNQGRTGFNAYLGERGVKLSGGQRQRIALARAILKKAPILILDEATSALDSDTEAKIQLALDYVMRDKTVFAIAHRLSTIVKMDRIILLHEGRIIEQGTHRELLKNGGLYSKYWEQQAGGFIGIDQMAV

SEQ ID NO: 144874 - protein, 146 aa, Unknown
  Bacterial polypetide isolated from the Sargasso Sea
YGARENVTRSQIEHAAKMAHVEEFLANLPDGLDTVIGENGLMLSGGQRQRIAIARAILAQAPILILDEATSALDTESEKLIQDALETLQKRCTSIVVAHRLSTIESADAIMVVEQGQIIEKGSHNELLEKNGHYAQLHALQFGDAK

SEQ ID NO: 144875 - protein, 144 aa, Unknown
  Bacterial polypetide isolated from the Sargasso Sea
MSESIIKIENMNKWFGDFQVLKDINLEVERNKKIVVCGPSGSGKSTLIRCINRLEEHQKGSIIVDGTELNEDTKNIEHIRAEVGMVFQQFNLFPHLSILDNCTLAPIWVKKLPKKEAQDLAMKQLEKVQIADQAQKFPGQLSGG

SEQ ID NO: 144876 - protein, 224 aa, Unknown
  Bacterial polypetide isolated from the Sargasso Sea
MNNKVIDVKDLKKNFSDNSNIIKAVNEVSFSVNESDIMIVFGRSGSGKSTLLHLLAGLETITSGQIKFENYAFQDLTLDELASIRRTNIGFVYQFHHLIPEFKAIDNAAFPLLLNGQSREVAYEKSRQILAKFGLEKRLFHKPNQLSGGERQRVAIARALIHDPKFVLLDEPTGDLDRETAQEVREMLKDFMINSKSSLIIATHDRSFEEISDFQKTMDSGSFI

SEQ ID NO: 144877 - protein, 197 aa, Unknown
  Bacterial polypetide isolated from the Sargasso Sea
MLQRLYTPERGRVLVDGMDLALADVSSLRRQIGVVLQDNMLFARSIRENIALTDPGAPIEQVMQAAKMAGAHEFILELSEGYDTVVGEHGASLSGGQRQRIAIARALMGNPRILIFDEATSALDYESERIIQQNMQAICKGRTVIIIAHRLSAVRDANRILVMDRGQIVEQGSHAELLTHQAGHYSRLHRLQQGGAA

SEQ ID NO: 144878 - protein, 227 aa, Unknown
  Bacterial polypetide isolated from the Sargasso Sea
MPGQLSGGQQQRVAVARALVFDPAVVLMDEPLGALDKNLRESMQYEIKHIHESIGVTVVYVTHDQSEALTMSNRIAVFNDGKVQQLSNPSELYEKPVNSFVAEFIGENNTFNGEVSDISGDECKVKLSNAEIIASAISVKSKGEKTTVSLRPERALIEPSEKMDNMFSGKIEEVIYHGDHTRVRINLLGNPEFILKVPNSTSNLELKVKEDIKIGWNSSDARALDPK

SEQ ID NO: 144879 - protein, 165 aa, Unknown
  Bacterial polypetide isolated from the Sargasso Sea
MNTSVSIKDLSLSFGAVDVLKNLDLDIQDGEFLVLLGSSGCGKSTLLNCIAGLLDVTGGQIFIKDKNVTWLEPKDRGIGMVFQSYALYPQMTVEKNLSFGLQVAKIPKAEIDKRVKRASEILQIEPLLKRKPAELSGGQRQRVAIGRALVRDVDVFLFDEPLSNL

SEQ ID NO: 144880 - protein, 209 aa, Unknown
  Bacterial polypetide isolated from the Sargasso Sea
MIVNLYSPSAGDIDFDNVCITKIKSNKEMMKFRKQIQMIFQDPYSSLNGRLKVKDIISEPIKLHNPSISSKDIDIYIYDLLESVELTQQSAERYPHEFSGGQRQRISIARALATQPRLLVCDEPTSALDVSIQAQILNLLKDLQEQLNLTILFISHDLPVVRQMCDRIAVLKNGKLCEISKTEELFKNPSHEYTKELLTLMPKIESIYN

SEQ ID NO: 144881 - protein, 203 aa, Unknown
  Bacterial polypetide isolated from the Sargasso Sea
IINLLDFEGSIKFNGKSIKDLSSVEKKLLKKDIQIVFQDPYGSLSPRMTVGEIIGEGLDIHFDFSSEEKIEKISNVMKDVGLDDSLIFKYPHEFSGGQRQRIAIARSIILNPKFMILDEPTSALDRSIQIQVIDVLKRLQDKYKLTYLFISHDLKVIRSMCDQIFVMSEGKLVEFGKADEVFENPQQEYTQKLLRAALKYSSN

SEQ ID NO: 144882 - protein, 141 aa, Unknown
  Bacterial polypetide isolated from the Sargasso Sea
MINQVEVEKVYKTFGEVKAVDGVSLKVAQGHFFSLLGPSGCGKTTLLRLIAGFEIPNSGDILIDSKSMDRIAPNLRPTNMVFQNYAIFPHLNVEENVAYGLRKKNLPKEKKLKMINDSLELVGLEGLNKRSSNALSGAKSK

SEQ ID NO: 144883 - protein, 230 aa, Unknown
  Bacterial polypetide isolated from the Sargasso Sea
MAVCNVYFKYPSREEYTLKDINLTVQEGEAIGIIGPSGSGKSTLIDLLLGFLKPEKGEINVNEYSINSNLEGWRNQVAFMPQQVYLIDDTILNNVALGIKDEEIDHARVTTSLEAAQLQDLVEDLPDGYNTLVGERGLQMSGGQRQRVALARAFYFGRDILILDEATSSLDNKTEKEIIKNIKSLKGKKTLIVIAHRLTTLVNCDRIYEIDNGKIINEGSYEDVILKNDR

SEQ ID NO: 144884 - protein, 287 aa, Unknown
  Bacterial polypetide isolated from the Sargasso Sea
YLGFNSKDIIPLITIFGLGTLRLRPVVSTFLNSINQIRFCRYATSIVYRDMKRSSNYRLNESSLQFKKNNFGKEFENLEINNISFKYPNTNNWAIEEISLSINKGDSIGVIGPSGAGKTTLIDLLLGLIDPQSGKIQYNGNFLDDNLSNWQSNVAYLPQEIFLTDDTLSANIALGIDEEHIDYKKISGILEKVKLATLVDSLPKGLKTIIGERGAKLSGGQRQRIALARAFYHDRDVLIMDEATSALDNETENEIVNEIKGLKGKKTLIVIAHRFSTIKHCDKIYKL

SEQ ID NO: 144885 - protein, 222 aa, Unknown
  Bacterial polypetide isolated from the Sargasso Sea
SLIGSSGSGKSTLLRCANLLENSQQGKIFFDGEEIKWAGTGEDRTPADSNQVRLMRTNLSMVFQQFNLWSHMTVLQNVMEAPVSVLGIEKEKAECNARDYLNKVGIGEKWGSYPAELSGGQQQRAAIARALCMEPSALLFDEPTSALDPELEQEVIKVIKDLAQEGRTMIIVTHDMQLAGDVSDHVVFLHKGLIEEEGSPNSLFKSPKSERLQKFLSSTRAA

SEQ ID NO: 144886 - protein, 170 aa, Unknown
  Bacterial polypetide isolated from the Sargasso Sea
QTFKIGMVFQQFNLFPHMTALQNCVEAPVEVLGLKREEAEERALDLLELVGLTDKKDQHPSRLSGGQQQRVAIARALAMRPKVMLLDEITSALDPEVVGEVLNVIRSLNKEHNLTMIMVTHQMGFAREISDRVCFFNEGKIFEEGPPEKLFGDPQNERTKQFLHAVLDAN

SEQ ID NO: 144887 - protein, 181 aa, Unknown
  Bacterial polypetide isolated from the Sargasso Sea
MPVAPIVHPVSSLASGLAERPEHSSESPLSVHAVTVAYQRKPVLWDIDYDAPANRLIAIVGPNGAGKSTLIKACLGLVPRASGQIELWGRPYKKVRSRVGYVPQRESVDWDFPVSALDVVCMGRYRRIGWCLPVTRKHKRVAMDCLEHVGMAGFADRQISQLSGGQQQRVFLARALHRKPT

SEQ ID NO: 144888 - protein, 289 aa, Unknown
  Bacterial polypetide isolated from the Sargasso Sea
IHEYTKHLLAAEPSGIPHLSSIDAPSVMKSTKLKVWFPIKKGVLRRVIGHVKAVDGVSVEIKEGQTLGVVGESGSGKSTLGRALLRLERSSGTIIFRGTQIQGFQFSEMRPLRRQMQIVFQDPYGSLSPRLSVGQIVEEGLLVHDLGGNYEERRDLIGEALKEVDLDPSVQDRYPHEFSGGQRQRIAIARALVLKPNFIVLDEPTSALDMSVQAQIIDLLRNLQEKHGLAYMFISHDLKVIRAVSHEIIVMKQGRVVEAGLTNEVINNPAQPYTQALMAAAFDLRADLS

SEQ ID NO: 144889 - protein, 120 aa, Unknown
  Bacterial polypetide isolated from the Sargasso Sea
INELNDQVDYNVGDNGSNLSGGQKQRVAIARAVYSNSPILILDEATSSLDSKSEKLVQDAIDKLMINKTSIVIAHRLSTIQNANKIIVLDKGEIVEQGNHDELIKNDSYYKKLIALQSFK

SEQ ID NO: 144890 - protein, 330 aa, Unknown
  Bacterial polypetide isolated from the Sargasso Sea
MKYWGGIQTVKAQHFELTARWKWQDRYRIFVSEGFKSTALGSTSGEIGGFLNQISGLLVLWIGMGLVLKGDLTLGMLIAFRIISGNVTGPLLQLSGLYQGFQGVQLAMERLSDILDQNPELSSQDEIGQISMPPIKGSIRFEGVSFRFGKKGPYQVDSVDLEISSGSFIGIVGQSGSGKSTLTKLIPKLYQLDEGRIFIDDYDISKVNLSSLRRQIGIVPQDSLLFEGTIADNIALNDPQATTESIIAAARIACAHDFIMSLGQGYATPLAERGGNLSGGQRQRIAIARTILANPQLLVMDEATSALDLHTERQLCRNLSAWASGRTVLF

SEQ ID NO: 144891 - protein, 174 aa, Unknown
  Bacterial polypetide isolated from the Sargasso Sea
MLKMKQLGKVFHTGEVSTHALREVDLHVKEGDFVSVTGPSGSGKTTFLNIAGLLEVASSGEFLLDGDNVNLLPDSARSKMRNQKIGFIFQGFNLIPELNLFDNVDVPLRYRGFDAKERKRRIEQQLELVGLASRMKHLPSQLSGGQQQRVAIARALATSPRFLLADEPTGNLDS

SEQ ID NO: 144892 - protein, 107 aa, Unknown
  Bacterial polypetide isolated from the Sargasso Sea
MTAPVSIRNATKTFGDFTALDDVSLEIAAGEFIVLLGPSGCGKTTLLSLLGGFLSPTSGTIEIDGKDMGDVAPAKRPTTTMFQDYALFPHMTLRDNVAFGLKMRKVG

SEQ ID NO: 144893 - protein, 189 aa, Unknown
  Bacterial polypetide isolated from the Sargasso Sea
MKTSTKTVISINNISKVYDGPPPVRALDGVSLEIKQGDFVSIVGQSGSGKSTFLNMIGLLDSITDGSIEIEGKDVSELSDNELSKFRGEKIGFIFQSFFLLPGLTAQENVAEGLLYQGISRTKRLEKAKEVLEQVGLGDRLTHLPKELSGGQQQRVAIARALVQDPAFVLADEPTGNLDKESGINILNI

SEQ ID NO: 144894 - protein, 190 aa, Unknown
  Bacterial polypetide isolated from the Sargasso Sea
PWLTVTENIKFCRQLKVISDSVHSQSDVEAASGRADALLNLMGLKNFAGAYPSQLSGGMQQRVAIARALMPRPDFLLMDEPFGALDAQTREVMHDLILHVHRLEKSTILFVTHDVEEAIYLGTRIVLMAPRPGRIDSIYEVPLPKVRHQDMKLEPEFIALKREILTRIRETSGVQTDLDQLARLSEGAGL

SEQ ID NO: 144895 - protein, 166 aa, Unknown
  Bacterial polypetide isolated from the Sargasso Sea
MGAIDIKSAGKIYPNGTRALEEVSITINDGEFVVLVGPSGCGKTTLLRMVAGLEDITEGEISIGDKTVNDVAPKDRDIAMVFQNYALYPHMSVFDNMAFSLKLRKLPKDEIDKKVKDAAKTLEISELLDRKPKALSGGQRQRVAMGRAIVRNPQAFLMDEPLSNLD

SEQ ID NO: 144896 - protein, 264 aa, Unknown
  Bacterial polypetide isolated from the Sargasso Sea
MDRKPKALSGGQRQRVAMGRAIVRSPQAFLMDEPLSNLDAKLRVQMRAELGELHSQLETTTLYVTHDQVEAMTMGDRVAVIRKGVLQQIDTPREIYLYPKNIFVAGFIGSPAMNFVYATINASGKKTKLTFGDSNIVSSDAPKSLSDFNGKEIVLGIRPEAFEDSVYANDKEFTEQININVSLLEQLGSDTYIHFYKDIPPVQTKAIEEILADEGEDISALGTETKFIARINPNATIEEGQNINLAIDPSKLHYFDPETGLAIT

SEQ ID NO: 144897 - protein, 190 aa, Unknown
  Bacterial polypetide isolated from the Sargasso Sea
MAFLKFENIDKSFGENNVISKFNLEVEKGKFIVLLGPSGCGKSTLLRMIAGLEKIDYGKILLENNLLNDLLPSKRQIAMVFQSYALYPHMSVFENISFGLKSEKISKNEIKDKVIEAAKILKIEELLDRKPRELSGGQRQRVAIGRAITRNPKLFLFDEPLSNLDAALRSEMRVEISKLHKKLKSNIVYV

SEQ ID NO: 144898 - protein, 128 aa, Unknown
  Bacterial polypetide isolated from the Sargasso Sea
ALELLELVGLTDKKDQHPSRLSGGQQQRVAIARALAMRPKVMLLDEITSALDPEVVGEVLNVIRSLNKEHSLTMIMVTHQMGFAREISDRVCFFNEGKIFEQGPPEKLFGDPQNERTKQFLHAVLDAN

SEQ ID NO: 144899 - protein, 116 aa, Unknown
  Bacterial polypetide isolated from the Sargasso Sea
QIDDQANKFPGQLSGGQQQRCAIARALCMQPKIMLFDEPTSALDPEMIKEVLDAMVSLAKGGMTMIVVTHEMGFAKEVADEVIFMDEGMIIEKADTKEFFANPKSDRTKLFLSQIL

SEQ ID NO: 144900 - protein, 247 aa, Unknown
  Bacterial polypetide isolated from the Sargasso Sea
LKNNSFMARKQFTAVDDVTFKINTNSTVGLVGESRSGKSTLGKAIAGLLNYEGEILFDGKNLGKISAFERQRIKKNIQIIFQDPFGSLSPRMTVGEIIGEGLDIHFDLKKNEKVSLIKDSMEDVGLNPEHIFKYPHEFSGGQRQRIAIARSIILKPKLLILDEPTSALDRSIQIQVLELLKELQKRLKLTYLFISHDLKVIRSISDHIFVMQNGKIIETGPSKVVFEDPKNQYTVDLLKAALKYSSG

SEQ ID NO: 144901 - protein, 139 aa, Unknown
  Bacterial polypetide isolated from the Sargasso Sea
NLELNQNVYDLIDIVGMTRQSLDRYPHEFSGGQRQRISIARALATRPRLLICDEPTSALDVSIQAQILNLLKDIQDELHLTMLFISHDLPVIRQMCNRIVVLKNGILCETKNTEELFNNPEHSYTKELIRLMPKIESII

SEQ ID NO: 144902 - protein, 234 aa, Unknown
  Bacterial polypetide isolated from the Sargasso Sea
MIINKISKSYGNKKVVRDISILINRGEIVGLLGPNGAGKTTTFYMIVGLVKPDTGSILLDKIEISKMPIYSRGLQGISYLPQEPSIFRGMNVEDNLLSIIEIVEKDKNKHDIILQSLLNEFDINHVRKSKSIVLSGGERRRLEIARTLASRPKYLLLDEPLTGIDPVSIEEIKIIIKKLKQKNIGVLITDHNVRETLKIVDKVYIVNEGMIYFSGNPNEAISNDRIKKFYLGSN

SEQ ID NO: 144903 - protein, 126 aa, Unknown
  Bacterial polypetide isolated from the Sargasso Sea
MSEVGLEPSSMLRFPHEFSGGQRQRIAIARSFVLNPKFVLLDEPTSALDLSIQKQILELLLQLQKNHKTTYIFISHDLRVIRSISHNLIVMKDGSILEQGVAKNILNNPQNDYTKNLIKSAFDIIY

SEQ ID NO: 144904 - protein, 244 aa, Unknown
  Bacterial polypetide isolated from the Sargasso Sea
DEKLVKAVNDVSFELFEGETLGLVGESGSGKSTIAKIITGLVRPTAGEIEYNNFSLYNQKKKYQIQKSRGQIQMIFQDPYSSLNPRFKVKDIIAEPLKFFQKNISKQDLDQSVFDLIDIVGMTRQSLDRYPHEFSGGQRQRISIARALATRPRLLVCDEPTSALDVSIQAQILNLLKDIQDELHLTMLFISHDLPVIRQMCNRIVVLKNGIVCETNDTEKLFNNPLHAYTKELIRLMPKIESLV

SEQ ID NO: 144905 - protein, 199 aa, Unknown
  Bacterial polypetide isolated from the Sargasso Sea
MAEIELKNISKSFSDTQVIKSLDLSIQDGEFITIVGPSGCGKSTLLRIIAGLETQSSGDVIIDGREVNNIRASDRDLAMVFQSYALYPHLTVKQNLSVPLKLRELSKIERIPIFNWFLPNRHSKLEEINNKVQKASDTLKITHLLERKPGQLSGGQQQRVAVGRAMVREPVAFLMDEPLSNLDAALRVHMRAEISELHR

SEQ ID NO: 144906 - protein, 255 aa, Unknown
  Bacterial polypetide isolated from the Sargasso Sea
MPAFIPHGGRHALPRLRRFAMSESKSSRSAPQPLLELKDVWRSYNQGGSKLNVLTGASLKVRAGEMTALVGPSGSGKSTLLNIAGLLEQPDSGKVFIDKVDSGRLRQGKRTLLRREHIGFVFQFHRLLPEFSALENVMIPQMLNGLDKFESADRADQLLAMVGLQDRIDHRPGLLSGGEQQRVAIARAVANAPRVLLADEPTGNLDPDTAKDVFGHLAAITRATQTAALVVTHNQQLALHMDSILTIVNGKVVEL

SEQ ID NO: 144907 - protein, 208 aa, Unknown
  Bacterial polypetide isolated from the Sargasso Sea
MAQTNEPIVKFSEVTKRYGDLVVLDKLDLEIKKNEMISIIGPSGSGKTTVLRVLMTLEKINSGVIYVDGEPLTHMLSSGELIEANEKYLRERRSKIGMVFQQFNLFPHMTALQNCIEAPMQVLGMNKEAAEERALELLELVGLSDKKDQHPSRLSGGQQQRVAIARALAMRPKVMLLDEITSALDPEVVGEVLNVIRSLNKEYSLTMI

SEQ ID NO: 144908 - protein, 193 aa, Unknown
  Bacterial polypetide isolated from the Sargasso Sea
MKNLIEVQNIKKNYGKKEAVKGISFNVEEDEILGLLGPNGSGKTTTIGMLLGLLKPTSGQIFINNLKLEENRIQILEMINFISPYIELPKKLTVKQNLYVYSKLYKVQNIKERIEYLSEKLRIGELLNSITGELSSGQKNRVSLAKALVNEPKVLLLDEPTASLDPEVGDFVRTFLKDYKKEKKISILLASHN

SEQ ID NO: 144909 - protein, 242 aa, Unknown
  Bacterial polypetide isolated from the Sargasso Sea
MENIKSGISLPSVTKNIIYKNVSYSYPSRNAMVLKNLNFTINAGSFTAIIGHSGAGKSTLVDMLTRLITPSSGQILFDGINILDLSLYSIRSNISYIPQDPILFRMTIAENMRYVKEDASDSELWSALKLANAENFVKDLPDQLNTNLGAMGSKLSGGQRQRIILARTFLKKPSVLILDEPTSALDKDSDEYIQNTIAILQKKMKITVILIAHRISSYKNLDQIISIKDGLINKVGKASDFL

SEQ ID NO: 144910 - protein, 255 aa, Unknown
  Bacterial polypetide isolated from the Sargasso Sea
EAKNINVNFPIRKGFLQRISDVVPAVVDASFQLHSRESLGIVGESGSGKSTLARALTKLVHHKGNIYFKGNEVVSLNSALLKPYRKEVQIVFQDPFGSLSPRLSVGEIIAEGPKAHGNKDAYILQQRVTEVLEEVGLEANFHDRYPHEFSGGQRQRIAIARALILRPEVIIFDEPTSALDVTVQKQIIDLLLKLQERHGLSYIFISHDISLISNVCHNMFVMKDGKIVELGTVRKILNNPSDAYTQTLIDAANRK

SEQ ID NO: 144911 - protein, 197 aa, Unknown
  Bacterial polypetide isolated from the Sargasso Sea
GPNGAGKSTLLQIMQGMLTPSAGHVLIGGALIQSCRQQIALMPQRGRIDWSFPITALEMVRLRQPRRQPTSRCMTAQEALERVGLGHRARDRLGMLSGGQQQRVLLAAAIAQNVDTLLLDEPCSALDPPARARVIDLLQQLAREGRSICLTSHDWGSALLQYDRVIVLDREMLFDGSPADVGQQLNDLMSSATRCPH

SEQ ID NO: 144912 - protein, 217 aa, Unknown
  Bacterial polypetide isolated from the Sargasso Sea
EAHKLLELVQMSEFSDRFPAQLSGGQQQRVALARALITNPSVLLLDEPLSALDPFLRIKMRSELKALHKKLGITFIHVTHSQDEAMALADMIVVMNNGIIEQVGNPYEIYNNPKNKFIATFVGGHNVIIKNKKSYSIRMDHINLDVKKINNKKNNNYNPFLVKEIEFQGQIVKVTGETKNFGELSVQLSDEMFLKNKFEIKDEVFISWDHERESLLE

SEQ ID NO: 144913 - protein, 218 aa, Unknown
  Bacterial polypetide isolated from the Sargasso Sea
VETHALRDFNLYVKEGDFISVTGPSGSGKTTFLNIAGLLETFNGGTYMLDGLDVSNLNDKQRSQLRNEKIGFIFQSFNLIPDLDLFDNVDVPLRYRGFNKAERKERIENSLEMVGLINRMKHLPSQLSGGQQQRVAIARALAGEPRFLLADEPTGNLDSKMAHSVMDLLQDINQKGTTIVMVTHDGELARQSGRNIFVRDGQVSELQEVASTAEAASA

SEQ ID NO: 144914 - protein, 239 aa, Unknown
  Bacterial polypetide isolated from the Sargasso Sea
DPGRLQLKVKKGEAVALVGSSGAGKTTLANLIPRFFDVTRGEVLIDGVNVKDYDLHAMRSQISIVTQDTILFNDTVANNIIYGQPDCSKERMYAAARAANAHEFVSQLTDGYDTFIGEKGVKLSGGQRQRLSIARALVKDSPILILDEATSALDSESEIEVQQAIENLMENRTTVVIAHRLSTIRNADRICVMEEGRIVEEGTHEELLLLEGRYSQLHALQFRNETEEELGRSGNYLVS

SEQ ID NO: 144915 - protein, 294 aa, Unknown
  Bacterial polypetide isolated from the Sargasso Sea
GEIQINNEVINEMHPSKRHTAMVFQSYALYPHMNVYDNMSFGLKIEKKTKEEIHTKVLSAAKTLKIEDLLERRPKELSGGQRQRVAIGRAITRNPKIFLFDEPLSNLDAALRAEMRVEISRLHQKIKTNMIYVTHDQVEAMTLADRIVILNNGNIEQVGTPNEIYTNPDNIFVAQFIGTPKMNIFKINSENIVSNNKINILGSSISFSGINLDKKNYYIGIRPEHLTLNENQEFNFTPKIELIENLGNEKIVYMVSEHNQLCAKISSDIQINNTFGFNLKNILLFDENGLRIRL

SEQ ID NO: 144916 - protein, 133 aa, Unknown
  Bacterial polypetide isolated from the Sargasso Sea
MPKKQAEEIAMKNLERVQIADQAKKFPGQLSGGQQQRSALARALCMEPKIMLFDEPTSALDPEMIKEVLDSMVDLAKAGMTMIVVTHEMGFAKEVADNMIFMDEGRIVEKAKTKDFFDNPKSDRTKLFLSQIL

SEQ ID NO: 144917 - protein, 227 aa, Unknown
  Bacterial polypetide isolated from the Sargasso Sea
QRQRVAIGRALVREPRIFLFDEPLSNLDAKLRVEMRREIKKLHQQLKTTVVYVTHDQTEAMSLGTRIAIMNHGVIQQNDTPENIYNKPSNTFVADFIGSPSMNLIKGTLKETSGKIFFTASDSNFEIPIKDYEFKDKSNLNNKEVFFGLRPEHIYFKKSNESDFEVNLRADLSEYIGHEQIMTFDYSNQEILAKFPSTIKIELAKETKLYFDLTQTSLFDAQTEERI

SEQ ID NO: 144918 - protein, 116 aa, Unknown
  Bacterial polypetide isolated from the Sargasso Sea
QIADQAHKFPGQLSGGQQQRCAIARALCMEPKIMLFDEPTSALDPEMIKEVLEAMVNLAKAGMTMIVVTHEMGFAKEVADEVIFMDEGMIVEKAATNEFFANPKSDRTKLFLSQIL

SEQ ID NO: 144919 - protein, 149 aa, Unknown
  Bacterial polypetide isolated from the Sargasso Sea
IRDNLLWGHDSLDDTALMHACRQAHIDFFINSLPQGLDTLIGDRGIKLSGGQRQRVALARTLLRKPQLLILDEATSALDAESEHAIQQSINELKGKLTLLVISHRLSTVKMANRIVVMDNGAIIQEGTWDKLSQDEGLFQRFKGLQIVG

SEQ ID NO: 144920 - protein, 206 aa, Unknown
  Bacterial polypetide isolated from the Sargasso Sea
TSLILALLKLISFMGKILFNDLDISKLKSKDLIKIRKDMQIIFQDPFSSLSPRMTVEEIVREGLDIHMKKVPIKEKQQMIIDILNEVGLNYTDVRNRFPHEFSGGQRQRIAIARAIILKPKLLILDEPTSALDVSIQNQIIKLLIKLQKKYELSYIFISHDIKVIRSVSDYIIVLKKGEIVEEGSAEEVFSLPKSNYTKELLTAVI

SEQ ID NO: 144921 - protein, 149 aa, Unknown
  Bacterial polypetide isolated from the Sargasso Sea
QLNFFQKNIINNDLLQNVYDLIDIVGMTRQSLDRYPHEFSGGQRQRISIARALATRPRLLICDEPTSALDVSIQAQILNLLKDIQDELHLTMLFISHDLPVIRQMCNRIIVLKNGAVCETKDTEELFNNPEHEYTKELIRLMPKIESII

SEQ ID NO: 144922 - protein, 300 aa, Unknown
  Bacterial polypetide isolated from the Sargasso Sea
AETTNKVIVMRHGLIVEQGNTKDLLTNPKSSEARSLVISVPPTNKKIKRFKLISPDGSEITSSSANLTKNIIKTWGVRKNTNQKLLELKEITKIFDDQSISYRKKINENTVKAVKNVSFKLFEGETLGLVGESGSGKSTIAKIITGLVRPSFGELEYNGLSLYNLRRKYQIDKIRGQIQMIFQDPYSSLNPRFKVKDIIAEPIKFFQKSITRKDLEQNINDLIDIVGMTRKSLDRYPHEFSGGQRQRISIARALATRPRLLVCDEPTSALDVSIQAQILNLLKDIQDELHLTMLFISHDL

SEQ ID NO: 144923 - protein, 183 aa, Unknown
  Bacterial polypetide isolated from the Sargasso Sea
MGVNLKDICLRDLRSLISVVRQDGMMFDETILENIRFGKPTASDVEIRKAAKMAYVDEFSNGLKDGLSTVVGPRGSTLSGGQRQRISIARAFLRNSPLLLLDEPTSALDSKSERLIQKSLSNLSMFSTTITIAHRLSTIVESDKVLILDEGKIVGEGTHDKLLQENTLYFNLFKSQVENKNNE

SEQ ID NO: 144924 - protein, 326 aa, Unknown
  Bacterial polypetide isolated from the Sargasso Sea
HVVKTLNLEMKDKEFMFFVAPSGCGKSTTLRMIAGLEEISGGDLLIDGKRMNDVPAKSRNIAMVFQNYALYPHMTVYDNMAFGLKMQKIAPAVIEERVNWAAQILGLRDYLQRKPGALSGGQRQRVALGRAIVREAGVFLMDEPLSNLDAKLRVQMRAEISKLHQKLNTTMIYVTHDQTEAMTMATRIVIMKDGIVQQVGAPKTVYNHPANMFVAGFIGSPAMNFIRGAIDGDKFVTETLKLTIPENKLAQLKTQGYEHQAITLGIRPEDIHPQLNNENSVSAKISVAELTGAEFMLYTIVGGHELVVRAGAVNDYHAGENITIHL

SEQ ID NO: 144925 - protein, 153 aa, Unknown
  Bacterial polypetide isolated from the Sargasso Sea
SHVSVLENIMLAPTKILKRSRSKVEQEALALLEKVGLPDKRNAYPRQLSGGQQQRIAIARALAMKPKLMLFDEPTSALDPEMISEVLDVMVDLSKAGMTMIVVTHEMGFARAAADRVILMHNASIVEDAAPKEFFENPKSEHTQLFLSKILQH

SEQ ID NO: 144926 - protein, 128 aa, Unknown
  Bacterial polypetide isolated from the Sargasso Sea
IPKEEIDTKKIKLCAKMAQLSETIESWDMKYDTVVGERGVRISGGQRQRIAIARALYKNADVMVFDEATSALDNDTERAVMDSIESLNPNITIIIVAHRTSTLQNCNEIIELKDGKIRKKGTYEDIFK

SEQ ID NO: 144927 - protein, 167 aa, Unknown
  Bacterial polypetide isolated from the Sargasso Sea
MSALLKLKKINLKYQTGKDNISVLKNIDLNIKKKETVSVVGESGSGKTSLIMLIGGLEKPTSGKIIFNDQEITNLSEDEVSEVRKKNIGIIFQSFYLIPNYTAVENVALTLELNNFKNPEKEAKILLDRFGLKHRFNNLPSQLSGGEQQRVAIARAIAMKPAINLSR

SEQ ID NO: 144928 - protein, 245 aa, Unknown
  Bacterial polypetide isolated from the Sargasso Sea
MKNLIKVKNIKKNYGKKEAVKGITFNVEENEILGLLGPNGSGKTTTIGMLLGLLKPTSGQIFINNLKLEENRVEILEMINFISPYIELPKKLTVKQNLYVYSKLYKVQNIKERIEYLSEKLRIGELLNSITGELSSGQKNRVSLAKALINEPKVLLLDEPTASLDPEVGDFVRTFLEEYKKEKRISILLASHNMNEVTRLCKSVLMMKNGEIIDQGKPNDLIAKHGRANLEEVFLKLSRSKSEFN

SEQ ID NO: 144929 - protein, 192 aa, Unknown
  Bacterial polypetide isolated from the Sargasso Sea
VCITKIKSNKEMMKFRKQIQMIFQDPYSSLNGRLKVKDIVSEPIKLHNPSISSRDIDDYIYDLLESVELTQQSAERYPHEFSGGQRQRISIARALATQPRLLVCDEPTSALDVSIQAQILNLLKDLQEQLNLTILFISHDLPVIRQMCDKIAVLKNGQLCEVTNTEDLFMKPSHDYTKELLRLMPKIESIYN

SEQ ID NO: 144930 - protein, 290 aa, Unknown
  Bacterial polypetide isolated from the Sargasso Sea
IASHSGRSSITFKSMQLVASDTKTLMGVRGNRISMIFQEPMTSLNPLHVIEKQISETLALHSGLTGREARNKCIELLEMVGLQKPETRLQAYPHQLSGGQRQRVMIAAALANKPDLLIADEPTTALDVTVQAQILELLKDLKKELGMALLLITHDLGVVKKVADKVCVMSKGEIIEAKPVEKLFANPEHPYTQKLIGSEPSGTPNALPDGAGKILEVENLKVWFPIQKGVLKRTIGHIKAVDGISFSIKSGETLGVVGESGCGKTTLGLAALRLQPSEGRIAFIGSPNKR

SEQ ID NO: 144931 - protein, 149 aa, Unknown
  Bacterial polypetide isolated from the Sargasso Sea
MSFLDLKNVTKIYPNGTKAVHETSLSINEGEFMVFVGPSGCGKSTLLRMVAGLEDITEGDINLDGKLMNEVDPSERDVAMVFQNYALYPHMNVYNNLAYGLKNRGIDKETIEQKVNDAAKLLQISDYLQRKPSMLSGGQRQRVAMGRAL

SEQ ID NO: 144932 - protein, 236 aa, Unknown
  Bacterial polypetide isolated from the Sargasso Sea
NFNCKIKKGKFTSIIGPSGTGKTTLLKLIAGLVEPETGEIKFDNKLLNDVINQITLIQQNPSLMPWLNVYDNITLAKLSNKKINYINVDKLIKDIGLEEFSSYFPHKLSGGLLQRVAIARALIFYPSLLLLDEPFAALDNLSREIISTELVSIIKQKSLTVLMVTHSIEEAALLSDEVLVTGIAPIRVIKKFIPPKSVNNQTWQKLGLRKSLQDKSFNGYLKSIRDTSYLLLEKEK

SEQ ID NO: 144933 - protein, 231 aa, Unknown
  Bacterial polypetide isolated from the Sargasso Sea
MSESLLEVKNLCKRFPIKGGLLGKEIGAVNAVNNISFSIKKGETLGLVGESGCGKTTLGRSILRLIEPTSGEVRFNGKNILDFNKNEMRAMRRKMQIIFQDPYASLNPRMTIGSILEEPLIIHDLFSTKEERVKRLHELLDYVQLPKDALNKYPHEFSGGQRQRVCIARALAVEPEFIVCDEPVSALDVSVQAQVVNLLMDLQKELSLTYLFIAHDLKVVEYISNPGRPLC

SEQ ID NO: 144934 - protein, 131 aa, Unknown
  Bacterial polypetide isolated from the Sargasso Sea
MNQEITASPIGSRPNESDSKIISIKSMHKWFGDFHVLKDINLEVAKSEKIVICGPSGSGKSTLIRCINRLEEHQQGSITVDGTELTQDLKNIEIIRSEVGMVFQQFNLFPHLSVLDNVSLAPIWVRKLPRA

SEQ ID NO: 144935 - protein, 164 aa, Unknown
  Bacterial polypetide isolated from the Sargasso Sea
MVFQQFNLFPHMTALQNCIEAPVEVLGMKKEEAEERALELLELVGLTDKKDQHPSRLSGGQQQRVAIARALAMRPKVMLLDEITSALDPEVVGEVLNVIRSLNKEHNLTMIMVTHQMGFAREISDRVCFFNEGKIFEQGPPEKLFGNPQNERTKQFLHAVLDAN

SEQ ID NO: 144936 - protein, 286 aa, Unknown
  Bacterial polypetide isolated from the Sargasso Sea
SSGDIIFDDVTITKLPENKLENIRGNEISMIFQEPMTSLNPLFTVGDQVSEVIKRHKGLNKDKSWAKAVELLDAVKIANPEKRAFDYPFQLSGGQRQRVMIAVALACQPKILIADEPTTALDVTIQAEILALINMLKEETGTAVMFITHDMAVVAQMADRVVVMYPGKKVEEGTVHEIFSNPKHDYTKSLLAAVPKLGEMASKKYPEPMKLVGEGSSKKPQPIVGTEQPLLKVNNLVTHYPVKGGVFRRTVARVHAVEDVSFTIMKGKTLSLVGESRCGKSTVGRS

SEQ ID NO: 144937 - protein, 220 aa, Unknown
  Bacterial polypetide isolated from the Sargasso Sea
GPNGAGKSSMLNVINGFYHPQEGEVWFRGKKRGSMKPYQIAHQGIARTFQNIALFKGMTALDNIMTGRFTHMKKGIFSQMIWEGGASREEYENREVVEKVIDFLEIQHIRKTPVGALPYGLQKRVELGRALAAEPELLLLDEPMAGMNVEEKEDMSRYILDVNSEFETTVALIEHDMGVVMDISDRVVVMDYGKKIGDGTPDEVRNNQAVIDAYLGVSEH

SEQ ID NO: 144938 - protein, 173 aa, Unknown
  Bacterial polypetide isolated from the Sargasso Sea
MILDIKDLHHSFGEVNAINKLSFSMKQNSIVSILGPSGCGKTTLIRLIAGLEEVQTGEIFFEDKMVANVKFNTPPEERSISYVFQDFALFPHMTVRENISFAASSKINKKQLVDQVIHLSKVESFLDKYPHTLSGGEQQRVALARSIAVQPKLLLLDEPFSDLDTNLKREIID

SEQ ID NO: 144939 - protein, 137 aa, Unknown
  Bacterial polypetide isolated from the Sargasso Sea
IDSYIYDLLESVELTQQSAERYPHEFSGGQRQRISIARALATQPRLLVCDEPTSALDVSIQAQILNLLKDLQEQLNLTILFISHDLPVVRQMCDRIAVLKNGKLCEISKTEELFKNPSHEYTKELLTLMPKIESIYN

SEQ ID NO: 144940 - protein, 323 aa, Unknown
  Bacterial polypetide isolated from the Sargasso Sea
ADANSSNKVQNLKLEATNNLATPIIQFLVSISLSLVAYFALGSSLGITLDAETFVAFFTAAGLMAKPIRQLSSINGVIQKGLAAANEIFDQLDFDDEVNTGDTTKPIEGVIEFKDVSFGYTGDKNILNNINLTVNKHETIAFVGKSGSGKSTLANLISRFYSDYTGQILIDGIPNNEYDLSFLRKSISIVTQSPTLFNDTIERNIAYGEDEFDTERVMESARLAGCLDFINKLPEGINSEIGDDGVLLSGGQRQRLAIARAFYKNSPIIILDEATSALDTESEELVQESLEKIISDRTTIVIAHRLSTIENADQIVVLDNGLI

SEQ ID NO: 144941 - protein, 181 aa, Unknown
  Bacterial polypetide isolated from the Sargasso Sea
MNQIHGESVTFQNVEKYYGNTAAVKDFNLEIKNSEFLTLLGPSGSGKTTVLNMIAGFIKQTSGSILIGKNSIENLPTEKRNVGMVFQSYSLFPHMNIFDNVAFPLKMRNENKKIINEKVRYALNLVNLDGVEKRMPNELSGGQRQRIAFARAIVFKPKVLLMDEPLGALDLKLREKMQIEI

SEQ ID NO: 144942 - protein, 231 aa, Unknown
  Bacterial polypetide isolated from the Sargasso Sea
IKEGESFGLVGESGSGKSTIAKMIVNLFKPTSGDIFFDDVCITKIKQKLELMKFRKQIQMIFQDPYSSLNGRLKVKDIIAEPITLHNPSISNLDLNNYIYDLLESVELTQKSADRYPHEFSGGQRQRISIARALATQPRLLVCDEPTSALDVSIQAQILNLLKDLQEQLNLTILFISHDLPVVRQMCDRIGVLKDGKLCEVSNTEDLFLKPTHEYTKELLHLMPKIESIYN

SEQ ID NO: 144943 - protein, 198 aa, Unknown
  Bacterial polypetide isolated from the Sargasso Sea
ELITSSGKIEFDKIDLNLIKKNKLKSIRKNIQIVFQDPYSSLSPRMNVEEILNEGIDVHFPKCPVSERKQILKDILKETGMNYERDYNKYPHEFSGGQRQRIAIARALILKPKILILDEPTSALDITIQNQILDLLQNLQEKYSLSYIFISHDMNVIRSVSDKILVLKKGKLIEYNSAEKVFNKPKDEYTKKLISSVV

SEQ ID NO: 144944 - protein, 163 aa, Unknown
  Bacterial polypetide isolated from the Sargasso Sea
MSKNLEFVKFDKVDKSYDGKVLVVKDLNLDIAEGEFITMLGPSGSGKTTCLMMLAGFETPTNGEIYLDKNPISNIPPHKRGIGMVFQNYALFPHMTVYENLAFPLRVRKFSKDDIDKKVNKALSMVSLSGFENRMPGQLSGGQQQRVAVARALVFDPPSSFNG

SEQ ID NO: 144945 - protein, 164 aa, Unknown
  Bacterial polypetide isolated from the Sargasso Sea
MLAPIIQIKDVNKWFGDFQVLKNINLEVEKNKKIVVCGPSGSGKSTLIRCINRLEEHQEGKIIVDGNELDENTKNIEQIRAEVGMVFQQFNLFPHLSILDNCTLAPIWVKQMPKKDAETLAMQHLEKVQISDQALKYPGQLSGGQQQRCAIARALCMEPKNNNF

SEQ ID NO: 144946 - protein, 222 aa, Unknown
  Bacterial polypetide isolated from the Sargasso Sea
ESGCGKSTTSSIITRLMDPTSGDVIFDGQNITTYPADTFAQRPERQKIQMVFQDPTECLNPRYSAHNCIAEPLKRLLGLRDKSELRSKIETLAERVGLPIGLLDRFPHQLSGGQKARVGIARAIAVDPLLLVLDEPTSALDVSVQALVLRLLDRLKRESGMSYIFVSHDLNVIRLLCERVIVMNRGRIVESGLAEDVLRCPTKPYTRRLIEAIPQFEVFASH

SEQ ID NO: 144947 - protein, 193 aa, Unknown
  Bacterial polypetide isolated from the Sargasso Sea
MVQPLIELKSIKKAFQKKRKTELLVLDDVNFSIKKREIVALLGKSGSGKSTLLRIISGLIKPSGGEVLYHGECVEKPVQGLSMVFQHFALLPWLTVLQNVELGLEAQRVPASERRERALQAIDVVGLDGFESAYPKELSGGMSQRVGIARALVVDPEILLMDEPFSALDVLTAENLRGDLLDIWGAEKTNIQA

SEQ ID NO: 144948 - protein, 287 aa, Unknown
  Bacterial polypetide isolated from the Sargasso Sea
MYGQKKITIKNSILLVFPRVFLEFFFIFVISLAAIFYILKGNQLVDLFNILVVYTVIASRLFPAVSRIASGFQMITTGKASVNVLFNEKKIFQNVPDNRNKQKISFESNIQFKNLDLSIFDEKTKINKIILKDVSFEINKNQFIGLVGKTGVGKTTLINYLSGFLDADQSNIFIDGKRILSSKTLNFSNFGVVTQEPLIFDGTIKENLYFQENPKIDEKKLKKAIQASDLETFIDQSKLGLETLINEKGTNISGGQLQRICIARALIFEPKILILDEATSALDLQTE

SEQ ID NO: 144949 - protein, 217 aa, Unknown
  Bacterial polypetide isolated from the Sargasso Sea
GASGCGKSTLCRALMGLNTIRGGRVDLLGQNLLSLKGEPLRQARRALQMVFQDPLACLNPALNVAEAIADPLLIHGLCSKAAARQRARELMERVGLNPAEQFQDRLPRQLSGGQQQRVAIARALALQPKVLICDESVSMLDAEVQAEVLALLRELQHELGLAMIFVTHDLSVASGFCHRVIVLDKGEIVEEGPGERIFQAPQAAISRTLVDACPRLP

SEQ ID NO: 144950 - protein, 277 aa, Unknown
  Bacterial polypetide isolated from the Sargasso Sea
SSFIFYAFLVASSTGFLSELAGDLQRAAGAAERIAQVLATTDIMPQTTTPRRFDLHNPVACHFENVNFAYPSARHRPAVADLDFTIAAGERVAIVGPSGAGKSTLFHLLLRFYDPLTGRISIAGADLRDVAIDELRDHIGLVPQDAALFSSTVRENIAFGRPDATEAMIIDAAQKAQADEFISALDGAYTALVGEKGVRLSGGQRQRIAIARAILRNPRLLLLDEATSALDAQSEAAVQHALENLMKNRTSLVIAHRLATVVQADRILLMDRGRIQA

SEQ ID NO: 144951 - protein, 285 aa, Unknown
  Bacterial polypetide isolated from the Sargasso Sea
MNKNNLVKNDALIIDDLHHKYDKRECSNWILNEINLKIENGELLGLLGPSGCGKTTLLRLIAGFEYPSIGRISLNDKEISSRQKILSPEKRNIGMVFQDYALFPHLTVLENVIFGLKNKKDRSRVNYLLNVVGLDSFVERYPHELSGGQKQRLAIARALAPGTNFILLDEPFCSLDMHVKLKLRSELPNILKGCNASGLMVTHDPEEAMSICDKVAVMNNGKIHQIDTPINLLNNPKTIFVSSFILGNNIINLKKNGNSYISCLGEINSSGVLQNSNIKSMSISP

SEQ ID NO: 144952 - protein, 286 aa, Unknown
  Bacterial polypetide isolated from the Sargasso Sea
VGFVGPSGAGKSSIVRLLLRFYDPDSGTVKIGGHDLKDLRLEDIRGQIAVVNQDTYLFHGTVADNLRVGKPDATAEELEAACRAANAHEFVSLLPQGYDTVIGERGIRLSGGQRQRVAIARAILRDAPILILDEALSAVDAENESIIQDALDRLMRGRTTLIFAHRLSSVIDADRILVLNEGGIAEEGTHAELMSSHGVYHQLMAAQAEESAGGAVEVDPERVRKAEKMPTYSEEAQFAPTDAIVKAQGLGWFAAARELMKYIVPYKGRLAMTFGFGVTRVLAYIG

SEQ ID NO: 144953 - protein, 272 aa, Unknown
  Bacterial polypetide isolated from the Sargasso Sea
PRLLPLVHRYTQLGANYRTKYPSICEVVEELEKNNNQKELILRNREFIFNKDIVLKNIDFSYEESNLILENINLKINKGDHVGIYGETGSGKSTFLDILIGLIPPSKGNILIDDVDIYKEKSSNLWTTNIAHVAQNIYLKEGTIAENIAYGESPNEINYDLLVNSAKSAQIYKFIEKSNKGFETSVGEGGIRLSGGQRQRIVIARALYRAREILVLDEATSALDNDTEESIIEAIKKHNNLTILMVTHRLKSLRICDRVFKVCGNQIIEEKR

SEQ ID NO: 144954 - protein, 250 aa, Unknown
  Bacterial polypetide isolated from the Sargasso Sea
MNNVLELINVKKSYGNFDAIHGINLKIKEGSYCCLLGPSGCGKTSLLRMIAGHEEISEGEIYLGSSRLNELPPSKRGTSMMFQSYALFPHLKVIDNVSFALKIMGVSREKRNKTALKYVEMVQMQGYEDRFPDQLSGGQKQRIALARALITKPSVLLLDEPLSALDPALRVLMRTELKQMQRELNITFIHVTHSQEEALALASIAVVMNEGKVEQIDNPLTIFNKPKSAFVSEFVGGHNIISIGKKLFSL

SEQ ID NO: 144955 - protein, 162 aa, Unknown
  Bacterial polypetide isolated from the Sargasso Sea
MNKNIIEINKLYKNFKSINSTIKVLKDINLNLESGKLIALIGPSGSGKSTFLHLLALLDKPSKGKIRLLGKDTDDISEDQKNLIIRNNISIIFQNNNLLSDFNSLENVAIPLIIRGNSYNFSIKKAAKILSKVNLDHRLEHFPNDLSGGEKQRVAIARSIAS

SEQ ID NO: 144956 - protein, 188 aa, Unknown
  Bacterial polypetide isolated from the Sargasso Sea
MGPSGSGKTTLMNIIGCLDSPTNGSYYLNNKSVSKLDDDELAKIRNEEIGFVFQSFHLLARNTAFDNVMLPLKYAGLSKEEATKRSNNVLDLVGLSSRSKHTPAELSGGQQQRVAIARALVNEPSILFADEPTGNLDSKTGQDVMKIFKDLNENGQTIILITHEDSIAKQSNRIITIMDGLIESDLKE

SEQ ID NO: 144957 - protein, 105 aa, Unknown
  Bacterial polypetide isolated from the Sargasso Sea
PLSGGQQQRSAIARALCMKPKIMLFDEPTSALDPEMIKEVLDAMVNLAKGGMTMIVVTHEMGFAKEVADEVIFMDEGMIVEKQPTKNFFANPKSDRTKLFLSQIL

SEQ ID NO: 144958 - protein, 288 aa, Unknown
  Bacterial polypetide isolated from the Sargasso Sea
RFQWILTAMVLLMTPLKRLTNVNAMIQRGIAAAASIFSLLDERNEIDRGTKDAQKLIGAVHFKDVNFSYGSEKETLKNINTNIKAGQTIAIVGKSGSGKTTFVNLIPRFYDVEKGSIEIDGIQIEEYTLESLRSNISLVTQEVTLFNDTIENNIIYGGHSNQEITDAVKASHIDEFIHDLPDGLQTKVGDQGILLSGGQRQRIAIARALLKDAPILILDEATSALDSESEKLIQNAFDRLMENRTTFVIAHRLSTIEKADRILVLSDGKIVEEGTHQDLLSQDGEYSL

SEQ ID NO: 144959 - protein, 196 aa, Unknown
  Bacterial polypetide isolated from the Sargasso Sea
IYFENVSLFEPKNKELIKKFRGQIQMIFQDPYSSLNPRFKVKSIIAEPIRFFQKNIDEISVNQNVNDLIDIVGISRKSLERYPHEFSGGQRQRISIARALATRPRLLICDEPTSALDVTIQAQVLNLLKDLQSHLNLTILFISHDLPVIRQMCDRTAVLKNGNVCETNKTERIFTNPKNSYTKELLKLMPKIESII

SEQ ID NO: 144960 - protein, 188 aa, Unknown
  Bacterial polypetide isolated from the Sargasso Sea
KSIKDLSSVEKKLLKKDIQIVFQDPYGSLSPRMTVGEIIGEGLDIHFDFSSEEKIEKISNVMKDVGLDDSLIFKYPHEFSGGQRQRIAIARSIILNPKFMILDEPTSALDRSIQIQVIDVLKRLQDKYKLTYLFISHDLKVIRSMCDQIFVMSEGKLVEFGKADEVFENPQQEYTQKLLRAALKYSSN

SEQ ID NO: 144961 - protein, 160 aa, Unknown
  Bacterial polypetide isolated from the Sargasso Sea
MVGDKDDRYRSILRREKFGFVFQSYNLVPRLSAIEQVELPLVYQGVKNKKAIALEALSRVNLDDRAHHFPQQLSGGQQQRVAIARSLVVQPQVVFADEPTGALDTQSGKDIMKIFSSLSLEGITIILITHEQHIAEKASRILEMSDGQVISDVSSERNMI

SEQ ID NO: 144962 - protein, 141 aa, Unknown
  Bacterial polypetide isolated from the Sargasso Sea
VNLFKPSSGDIFFDNICITKIKSNSEMMKFRKQIQMIFQDPYSSLNGRLKVKDIVSEPIKLHNPSISTKDLNNYVFDLLESVELIKNSADRYPHEFSGGQRQRISIARALATQPRLLVCDEPTSALDVSIQAQILNLLKDL

SEQ ID NO: 144963 - protein, 226 aa, Unknown
  Bacterial polypetide isolated from the Sargasso Sea
KDTKIECHQNYLGGQQQRVAVARAIVLEPKVLLFDEPLSNLDAKLRRQVREDIREIQQKLGVTTIYVTHDQEEALAISDKVIVMNNAVIAQEGSPKDLYNCPKNKFVANFIGDANVFKAEIINKQSNNYELKLGEMNINIETDKDLNNSVSVALRPENININKNKTENSIHAKVNTASFVGTSYQYILNSKIGKIYVVSTDTKNIFNINDEVYLNIEKEELKILND

SEQ ID NO: 144964 - protein, 180 aa, Unknown
  Bacterial polypetide isolated from the Sargasso Sea
MKDRSKEDEVADIKIDNINKFYGDVQVIENVSLEIKSQSFTVLVGPSGCGKSTMLRMIAGLEDINSGTISIDGTVVNDLPPKERNIAMVFQSYALYPHMTVFDNMAFGLKLEKRSKEEIDERVQEAAKILQIEEYLSRKPKQLSGGQRQRVAIGRAITRKPQVFLFDEPIIKPWMLLLES

SEQ ID NO: 144965 - protein, 276 aa, Unknown
  Bacterial polypetide isolated from the Sargasso Sea
ERDVAMVFQNYALYPHMNVYNNLAYGLKNRGIDKETIEQKVNDAAKLLQISDYLQRKPSMLSGGQRQRVAMGRAIVRNPKIFLFDEPLSNLDAKLRIQMRLEIKKLQQKVGVTSIFVTHDQVEAMTLADRLAVINNGIIEQLGTPIEIYDNPKSLFVAGFIGSPQMNFLDGNLKNKTLSAEGFEIKDVNTEHEGEVTLGIRPEHLVQSENGLINLKVDLVEQLGSDNLVYGQLKNIKDFCYRCPGNQNIEKVSNLSLNIENNKYYIFDKSTGKRVN

SEQ ID NO: 144966 - protein, 281 aa, Unknown
  Bacterial polypetide isolated from the Sargasso Sea
MSFLDLKNVTKIYPNGTKAVHETSLSINEGEFMVFVGPSGCGKSTLLRMVAGLEDITEGDINLDGKLMNEVDPSERDVAMVFQNYALYPHMNVYNNLAYGLKNRGIDKETIEQKVNDAAKLLQISDYLQRKPSMLSGGQRQRVAMGRAIVRNPKIFLFDEPLSNLDAKLRIQMRLEIKKLQQKVGVTSIFVTHDQVEAMTLADRLAVINNGIIEQLGTPIEIYDNPKSLFVAGFIGSPQMNFLDGNLKNKTLSAEGFEIKDINTDFEGEVKLGIRPEHLSQ

SEQ ID NO: 144967 - protein, 185 aa, Unknown
  Bacterial polypetide isolated from the Sargasso Sea
MENKNSNEIIVKFEDVTKQYGDLVVLDKLNLDIKKNEMVSIIGPSGSGKTTVLRVLMTLEKINGGVIHLDGETLTHMNLNGNQVEANEKYLRERRSKIGMVFQQFNLFPHMTALQNCIEAPVEVLGMKKEEAEERALELLELVGLTDKKDQHPTRLSGGQQQRVAIARALAMRPKVMLLDEITSA

SEQ ID NO: 144968 - protein, 103 aa, Unknown
  Bacterial polypetide isolated from the Sargasso Sea
GGQRQRIAIARALILNPKILILDEPTSALDVTIQKQIIDLLNTLQNKFSLSYLFISHDMKVIRSVADKIIVLKDGDLIEYNKSEIIFNSPKNEYTKNLLSSVL

SEQ ID NO: 144969 - protein, 263 aa, Unknown
  Bacterial polypetide isolated from the Sargasso Sea
FILEATAFGGIILIILYKMSETGTFINTIPIISLYVFAGYRLMPAAQLIYASSTQIAFASPSIEKVYKDMKNLNPINFHQDKGVLPLNKEISLKNISYSYPNAVRTALKNINLNIPIKNTIGFVGATGSGKTTIVDIILGLLEAQKGTLEIDGIIINKNNSQSWQRSIGYVPQHIYLSDDTVASNIAFGQEPKDINEEEIQKASKIANLHDFVMHELPNQYQTIIGERGVRLSGGQRQRIGIARALYFNPQVLILDEATSALD

SEQ ID NO: 144970 - protein, 91 aa, Unknown
  Bacterial polypetide isolated from the Sargasso Sea
MLEFDQVQHAYNGTQSVNGVSFHVERGEVVSLLGPSGCGKTTLLRLAAGLEKPRAGCIRLDGQQLSDSQVMIPPENRGIGYMFQDYALFPH

SEQ ID NO: 144971 - protein, 214 aa, Unknown
  Bacterial polypetide isolated from the Sargasso Sea
MTKTFPGVNNTSPVEVLKGLELKVEEGETTAIIGQSGSGKSTLLSLLAGLDQPTSGTLKLKERHLDSMSEEELTQFRAENIGIIFQQFHLMTHLNALENVSLPLEMNHQQDALELAEKALEQVGLGLRMDHFPHQLSGGECQRVAIARAIVIRPALLLADEPSGNLDHDTGEQVADLLFDLVGRTGMTMVLVTHNSELALRCSKQLTLSHGLLQ

SEQ ID NO: 144972 - protein, 256 aa, Unknown
  Bacterial polypetide isolated from the Sargasso Sea
MSLLVAENLSYSYAKNVSPAISKVSITVEPGTLTALVGPNGAGKSTLLRILQGQCIPDNGQITIDGEKLIRQRSQVALMPQRSSMNWKFPITVEKLVSLGQIKYSKSKSSSPFQIKALLANPNAWINKCCELEATMQRVGIANIAKRRLDSLSGGQQQRALLAKTLMSPAKIFLLDEPCAALDPPAKEDFLKIVRQLADAGLSLMVSSHDWGTSLNSYDQVIVLDKAVLACGSPDSIKDKLEDINISSIEDNNCCD

SEQ ID NO: 144973 - protein, 304 aa, Unknown
  Bacterial polypetide isolated from the Sargasso Sea
KALVSSVPPTNKKINRFKIIEKENKNQGETNIKILKRWTKKEITDQDLVKVKNLSKTFDDSFFVESTKNSVMAVDDVSFNIKEGESFGLVGESGSGKSTIAKMIVNLYSPSAGDIDFDNVCITKIKSSKEMMKFRKQIQMIFQDPYSSLNGRLKVKDIVAEPIKLHNPSISSKDIDSYIYDLLESVELTQQSAERYPHEFSGGQRQRISIARALATQPRLLVCDEPTSALDVSIQAQILNLLKDLQEQLNLTILFISHDLPVVRQMCDRIAVLKNGKLCEISKTEELFKNPSHDYTKELLTLMP

SEQ ID NO: 144974 - protein, 139 aa, Unknown
  Bacterial polypetide isolated from the Sargasso Sea
NNVGFIFQFYNLLPVLTANKNVEIPLLLTSLSASKRKEHVSTALNVVGLSDRGGHKPSELSGGQQQRVAIARALVSDPDILVCDEPTGDLDRETATEILDLLQILNRDHGKTILMVTHDPVAADFAKRTLHLDKGRLTN

SEQ ID NO: 144975 - protein, 230 aa, Unknown
  Bacterial polypetide isolated from the Sargasso Sea
APVIMLDQARLALSSAEGMVEILRGISLSIEAGETVGVLGPSGAGKTSLLMIMAGLESLTGGSISLAENDITTMGEDALAALRRDQVGIVFQAFRLIPSMTALQNVAVPMELAGRRDADQMAAMALEAVGLGHRKTHRPDQMSGGEQQRVAIARAIATRPRILLADEPTGNLDSGTSEKVIATLFEATKSASAALVLVTHDADLAERCERVLTIEDGRIVGDRKTTAGAA

SEQ ID NO: 144976 - protein, 268 aa, Unknown
  Bacterial polypetide isolated from the Sargasso Sea
KKITESKNTNEILKVEDLKVWFPIKKGILRRVKDYVKAIDKISFSLQEKKTLGIVGESGSGKTSLILALLKLINSEGKIIFNSSTINLRKNADIKNFRKNVQIVFQDPFSSLSPRMTVEQIISEGLDIHEKNLSYEEKQKKIFSVVNEIGMDYIEIKNRYPHEFSGGQRQRVAIARALVLKPKLLILDEPTSSLDVSIQSQILDLLNNLQKKYNLTYIFISHDMKVIKAISDYVLVLKNGKIVEEGETNKIFMKTQNEYTKNLIKAVI

SEQ ID NO: 144977 - protein, 255 aa, Unknown
  Bacterial polypetide isolated from the Sargasso Sea
MENKNNEPIVKFDEVTKQYGDLVVLDKLNLEIKKNEMVSIIGPSGSGKTTVLRVLMTLEKINGGVIHLDGEPLTHTQNDGKLTEANEKYLRERRSKIGMVFQQFNLFPHMTALQNCIEAPVEVLGLKKEEAEQRALELLELVGLTDKKDQHPSRLSGGQQQRVAIARALAMRPKVMLLDEITSALDPEVVGEVLNVIRSLNKEHNLTMIMVTHQMGFAREISDRVCFFNEGKIFEQGPPEKLFGDPQNERTKQFL

SEQ ID NO: 144978 - protein, 164 aa, Unknown
  Bacterial polypetide isolated from the Sargasso Sea
MSDPIIQITDVNKWFGDFQVLKNINLEVEKNKKIVVCGPSGSGKSTLIRCINRLEEHQEGQIIVDGNELSENTKNIEQIRAEVGMVFQQFNLFPHLSILDNCTLAPIWVKQMPKKDAEKLAMEHLEKVQISDQAFKYPGQLSGGQQQRCAIARALCMEPKNNAF

SEQ ID NO: 144979 - protein, 245 aa, Unknown
  Bacterial polypetide isolated from the Sargasso Sea
KKVDKALSMVSLNGFETRMPGQLSGGQQQRVAVARALVFDPAVVLMDEPLGALDKNLRESMQYEIKHIHESIGVTVVYVTHDQSEALTMSNRIAVFNDGKVQQLSNPSELYEKPVNSFVAEFIGENNTFNGEVSDISGDECKVKLSSGEIIASAISVKSKGEKTTVSLRPERALIEPSEKMDNMFSGKIEEVIYHGDHTRVRINLLGNPEFILKVPNSTSNLELKVKQDIKIGWNSSDARALDPK

SEQ ID NO: 144980 - protein, 282 aa, Unknown
  Bacterial polypetide isolated from the Sargasso Sea
KIINNLIPSKREIAMVFQSYALYPHMNVYENMSFGLKMEKKDKSEIDKKVNNAAKMLQIQNLLKRKPKELSGGQRQRVAIGRAITRNPKIFLFDEPLSNLDAALRSEMRVEISKLHKKINTNMIYVTHDQVEAMTLADRIVILNEGNIEQFSTPGEIYENPSNIFVAEFIGTPKMNIIKISKEQIQNSNTINFYNNQIVFNGYILEDDFFLGIRPEHINISPEGKIKCNINIDLIENLGFEKIIHASLGDHAIRIKTDKKSLEGINIISFLPENFYLFDKKG

SEQ ID NO: 144981 - protein, 188 aa, Unknown
  Bacterial polypetide isolated from the Sargasso Sea
YEPAEGSIRIDGNDISKVDLYSLRAQIGVVPQDSLLFDGTVMSNIALTRPDAGFEEIVLAGQVACAHEFIEAMPAGYSSSVGERGAGLSGGQRQRLAIARMIIRKPRLLVLDEATSALDVDTERRLTANLMQLYKGSTVFFITHRLASLKAADHILVMDQGALVEQGTHEELMELDGRYATLYHQQEV

SEQ ID NO: 144982 - protein, 278 aa, Unknown
  Bacterial polypetide isolated from the Sargasso Sea
MVTAYNILIYINNAFLVFTISALAIWLWMSSIVSTGSIAIAIAMCLRINGMSQWIMWEVSSLFENIGVVHDGMSMMAKPLEVVDHEQASALKISSGKVDFDHVGFHYGRPGGIMEDFSLSIAAGEKVGVVGRSGAGKTTLMNLLLRFYDLEKGEIRIDGQNISGVTQESLRAQIGVVTQDTSLLHRSIRDNIAYTSPEISDENVIEAAKKANAWEFILDLEDSFGRKGLEAHVGERGVKLSGGQRQRIAIARMFLKDAPILVLDEATSALDSEVEAAI

SEQ ID NO: 144983 - protein, 139 aa, Unknown
  Bacterial polypetide isolated from the Sargasso Sea
MVKLVQVENVFKSFGDVNAVNGVSLDIEEGQFYSLLGPSGCGKTTLLRLIAGFEKPTSGQVFIDNTSMEGIEPNLRPTNMVFQNYAIFPHLNVEENVAYGLRNKRENKNEQNKLVDEALELVGLSGLNKRSANALFRRP

SEQ ID NO: 144984 - protein, 210 aa, Unknown
  Bacterial polypetide isolated from the Sargasso Sea
LDGLFDHQKDKSEKLSKEEQIDIVQKLLKSVDLAPGVAEMYPHELSGGMKQRVAIAIATSMQPRVIVADEPTSALDVVVQRNVMQTLGRLQEGLHASIILIGHDMGLVAQFSDHVGVMYAGRLVEVGPVKTVFKSPKHPYTRLLINSLPTLSNKKDFIGIPGLPASLLDLPEGCAFCLRIGKEDKNKIPWVNVAKDHYLQDCKTCADYGK

SEQ ID NO: 144985 - protein, 249 aa, Unknown
  Bacterial polypetide isolated from the Sargasso Sea
FTESTKNAVMAVEDVSFNIKEGESFGLVGESGSGKSTIAKMIVNLYSPSAGDIDFDNVCITKIKSNKEMMKFRKQIQMIFQDPYSSLNGRLKVKDIVSEPIKLHNPSISSKDLDSYIYDLLESVELTQQSAERYPHEFSGGQRQRISIARALATQPRLLVCDEPTSALDVSIQAQILNLLKDLQEQLNLTILFISHDLPVVRQMCDRIAVLKNGKLCEISKTEELFKNPSHDYTKELLTLMPKIESIYN

SEQ ID NO: 144986 - protein, 244 aa, Unknown
  Bacterial polypetide isolated from the Sargasso Sea
NMPRTSFFKSNRFHAVKDTSINIYKNTTIGLVGESGSGKSTLGKAIANLTSYEGKIYYDGQDIASSSKEIKKHIQIVFQDPYGSLSPRMTIGEIVGEGLGVHFYLSKKESDLKIDKVLSDVGIELKAKNKYPHEFSGGQRQRIAIARSLIMNPNFMILDEPTSALDRSIQIQVINLLKDIQNEYELTYLFISHDLKVIRSMSDYIFVMKDGIIVESGLSNDVFDYPKEKYTKKLLSAALRYATD

SEQ ID NO: 144987 - protein, 181 aa, Unknown
  Bacterial polypetide isolated from the Sargasso Sea
GPSGCGKTSLLRAISGLWAIQSGEIETPSNGELLFIPQKPYMTLGSLREQLCYPLDKNRFSDDHLKAVLEEVKLPQIIQRYPDLDIKQDWQRLLSLGEQQRLAFARLLLNSPKYVVLDEATSALDVNTEKHLYELLNKREMACISVGHRPTLKNYHENVLEITENKGWRLLPASSYQFTEN

SEQ ID NO: 144988 - protein, 140 aa, Unknown
  Bacterial polypetide isolated from the Sargasso Sea
APIWVKKMPKKEAEELALKHLERVQILDQAQKYPGQLSGGQQQRAAIARALCMEPKIMLFDEPTSALDPEMIKEVLDVMVNLAKQGMTMIVVTHEMGFAKEVADQMIFMDEGMIVEKADTKEFFANPKSDRTKLFLSQIL

SEQ ID NO: 144989 - protein, 249 aa, Unknown
  Bacterial polypetide isolated from the Sargasso Sea
MSDFLLALQDVHVNFPARKNWLGKVTERVHALNGLDLQIRQGETLGIVGESGCGKSTLAQLLMGMLKPSQGSYSRRGDKQHNGMQMVFQDPLSSLDPRLPVWRTITEPVWIQKRSPERERRMLAEDLAQQVGIRPEYLDRLPHAFSGGQRQRIAIARALSSEPDVIVLDEPTSALDISVQAQILNLLVSLQARRNLTYVLISHNVSVVRHMSDRVAVMYLGQIVELGDAPHVLTHPAHPYTRVLLDSVP

SEQ ID NO: 144990 - protein, 223 aa, Unknown
  Bacterial polypetide isolated from the Sargasso Sea
MNKTILEVSNVTKKVTSPEGELTIVNDISLSLEEGVFASILGPSGSGKTTLLAIMAGLDLPSSGSVKLLDKEITSLTEDKRAQIRSKDVGFVFQSFHLLPRLSALDNVMMPLEILGAKDAKERALKALDEVGLSKRTGHVPHQLSGGEKQRVAIARAMVKAPSILFADEPTGNLDQSSTDNILELLLGINKQTKTTLVVVTHDQQLASRSDMVFELQEGKLKC

SEQ ID NO: 144991 - protein, 224 aa, Unknown
  Bacterial polypetide isolated from the Sargasso Sea
INIYKNTTIGLVGESGSGKSTLGKAIANLTPYEGKIYYDGQDIASSSKEIKKHIQIVFQDPYGSLSPRMTIGEIVGEGLGVHFNLSKKESDLKIDKVLTDVGIELNAKNKYPHEFSGGQRQRIAIARSLIMNPNFMILDEPTSALDRSIQIQVINLLKDIQNEYELTYLFISHDLKVIRSMSDYIFVMKDGIIVESGLSNDVFDYPKEKYTKKLLSAALRYATD

SEQ ID NO: 144992 - protein, 149 aa, Unknown
  Bacterial polypetide isolated from the Sargasso Sea
EIVGEGLKVHEPHLPNEIRLSKIIGALNDVELDETFYSRFPHELSGGQRQRIAIARAIILRPKLILLDEPTSALDVSIQMQILYLLKDLQNKLGLAYLCISHDLRVIRFLSDQVYVMKEGVIVERGSSEEVFEDPKHEYTKELLAASIA

SEQ ID NO: 144993 - protein, 187 aa, Unknown
  Bacterial polypetide isolated from the Sargasso Sea
LLEQVSLSSADSEKFPHEFSGGQRQRISIARALASQPDFLVCDEPTSALDVSVQAQILNLMKKLQKELGLTYLFISHDLAVVSHLSDKVGVMYLGRLVEWADTKTLFRAPKHPYTKMLLDAIPDLNLSGKARTPVAGEVPSPINPPSGCHFHPRCPWSNERCRTELPTLMDQQQQSVACHAVVENRI

SEQ ID NO: 144994 - protein, 215 aa, Unknown
  Bacterial polypetide isolated from the Sargasso Sea
NISKVYEGPPPVRALDGVSLEVEEGDFVAIVGQSGSGKSTLLNMIGLLDSITEGSIEIEESDVSKLSDNELSKFRGEKIGFIFQSFFLLPGLTAQENVAEGLLYQGISRTERLEKAKKVLDQVGLGDRLTHLPKELSGGQQQRVAIARALVQDPAFVLADEPTGNLDKESGINILNILKDLNNQGKTVIMITHNQEHANMFKKVIELVDGKIVSK

SEQ ID NO: 144995 - protein, 113 aa, Unknown
  Bacterial polypetide isolated from the Sargasso Sea
GLQTMIGENGIRLSGGQRQRLAIARAIIGKPELLLLDEATSALDNESERLVQQALEAIAKEFTLVVIAHRLTTVRHADIIYVMEGGQVVQTGKYNDLVAQDGIFRQLHSAGFE

SEQ ID NO: 144996 - protein, 128 aa, Unknown
  Bacterial polypetide isolated from the Sargasso Sea
KVKEILLEVGLDYEENYNRYPHEFSGGQRQRIAIARALILNPKILILDEPTSALDISIQNQIIELLSSLQKKFSLSYIFISHDMKVIRSVSDKILVIRNGQVIESNNSYEIFNNPKNQYTKNLIQSVI

SEQ ID NO: 144997 - protein, 218 aa, Unknown
  Bacterial polypetide isolated from the Sargasso Sea
GSGKTTVLRVLMTLEKINGGVINLDGEPLTHMNENGNLIEASEKYLRERRSKIGMVFQQFNLFPHMTALQNCIEAPIEVLGLKKEEAEERALDLLELVGLTDKKDQHPSRLSGGQQQRVAIARALAMRPKVMLLDEITSALDPEVVGEVLNVIRSLNKEHNLTMIMVTHQMGFAREISDRVCFFNEGKIFEEGPPEKLFGDPQNERTKQFLHAVLDSH

SEQ ID NO: 144998 - protein, 178 aa, Unknown
  Bacterial polypetide isolated from the Sargasso Sea
MNQPLVEIKNLSLKYGNYTALKNISASFFPGKCVVICGPSGSGKSSLLRCVNKLEEFDEGDVIFDGHSLKKTKNISQIRSNIGMVFQHFELYPHLSVLNNITLAPIQVKGLSKREANSNAMKLLERVGIDDQAKKYPAELSGGQQQRAAISRALALEPKLMLFDEPTSALDPEMISEV

SEQ ID NO: 144999 - protein, 155 aa, Unknown
  Bacterial polypetide isolated from the Sargasso Sea
LLFEGTVAENIALNNSEASDDEIIEASKIACAHDFIMTLEKGYATNISERGANLSGGQRQRIAIARTILANPQLLIMDEATSALDYNTENLLTRNLAEWAHGRTVLFVTHRLNSLKNSDTILVMQDSMLKEKGTHQELMDKQSIYYALWNQQNSL

SEQ ID NO: 145000 - protein, 263 aa, Unknown
  Bacterial polypetide isolated from the Sargasso Sea
MAKNNTDEIIVKFDEVTKQYGDLVVLDKLNLEIKKNEMVSIIGPSGSGKTTVLRVLMTLEKINGGVIYLDGEPLTHMDSNGSMVEASEKYLRERRSKIGMVFQQFNLFPHMTALQNCIEAPVEVLGMKKEEAEERALELLELVGLTDKKDQHPSRLSGGQQQRVAIARALAMRPKVMLLDEITSALDPEVVGEVLNVIRSLNKEHNLTMIMVTHQMGFAREISDRVCFFNEGKIFEQGPPEQLFGDPQNERRKQFLHAVLDAN

SEQ ID NO: 145001 - protein, 164 aa, Unknown
  Bacterial polypetide isolated from the Sargasso Sea
GVVPQDSLLFDGTVQANIALTRPDASFEEITGAAQVACAHDFIQSLPGGYSSSVGERGSALSGGQRQRMALARMVLKRPRLLVLDEATSALDVDTEQQVTRNLAEVYRGSTVLWITHRLGSLRHADHILVMHQGSLVEQGTHSELMKLGGRYATLYQQQEAGQA

SEQ ID NO: 145002 - protein, 169 aa, Unknown
  Bacterial polypetide isolated from the Sargasso Sea
SPTKGTYSLNNKEVSQMSDDELSKIRNTEIGFVFQNFSLLPRSSALENVMLPLQYAGISLSERKTIALDALEKVELLDRKDHKPSELSGGQQQRVAIARALVNNPSILFADEPTGNLDSQTGMKVLDIFKRLNENGQTIILITHENEVASAAKRIIHIKDGNISNDEIH

SEQ ID NO: 145003 - protein, 134 aa, Unknown
  Bacterial polypetide isolated from the Sargasso Sea
IGIIFQQFHLMTHLNALENVSLPLEMNHEQDALELAEKALEQVGLGSRMDHFPHQLSGGECQRVAIARAIVIRPALLLADEPSGNLDHDTGEQVAGLLFDLVGRIGMTMVLVTHNSELALRCSKQLTLSQGLLQ

SEQ ID NO: 145004 - protein, 221 aa, Unknown
  Bacterial polypetide isolated from the Sargasso Sea
MGPILKVKNLSKHFDVSPPLITRLVSREEKSILKAVEGIGFEIKQGETVSLVGESGCGKSTVARLVVKLYEPTNGEIFFGDQNFSSIKSRKELKPIRRRIQMIFQDPYASLNPRWRVFDIIAEPLRAHGIISDKQGLKKRINELLEQVSLSSADSEKFPHEFSGGQRQRISIARALASQPDFLVCDEPTSALDVSVQAQILNLMKKLQKELGLTYLFISHD

SEQ ID NO: 145005 - protein, 238 aa, Unknown
  Bacterial polypetide isolated from the Sargasso Sea
TVIAVDEVDLGIPKGRTLGLVGESGCGKTTLGRAILRLQQPTSGSVQYDGTELIGLTQSDMLEYRKRMQIIFQDPYASLNPRQTIEQTLIEPMLVHKIGSNQADRRDRVVSLLEEVGLGAEFLLRYPHEFSGGQRQRISVARALAVEPEFVVCDECVSAMDVSVQAQVLNLLRELQEKRKLTYLFISHDLSVVKFMSDDIAVMKQGCIEEFGSANDIYENPQSDYTRELLDAVPRADF

SEQ ID NO: 145006 - protein, 107 aa, Unknown
  Bacterial polypetide isolated from the Sargasso Sea
MEYPKVTVLERSEEILEKVGLKERINHLPSELSGGERQRVAIARSMVNEPTCLIMDEPTGDLDTNNASIIIDLILNLIESKDISLILATHDMVFANLLDNIIDLSNG

SEQ ID NO: 145007 - protein, 134 aa, Unknown
  Bacterial polypetide isolated from the Sargasso Sea
LSGGQQQRVAIARALVQKPQIVLADEPIASLDPLNAKIVMESLRDIHDTDGLTVICNLHTLDTARQFCDRVIGMSEGRIVFDGKADNLTTEVAKSIYGASEDFEESMTSTAIGSDNNKPSREDLQIKELSTVDA

SEQ ID NO: 145008 - protein, 278 aa, Unknown
  Bacterial polypetide isolated from the Sargasso Sea
EKTNSYGFQSYALYPHMNVFQNISFGLTSEKIEKNKIKQKVLEASKILKIEELLDRKPKELSGGQRQRVAIGRAITRNPKLFLFDEPLSNLDAALRSEMRVEISKLHKKLKSNIVYVTHDQIEAMTLADKIVIMNKGKIEQFGDPEDIYNNPRNIFVAEFIGNPKMNILKIERKDIINKNTLKLFNKNIHFENSNFESEIYIGIRPEDISLENESEISAEIKIDLIENLGSEKIIYTHINGSEIRIKTIKNIKDKNITIYLPKNKLYLFDVNKNRLKT

SEQ ID NO: 145009 - protein, 158 aa, Unknown
  Bacterial polypetide isolated from the Sargasso Sea
MASIELKNIEKSFGTNKVINKFDIKINDGEFIVLVGPSGCGKSTLLRMISGLESVDIGEIYLDNKLINNLIPSKREIAMVFQSYALYPHMNVFENMAFGLKMEKIPKSEINQKVNNAAATLQIEDLLERKPKQLSGGQRQRVAIGRAITRSPKVFLFD

SEQ ID NO: 145010 - protein, 161 aa, Unknown
  Bacterial polypetide isolated from the Sargasso Sea
RSIRENICYGKSDATKKEIIAAAKKAHAHDFILNLQDESGRKGYDAHVGERGIKLSGGQRQRITLARVILKNAPILLLDEATSALDSEIENQIQDTLKNMMKGKTVIAIAHRLSTIAQMDRILVLDNGKIIEDGDHQSLLSKGGLYYELWHHQSGGFLKSD

SEQ ID NO: 145011 - protein, 177 aa, Unknown
  Bacterial polypetide isolated from the Sargasso Sea
ISQGHPMVFPFKVSEVVLMGRHPHLSALSFESHEDFNISQRAMETTMTSEFSERFFNEISEGEKQRVMIASALAQNPELMLLDEPTSALDLKYQIEIMNILKDLNTNHKMTLIVAMHDLNLASRFCNRIILINEGKVVSDGTPLQVLKKDILEQVYGIELDLDFKNGHTLIHPKIDS

SEQ ID NO: 145012 - protein, 219 aa, Unknown
  Bacterial polypetide isolated from the Sargasso Sea
MKDTPPVVEASKVDLVFQTADGPVHALSDIDLEINKGDFISLIGPSGCGKTTLLRLIADLEKPTGGMLKVNGISPEEARLNRDYGYVFQSPALYPWRTVDGNLKLPLEIMGVEKADQNKRAREALEMVDLTGFEKKFPWQLSGGMQQRVSIARALTFYPDLLLMDEPFGALDEIVRDQLNEHFHRLWEQTHKTVVFVTHSIPEAAYLSTKIVVMSPLQE

SEQ ID NO: 145013 - protein, 180 aa, Unknown
  Bacterial polypetide isolated from the Sargasso Sea
IRDVTQESLHRSIGVVPQDTVLFNDTIYYNIAYGLDNASRAAVEKAAKDAQIHDFILSLPEGYDTTVGERGLKLSGGEKQRVGIARTLLKNPPILLLDEATSALDTETEREIRETLTNASEGRSVITIAHRLSTIADADRIIVLENGSIVEIGTHEALLSKRGRYYSLWTKQLTEDKPAA

SEQ ID NO: 145014 - protein, 173 aa, Unknown
  Bacterial polypetide isolated from the Sargasso Sea
KYSENIQIIFQDPYSSLSPRMNVQEILTEGIDVHFPKQSHIEKIQMLKDILNETGMNYDRDYNKYPHEFSGGQRQRIAIARALILKPKILILDEPTSALDITIQNQILDLLQNLQEKFSLSYIFISHDMNVIRSVSDKIIVLKTGKLIEYDEAKNIFNNPVDNYTKNLIRSVI

SEQ ID NO: 145015 - protein, 253 aa, Unknown
  Bacterial polypetide isolated from the Sargasso Sea
KDDIDKKVDKALSMVSLSGFEKRMPNQLSGGQQQRVAVARSLVFDPQLVLMDEPLGALDKNLRESMQYEIKHIHENIGVTVVYVTHDQSEALTMSSRIAVFNDGKVQQLSSPDKLYEEPVNSFVAEFIGENNTFSGQVTDISGGKCKVKLDTGAEIISNPIRVKTKGEKTKVSLRPERAIIDPEEKMDNKHKGKIEEVIYHGDHARVRLNLLGNKEFILKVPNSSARMDIKPGNEINVGWNSNDARALDPKSI

SEQ ID NO: 145016 - protein, 230 aa, Unknown
  Bacterial polypetide isolated from the Sargasso Sea
MPNQLSGGQQQRVAVARSLVFDPQLVLMDEPLGALDKNLRESMQYEIKHIHENIGVTVVYVTHDQSEALTMSSRIAVFNDGKVQQLSSPDKLYEEPVNSFVAEFIGENNTFSGQVTDISGGKCKVKLDTGAEIISNPIRVKTKGEKTKVSLRPERAIIDPEEKMDNKHKGKIEEVIYHGDHARVRLNLLGNKEFILKVPNSSARMDIKPGNEINVGWNSNDARALDPKSI

SEQ ID NO: 145017 - protein, 216 aa, Unknown
  Bacterial polypetide isolated from the Sargasso Sea
VNQNEIIGILGPNGCGKTTTIGMILGLLKPSKGKVLINGVEIENQRVDLLNQLNFISPYIELPKKLTVRQNLEVYGRLYDVNKHKEKIEYLCEKLRLYEFIDKLTGELSSGQKNRVSLAKSIINNPKVLLLDEPTASLDPETGDFVRSFLEEYQQENKTSILLASHNMAEVERLCSSVLMMNKGSIIDEGKPEELIKKHGRKNMEEVFLKLTREKV

SEQ ID NO: 145018 - protein, 148 aa, Unknown
  Bacterial polypetide isolated from the Sargasso Sea
MTEVNIVNLIKNFSGMTRPAVDNISINIRNGELIALLGPSGCGKTTILKMITGLLTPDNGDILLDNQSILSVPTEKRNVVMVFQNYLLFPYMNVNENVGFSLKMKGDDPKIINKRVQEMLELVKLPDIGERRPKQLSGGQQQRVALAR

SEQ ID NO: 145019 - protein, 190 aa, Unknown
  Bacterial polypetide isolated from the Sargasso Sea
MNKTILEVSNVTKKVTSPEGELTIVNDISLSLEEGVFASILGPSGSGKTTLLAIMAGLDLPSSGSVKLLDKEITSLTEDKRAQIRSKDVGFVFQSFHLLPRLSALDNVMMPLEILGAKDAKERALKALDEVGLSKRTGHVPHQLSGGEKQRVAIARAMVKAPSILFADEPTGNLDQSSTDNILELLLGNQ

SEQ ID NO: 145020 - protein, 216 aa, Unknown
  Bacterial polypetide isolated from the Sargasso Sea
KEIAMIPQNAGQSLTPNLKIGYQIEETLKLHSTINTKDRQLKITELLHKVRLPSPNIMAQRYPHELSGGQQQRVAIAMALAGSPKLLLLDEPTTGLDVTTQAHVLELLNEIAKDTDTSLVYVSHDLGAIAQVSDRVIVMYAGEIVLDGNVREVLSSPLHPYAYGLLNSIPKLSLPGLPEAMPGTPPELEQNIKGCSFFERCEFATDKCKNSKPELF

SEQ ID NO: 145021 - protein, 113 aa, Unknown
  Bacterial polypetide isolated from the Sargasso Sea
GLDTLIGENGMRLSGGQRQRLGVARALFTRPRLLVLDEATSALDSETEQAIARTMMDLEGSVTTITIAHRLATIRHCDLVLYLDQGRLAAGGDFDDVRAQSVDFDRQAKLLGL

SEQ ID NO: 145022 - protein, 115 aa, Unknown
  Bacterial polypetide isolated from the Sargasso Sea
TGELSSGQKNRVSLAKALVNEPKVLLLDEPTASLDPEVGDFVRTFLEDYKKEKKISILLASHNMNEVTRLCKSVLMMKNGEIIDQGKPEDLIAKHGRTNLEEVFLKLSRSKNEFN

SEQ ID NO: 145023 - protein, 236 aa, Unknown
  Bacterial polypetide isolated from the Sargasso Sea
PLKVRKMSQVEIEKKVDKALSMVSLGGFANRMPGQLSGGQQQRVAVARALVFDPSVVLMDEPLGALDKNLRESMQYEIKHIHESIGVTVVYVTHDQGEALTMSNRIAVFNDGKVQQLSSPDKLYEEPVNSFVAEFIGENNTFGGEVSEISNGTCKVKLEKGEIIANPISVKSVGEKTTVSIRPERALINPKDKMDNNQKGKIEEVIYHGDHTRVRLNLLGNSEFILKVPNSSQNLD

SEQ ID NO: 145024 - protein, 219 aa, Unknown
  Bacterial polypetide isolated from the Sargasso Sea
MPMRFTLSVAHGEQIAILGPSGAGKSTLLNLIAGFLTPASGNMVIDGEDHTTTPPSRRPVSMLFQENNLFSHLSVQQNIGLGLNPGLKLNASQREKILHIAQQMGIDSLLERLPSELSGGQRQRVALARCLVREQPILLLDEPFSALDPALRQEMLTLVAEVCREKKLTLLMVSHSVEDAARIAPRSIVVADGRIAWQGDTDDLLSGNASASALLGIKA

SEQ ID NO: 145025 - protein, 154 aa, Unknown
  Bacterial polypetide isolated from the Sargasso Sea
ELPKKLTVEENLEVYGRLYGVNNLQNKILNLMEDLDLTDFRKRKTGELSSGQKNRVSLAKALINEPEILLLDEPTASLDPDVGDYIRTYIENFSSKKGTTILLASHNMNEVERLCSEVMMMKNGKIIDKGTCNALISKHGRKNLEETFLKIVRE

SEQ ID NO: 145026 - protein, 103 aa, Unknown
  Bacterial polypetide isolated from the Sargasso Sea
MSNAIIKIENMNKWFGDFQVLKDINLEVEKNKKIVVCGPSGSGKSTLIRCINRLEEHQKGSIVVDGTELTENTKNIEAIRAEVGMVFQQFNLFPHLSILDNCT

SEQ ID NO: 145027 - protein, 158 aa, Unknown
  Bacterial polypetide isolated from the Sargasso Sea
FQQFNLFPHLSILDNCTLAPIWVKKMPKKNAEELAMKQLEQVQIVDQAQKFPGQLSGGQQQRCAIARALCMEPKIMLFDEPTSALDPEMIKEVLDAMVNLAKAGMTMIVVTHEMGFAKEVADEVIFMDEGMIVEKAETKEFFANPKSDRTKLFLSQIL

SEQ ID NO: 145028 - protein, 209 aa, Unknown
  Bacterial polypetide isolated from the Sargasso Sea
MVVNLFKPSSGDIFFDNVNVTKIKKNKDLLKFRRQIQMIFQDPFSSLNGRLKVKEIIAEPIKLHNPNIKSIDLDNYIYDLLESVELSQQSAIRYPHEFSGGQRQRISIARALATQPRLLVCDEPTSALDVSIQAQILNLLKDLQEQLNLTILFISHDLPVVRQMCDKIAVLKDGKLCEVSETEELFKNPKHNYTKELLKLMPKIESIYN

SEQ ID NO: 145029 - protein, 263 aa, Unknown
  Bacterial polypetide isolated from the Sargasso Sea
ENLAFPLRVRKVEKDEIDKKVDKALSMVSLNGFETRMPAQLSGGQQQRVAVARALVFDPAVVLMDEPLGALDKNLRESMQYEIKHIHESIGVTVVYVTHDQSEALTMSNRIAVFNDGKVQQLSDPAELYEKPVNSFVAEFIGENNTFNGEVIDIDKDKCKVKLGNAEIIANPISVKSKGEKTTVSLRPERALINPKDKMDNMFTGKIEEVIYHGDHTRVRLNLLGSSEFILKVPNSTSNLELKVSQDIKIGWNSLDARALDPK

SEQ ID NO: 145030 - protein, 87 aa, Unknown
  Bacterial polypetide isolated from the Sargasso Sea
RPSALSGGERQRVAIARALVNQPACVLLDEPTGNLDADTAESVHALLAELNREYQTSLLVVTHDMQLAQRMDRIYRLQAGQLHEQVA

SEQ ID NO: 145031 - protein, 118 aa, Unknown
  Bacterial polypetide isolated from the Sargasso Sea
MSGGQRQRLSIARALVKDAPILILDEATSALDSESEIEVQQAVEHLMENRTTLVIAHRLSTIQSADRICVMENGQIVEQGKHEELLLNGGRYHQLYEMQFKHQPEIQITEESKENLVS

SEQ ID NO: 145032 - protein, 200 aa, Unknown
  Bacterial polypetide isolated from the Sargasso Sea
KAEVVDIPGAKKLQIKEGEIRFDAVSFGYSPERTVLKSLTFRVAPGETLAIVGASGSGKSTITRLIFRLYDTLDGKILIDGQDIRLITQESLRESIAIVSQDTILFNETIYYNIAYGRPNASPSEVEEAARLAQIHEFITKQPNGYQTIVGERGLKLSGGERQRVGIARALIKQTKILVFDEATSALDSYTEREIFDGLN

SEQ ID NO: 145033 - protein, 268 aa, Unknown
  Bacterial polypetide isolated from the Sargasso Sea
TQLTLKIKNGELLGLLGPSGCGKTTLLRLIAGFEYPTRGRISLNDKEISSGKKILSPEKRNIGMVFQDYALFPHLTVLENVIFGLKNKKDRSRVDYLLNVLGLDRFIGRYPHELSGGQKQRLAIARALAPGTNFILLDEPFCSLDMHVKLKLRSEFPNILRGCNASGLMVTHDPEEAMSICDKVAVMNEGKIHQIDTPINLLNNPKTLFVSSFILGNNIINLQKNGNTYMSCLGRINSSGVLQNANIKSMSISPKFISIKRSESGNAN

SEQ ID NO: 145034 - protein, 153 aa, Unknown
  Bacterial polypetide isolated from the Sargasso Sea
MPQKVKNAIVRMENVSKWFDDFQAINDVNLTIYEGERIVICGPSGSGKSTLIRCLNGLEKHQKGKITVHETELTGGASSVRKVREDVGMVFQQFNLFPHLTVLENCTLAPVSNSKMDASAAHNKAMEYLKRVQIPEQADKLPGQLSGGQQQRV

SEQ ID NO: 145035 - protein, 29 aa, Unknown
  Bacterial polypetide isolated from the Sargasso Sea
MQRHHGGFSVFAGVGERTREGNDLYHEMI

SEQ ID NO: 145036 - protein, 252 aa, Unknown
  Bacterial polypetide isolated from the Sargasso Sea
KGRPYSQKMQNIILNLTKSINDPQNAPKLLVGTGEDKKYLCVVLTADRGLCGGFNSNICKLAKTNFKKILSEGKELNIITVGSKGHDQIKREYGKYVIKKFSFKDKKNISFNDADEVGKEIISLFNQDKFDKCIIFYNNFKNVITQIPQAQQIIPAETKNLEEGNDQNFSYEFEPEEDEILEDLLPKNISTQVFKALLENAASEQGSRMTAMDNATRNAGDLVDKLYIDLYRSRQASITKEFNRIISGAESL

SEQ ID NO: 145037 - protein, 220 aa, Unknown
  Bacterial polypetide isolated from the Sargasso Sea
ELVSYQKNIKESKNFDSASILKVEGLDVWYPIKKGLLKRTVDYVKAIKNVSFDLKIGESIGIVGESGSGKTSLILAILNLIESKGKIQINKKDLSQLNKKEMLNLRKEIQIVFQDPFSSLSPRMNIEDIISEGLLIHYPKIGKKEKEEKIKNILDKVGLEYKNTIEKYPHEFSGGQRQRIAIARALILEPKILILDEPTSALDVTIQSQIINLLNKLQKQ

SEQ ID NO: 145038 - protein, 153 aa, Unknown
  Bacterial polypetide isolated from the Sargasso Sea
MTALQNCIEAPVQVLGMKKEEAEERALELLELVGLTDKKDQHPSRLSGGQQQRVAIARALAMRPKVMLLDEITSALDPEVVGEVLNVIRSLNKEHNLTMIMVTHQMGFAREISDRVCFFNEGKIFEQGPPEKLFGDPKNERTKQFLHAVLDAN

SEQ ID NO: 145039 - protein, 160 aa, Unknown
  Bacterial polypetide isolated from the Sargasso Sea
YIELPKKLTVKQNLIVYGKLYSIKNLENRIEYLSETLRLKNLLNRVTGELSSGQKNRVSLAKALINEPKVLLLDEPTASLDPEIGDFVRTFIENYKKEKKMSILLASHNMNEVTRLCSSIMMMKDGEIIDSGNPKDLIKKHGRQNLEEVFLKLTRNKNEL

SEQ ID NO: 145040 - protein, 190 aa, Unknown
  Bacterial polypetide isolated from the Sargasso Sea
MKDRSKEDEVADININTVNKYFGDVHVIKDVSLDIKSQSFTVLVGPSGCGKSTMLRMIAGLEDINSGTISIDGQVVNDLPPKQRNIAMVFQSYALYPHMTVFDNMAFGLKLEKRSKDEINERVNEAARILQIEDYLQRKPKQLSGGQRQRVAIGRAITRKPKVFLFDEPLSNLDAALRVQMRVELAKLHN

SEQ ID NO: 145041 - protein, 264 aa, Unknown
  Bacterial polypetide isolated from the Sargasso Sea
VVKARMAAHELHAVIDRAPEGGEGADTRDPKGAALVASQVKGEIEFVDVTFAYAARPIFRGLTMNIPAGTTAALVGESGCGKSTIARLLERFYDPTSGVIRLDGVDISSIRITDLRAAIGIVSQEPLLFEASLRENIAVGRANASAEDVPLEDVVSAAMSAMAHDFISSFPSGYDTIVGGKNSKLSGGQKQRVAIARAALRNPPVLILDEATSALDTENERLVQEALDALVAGSKRTTIVIAHRLTTVRGADKIIVLGSADAAG

SEQ ID NO: 145042 - protein, 155 aa, Unknown
  Bacterial polypetide isolated from the Sargasso Sea
FNLFPHLSILDNCTLAPIWVKKMPKKDAEDLALKQLKQVQIDDQAYKYPGQLSGGQQQRCAIARALCMEPKIMLFDEPTSALDPEMIKEVLDAMVNLAKAGMTMIVVTHEMGFAKEVADEVIFMDEGMIIEKATTTEFFANPKSDRTKLFLSQIL

SEQ ID NO: 145043 - protein, 134 aa, Unknown
  Bacterial polypetide isolated from the Sargasso Sea
MYYNESLIVNDVTHFYKKTKSINNFSLRVKKGEVVSLLGPSGCGKTTLLRLIAGFDDPVSGEIIIGENIVYGSNYISTEKRGVGMLFQDIALFPHLTVGKNIGFAIENNKNRNEVIINLLKKVGLEKFINRYPD

SEQ ID NO: 145044 - protein, 111 aa, Unknown
  Bacterial polypetide isolated from the Sargasso Sea
MYKKNFVKKDALIIDDLHHKYDKRECSNWILNEINLKIENGELLGLLGPSGCGKTTLLRLIAGFEYPSRGRISLNDKEISSREKILSPEKRNIGMVFQGYALFPHLTVWKM

SEQ ID NO: 145045 - protein, 187 aa, Unknown
  Bacterial polypetide isolated from the Sargasso Sea
MGPSGSGKSTLMNIIGCLDSPTDGDYYLNDKSVSQLSDDELAKIRNKEIGFVFQSFHLLPRNTAFENVMLPLKYAGLDKNVAKKKTEKVIDLVGLSSRSNHTPAELSGGQQQRVAIARALVNKPSILFADEPTGNLDSKTGQDVMKIFKDLNELGQTIILITHENDIARQSNRIITIMDGLIESDTN

SEQ ID NO: 145046 - protein, 148 aa, Unknown
  Bacterial polypetide isolated from the Sargasso Sea
IKLDSRILNDKKIFIEPENRNIGYVFQDFALFPHINAEKNMKYALSNDFHSSYEEIINTLNLQDHLKKMPHEMSGGQQQRVAIARSILMKPSLLILDEPFSNLDKENASNAQSLIAKIVKDLNIPCILVTHDSNNLNFLKISEEITLN

SEQ ID NO: 145047 - protein, 295 aa, Unknown
  Bacterial polypetide isolated from the Sargasso Sea
MGVIAETADRVAVMKSGNLVEIGETKKILTNPQENYTKSLVSSVPPTNKKISRFVIVEKENNNKEENNIKILNRWSKKEIIKQDLVEIKNLNKSFDDNFFTENSKNSVMAVNDVSFEIKEGESFGLVGESGSGKSTIAKMIVNLFKPTSGDILFDNVCITKIKQRSELMKFRKQIQMIFQDPYSSLNGRLKVKDIIAEPITLHNPSISNFDLNNYIYDLLESVELTQKSADRYPHEFSGGQRQRISIARALATQPRLLVCDEPTSALDVSIQAQILNLLKDLQEQLNLTILFISH

SEQ ID NO: 145048 - protein, 180 aa, Unknown
  Bacterial polypetide isolated from the Sargasso Sea
MATLVAENLTFAYAKKSNPVLNKVSVEIKPGTLTALVGPNGAGKSTLLRILQGQNIPDKGEIKIDGENLYRSRALVALMPQRSSLNWKFPITVEKLVSLGQIKYSKSRSNNPFQIKTLLAYPNSWINKCCELEATMQRVGIASLANRRLDSLSGGQQQRALLAKTLMSPAKIFLLDEPCA

SEQ ID NO: 145049 - protein, 223 aa, Unknown
  Bacterial polypetide isolated from the Sargasso Sea
GQRQRVAMARAIVRNPRLFLMDEPLSNLDARLRSEVRDSIMDLHQQLKTSTVYVTHDQTEAMSMADRIVVMNGGHVQQVGRPEYLYAHPANLFVAGFIGSPAMNLLSLPCADGEVQLGDLRHPLPSRYRDEPRVWFGIRPEHISDRVEEGHLRLSATVLQRELMGADYLLHVSTPIGTLRFSRRHRGAVPEKGDTLTLGFSPGDIHLFHAEQQHNLLQEIDHA

SEQ ID NO: 145050 - protein, 193 aa, Unknown
  Bacterial polypetide isolated from the Sargasso Sea
MIKTRNLRRSYLTGTQSVDAIKGIDLDISRGEFISIMGPSGSGKTTLMNIIGCLDSPSSGEYYLNDKLVSELSDNELATIRNNEIGFVFQSFHLLARNSALDNIMLPLKYAGKDKVSALERSQEVLKQVGLSDRASHTPAELSGGQQQRVAIARALVNSPSIIFADEPTGNLDSKTGAEVMSLFKDLNANGQT

SEQ ID NO: 145051 - protein, 214 aa, Unknown
  Bacterial polypetide isolated from the Sargasso Sea
FPKYTKAHPPVRALDGVSLEVEEGDFVAIVGQSGSGKSTLLNMIGLLDSITEGSIEIEESDVSQLSDNELSKFRGEKIGFIFQSFFLLPGLTAQENVAEGLLYQGISRTERLKKATEVLDQVGLGDRLTHLPKELSGGQQQRVAIARALVQDPAFVLADEPTGNLDKESGINILNILKDLNNQGKTVIMITHNQEHANMFKKVIELVDGKIVSK

SEQ ID NO: 145052 - protein, 258 aa, Unknown
  Bacterial polypetide isolated from the Sargasso Sea
ISNIRSKKFEVIDIIKMMNSKVKINPKIRKIYNFKDSIKLLNVNFAYDDKSNTLENVNLTINKGDRVGIIGSTGSGKSTLLDIIMGLLQPNSGEVLIDGININNSFDKTSLNKWQSCISHVPQNIFISDASFAENIAFGLSINQIDIDKVRECAKKAMIDNFINNSEKKYFTNLGEGGVKISGGQKQRIGIARALYKNSKVLILDEATSALDNKTEHDVMNTFQDLNSVTLLIVTHRPSTIKYCDKIIEIKKGSIMSS

SEQ ID NO: 145053 - protein, 219 aa, Unknown
  Bacterial polypetide isolated from the Sargasso Sea
MSKNTEFVKFDKVDKSYDGKVLVVKDLNLNISEGEFITMLGPSGSGKTTCLMMLAGFETPTNGEIYLDSNPISNIPPHKRGIGMVFQNYALFPHMTVYENLAFPLRVRKVQKDEIDKKVDKALSMVSLSGFESRMPAQLSGGQQQRVAVARALVFDPAVVLMDEPLGALDKNLRESMQYEIKHIHENIGVTVVYVTHDSGEALTMSNRIAVFNDGKVPH

SEQ ID NO: 145054 - protein, 139 aa, Unknown
  Bacterial polypetide isolated from the Sargasso Sea
MSETIIQMKEVNKWFGDFQVLKDINLDVKEKQKIVVCGPSGSGKSTLIRCINRLEEHQKGQIIVDGNELSEKTKDIEKIRAEVGMVFQQFNLFPHLSILDNCTLAPIWVKKTPKKKAEEFAMRQLEQVKIADQAAKFPG

SEQ ID NO: 145055 - protein, 224 aa, Unknown
  Bacterial polypetide isolated from the Sargasso Sea
MKSYSIDDLSFQKVYFSYDDKLNTNEILNNFSYKIKKGKFTSIIGPSGSGKTSLLKLISGITKCKKGEIRFENEIIKNKSIDISLVQQSAALMPWLNVYQNIELGNINKRNKKLNKIDKIIKDVGLQEYTKFYPYQLSGGLLQRVAIARALLFNPKLLLLDEPFAALDNLSREIISTELISIIKKEAVTVIMVTHSIEEAALLSDKVLVTGLAPINVIKSFIPP

SEQ ID NO: 145056 - protein, 216 aa, Unknown
  Bacterial polypetide isolated from the Sargasso Sea
GIVGESGSGKTSLVLAILKLINSEGKIKINNLDLSNLKQKEFKKLRKDIQIVFQDPFSSLSPRMTVEQIVSEGLYVHYPDISVDEKNLKVESILNEVGLKYSETYNRFPHEFSGGQRQRIAIARALILNPKILILDEPTSALDITIQKQIIDLLNNLQKKYLISYLFISHDMKVIKSVADNILVLKNGNLIESGNTDEIFNNPKNDYTKTLLSAVI

SEQ ID NO: 145057 - protein, 115 aa, Unknown
  Bacterial polypetide isolated from the Sargasso Sea
TFYSRFPHELSGGQRQRIAIARAIILRPKLILLDEPTSALDVSIQMQILYLLKDLQNKLGLAYLCISHDLRVIRFLSDQVYVMKEGVIVERGSSEEVFEDPKHEYTKELLAASIA

SEQ ID NO: 145058 - protein, 287 aa, Unknown
  Bacterial polypetide isolated from the Sargasso Sea
EVVRNFNLLIIWRVIIDVMRRSINYAGNFFPYLIMAIPYFRGDIDYGRFIQASFAFGMVEGSLFFIVNQIEELAKFTAGIGRLEGFQSKVESISQTNPTSNQNVISNYPSILINNADLCPPGSNKTIIKNLNLSIDHNQSLLVVGPSGCGKTSLLRMISGLWEPDNGVIKKPKIGELLFIPQKPYMLLGSLREQLCYPTEVKKFSDEHLTSVLHEVNLKTLVDRYPNLDIKQDWPRILSLGEQQRLAFARLLLNSPRFAVLDEATSALDIDTEKKLYSLLKKRELLS

SEQ ID NO: 145059 - protein, 121 aa, Unknown
  Bacterial polypetide isolated from the Sargasso Sea
MTTSLFKYPHEFSGGQRQRIAIARSIILNPKFMILDEPTSALDRSIQIQVINVLKRLQDKYELTYLFISHDLKVIRSMCDQIFVMSEGKLVEYGKADEVFENPQQEYTQKLLRAALKYSSN

SEQ ID NO: 145060 - protein, 185 aa, Unknown
  Bacterial polypetide isolated from the Sargasso Sea
LLDEPLGALDANLRKTMQVELKKIHSEFGITFVYVTHDQEEALSMSSRIVLMNEGEIEQLSNPNELYENPNTAFAAKFMGFSNIFSISDIEQINSNKILNYLFDENKHSNKLCFRSKDVNIVSQNNGDFKIISKNYYGDSYKFQAINSNGLIINVSSSDNNISKLEIDTLVDLKINNKKIITLKK

SEQ ID NO: 145061 - protein, 157 aa, Unknown
  Bacterial polypetide isolated from the Sargasso Sea
MSTNKEFVKFDKVDKSYDGKILVVKDLQLDIAEGEFITMLGPSGSGKTTCLMMLAGFETPTNGEIYLGGNAISSIPPHKRGIGMVFQNYALFPHMTVYENLAFPLRVRKIPKDEADKKIDKALSMVSLQGFASRMPGQLSGGQQQRVAVERSLVFDP

SEQ ID NO: 145062 - protein, 217 aa, Unknown
  Bacterial polypetide isolated from the Sargasso Sea
AEGDITFERIRFAYPGRGVVFEDLDLHIPAGQKVGVVGSSGAGKSTLINLLQRLDDVQGGRILVDGQDIRSVSQDSLREKIAVVPQETALFNRSIRENIRYGRPDASDEEVIEAARSAFCDGFIRELPEGYETLVGERGVMLSGGQRQRLGIARAFLKDAPILILDEATSALDTQSEGEIQAALNLLVHNRTVVAVAHRLSTLASFDRILVLRDGRI

SEQ ID NO: 145063 - protein, 124 aa, Unknown
  Bacterial polypetide isolated from the Sargasso Sea
LELVGLTDKKDQHPSRLSGGQQQRVAIARALAMRPKVMLLDEITSALDPEVVGEVLNVIRSLNKEHNLTMIMVTHQMGFAREISDRVCFFNEGKIFEQGPPEQLFGDPKNERTKQFLHAVLDAN

SEQ ID NO: 145064 - protein, 169 aa, Unknown
  Bacterial polypetide isolated from the Sargasso Sea
QDPYSSLNGRLKVKDIVSEPIKLHNPSISSKDIDSYIYDLLESVELTQQSAERYPHEFSGGQRQRISIARALATQPRLLVCDEPTSALDVSIQAQILNLLKDLQEQLNLTILFISHDLPVVRQMCDRIAVLKNGKLCEISKTEELFKNPSHDYTKELLTLMPKIESIYN

SEQ ID NO: 145065 - protein, 229 aa, Unknown
  Bacterial polypetide isolated from the Sargasso Sea
PVLNNLSMTIKAGESIALVGRSGSGKSTISNLLPRYYDLEAPSEILLDGIALNEYKLSDLRRQFALVSQQVVLFNDTIANNICYGLQRDVSMEELHAVAKQAHVWEFVEDLPEQLNTMVGENGVMLSGGQRQRIAIARAILKDAPILILDEATSALDTESEKLIQHALDTLMRDKTSIVIAHRLSTIENSDRIYVIDSGQVIESGTHTDLLANDGTYSALCKMQFGEQG

SEQ ID NO: 145066 - protein, 118 aa, Unknown
  Bacterial polypetide isolated from the Sargasso Sea
MNYERDHNKYPHEFSGGQRQRIAIARALILKPKILILDEPTSALDITIQNQILDLLQNLQEKFSLSYIFISHDMNVIRAVSDKILVLRKGKLIEYNSADVVFNNPKDQYTEKLISSVI

SEQ ID NO: 145067 - protein, 129 aa, Unknown
  Bacterial polypetide isolated from the Sargasso Sea
KVLLDVGIELNAKNKYPHEFSGGQRQRIAIARSLIMNPTFMILDEPTSALDRSIQIQVINLLKDIQNEYKLTYLFISHDLKVIRSMSDYIFVMKDGKIVESGPSNEVFDYPKQNYTKKLLSAALRYASN

SEQ ID NO: 145068 - protein, 244 aa, Unknown
  Bacterial polypetide isolated from the Sargasso Sea
MKKPLEVIGLSKTYNSKEAVKDVSFKVNQNEIIGILGPNGCGKTTTIGMILGLLKPSKGKVLINGVEIENQRVDLLNQLNFISPYIELPKKLTVRQNLEVYGRLYDVNKHKAKIDYLCEKLRLYEFIDKLTGELSSGQKNRVSLAKSIINNPKVLLLDEPTASLDPETGDFVRSFLEEYQQENKTSILLASHNMAEVERLCSSVLMMNKGSIIDEGRPEELIKKHGRKNMEEVFLKLTREKYEF

SEQ ID NO: 145069 - protein, 270 aa, Unknown
  Bacterial polypetide isolated from the Sargasso Sea
MSFLDLKNVTKIYPNGTKAVHETSLSINEGEFMVFVGPSGCGKSTLLRMVAGLEDITEGDINLDGKLMNEVDPSERDVAMVFQNYALYPHMNVYNNLAYGLKNRGIDKQTIEQKVNDAAKLLQISDYLQRKPSMLSGGQRQRVAMGRAIVRNPKIFLFDEPLSNLDAKLRIQMRLEIKKLQQKVGVTSIFVTHDQVEAMTLADRLAVINNGIIEQLGTPIEIYDNPKSLFVAGFIGSPQMNFLGGNLKNKTLSAEGFEIKDINSNYEGEV

SEQ ID NO: 145070 - protein, 200 aa, Unknown
  Bacterial polypetide isolated from the Sargasso Sea
MAQLLMRFWDPSEGTILLSGNDIREYGLEALRSKIALVAQDTYLFNSTLKENILIAKPDAGYPEMKKAIQMASLAELVETLPQGFDTKVGERGTSLSGGQRQRVAIARAFLKDAPILILDEATSHLDALSESEVRGALDKLKEDRTTIIIAHRLSTIRNADNIIVLDGGKIKESGNHEQLLKNNGLYSQLVYKQMNFSGG

SEQ ID NO: 145071 - protein, 154 aa, Unknown
  Bacterial polypetide isolated from the Sargasso Sea
LNDNELAVIRNKKIGFVFQSFHLLSRNTALNNVILPLTYAGYDKNEALKKAKKVLTEVGLDDRINHKPNELSGGQQQRVAIARALVNDPSIVFADEPTGNLDSKTGEEIMSLFKKLHKNGQTIIVITHENEIADQTDRVITVKDGLIESDERRI

SEQ ID NO: 145072 - protein, 244 aa, Unknown
  Bacterial polypetide isolated from the Sargasso Sea
ALDMVQLDGFQNRRPMQLSGGQQQRVAVARALVFEPSLVLMDEPLGALDKQLREQMQYEIKHIHENLGVTIVYVTHDQSEALTMSNRIAVFNDGIIQQLASPEQLYEAPENAFVAQFIGENNTLRGKVSDMNSTTCKVTLENGQSVDALAVNVDSVGTETSISLRPERVFINPKTNSCKNLVEAQVLELIYLGDHIRSRVNVCGHDDFIIKVPNSADHTQLKPGDTVQVGWHVEDARALDMHAA

SEQ ID NO: 145073 - protein, 152 aa, Unknown
  Bacterial polypetide isolated from the Sargasso Sea
MANIKFTGVHKSFGSNKIITDFNLSGKDDEFLVLVGPSGCGKSTLLRMIAGLEKIDEGEIFINDQKINDLHPSKRQTAMVFQSYALYPHMNVYENMSFGLKIEKRSKEEIQSKVMQAAKILKIEELLERRPKQLSGGQRQRVAIGRAITRNP

SEQ ID NO: 145074 - protein, 308 aa, Unknown
  Bacterial polypetide isolated from the Sargasso Sea
IKKLTKERNLAVILITHDMGVISETTNRVAVMKNGNLVEIGPTKEILTKPKEIYTKALVSSVPPTNKKINRFKIIEKKNKNQGETNIKILNRWTKKEIADQDLVKVKNLSKTFDDSFFVESTKNSVMAVDDVSFNIKEGESFGLVGESGSGKSTIAKMIVNLYSPSAGDIDFDNVCITKIKSSKEMMKFRKQIQMIFQDPYSSLNGRLKVKDIVAEPIKLHNPSISSKDIDSYIYDLLESVELTQQSAERYPHEFSGGQRQRISIARALATQPRLLVCDEPTSALDVSIQAQILNLLKDLQEQLNLTI

SEQ ID NO: 145075 - protein, 279 aa, Unknown
  Bacterial polypetide isolated from the Sargasso Sea
SPERRGVGLVFQDYALFPHLTVSQNVAFGLEDMSATEKSIRALTVLEQVGMKWATARYPHTLSGGQQQRVALARAMAPEPSVILLDEPFSGLDARLRDQVRDEFLHILKEAGTAALLVTHDAEEAMFMADRIGVMRDGQLVQFDKPDELYMRPKDTFVAEFFGEVNKFYGTATGGSVATPIGRFPAPALGDGEEAEVVIRPEAIGIGAGRPDAALCGKVLASRMLGRSSLIHLCLCQQTKEDFHLHARVPGRFLPDEAETVSIEVDPNRVFVFPVSSTR

SEQ ID NO: 145076 - protein, 143 aa, Unknown
  Bacterial polypetide isolated from the Sargasso Sea
MKNVNKWFGDFQVLKDVNLDVNQKQKIVVCGPSGSGKSTLIRCINRLEEHQKGTIIVDGNELTEDTKDIEKIRAEVGMVFQQFNLFPHLSILDNCTLAPIWVKKMPKKQAEEMAMNELKKVQIADQAKKFPGQLSGGQQQRCA

SEQ ID NO: 145077 - protein, 295 aa, Unknown
  Bacterial polypetide isolated from the Sargasso Sea
LDSNPISNIPPHKRGIGMLFQNYALFPHMTVYENLAFPLRVRKVQKDEIDKKVDKALSMVSLSGFESRMPAQLSGGQQQRVAVARALVFDPAVVLMDEPLGALDKNLRESMQYEIKHIHENIGVTVVYVTHDQGEALTMSNRIAVFNDGKVQQLSSPDKLYEEPVNSFVAEFIGENNTFGGEVTDISKDVCKVKLQNGEILANPISVKSKGDKTTVSIRPERALINPKDKMDNNQTGKIEEVIYHGDHTRVRLDLLGNKEFILKVPNSSNELDLKLGNEIKVGWNSQDARALDPK

SEQ ID NO: 145078 - protein, 197 aa, Unknown
  Bacterial polypetide isolated from the Sargasso Sea
IYFDKTCITKIKNNREMMKFRKQIQMIFQDPYSSLNGRLKVEDIIAEPIKLHNPSIKNMDLKNYIFDLLESVELAPNSATRYPHEFSGGQRQRISIARALATQPRLLVCDEPTSALDVSIQAQILNLLKDLQEKLNLTILFISHDLPVVRQMCDRIGVLRNGKLCEISNSEDLFENPKHEYTKELLRLMPKIETIYN

SEQ ID NO: 145079 - protein, 279 aa, Unknown
  Bacterial polypetide isolated from the Sargasso Sea
YFAGEIDYGGFIQANFAFGMVEGSLFYVVNQIEELAQFTAGISRLEGFQSEVEQVSREAQGADPVQLGAESIVVRHADLTPPGADQPIVRDLSLSVGETDKLLVVGPSGCGKTSLLRMISGLWSPSKGNVERPPTGELLFIPQKPYMLLGSLREQLCYPTDEGRFSDDQLRHVLDEVNLGTLSERYPDLDVKQDWPRILSLGEQQRLAFGRLLLNAPRFVVLDEATSALDVATEDHLYALLRQRELAVISIGHRPTLKQFHDSVLELKGDGGWRLMPAT

SEQ ID NO: 145080 - protein, 230 aa, Unknown
  Bacterial polypetide isolated from the Sargasso Sea
LSFDVPPGAKVAVVGESGAGKSTLMKLLFRFYEPNKGKITIDGKDITSLTQQSLRGHIGIVPQDTVLFNTTLLENIRYGNPDATDDDINSVLKLAHLQAFVESLPEKLDTTVGERGLKLSGGEKQRVAIARALLKGAPIMIFDEATSSLDSTSEQAILSALRDAAKGHTSLVIAHRLSTIVDADKILVLKNGTIVEEGTHTSLLERQGEYATLWQTQQRDSEDNVNERTT

SEQ ID NO: 145081 - protein, 107 aa, Unknown
  Bacterial polypetide isolated from the Sargasso Sea
MDNYSGGQQQRCAIARALCMEPKIMLFDEPTSALDPEMIKEVLDAMVNLAKAGMTMIVVTHEMGFAKEVADEVIFMDEGMIVEKAETKEFFANPKSDRTKLFLSQIL

SEQ ID NO: 145082 - protein, 246 aa, Unknown
  Bacterial polypetide isolated from the Sargasso Sea
MKDITPVVEASKVDLIFQTADGPVHAISDIDLDINKGDFISLIGPSGCGKTTLLRLIADLEKPTGGMLRVNGISPEEARLNRDYGYVFQSPALYPWRTVAGNLKLPLEIMGVDKNDQEIRAREALEMVDLAGFEKKFPWQLSGGMQQRVSIARALTFYPDLLLMDEPFGALDEIVRDQLNEHFHRLWEQSQKTVVFVTHSIPEAAYLSTKIVVMSPRPGKIIDVIESTLPEKRKLDIRETKEFLEL

SEQ ID NO: 145083 - protein, 266 aa, Unknown
  Bacterial polypetide isolated from the Sargasso Sea
TRAPGRIAGGKVIVDNTDLLDLDEEEMRMQRLDEVALVPQGAMNSLNPVMKIKNQLLDGLYDHQKDKSEKLSKEEQLDIVEKLLKSVDLAPGVAEMYPHELSGGMKQRVAIAIATSMQPRVIVADEPTSALDVVVQRNVMQTLGRLQEGLHASIILIGHDMGLVAQFSDHVGVMYAGRLVEVGPVKTVFKSPKHPYTRLLINSLPTLSNKKDFIGIPGLPASLLNLPEGCAFCLRIGKEDKNKIPWVNVAKDHYLQDCKTCADYGK

SEQ ID NO: 145084 - protein, 287 aa, Unknown
  Bacterial polypetide isolated from the Sargasso Sea
MSHWIMWEISFLFENIGTIDEGKETISKKPSVTDAKDAKSLTVEKGLIEFTDVKFNYGMPGGLFEALNLKINSGEKVGLVGRSGSGKSSIVNLLLRLYDLDEGKILIDKNDISKITQDSLRSNIAVVTQDTALLHRSIRENILYGKPDATETDLIEAAKQAEAYDFIIDLEDKDGRKGFDAHVGERGVRLSGGQRQRIAIARVILKNAPILVLDEATSALDSEIETAIQAQLSNILENRTALVIAHRLSTINKLDRLIVMDQGKIIEVGTHSELIKNGGHYANLWSL

SEQ ID NO: 145085 - protein, 213 aa, Unknown
  Bacterial polypetide isolated from the Sargasso Sea
LEDVTQGEIEIDNERVDHLPPAKRGIAMVFQSYALYPHMNVYQNMSFGLRLAKTDKNITDQKVREAAEILQITELLERKPKELSGGQRQRVAIGRAIVRDPKVFLFDEPLSNLDAKLRVQMRIELTKLHRELNATMIYVTHDQVEAMTMADKIVVLREGFVEQVGAPLDLYHKPANKFVAGFIGSPAMNFMDGTISGISDKSVELELNSDLKK

SEQ ID NO: 145086 - protein, 197 aa, Unknown
  Bacterial polypetide isolated from the Sargasso Sea
DISLSLEEGVFASILGPSGSGKTTLLAIMAGLDLPSSGSVKLLDKEITSLNEDKRAQIRSKDVGFVFQSFHLLPRLSALDNVMMPLEILGAKDAKERALKALDEVGLSKRTGHVPHQLSGGEKQRVAIARAMVKAPSILFADEPTGNLDQSSTDNILELLLGINQQTKTTLVVVTHDQQLAARSDMVFELQEGKLKC

SEQ ID NO: 145087 - protein, 108 aa, Unknown
  Bacterial polypetide isolated from the Sargasso Sea
GDQGILLSGGQRQRIAIARALLKDAPILILDEATSALDSESEKFIQKAFDRLMENRTTFVIAHRLSTIENADKILVLSNGKIVEEGTHEELLNQDGEYSFLHKMQFND

SEQ ID NO: 145088 - protein, 298 aa, Unknown
  Bacterial polypetide isolated from the Sargasso Sea
MNPPPSLDVAVAGQVMAELSGLCQELGSALLLISHDLAMAARWCERMAMLDGGRKVEDGPSHQLLTRPKSPVGQRLVASAQAREGERSPARPDNDSVLRVEEMRCWHGVGGAPWAPLWLRAVDGVSFELRAGESLGVVGASGCGKSTLCRALMGLNPIRGGRVDLLGQDLLSLRGEALRTARRALQMVFQDPLACLNPALQVADAIADPLLIHGLCSKAAAREEARRLLERVGLSPAEQFQDRLPKQLSGGQQQRVAIARALALKPKVLICDESVSMLDAEVQADVLALLRELQQELA

SEQ ID NO: 145089 - protein, 154 aa, Unknown
  Bacterial polypetide isolated from the Sargasso Sea
MSDKIIQIKEMNKWFGDFQVLKNINLDVEKNKKIVVCGPSGSGKSTLIRCINRLEEHQEGSIVVDGTELTEETKNIEQIRAEVGMVFQQFNLFPHLSILDNCTLAPIWVKKMPKKDAEELAHKHLEKVQIADQAYKYPGQLSGGQQQRCAIARA

SEQ ID NO: 145090 - protein, 132 aa, Unknown
  Bacterial polypetide isolated from the Sargasso Sea
SRPEADARAEAILKETGLLDKANAYPAALSGGQQQRVGIGRAMALDADLMLFDEPTSALDPEWVGEVLDLMRRVAEKGQTMLIVTHEMQFAREIADRIIFMTGGDVVEQGPPDQILNTPQDPRTRAFLRRVL

SEQ ID NO: 145091 - protein, 135 aa, Unknown
  Bacterial polypetide isolated from the Sargasso Sea
NYIYDLLESVELTQKSANRYPHEFSGGQRQRISIARALATQPRLLVCDEPTSALDVSIQAQILNLLKDLQEQLNLTILFISHDLPVVRQMCDRIGVLKDGKLCEVSNTEDLFLKPTHEYTKELLRLMPKIESIYN

SEQ ID NO: 145092 - protein, 230 aa, Unknown
  Bacterial polypetide isolated from the Sargasso Sea
RKLLKNISFKIYPNQTVAIVGPTGAGKSTISKIFFRFYDPASGSILIDNQDIRKVTQKSLRKQIAVVPQDTVLFNETLFYNISYGNPNSSKEEIIQVTKMAKLHDFIKNLPEGYNTIVGERGLKLSGGEKQRVAIARALLKKPKIFFFDEATSSLDTKTEKEIQNNLEHLSKNITTIIIAHRLSAVKNADNIIVLDNGEVVETGNHKRLLELNGLYSNLWKQQEKNYKDK

SEQ ID NO: 145093 - protein, 184 aa, Unknown
  Bacterial polypetide isolated from the Sargasso Sea
MAAPTPIVAENVSHSYGVGSMRRQVLQDINFRVEPGEVVLLTGPSGCGKTTLLTLVGALRSLQHGQLQVLGVPLAAASRGDRRRLRQRIGMIFQGHNLLRCLTAEQNVQMGADLLPGLSYSQRRGQAREWLRAVGLGDQLKKVPHDLSGGQKQRVAIARALAAHPRLLLADEPTAALDGRTGSG

SEQ ID NO: 145094 - protein, 147 aa, Unknown
  Bacterial polypetide isolated from the Sargasso Sea
YGKWDASDEEIWAAARAANAEAFLRALPQGLDSHLGEGGARLSGGQRQRVSIARALLRDAPILLLDEATSALDAESEQLVKDALDRLMQGRTTIVIAHRLATVRAADRIIVLDQGRIVEQGDHGTLVALGGLYARLASLQFQDQLDG

SEQ ID NO: 145095 - protein, 160 aa, Unknown
  Bacterial polypetide isolated from the Sargasso Sea
RSLVAYLPQEIFLVDGTLKENIALGEDLLEIREEDVRKAIVKSSLENFVNELPNGIDTLIGERGARISGGQRQRVALARAFYHERSVLVMDESTSALDDKTEEEIIRSISSLKGDTTTIIIAHRVSTLTNCDLIIKMHEGKIIEQGSYNEIIGKGSLDVQ

SEQ ID NO: 145096 - protein, 173 aa, Unknown
  Bacterial polypetide isolated from the Sargasso Sea
SGKSTFLDLILGLKNFETGDITIKCKDYEVGYVPQECYISEGTIESNIAFGVFRKNVNRESLINSAKEAQIYDFINSLPEKFNSKISSFGSNISVGQKQRIGIARTLYNNSKILLLDEPTSALDPATEEKFMNILKTLKKNRLIIITTHRNNLKENYDYTLKLENNSIKQIKI

SEQ ID NO: 145097 - protein, 130 aa, Unknown
  Bacterial polypetide isolated from the Sargasso Sea
KEAESLAMKQLEQVQIVYQALKFPGQLSGGQQQRCAIARALCMEPKIMLFDEPTSALDPEMIKEVLDAMVNLAKAGMTMIVVTHEMGFAKEVADEVIFMDEGMIVEKAMTKEFFANPKSDRTKLFLSQIL

SEQ ID NO: 145098 - protein, 261 aa, Unknown
  Bacterial polypetide isolated from the Sargasso Sea
MSEASTSAEANAVEAKNLDLVFQTRDSPVHALSEINLEIRRGDFISFIGPSGCGKTTLLRVIADLEKPTGGSIVVNGVSTEQARLQRAYGYVFQSPALFPWRTVEGNLKLPLEIMGIDAAERTRRAKESLKMVNLEGFEKKFPWQLSGGMQQRVSIARALTFDPELLLMDEPFGALDEIVRDQLNEHFLRLWEKNRKTVVFVTHSIPEAAYLSTRIVVMSPRPGRIIECIDSDLPPGRTLDIREPRNFWIFLTVSGKVFVP

SEQ ID NO: 145099 - protein, 283 aa, Unknown
  Bacterial polypetide isolated from the Sargasso Sea
DFLVTVHRQMRLVTTYNILIYINNAFLVFTISALAIWLWMSSIVSTGSIAIAIAMCLRINGMSQWIMWEVSSLFENIGVVHDGMSMMAKSLEVLDHEQASALKISSGKVDFDHVGFHYGRPGGIMEDFSLSIAAGEKVGVVGRSGAGKTTLMNLLLRFYDLEKGEIRIDGQNISGVTQESLRAQIGVVTQDTSLLHRSIRDNIAYTSPEISDENVIEAAKKANAWEFIQDLEDSFGRKGLEAHVGERGVKLSGGQRQRIAIARMFLKDAPILVLDEATSALDS

SEQ ID NO: 145100 - protein, 267 aa, Unknown
  Bacterial polypetide isolated from the Sargasso Sea
MTVYENLAFPLRVRKVEKDEIDKKVDKALSMVSLSGFETRMPAQLSGGQQQRVAVARALVFDPAVVLMDEPLGALDKNLRESMQYEIKHIHESIGVTVVYVTHDQSEALTMSNRIAVFNDGKVQQLSNPAELYEKPVNSFVAEFIGENNTFNGEVVDIDKDKCKVKLANSEILANPISVKSKGEKTTVSLRPERALISPTDKMDNMFTGKIEEVIYHGDHTRVRLNLLGSSEFILKVPNSTSNLELKVDQDINIGWNSVDARALDPK

SEQ ID NO: 145101 - protein, 155 aa, Unknown
  Bacterial polypetide isolated from the Sargasso Sea
MKCLKIKNLDIAYGKKQIIFGFDFELDECQIGCLLGPSGCGKTTVLRSIAGFEQPSRGEISLNGEKLNGFKTHVTPEKRNIGMVFQDIALFPHLSVEENIQFGMRSWSREKREKRSQELLDLIGMLQFMKKYPHQLSGNQQQRIALARAMAPKAF

SEQ ID NO: 145102 - protein, 138 aa, Unknown
  Bacterial polypetide isolated from the Sargasso Sea
LGKKERNDLIEQTMREVELDPKYRFKYPHEFSGGQRQRIAIARSIILKPKFIILDEPTSALDRSIQIQIIDLLKSLQEKYSLTYLFISHDLKVIRAMSDRILVMQNGEMVEEGNAKSIFEKPKEEYTRELLSAAIKYS

SEQ ID NO: 145103 - protein, 205 aa, Unknown
  Bacterial polypetide isolated from the Sargasso Sea
KSTIGRLLFRFYDAQQGSIKIDGQDIRDVTQESLHRSIGVVPQDTVLFNDTIYYNIAYGLDNASRAEVEKAAKDAQIHDFILSLPDGYETTVGERGLKLSGGEKQRVGIARTLLKNPPILLLDEATSALDTETEREIREALTNASEGRSVLTIAHRLSTIADADRIIVLENGSIVEIGTHEALLIKRGRYYSLWTKQLTEDKPAA

SEQ ID NO: 145104 - protein, 182 aa, Unknown
  Bacterial polypetide isolated from the Sargasso Sea
MAKIGLRSISKSFGSTEVIKSLDLSVSNGEFITIVGPSGCGKSTLLRIIAGLENQSTGDVEIDGNVVNNTRASERDLAMVFQSYALYPHLTVQQNMMVPLKLRRLSILERFPIIGLLMPNRHSKLDEIVNKVQAASETLQITHLLDRKPGQLSGGQQQRVAVGRAMVREPVAFLMDEPLSNL

SEQ ID NO: 145105 - protein, 168 aa, Unknown
  Bacterial polypetide isolated from the Sargasso Sea
MINFISPYIELPKKLTVKQNLFVYSKLYKVKNIKERIEYLSEKLRIGELLNSITGELSSGQKNRVSLAKALVNEPKVLLLDEPTASLDPEVGDFVRTFLEEYKKEKKISILLASHNMNEVTRLCKSVLMMKNGEIIDQGKPQDLITKHGRTNLEEVFLKLSRSKSEFN

SEQ ID NO: 145106 - protein, 302 aa, Unknown
  Bacterial polypetide isolated from the Sargasso Sea
MIIPVINRYCNRVVIIESGEVFDQKYGQLPQVDDNVDHKNPSGKLPDIKKEKVLSINGFCKSYSNSGQTKKALKDVSLNLFRGKTLGIIGESGSGKSTLAKMILNILNRDDGEMELTVSNNKVKNLITPNKNIGAVLQDSSGSLNPKMKIQQILLEPLEILGFFDKNEMKSKTIKAINEIGLDQSFLDRYPHTLSGGQRQRVSLARAMMLEPSVLVFDEPTSALDTENKKRILELLKSLQNKKKTSYLFISHDLLVISEIADEVAVLFRGEIIEIGTIETIMSNPKQDYTKKLVESHRYSSV

SEQ ID NO: 145107 - protein, 168 aa, Unknown
  Bacterial polypetide isolated from the Sargasso Sea
MQDKNNVVDHSKALPITIRSLTKKYGSLYALDSIDLDVSSGEFLTLLGPSGSGKTTLLMAIAGFNRPDSGSIRFGNTEMILAPPHKREVGMVFQNYALFPHMTVAENISFPLKLRKYPSTECHKRVDEALSTVQLSDLGDRRIDQLSGGQKQRVALARAFVFSPRILL

SEQ ID NO: 145108 - protein, 126 aa, Unknown
  Bacterial polypetide isolated from the Sargasso Sea
ELLELVGLTDKKDQHPTRLSGGQQQRVAIARALAMRPKVMLLDEITSALDPEVVGEVLNVIRSLNKEHSLTMIMVTHQMGFAREISDRVCFFNEGKIFEQGAPEQLFGDPQNERTKQFLHAVLDAN

SEQ ID NO: 145109 - protein, 309 aa, Unknown
  Bacterial polypetide isolated from the Sargasso Sea
RKKGIGMVFQHFSLFESLTVRDNLILGIDKDISYTDLKNQLKNISSKYNLPLDLDAPITSLSAGEKQRVEIVRILLQDPQLLIMDEPTSVLTPQEVDNLFVTLNSLVKEGRTILYITHKLEEVINLCNDVTIMRNGKVIDSCSTNNQTAKSLATKMLGEKLDDLKKDSSYLNNKISFVAKNISCSFNDPFFTDLKNISFEVKSGEIFGIAGVAGNGQSELMDILVGENVLIDSGEIIFNNINIEYLDPQKRRDLSIAFVPENRLGHSAVPELTLSENILLSQFPNNNFSNRGILNHSSIETYANKVINI

SEQ ID NO: 145110 - protein, 325 aa, Unknown
  Bacterial polypetide isolated from the Sargasso Sea
TSHVVHNSLSFNINKGERVGLVGSSGCGKSSIVKLLLRFHDPVSGSVRIGDKDLRDISFDQIRSMISVVHQDTFLFHGTIEENIKMGNPEAEETEIIKAAKNANIHEFVETLPDGYKTLIGEKGIKLSGGQRQRVAIARALLRDKPILILDEALSAVDAENEFVIQQALDHLMKDRTTLVLAHRLSSVVKCDRILVIDKGQIAESGSHQILMQQEGIYKLLMSQQIREAESEELMIEDKESDIFKEKEEEQSKESIINIPTEGIVAAEGLNWKQLIIELMCHITPWKGRLVLSFCFGVLRVLSFIGVGIFSALIVLDLKNANDYS

SEQ ID NO: 145111 - protein, 251 aa, Unknown
  Bacterial polypetide isolated from the Sargasso Sea
ENLDVFYNMPRTSFFKSNRFHAVKDTSINIYKNTTIGLVGESGSGKSTLGKAIANLTPYEGKIYYDGQDITSSSKEIKKHIQIVFQDPYGSLSPRMTIGEIVGEGLGVHFNLSKKESDLKIDKVLTDVGIELNAKNKYPHEFSGGQRQRIAIARSLIMNPNFMILDEPTSALDRSIQIQVINLLKDIQNEYELTYLFISHDLKVIRSMSDYIFVMKDGIIVESGLSNDVFDYPKEKYTKKLLSAALRYATD

SEQ ID NO: 145112 - protein, 78 aa, Unknown
  Bacterial polypetide isolated from the Sargasso Sea
SKAALVYGQKNEPPGARARVALTGITVAEYFREQEGQDVLFFVENIFRITQAGSEVSALLGRIPSAVGDQPTLATDMG

SEQ ID NO: 145113 - protein, 322 aa, Unknown
  Bacterial polypetide isolated from the Sargasso Sea
RSAFISNRLSPLMEFIGSLAIALSIYAGGVFVLNETMTTGQFMSFLVSLLLAYQPVKALGNLNISVQEGLAGAERIFKLLDTSNKNMEEVSEKKDIKLDGDILLKNISFGYDQKNVLENININIPKNKKVALVGLSGSGKSTIANLVPRFYDNYKGDIIIGSENIKKIHLKDLRNNISIVTQETILFNDTIANNIKYGRLDASDNEIEKVANLSGVTEFSNTLDKKLETIIGESGVKLSGGQRQRVAIARAIIKDAPILILDEATSSLDNITEKGIYSTIKDLMKNKTILIVAHRLSTIEDSDIIYVVDKGKIDSFGSHDEL

SEQ ID NO: 145114 - protein, 202 aa, Unknown
  Bacterial polypetide isolated from the Sargasso Sea
MTVASHPPVISLRQLRKSYDSLEVLKGVDLEAREGDVISLIGSSGSGKSTMLRCINMLEISQAGEIEFCGDPVRWSGNGTDRVPADRQQVIEMRTRLSMVFQQFNLWSHLTVLENVIEAPITVLGRPRAEVVDEAMALLAKVGIADKVDSYPAQLSGGQQQRAAIARALAMRPKALLFDEPTSALDPELEHEVVKVIRELAA

SEQ ID NO: 145115 - protein, 230 aa, Unknown
  Bacterial polypetide isolated from the Sargasso Sea
RRPAQLSGGQQQRIALARALVFEPELVLMDEPLGALDKQLREKMQFEITGLAHRLGITVVYVTHDQTEALTMSDRVAVFNDGRIQQLATPDQLYEEPENSFVAQFIGENNTLNGTISDLKSDVATVKLDSGDIIDCKPVNVSTIGERTQVSIRPERVELNKKRLPPGSHTLTAEVLEFIYMGDVFRTRLRVAGNEDFIVKTRNSSDQVRLNPGEKIEIGWSTSCCRALDA

SEQ ID NO: 145116 - protein, 225 aa, Unknown
  Bacterial polypetide isolated from the Sargasso Sea
HKFSMLLDIENLTKTFPGVNNTSPVEVLKGLKLKVEEGETTAIIGQSGSGKSTLLSLLAGLDQPTSGTLKLKERHLDSMSEEELTQFRAENIGIIFQQFHLMTHLNALENVSLPLEMNHQQDALELAEKALEQVGLGSRKDHFPHQLSGGECQRVAIARAIVIRPALLLADEPSGNLDHDTGEQVAELLFDLVGRTGMTMVLVTHNSELALRCSKQLTLSQGLLQ

SEQ ID NO: 145117 - protein, 242 aa, Unknown
  Bacterial polypetide isolated from the Sargasso Sea
DKALSMVSLNGFETRMPAQLSGGQQQRVAVARALVFDPAVVLMDEPLGALDKNLRESMQYEIKHIHESIGVTVVYVTHDQSEALTMSNRIAVFNDGKVQQLSDPAELYEKPVNSFVAEFIGENNTFNGEVIDIAKDKCKVKLANSEILANPISVKSKGEKTTVSLRPERALINPSDKMDNMFTGKIEEVIYHGDHTRVRLNLLGSSEFILKVPNSTSNLELKVSQDINIGWNSVDARALDLK

SEQ ID NO: 145118 - protein, 195 aa, Unknown
  Bacterial polypetide isolated from the Sargasso Sea
MNAVNNTVVLEAKGLTKRFTEGRLDVTVLKGVDLQIHAGETLAIVGASGSGKSTLLHLLGGLDAPTAGTVRLKGEEMSSLSAERQGQLRNHHLGFIYQFHHLLPEFSALDNVAMPLRIRRLPLAQCHAEAERVLASVGLKERLMHRPAELSGGERQRVAIARALVTRPACVLADEPTGNLDRSTADGVFDLMLQL

SEQ ID NO: 145119 - protein, 308 aa, Unknown
  Bacterial polypetide isolated from the Sargasso Sea
CEIKSFGAEEYENSRLADATLSNKFQNLKLKATNNLATPIIQFLVSISLSLVAYFALGSSLGITLDAETFVAFFTAAGLMAKPIRQLSSINGVIQKGLAAANEIFDQLDFDDEVNTGDTTKPIEGVIEFKDVSFGYTGDKNILNNINLTVNKHETIAFVGKSGSGKSTLANLISRFYSDYTGQILIDGIPNNEYDLSFLRKSISIVTQSPTLFNDTIERNIAYGDDEFDTDRVMESARLAGCLDFIEKLPEGINSEIGDDGVLLSGGQRQRLAIARAFYKNSPIIILDEATSALDTESEELVQESLEK

SEQ ID NO: 145120 - protein, 183 aa, Unknown
  Bacterial polypetide isolated from the Sargasso Sea
MSKKIIELKNVSKWFDKFQALKDVNLEVNQQEKIVICGPSGSGKSTLIRCINRLEEHQEGQIIVDGKEISENTKDIEKIRAEVGMVFQQFNLFPHLSILDNCTLAPIWVKKLPKKQAEEIAMRNLERVQIADQAKKFPGQLSGGQQQRSALARALCMEPKIMLFDEQHRLLIRNDPRGSRCHG

SEQ ID NO: 145121 - protein, 212 aa, Unknown
  Bacterial polypetide isolated from the Sargasso Sea
INNADLCPPGSNKTIIKNLNLSIDNNQSLLVVGPSGCGKTSLLRMISGLWEPDQGVIKKPKIGELLFIPQKPYMLLGSLREQLCYPTEVKKFSDEHLTSVLHEVNLKTLVDRYPNLDIKQDWPRILSLGEQQRLAFARLLLNSPRFAVLDEATSALDINTEKKLYGLLKERELSLISVGHRPSLKDFHENILELNGQGDWKLLTSDKYNFKD

SEQ ID NO: 145122 - protein, 175 aa, Unknown
  Bacterial polypetide isolated from the Sargasso Sea
MIIKTENLTKDYETGTQVVSALKGINLSVEKGEFLSIMGPSGSGKTTLMNIIGCLDSPTNGSYFLNDKSVSKLDDDELAKIRNDEIGFVFQSFHLLARNTAFDNVMLPLKYAGIGKEEATKRSNDVLDLVGLSSRAKHTPSELSGGQQQRVAIARALVNEPSILFADEPTGNLDS

SEQ ID NO: 145123 - protein, 146 aa, Unknown
  Bacterial polypetide isolated from the Sargasso Sea
KIRNKEIGFVFQKFHLLPRNTALENVMLPLKYASVGKTERSKKAMEALTQVGLADRVDHRPSELSGGQQQRVAIARALVNSPAILFADEPTGNLDSKTGEEVMNLLHELNDKGQTIVLITHEKEIADQTERTIFIRDGKIESDAIN

SEQ ID NO: 145124 - protein, 183 aa, Unknown
  Bacterial polypetide isolated from the Sargasso Sea
MFLNVKNLSKSYGAHETIIKKLNFSLKKGEIISFIGESGSGKTTFLKCLAGLENIDSGLIELNGRLLNDHNKFVEANQRKIGFVFQDNPLFPHLNVLENIKFNLKNIDDDELTKLLNLTALNGLEKRYPHELSGGEKQRVCIARSLIRKPDLLLLDEPFSNLDSNIKTKIKDEIYRIIKESGI

SEQ ID NO: 145125 - protein, 217 aa, Unknown
  Bacterial polypetide isolated from the Sargasso Sea
MVGLSLENITHAFDGNVVVDNINLRVDPGEIICLVGPSGCGKSTTLRIAAGLEEVQAGRVIISGKLVGGDGLHVPPERRGVGLVFQDYALFPHLKVLENVAFGVSNGQSDESQKHTAREMLDKVGLGHLENMFPHTLSGGEQQRVALARALAPKPSLMLMDEPFSSLDTGLRDKIRDDTLALLKDSGAATLLVTHDPEEAMRMADRIALMRDGRLVQ

SEQ ID NO: 145126 - protein, 139 aa, Unknown
  Bacterial polypetide isolated from the Sargasso Sea
GNQRRNRVEEVLEAVKIDEELRNRRPDQLSGGQLQRVAIARAIAPEPNLIFLDEPTSSLDLSVRGEVLSLLNELQNILKITYVFVSHDLEVVRAVSDRIVVMYRGKIVEEGSPETIFKNPSHPYTQKLLAASEFSLLKN

SEQ ID NO: 145127 - protein, 134 aa, Unknown
  Bacterial polypetide isolated from the Sargasso Sea
DISDAIQASHIDEFIDELPEGLQTKVGDQGILLSGGQRQRIAIARALLKDAPILILDEATSALDSESEKFIQKAFDRLMENRTTFVIAHRLSTIENADKILVLSNGKIVEEGTHEELLNQDGEYSLLHKMQFND

SEQ ID NO: 145128 - protein, 190 aa, Unknown
  Bacterial polypetide isolated from the Sargasso Sea
KIYYDGQDIASSSKQIKKHIQIVFQDPYGSLSPRMTIGEIVGEGLGVHFNLSKKESDLKIDKVLTDVGIELNAKNKYPHEFSGGQRQRIAIARSLIINPNFMILDEPTSALDRSIQIQVINLLKDIQNEYELTYLFISHDLKVIRSMSDYIFVMKDGIIVESGLSNDVFDYPKEKYTKKLLSAALRYATD

SEQ ID NO: 145129 - protein, 75 aa, Unknown
  Bacterial polypetide isolated from the Sargasso Sea
MSEVEYKNIKKNFGSVEVLKDINLNIGNQKFVVLLGPSGCGKTTLLRMTAGLESISSGEILIEGGIINNIHPRDR

SEQ ID NO: 145130 - protein, 275 aa, Unknown
  Bacterial polypetide isolated from the Sargasso Sea
EIAMVFQSYALYPHMNVFENMSFGLKMEKIPKSEINQKVNNAAAILQIEDLLERKPKQLSGGQKQRVAIGRAITRNPKVFLFDEPLSNLDAALRSEMRVEISKLHKKMNSNIIYVTHDQVEAMTLADKIVVLNKGNIEQYGTPSEIYSDPNNIFVAEFIGSPKMNIIKINKEQIINSNTLKLFKNEITFENFKFEDEIYLGIRPEDVSLENNHEIQVDVNIDLIENLGFEKIIYSKVSTSQIIIKSSKHISEKSLTISFSKDKVLFFDKNNNRIR

SEQ ID NO: 145131 - protein, 295 aa, Unknown
  Bacterial polypetide isolated from the Sargasso Sea
ETRLSAYPHQLSGGQRQRVMIAMALANHPDLLIADEPTTALDVTVQAQILNLLKHLQKKLGMAILLITHDLSIVKKVADKVAVMIDGEIVETNSVTNLFARPKTAYTRKLINSEPTGKPPPISENARTILEVKNLRVWFPIQKGILKRTVGYIKAVNGVTLSIREGETLGVVGESGSGKTTLGLAILRLQSSEGDIIYRERPIHNMGYRKMIHLRSEMQVVFQDPFGSLSPRMSMAEIIGEGLWVHHKAHSGSKNVSVIENRIDEAIQEVGLDLAMRNRYPHEFSGGQRQRISIA

SEQ ID NO: 145132 - protein, 122 aa, Unknown
  Bacterial polypetide isolated from the Sargasso Sea
MAKVGIDERQQIKYPVHLSGGQQQRVSIARALAMEPDVLLFDEPTSALDPELVGEVLRIMQKLAEEGKTMVVVTHEMGFARHVSSHVIFLHQGKIEEEGHPDELFGNPKSPRLQQFLKGSLK

SEQ ID NO: 145133 - protein, 175 aa, Unknown
  Bacterial polypetide isolated from the Sargasso Sea
MKLEKDRDVLSLKGVSVRYVDSTVALHPTSLDVKQGEFLVLLGASGAGKSTLLRSINGLVLPTKGEVSIPGLAGGVVNAKTLREHRKRCGMVFQQHHLIGRQSVLRNVLMGKLGDRGAFASLWPWSKKDKLEALTVIERVGLLEKALSRADALSGGQQQRVGIARALIQKPRILL

SEQ ID NO: 145134 - protein, 227 aa, Unknown
  Bacterial polypetide isolated from the Sargasso Sea
MNSCSIDDLSFQKVCFSYDDKLNNKEILNNFSYKIKKGKFTSIIGPSGSGKTSLLKLISGIVKCKKGEIRFENEIIKKKSNDVSLVQQSASLMPWLNVYQNIELGNINKKNKKFNKIDKVIKDVGLQEYTKFFPYQLSGGLLQRVAIARALLFNPKLLLLDEPFAALDNLSREIISTELTSIIKKEAVTVIMVTHSIEEAALLSDEVLVTGLAPINVIKSFIPPKSK

SEQ ID NO: 145135 - protein, 206 aa, Unknown
  Bacterial polypetide isolated from the Sargasso Sea
MNAAPPLIEFRKVSRIYGSGEAEIAALNGVDFSIEAGEFLSIMGPSGSGKSTAMNILGWLDRPTSGQFFFQGVDTTELPGPKLTLLRRHLLAFVFQRYNLLPRSSAIENVELPLLYRGISRTERRERAENALDQVGLGDRLHQRTMELSGGQQQRVAIARALITEPAVLLADEPTGNLDTKSSNEIMELVTSLNVDIGITGGDGHP

SEQ ID NO: 145136 - protein, 337 aa, Unknown
  Bacterial polypetide isolated from the Sargasso Sea
MIAMSLINEPELLIADEPTTALDVTIQAQILDLMNRLKDKLGMSILFITHDLGLVEKFSDRVCVMKEGKIVEQGVTTKIFSNPKHEYTIKLLKSEPKEKNHLLVSEDNILDISKLSVFYKIPSKQLFKTDRFCAVSDISLKIPRNSTVGVVGESGSGKSTLGKAIINLLDFEGSIKFNGKSIKDLSSAEKKLLKKDIQIVFQDPYGSLSPRMTVGEIIGEGLDIHFDFSNEEKIEKISNVMKDVGLDDSLIFKYPHEFSGGQRQRIAIARSIILNPKFMILDEPTSALDRSIQIQVIDVLKRLQEQYKLTYLFISHDLKVYRSMCDQIFVMSEGKLV

SEQ ID NO: 145137 - protein, 145 aa, Unknown
  Bacterial polypetide isolated from the Sargasso Sea
DIHFDFSSEEKIEKISNVMKDVGLDDSLIFKYPHEFSGGQRQRIAIARSIILNPKFMILDEPTSALDRSIQIQVIDVLKRLQDKYKLTYLFISHDLKVIRSMCDQIFVMSEGKLVEFGKADEVFENPQQEYTQKLLRAALKYSSN

SEQ ID NO: 145138 - protein, 179 aa, Unknown
  Bacterial polypetide isolated from the Sargasso Sea
KSRKLLTFRKNAQIIFQDPYGSLSPKMNIEAIVGEGLDVHEKISKSKRKEMILQILNEVGLDGDMITRYPHEFSGGQRQRIAIARALILKPKLLILDEPTSALDVSVQLQVINLLKKIQKKYSLSYIFISHDIALIKSVSDKIIIMKDGIIVESGETKSLFSKPNENYTKELIFSSNLK

SEQ ID NO: 145139 - protein, 242 aa, Unknown
  Bacterial polypetide isolated from the Sargasso Sea
EPAIRDFILRLRKGEAVALVGSSGAGKTTIANLIPRFYDITRGSVTIDGHDLRDLDLLSLRKLIAIVTQDTILFNDTIANNITYGQPDCSKERMFAAARAANAHNFINEQPEGYDTLIGEKGTRLSGGQRQRLSIARALVKDAPILILDEATSALDSESEIEVQQAIEHLMENRTTLVIAHRLSTIRSADRICVMENGQIVEQGKHEELLLEGGRYQQLYEMQFKHQPEGHILEGTKEHLVS

SEQ ID NO: 145140 - protein, 241 aa, Unknown
  Bacterial polypetide isolated from the Sargasso Sea
RKISLENITFTYPTIEEPALNQLNISIPANSVIGIVGPSGSGKSTLIDILLGLIEPHHGMLKVDNTIINSKNRRSWQNTIGFVAQSIFLSEGTIAENVAFGIPKNQINLDQVHQALKLAHLDELLQSLENGIHTKVGERGVQLSGGQRQRVGIARALYYEAEVLVFDEATSSLDGITEKMIMEAIHNFSGQKTIIMIAHRLKTVQKCDQIFFIDKGQVIDKGTYHELIEKNEHFKNMAKHS

SEQ ID NO: 145141 - protein, 190 aa, Unknown
  Bacterial polypetide isolated from the Sargasso Sea
MSNKKEFVKFAKVDKSYDGKVLVVKDLNLDIEEGEFVTMLGPSGSGKTTCLMMLAGFETPTNGEIYLDGNPISNIPPHKRGIGMVFQNYALFPHMTVYENLAFPLRVRKIPKDEIDKKVDKALSMVSLAGYESRMPGQLSGGQQQRVAVARALVFDPSVVLMDEPLGALDKNLRESMQYEIKHIHESIGV

SEQ ID NO: 145142 - protein, 271 aa, Unknown
  Bacterial polypetide isolated from the Sargasso Sea
MNRFYVLLISWQAFNANLGGVDAFVSNFEEITNNKEATGENELKEFKELIYLKNVSLSFGEFNVLENINLKIPKDKMIAIVGESGAGKSTIVDLICGLVKPSKGSIIIDGKDFQDLNINDIRSLIGFVAQDTIIFNDSIENNISLWGDDNQERISNVSRIADAEDFIIKKEEKYQTIVGDKGEKLSGGQRQRISIARELFKDPQILILDEATSALDTKTENRIKQSIESLQGSKTILAISHRISTIKNADYIYLIHNGILEEEGTFNQLYE

SEQ ID NO: 145143 - protein, 146 aa, Unknown
  Bacterial polypetide isolated from the Sargasso Sea
IAKPNASYLEMKKAIQMASLTELVETLPQGFDTKVGERGTSLSGGQRQRVAIARAFLKDAPILILDEATSHLDSLSESEVRGALDKLKEDRTTIIIAHRLSTIRNADNIIVLDGGKIKESGNHDQLLKKNGLYSQLVYKQMNFSGG

SEQ ID NO: 145144 - protein, 214 aa, Unknown
  Bacterial polypetide isolated from the Sargasso Sea
MTKTFPGVNNTFPVEVLKGLELKVEEGETTAIIGQSGSGKSTLLSLLAGLDQPTSGTLKLKERHLDSMSEEELTQFRAENIGIIFQQFHLMTHLNALENVSLPLEMNHQQDALELAEKALEQVGLGSRMDHFPHQLSGGECQRVAIARAIVIRPALLLADEPSGNLDYDTGKQVADLLFDLVGRTGMTMVLVTHNSELALRCSKQLTLSQGLLQ

SEQ ID NO: 145145 - protein, 179 aa, Unknown
  Bacterial polypetide isolated from the Sargasso Sea
MKLEKDRDVLSLKGVSVRYVDSTVALHPTSLDVKQGEFLVLLGASGAGKSTLLRSINGLVLPTKGEVSIPGLAGGVVNAKTLREHRKRCGMVFQQHHLIGRQSVLRNVLMGKLGDRGAFASLWPWSKKDKLEALTVIERVGLLEKALSRADALSGGQQQRVGIARALIQKPRILLADEP

SEQ ID NO: 145146 - protein, 253 aa, Unknown
  Bacterial polypetide isolated from the Sargasso Sea
QTSHRGGICSQSLGEIAQRAVDGNHNRLTRMGRNNASANCQSNTDPRRLSQGRTHGRPSENDYHFVQCRIRCHDGVCKTTRGPSQAVKGLMNDSLSVLSTTELSFSYGERNTVDRVNLQLQAGTLTALVGPNGAGKSTLLHLLEGRLKPSQGTVNSNKQIGLMPQRAAIDWSFPITASDMVQLGVGKKGKATAENHCEQLLERVGMGAMGSRRLNQLSGGQQQRVLLARALMQQTEILLLDEPCSAIDPPTRE

SEQ ID NO: 145147 - protein, 278 aa, Unknown
  Bacterial polypetide isolated from the Sargasso Sea
MNDLILDIKNISKSFPRVIANNKVTFGIKKNSVHAILGENGAGKSTFVKILYGLLEPDDGSIEYNNKPFEINSPAEARKNGIGMVFQHFSLFESLSVRENLILGIDEKMSYSNLEKKLENISSQYNLPLDLDAPITSLSAGEKQRVEIVRILLQDPQILIMDEPTSVLTPQEVESLFVTLNALVKEGRTILYITHKLEEVISICDTVTIMRNGEVIDTSSTSNFTAKSLATKMLGQKLNDLKTNYDHINDEFNFEVIIFLVNLMILFLTDLKNISFKS

SEQ ID NO: 145148 - protein, 231 aa, Unknown
  Bacterial polypetide isolated from the Sargasso Sea
KPKALSGGQRQRVAIGRAIVRDPKAFLFDEPLSNLDAELRVTMRKELSALHEKIGGTMIYVTHDQVEAMTLADQIVVLNNGYVAQAGAPLDLYNNPSDIFVAGFIGSPKMNFIKVNAIDKSGSFNLVSDALNLQTNHKNLQNNTPYSLGIRPEHIEVCEQQNSDLKVHVDFTEQLGSETYFYCQGEGIKQLIVHHTGQYKINKGEELYLRFKRDLVHLFEENGMSVSKKNN

SEQ ID NO: 145149 - protein, 226 aa, Unknown
  Bacterial polypetide isolated from the Sargasso Sea
TSINIYKNTTIGLVGESGSGKSTLGKAIANLTPYEGKIYYDGQDIASSSKEIKKHIQIVFQDPYGSLSPRMTIGEIVGEGLGVHFNLSKKESDLKIDKVLTDVGIELNAKNKYPHEFSGGQRQRIAIARSLIMNPNFMILDEPTSALDRSIQIQVINLLKDIQNEYELTYLFISHDLKVIRSMSDYIFVMKDGIIVESGLSNDVFDYPKEKYTKKLLSAALRYATD

SEQ ID NO: 145150 - protein, 121 aa, Unknown
  Bacterial polypetide isolated from the Sargasso Sea
YLKRVQIDDQAHKYPAQLSGGQQQRAAIARALCMEPRIMLFDEPTSALDPEMIKEVLDVMVGLAEGGMTMLVVTHEMGFAKEVADKIIFMDEGQIVESKNPTDFFSNPESERTKTFLSQIL

SEQ ID NO: 145151 - protein, 192 aa, Unknown
  Bacterial polypetide isolated from the Sargasso Sea
GEIIINNKNLNNLNKKELLDLRKDIQVVFQDPFSSLSPRMNIEDIISEGLMVHYPTISLKEKKHRLNNILGKVGLKYEDTITKYPHEFSGGQRQRIAIARALILKPSILILDEPTSALDVTIQNQILGLLNNLQNELGLSYIFISHDMKVIRAVANKVIVLKEGLIVEENRSEDIFTSPKSKYTKKLISSVA

SEQ ID NO: 145152 - protein, 157 aa, Unknown
  Bacterial polypetide isolated from the Sargasso Sea
MSHSSCVLSTTELCFSYGGRNTVDRVNLHLQSGTLTALVGPNGAGKSTLLHLIEGRLKPSQGTVNSSKPIGLMPQRAAIDWSFPITARDMVQLGAPRKGKATAADHCEQLLERVGMGAMGSRRLNQLSGGQQQRVLLARGLMQQTDILLLDEPCSAI

SEQ ID NO: 145153 - protein, 254 aa, Unknown
  Bacterial polypetide isolated from the Sargasso Sea
RKLEKNIIKDKISTAADVLGLTPYLKRYPRALSGGQRQRVAMGRAIVRDPQVFLFDEPLSNLDAKLRVQMRAEIRELHQRLKSTTLYVTHDQIEAMTMADKIVVMQNGFIEQIGSPLELYDRPNNIFVAGFIGSPAMNLLPGTVKKSGKNFVAEIYGGQFSLPKAKNLTAGQDIILGIRPEQLSPGKKGIAATVSVVEPTGSETHLIVRSGEQELISVVRERSNFSIGEKINLFAEKNFLHVFDAKSSERLNDD

SEQ ID NO: 145154 - protein, 184 aa, Unknown
  Bacterial polypetide isolated from the Sargasso Sea
PVNLRRSIGYVFQGIGLFPHYTVLDNVAAVPSLLRWEDSLIHSRCEEILEMVGLPIKDYGGRYPSQLSGGQQQRVGVARALIAKPEVLLMDEPFGALDPITRAGLQEEFKRIQRLLNLTVIMVTHDMTEALLMADQIAVMRKGQILQMGPPKELLNRPEHNYVRKLIELPRDRASRLEELMDSL

SEQ ID NO: 145155 - protein, 192 aa, Unknown
  Bacterial polypetide isolated from the Sargasso Sea
RLCGEDLRNLALGDIRQYIGLVPQEPALFSTSVRDNIGFGRPDANEDEIIAAARQAEAHDFIAALENGYDTPIGEKGVRLSGGQRQRIAIARAILRDPGLLLLDEATSALDARSEAAVQAALERLMCNRTSIVIAHRLATVVRADRILLMDGGRITATGTHEQLINESALYRHLADLQFSTPQSGTQGTPLN

SEQ ID NO: 145156 - protein, 193 aa, Unknown
  Bacterial polypetide isolated from the Sargasso Sea
ESVSIRGESGCGKTTLLNLLARLDTADVGELYWNGEAHDPKLPPGPRDAARRACLLGVVYQAYYLIPEMNVLENVLLAARLAGSIGKDAKQRARELLDRVGVSNRERQLPQKLSGGERQRVAIARALLNRPKVLLADEPTGNLDEHSAGDVMELLLEASREEEAGLVLVTHNPSFAKATDEALHLVKGVLGSP

SEQ ID NO: 145157 - protein, 252 aa, Unknown
  Bacterial polypetide isolated from the Sargasso Sea
EFGLEKLSAGDRQIRAIEVLDQVGMKWAVSRYPHTLSGGQQQRVALARALAPQPPVILFDEPFSGLDARLRDKVRDETLHILKDSGTAALLVTHDAEEAMFMADRIGLMHEGSLVQFGNPENLYFKPKNAFVAEFFGEINRITGVVESGRIRTPLGEFIGEGLEEGREVQILIRPELLQLKRNSDVSGLKGRVITSRMLGRTSLIHLSVCKQGRDLHLHSRMPGRFLPEEEAEVYIEFDPIHAFVFPLGSKR

SEQ ID NO: 145158 - protein, 189 aa, Unknown
  Bacterial polypetide isolated from the Sargasso Sea
MSKKVASLENISKTYGKEDLTVKALNSINLEIYKGDYLAVMGASGSGKSTAMNIIGCLDRPSEGVYKLNGIPVEKLSDDELAEIRNQKLGFVFQQFHLLSDATALENVILPMVYAGIEPEQRLERGKNALKKVGLSERMNNRPNQLSGGQQQRVAIARAIINNPAILLADEPTGALDSKTTEDVLDLLT

SEQ ID NO: 145159 - protein, 293 aa, Unknown
  Bacterial polypetide isolated from the Sargasso Sea
TKEILVNPKERYTKSLVSSVPPTNKKISRFIIVENENKKLIRNNFKILNRWKKKDIKHQKLVEVKKLSKNFDDNFFNENLKNSVMAVNKVSFEIKEGESFGLVGESGSGKSTIAKMIVSLFKPTSGEIFFDNVCVTKLKQNNEMMKFRKQIQMIFQDPYSSLNGRLKVKDIVSEPIKLHNPSISRSDLENYVFDLLESVELTQKSAERYPHEFSGGQRQRISIARALATQPRLLVCDEPTSALDVSIQAQILNLLKDLQEQLNLTILFISHDLPVVRQMCDRIAVLRNGKLCE

SEQ ID NO: 145160 - protein, 217 aa, Unknown
  Bacterial polypetide isolated from the Sargasso Sea
MRHINKIYGSGDTEVRAVNDLSLTVESGDYMAVMGASGSGKSTAMNILGCLDRPSSGSYVLQGQAVEGLGDDDLAGLRNSCLGFVFQQFHLLGHLSALENVELPMIYANVPADERRRRATEALQRVGLGERLRNRPNQLSGGQQQRVAIARAIINRPALLLADEPTGALDSETTRDVLEIFDQLNRDGMTVVLVTHEHDVAERAKRVLLFRDGRIAG

SEQ ID NO: 145161 - protein, 212 aa, Unknown
  Bacterial polypetide isolated from the Sargasso Sea
DVSFNIKEGESFGLVGESGSGKSTIAKMIVNLYSPSAGDIDFDNVCITKIKSNKEMMKFRKQIQMIFQDPYSSLNGRLKVKDIVAEPIKLHNPSISTKDIDSYIYDLLESVELTQQSAERYPHEFSGGQRQRISIARALATQPRLLVCDEPTSALDVSIQAQILNLLKDLQEQLNLTILFISHDLPVVRQMCDRIAVLKNGKLCEISKTEEL

SEQ ID NO: 145162 - protein, 159 aa, Unknown
  Bacterial polypetide isolated from the Sargasso Sea
MSAIEVKNLVKKFHGQTVLHGIDLEVQQGEVVAIIGPSGSGKTTLLRSINLLEQPESGTIRVGDVTIDAGRSINQQKTAIRRLRQHVGFVFQNFNLFPHRTVMENIIEGPVIVKGEDKNESIARALELLTKVGLTGKENSYPRRLSGGQQQRVAIARAL

SEQ ID NO: 145163 - protein, 228 aa, Unknown
  Bacterial polypetide isolated from the Sargasso Sea
GQRQRVAIGRALVREPRIFLFDEPLSNLDAKLRVEMRREIKKLHQQLKTTVVYVTHDQTEAMSLGTRIAIMNHGVIQQNDTPENIYNKPSNTFVADFIGSPSMNLIKGNIKESSGEITFTASGSNFEIPIKDYEFKNKSNLNNKEILFGIRPEHIYFKKSNESDFEVNLRADLSEYIGHEQIITFDYANQEILAKFPSTIKIELAKETKLYFDLTQISLFEAQTEERM

SEQ ID NO: 145164 - protein, 229 aa, Unknown
  Bacterial polypetide isolated from the Sargasso Sea
LKRRPRELSGGQRQRVAMGRAIVRDPAVFLFDEPLSNLDAKLRVQMRLELQQLHRRLKTTSLYVTHDQVEAMTLAQRVMVMNKGIAEQIGTPVEVYEKPASRFVASFIGSPAMNLLDGRISEDGRRFELEGGLRLPMNGEHRRHAGRKMTLGIRPEHFALSSQAEGGVPLVMDTLEILGADNLAHGRWGEQKLVVRLPHQQRPSAGSTLWLHLPEDHLHLFDGETGQRA

SEQ ID NO: 145165 - protein, 215 aa, Unknown
  Bacterial polypetide isolated from the Sargasso Sea
YPIREGALQRVVGHVRAVDGVSFDIFPGKTVGLVGESGCGKSTLGKVVAGLTDPTSGSVRYNFDNQLVSISSLEKNKFKNFRRNCQMVFQDSFASLNPRHLVFDIVGRPLKVYKEVSGYDLVEKVVSLLNQVGLGREHLYRYPHQFSGGQRQRISIARALALNPEIIILDEPTSALDVSVQAQILNLLNELQKARNLAYLFVTHDLSVVRHMADS

SEQ ID NO: 145166 - protein, 234 aa, Unknown
  Bacterial polypetide isolated from the Sargasso Sea
NRFHAVKDTSIYIYKNTTIGLVGESGSGKSTLGKAIANLTPYEGKIYYDGQDIASSSKEIKKHIQIVFQDPYGSLSPRMTIGEIVGEGLGVHFNLSKKESDLKIDKVLTDVGIELNAKNKYPHEFSGGQRQRIAIARSLIMNPNFMILDEPTSALDRSIQIQVINLLKDIQNEYELTYLFISHDLKVIRSMSDYIFVMKDGIIVESGLSNDVFDYPKEKYTKKLLSAALRYATD

SEQ ID NO: 145167 - protein, 190 aa, Unknown
  Bacterial polypetide isolated from the Sargasso Sea
SGYILIDNQDIRKVTQKSLRRQIAVVPQDTILFNESLFYNIAYGNPNSSKEEIIKVTKMAKLHDFIKNLPDGYNTIVGERGLKLSGGEKQRVAIARALLKKPKIFFFDEATSSLDTKTEKEIQNNLEHLSENITTIIIAHRLSTIKNADNIIVLNNGVIEETGNHKKLLEINGLYASMWKQQEKNLNDYT

SEQ ID NO: 145168 - protein, 279 aa, Unknown
  Bacterial polypetide isolated from the Sargasso Sea
KILNRWSKKEIINQDLVQIKNLNKSFDDNFFTENSKNSVMAVNDVSFNIKEGESFGLVGESGSGKSTIAKMIVNLFKPTSGDIFFDNVCITKIKQRSELMKFRKQIQMIFQDPYSSLNGRLKVKDIITEPITLHNPSISNLELNNYIYDLLESVELTQKSADRYPHEFSGGQRQRISIARALATQPRLLVCDEPTSALDVSIQAQILNLLKDLQEQLNLTILFISHDLPVVRQMCDRIGVLKDGKLCEVSNTEQLFLKPAHEYTKELLRLMPKIESIYN

SEQ ID NO: 145169 - protein, 210 aa, Unknown
  Bacterial polypetide isolated from the Sargasso Sea
MPDPSTENLLEVQGLKMHFPISEGFFFNKNISLVKAVDGINFSIKRGETLGLVGESGCGKTTTGRCILQLEKATEGKIVFEGQDLTQLDSNELSPLRQKIQVIFQDPYSSLNPRLKIGDTISEPMKVHNIQSDPKLRNKRVAELLNICGLPSVMADRYPHEMSGGQRQRVGIARALSLNPEFIICDEAVSALDVSIQAQVINLLEDLREE

SEQ ID NO: 145170 - protein, 217 aa, Unknown
  Bacterial polypetide isolated from the Sargasso Sea
YGTDVEVHALHQVSLDIFSSDFMSIVGPSGSGKSTMLGLLGLLDVPSKGNVKVKGVDATSMNDFQRSRLRGDAIGFVFQQFHLIPHLSALGNVETALLYRGLSPKERKKKAAESLNKLGLGGRENHRPVQLSGGEQQRVAIARAIVTDPLVVLADEPTGALDSENAENIMEVFADLKSPERAVCLVTHDMEIADSTDRKISMKDGEIVEDLILGSEK

SEQ ID NO: 145171 - protein, 266 aa, Unknown
  Bacterial polypetide isolated from the Sargasso Sea
LSSYERYPEYGFSLDLQKMPKLEIKQRVEEAAKILQMEDLLERRPAALSGGQRQRVAIGRAIVRNPEVFLFDEPLSNLDAALRHDTRVEIAKLHRQLGATTVYVTHDQVEAMTLADKIVVLKDGEVMQVGAPMDLFNYPENKFVAGFLGSPKMNFFECKLASKNGAKTLGTVEFDGHTTNYIRLVSQEKSAGDAVHLGIRPQDLKIKTNGAITGNVTLVERLGTETVVELLSKNGFPFRFASPETLDLEIGSQVCFSYDRQKAHIF

SEQ ID NO: 145172 - protein, 273 aa, Unknown
  Bacterial polypetide isolated from the Sargasso Sea
MEVATGLGGLAVVVTGAMLVNAGMLEGAMLPLLTLLAMAAFLPISEISEVSRQLADTLGSTRRLYAVEHEPVPVTDGPGVPVAREGGGVPIVLDEVDFRYETGNRQALDATDFEAEAGKTIALVGPSGAGKTTIAHLLMRFWDPQQGSITLGGHDLRDYRLDDLRGQIALVAQDTFLFNDTLRANILIARPEATEEELGATLERASLSELVAGLPEGLETMVGERGMRLSGGQRQRVAIARAFLKDAPVLILDEATSHLDAVNEQAVRQALEA

SEQ ID NO: 145173 - protein, 169 aa, Unknown
  Bacterial polypetide isolated from the Sargasso Sea
TSIRNQITIVSQDIVFFDQSLEDNIRYADPSANNEMIIEAAKKAQIDKLLSERNGSSVGPNGSQLSGGQRQRIALARAFLKPAPILLLDEATSALDAVTEASITNSLKELSKNRTTIVIAHKLSSIKDAEVIFVMEGGRLVEFGTHSELMKKKKHYAKVVKTQNSSTQK

SEQ ID NO: 145174 - protein, 151 aa, Unknown
  Bacterial polypetide isolated from the Sargasso Sea
PHLSILDNCTLAPIWVKKMPKKEAEELAMNQLKQVQIDDQSNKFPGQLSGGQQQRCAIARALCMQPKIMLFDEPTSALDPEMIKEVLDAMVNLAKQGMTMIVVTHEMGFAKEVADEVIFMDEGMIVEKAVTKEFFANPKSDRTKLFLSQIL

SEQ ID NO: 145175 - protein, 125 aa, Unknown
  Bacterial polypetide isolated from the Sargasso Sea
LALQHLEKVQISDQANKYPGQLSGGQQQRCAIARALCMEPKIMLFDEPTSALDPEMIKEVLDAMVNLAKAGMTMIVVTHEMGFAKEVADEVIFMDEGMIVERAETKEFFANPKSDRTKLFLSQIL

SEQ ID NO: 145176 - protein, 162 aa, Unknown
  Bacterial polypetide isolated from the Sargasso Sea
MSDKIIQIKEMNKWFGDFQVLKNINLDVEKNKKIVVCGPSGSGKSTLIRCINRLEEHQEGSIVVDGTELTEETKNIEQIRAEVGMVFQQFNLFPHLSILDNCTLAPIWVKKMPKKDADALALKHLEKVQIADQAYKYPGQLSGGQQQRCAIARALCMEPKIM

SEQ ID NO: 145177 - protein, 265 aa, Unknown
  Bacterial polypetide isolated from the Sargasso Sea
LFFIIYKIEALARFSASIGRLEGFQSSIKEVKNLKSNTYKNTVKEKETIYIRNVNVETPDKSKLLVKDLNLSVEYGESILVVGPSGCGKTSLLRVISGLWSTDKGEIFSPQKGDLLFIPQKPYMTLGSLREQLCYPLRTSRFSDEHLRAVLKEVQLPNLIERYPDLDIKQDWQRILSQGEQQRLAFARLLLNSPKFVILDEATSALDIKTEHYLYNLLKDRNIALVSVGHRPTLKGFHDNVLELSGKGNWSLIPSNNFDFNSSIN

SEQ ID NO: 145178 - protein, 292 aa, Unknown
  Bacterial polypetide isolated from the Sargasso Sea
FPVTEGIFIQSVIAHVKAVDGISFQIMKGETLGLVGESGCGKTTTGRCILKLEDPTSGEIIFRGQDLMNLDDKNMIDVRKKIQVIFQDPFSSLNPRMKIGDIISEPMRVHGIVPDPNARDDRVVELLTTCGLKANFADRYPHEMSGGQRQRVGIARALAMNPEFIICDEAVSALDVSIQAQVVNLLEDLREKFGLTYLFISHDLSVVRHISHRVAVMYLGHMVELAECDELFDNPQHPYTRALLEAVPIPDPDLENGRGHKIIKGEIPSPINPPSGCVFHPRCPMAHDGCKK

SEQ ID NO: 145179 - protein, 226 aa, Unknown
  Bacterial polypetide isolated from the Sargasso Sea
VFENVSFSYPKNKGIILKDINFKIPYNSLVAIIGPSGAGKTTLIDLIGLIHLPTKGKILFDGLPSKEFSLIGLRNQMAFVSQEPFIFDETIEENLKYVRPKATQKEIEKAIELGNLKDVVKEFPEGTQTKMGDQGSRLSVGQKQRLAISRAFLSGSSIILMDEPTSALDVKSELVIKNSIEYLIKHMNKTIIVVAHRLSTIAKSDLVIKIDKGRVVKKGSPKKVLD

SEQ ID NO: 145180 - protein, 227 aa, Unknown
  Bacterial polypetide isolated from the Sargasso Sea
FLNRTPKELSGGQRQRVAMGRALVRDPKVFLFDEPLSNLDAKLRAHMRLEIRKLHNQQNATTIYVTHDQIEAMTMADEIVIMNNGIIEQIATPNEIYEKPNNLFVADFIGTPAINLLEGVVTDKSSIKLKSQDLPHSKKNVTNNQNVVYGIRPTDVSIDPSSNIKAEVVLVETTGSETHIIAMLDDNEFRVVQNGGRTTIKNGDVIPLSINIEKAHLFDHSSTKRID

SEQ ID NO: 145181 - protein, 193 aa, Unknown
  Bacterial polypetide isolated from the Sargasso Sea
MLLDIENLTKTFPGVNKTSPVEVLKGLELKVEEGETTAIIGQSGSGKSTLLSLLAGLDQPSSGTLKLKERHLDSMSEEELTQFRAENIGIIFQQFHLMTHLNALENVSLPLEMNHQQDALELAVKALEKVGLGSRMDHFPHQLSGGECQRVAIARAIVIRPALLLADEPSGNLDHDNGEQVADLLFDLVEVQE

SEQ ID NO: 145182 - protein, 159 aa, Unknown
  Bacterial polypetide isolated from the Sargasso Sea
MSDKIIQIKEMNKWFGDFQVLKNINLDVEKNKKIVVCGPSGSGKSTLIRCINRLEEHQEGSIIVDGTELTEETKNIEQIRAEVGMVFQQFNLFPHLSILDNCTLAPIWVKKMPKKDAEALALKHLEKVQIADQAYKYPGQLSGGQQQRCAIKRALCMEP

SEQ ID NO: 145183 - protein, 155 aa, Unknown
  Bacterial polypetide isolated from the Sargasso Sea
MININSLSKEYIMGDNKLLALDNIDLSINEGDFVSIMGSSGSGKSTLMNIIGCLDVPSSGEYHFRDNNVSTLNSNKLAELRNKDIGFVFQNFNLLPRLNAQENVVLPLLYSGKNLKERNQLAIEALESVGLKDRVHHRPNQLSGGQQQRVSMQEQ

SEQ ID NO: 145184 - protein, 217 aa, Unknown
  Bacterial polypetide isolated from the Sargasso Sea
MNDSPKVVEASKVNLVFKTADGPVHALSGIDLEINKGDFISLIGPSGCGKTTLLRLIADLEKPTGGILRVNGISPEEARLNRDYGYVFQSPALYPWRTVEGNLKLPLEIMGVEKVDQNERTREALEMVDLTGFEKKFPWQLSGGMQQRVSIARALTFYPDLLLMDEPFGALDEIVRDQLNEHFHRLWEQTQKTVVFVTHSIPEAAYLSTKIVVMSPR

SEQ ID NO: 145185 - protein, 229 aa, Unknown
  Bacterial polypetide isolated from the Sargasso Sea
LLEQPLPSYLLDEDIKSVDFEHHIKLKNIKFKYLNNNKYVIDDISLTIDKGSRVGFIGSTGCGKSTLLDIIMGLIEPTEGKFLIDNNEVDFQNNRGWQKHIAHVPQAIFLSDSSIAENIAFGIPKNEIDYHRLELSAKQAQLTDLIESWEDKYDSYVGERGVRISGGQRQRIGIARALYQNADVIIFDEATSALDNETEKAIIESITELSKNLTIIMVAHRLTTLEGCS

SEQ ID NO: 145186 - protein, 100 aa, Unknown
  Bacterial polypetide isolated from the Sargasso Sea
SGGQKQRVAIARAVIKQPAVLLLDEATSALDNESEGIVQAALDELMASQSRTTIVIAHRLSTIRNASKIAVISSGKVVEEGTHDELIDKPGMYANLVLSA

SEQ ID NO: 145187 - protein, 218 aa, Unknown
  Bacterial polypetide isolated from the Sargasso Sea
LEVSNVTKKVTSPEGELTIVNDISLSLEEGVFASILGPSGSGKTTLLAIMAGLDLPSSGAVKLLDKEITSLNEDKRAQIRSKDVGFVFQSFHLLPRLSALDNVMMPLEILGAKDAKERALKALDEVGLSKRTGHVPHQLSGGEKQRVAIARAMVKAPSILFADEPTGNLDQSSTDNILELLLGINKQTKTTLVVVTHDQQLASRSDMVFELQEGKLKC

SEQ ID NO: 145188 - protein, 225 aa, Unknown
  Bacterial polypetide isolated from the Sargasso Sea
LSGGQSQRVALARSLIKEPKVLLLDEPMAALDKKLRQSTQFELMDIHDELGITFVIVTHDQEEAMTLSDRIAIMEEGQFVQIGSPNLIYENPKSKFVADFLGNINLLEATITEQNDSQIVVNCAALGGELKFNQTEQSNALEMTVALRPEKVMIEKSLLTNDEQKHVKGIVEDFGYFGNLSIYRVRTESGHIIQVSKQNRDRVEQSIKWEDEVYLSWENDSLMLL

SEQ ID NO: 145189 - protein, 175 aa, Unknown
  Bacterial polypetide isolated from the Sargasso Sea
DHHNHKKFPKNKIGMVFQGHHLFPHMSVIENVSLSLKLVKKNNSKLAIEKAIKTLSEVKISKNLYNKSPNDLSGGEKQRVAIARMLVLEPEIMIFDEPTASLDPELIYDILELIDSLSRSTKTMIFVTHEIKFAEKISTKMGYLDNGKFLEVDTPKKIIYEPESEELKKFLSKIL

SEQ ID NO: 145190 - protein, 132 aa, Unknown
  Bacterial polypetide isolated from the Sargasso Sea
YDLLESVELTQQSAERYPHEFSGGQRQRISIARALATQPRLLVCDEPTSALDVSIQAQILNLLKDLQEQLNLTILFISHDLPVVRQMCDRIAVLKNGKLCEISKTEELFKNPSHDYTKELLTLMPKIESIYN

SEQ ID NO: 145191 - protein, 314 aa, Unknown
  Bacterial polypetide isolated from the Sargasso Sea
MNEVVIDIKQVKKSFRKRRDKELLVLDGVDFAIREGEVIALLGKSGSGKSTLLRIIAGLIAPSGGQVLYRDKPIHQPVPGLTMVFQNFALLPWLTVLENVELGLEAQGVKSAERRERALEAIDVVGLDGFESAYPKELSGGMSQRVGIARALVVNPEVLLMDEPFSALDVLTAENLRGDLVDIWLSEKTNIKSILLVTHNIEEAVSLADKIMIFGSDPGRVLHTIDVDLSHPRNDQEATFRALVDQIYTLMTTPEQRQEQTRDGEFTVLGMDYRLPQLAIAEMTGFLETLASPEYEKRVDLPELAEELHLEVDD

SEQ ID NO: 145192 - protein, 194 aa, Unknown
  Bacterial polypetide isolated from the Sargasso Sea
MEKSNLNADTIRIDSVKFHWSNKNDFKIYVPEFNVARGEKVLLLGESGSGKTTLLSLICGFLNPISGDIFLNDEPINNLSARKKDQYRCDNIGIIFQQFNLLPYAKVIDNILLPLYFSKKRVENIKDQKETAANICKSLRLPDEVLNMQASKLSVGQQQRVAVARALIGNPPLIIADEPTSALDKNAQSIFLDL

SEQ ID NO: 145193 - protein, 200 aa, Unknown
  Bacterial polypetide isolated from the Sargasso Sea
MPKRVYKILDASPAVIEKHFEKIENFLEPTIAFDSVKFKYPGHSHVVHSSLSFNIKKGERVGIVGSSGCGKSSIVKLLLRFHDPVNGSVHIGGKDLRDISFDKIRGMISVVHQDTFLFHGTIEDNIKMGNPKADEEEIIKAAKNANIHEFVSTLPEGYNTLIGEKGIKLSGGQRQRVAIARALLRDTPILILDEALSAVD

SEQ ID NO: 145194 - protein, 276 aa, Unknown
  Bacterial polypetide isolated from the Sargasso Sea
LTKPKEIYTKALVSSVPPTNKKINRFKIIEKENKTQGETNIKILNRWTKKEIIDQDLVKVKNLSKTFDDNFFTESTKNSVMAVDDVSFNIKEGESFGLVGESGSGKSTIAKIIVNLYGPTAGDIDFDNVCITKIKSNKEMMKFRRQIQMIFQDPYSSLNGRLKVKDIVSEPIKLHNPSISSKDIDSYIYDLLESVELTQQSAERYPHEFSGGQRQRISIARALATQPRLLVCDEPTSALDVSIQAQILNLLKDLQEQLNLTILFISHDLPVVRQNV

SEQ ID NO: 145195 - protein, 161 aa, Unknown
  Bacterial polypetide isolated from the Sargasso Sea
MANVQRNYEQGGSVIEVLRDASLEVRGGEITALVGPSGSGKSTLLNIAGLLEKPSGGEVTIDGISSSKLGSGKRGRLRGSHIGFVFQFHRLLPEFSALENVMIPQMLNGLGREESAERAEQLLAMVGLRQRCDHRPGALSGGEQQRVAIARAVANARRILL

SEQ ID NO: 145196 - protein, 243 aa, Unknown
  Bacterial polypetide isolated from the Sargasso Sea
MVANPTLLFPNDAVAQATPATSEGLLAVENVNLEYRTRDRIVRATHNVSFDVYGGDRFVLLGPSGCGKSTLLKAVAGFIQPASGSIALDGETVRGPGADRIVVFQEFDQLPPWKTVLQNVAFPLRVARKLSRAEANERALHYLEKVGLTSFAKAYPHTLSGGMKQRVAIARALAMQPRVLLMDEPFAALDALTRRKMQEELLRLWEEVNFTLLFVTHSIEEALVVGNRILLLSPHPGRVRAEL

SEQ ID NO: 145197 - protein, 254 aa, Unknown
  Bacterial polypetide isolated from the Sargasso Sea
FDDNFFTENSKNSVLAVDNVSFEIKEGESFGLVGESGSGKSTIAKMIVNLFKPSSGDIFFDNRCITQIKNKSEMMKFRKQIQMIFQDPYSSLNGRLKVKDIIAEPITLHNPSISNSDLNNYVNDLLDSVEMTQKSADRYPHEFSGGQRQRISIARALATQPRLLVCDEPTSALDVSIQAQILNLLKDLQEQLNLTILFISHDLPVVRQMCDRIGVLKDGKLCEVSNTEDLFLKPSHEYTKELLHLMPKIESIYN

SEQ ID NO: 145198 - protein, 249 aa, Unknown
  Bacterial polypetide isolated from the Sargasso Sea
FTESSKNSVMAVNDVSFNIKEGESFGLVGESGSGKSTIAKMIVNLYKPSEGDIFFDNVCITKIKNNSELMKFRKQIQMIFQDPYSSLNGRLKVKDIISEPIKLHNPSISRNDLENYIFDLLESVELTQNSADRYPHEFSGGQRQRISIARALATQPRLLVCDEPTSALDVSIQAQILNLLKDIQEQLNLTILFISHDLPVVRQMCDRIGVLKDGKLCEVSNTEELFLKPRHSYTKELLHLMPKIESIYK

SEQ ID NO: 145199 - protein, 241 aa, Unknown
  Bacterial polypetide isolated from the Sargasso Sea
MARKQFTAVDDVTFKINTNSTVGLVGESGSGKSTLGKAIAGLLNYEGEILFDGKNLAKISGSERQRVKKDIQIIFQDPFGSLSPRMTVGEIIGEGLDVHFDLKKNEKVSLIKDSMEDVGLNPEHMFKYPHEFSGGQRQRIAIARSIILKPKLLILDEPTSALDRSIQIQVLELLKELQKKLKLTYLFISHDLKVIRSISDHIFVMQNGKIIETGPSKVVFEDPKDQYTVDLLKAALKYSSG

SEQ ID NO: 145200 - protein, 196 aa, Unknown
  Bacterial polypetide isolated from the Sargasso Sea
FFDNVCITKIKQRSELMKFRKQIQMIFQDPYSSLNGRLKVKDIIAEPITLHNPSISNIELNNYIYDLLESVELTQKSADRYPHEFSGGQRQRISIARALATQPRLLVCDEPTSALDVSIQAQILNLLKDLQEQLNLTILFISHDLPVVRQMCDRIGVLKDGKLCEVSNTEHLFLKPTHEYTKELLRLMPKIESIYN

SEQ ID NO: 145201 - protein, 193 aa, Unknown
  Bacterial polypetide isolated from the Sargasso Sea
ERVGIMGTTGSGKSSILDLLMGLLLPTSGSIKIDGKNLTPQNIYLWHKKISHVSQGIYFLDASIVANIALGIPENKVDWVKVKSVCQIAEIAEDIENLPQEYLSPMGENGELFSGGQRQRIALARALYRGSEVLLLDEATSALDVETESKVMQNLINYSSDTTIIMVAHRTAVLEFCNKLFKVKKGRIVESDH

SEQ ID NO: 145202 - protein, 140 aa, Unknown
  Bacterial polypetide isolated from the Sargasso Sea
SKDIDSYIYDLLESVELTQQSAERYPHEFSGGQRQRISIARALATQPRLLVCDEPTSALDVSIQAQILNLLKDLQEQLNLTILFISHDLPVVRQMCDRIAVLKNGKLCEISKTEELFKNPSHDYTKELLTLMPKIESIYN

SEQ ID NO: 145203 - protein, 149 aa, Unknown
  Bacterial polypetide isolated from the Sargasso Sea
MSFLDLKNVTKIYPNGTKAVHETSLSIDEGEFMVFVGPSGCGKSTLLRMVAGLEDITEGDINLDGKLMNEVDPSERDVAMVFQNYALYPHMNVYNNLAYGLKNRGIDKQTIEQKVNDAAKLLQISDYLQRKPSMLSGGQRQRVAMGRAM

SEQ ID NO: 145204 - protein, 130 aa, Unknown
  Bacterial polypetide isolated from the Sargasso Sea
LLESVELTQQSAERYPHEFSGGQRQRISIARALATQPRLLVCDEPTSALDVSIQAQILNLLKDLQEQLNLTILFISHDLPVVRQMCDRIAVLKNGKICEVSMTEELFKNPSHEYTKELLTLMPKIESIYN

SEQ ID NO: 145205 - protein, 183 aa, Unknown
  Bacterial polypetide isolated from the Sargasso Sea
MSQKDSFVKFEKVDKSYDGEILVVKDLNLDVPKGEFLTMLGPSGSGKTTVLMMLAGFETPTSGEIYLDGNPISSIPPNKRGIGMVFQNYALFPHMTVKENLAFPLEVRKMQKSEIDEKVGNALAMVELQDFGNRMPLQLSGGQQQRVALARSLVFEPRLVLMDEPLGALDKNLREQMQYEIKH

SEQ ID NO: 145206 - protein, 183 aa, Unknown
  Bacterial polypetide isolated from the Sargasso Sea
GSILMKDQIISDHFHTVLTENRDVGLVVQERALFPHLTIINNVMFGVSGSKTERHSTAMRLLKLFRVDRYAYNYPNEISSGEQQRVAIARAMAPNPKILLMDEPFGTLDQSLTNQLRVETRKILKDNNITAIIVSHDFDDALSMSDKVIVIEDGTVIQSGSAKDITHISREKSVEFSSIKANT

SEQ ID NO: 145207 - protein, 104 aa, Unknown
  Bacterial polypetide isolated from the Sargasso Sea
MGGQKQRVAIARAILRNAPVLLLDEATSALDAENERSVQEAFDRLLKGRTTIVVAHRLATVKKADRIIVLDKGRIVEQGKHEKLISEKGVYARLASLQFTNGVN

SEQ ID NO: 145208 - protein, 336 aa, Unknown
  Bacterial polypetide isolated from the Sargasso Sea
SSSQTIFQLMDAKPMVNESPSPLVVDALEPTVALEGVGFAYPGGRRTTHEGLSFAVAAGERVGFVGPSGAGKSSIVRLLLRFYDPDVGTVKIGGHDLKDLRLEDIRGQIAVVNQDTYLFHGTVADNLRVGKPDATPEELEAACRAANAHEFVSLLPQGYDTVIGERGIRLSGGQRQRVAIARAILRDAPILILDEALSAVDAENESIIQEALDRLMRGRTTLIFAHRLSSVIDADRILVLNEGGIAEEGTHAELMARHGVYHQLMAAQAEESAGGAVEVDPERVRKAEKMPTYSEEAQFAPTDAIVKAQGLGWFAAARELMRYIVPYKGRLAMTFG

SEQ ID NO: 145209 - protein, 152 aa, Unknown
  Bacterial polypetide isolated from the Sargasso Sea
TFNNSEKYHFAIKKVKKINRIEANKIALEVLNKVKIEDQKDKYPSTLSGGQQQRCAIARSLAMNPSIMLFDEPTSALDPEMINEVLDVMTDLANLGMTMIVVTHEMGFAKKLASKVIFMDNGIIVENNTPDNFFNYPKEERTKTFLKQILKH

SEQ ID NO: 145210 - protein, 135 aa, Unknown
  Bacterial polypetide isolated from the Sargasso Sea
MSKKEDFVKFDKVDKSYDGKVLVVKDLNLDIEEGEFVTMLGPSGSGKTTCLMMLAGFETPTNGEIYLDKNPISNIPPHKRGIGMVFQNYALFPHMTVFENLAFPLKVRKISQVEIEKKVDKALSMVSLGGICKQN

SEQ ID NO: 145211 - protein, 210 aa, Unknown
  Bacterial polypetide isolated from the Sargasso Sea
LGPNGSGKTTTIGMLLGLLKPTSGQIFINNFKLEENRIQILEMINFISPYIELPKKLTVKQNLYVYSKLYKVKNIKERIEYLSEKLRIGELLNSITGELSSGQKNRVSLAKALVNEPKVLLLDEPTASLDPEVGDFVRTFLEDYKKEKKISILLASHNMNEVTRLCKSVLMMKNGEIIDQGKPEDLIAKHGRANLEEVFLKLSRSNSEFN

SEQ ID NO: 145212 - protein, 188 aa, Unknown
  Bacterial polypetide isolated from the Sargasso Sea
MGPSGSGKTTLMNIIGCLDTPTQGTYNLNNKSVSILNDDELAKIRNEEIGFVFQSFHLLPRSTALNNVMLPLKYAGCSESEAIKRSKDVLDKVGLIDRIAHSPSELSGGQQQRVAIARALVNNPSILFADEPTGNLDSKTGADVMNLFKELNNQGQTIILITHEDNIAAQSNRIITIKDGLIKSDNIN

SEQ ID NO: 145213 - protein, 145 aa, Unknown
  Bacterial polypetide isolated from the Sargasso Sea
MSQKDSFVKFEKVDKSYDGEVLVVKDLNLDVPKGEFLTMLGPSGSGKTTVLMMLAGFETPTSGEIYLDGNPISSIPPNKRGIGMVFQNYALFPHMTVKENLAFPLEVRKMQKSDIDKKVGNALAMVELQDFGNRMPLQLSGGQQQ

SEQ ID NO: 145214 - protein, 243 aa, Unknown
  Bacterial polypetide isolated from the Sargasso Sea
MTVSYGEKPAIFSVDASFPANKMSAIVGPNGAGKSTLLKAALGVIPRLSGEVHVFGTAIASARKRIAYVPQSASVDWDFPTSVLDVVQMGLYRKVGLLGRLSGHGKTSAFACLDRVGMADFAARQIGQLSGGQQQRVFLARALAQDADLYLLDEPFAGVDAATERAIIAVLKQLKTEGKAVVAVHHDLSTVRDYFDHVFMINVRRIAEGSVASTFTADNLQAAYGGRLTTTHLDELAMVDGVR

SEQ ID NO: 145215 - protein, 182 aa, Unknown
  Bacterial polypetide isolated from the Sargasso Sea
MSQEKPAVSLDKVHKSFGELEVLKGITFDVMKGEVICIIGPSGSGKSTLIRCINALNDIDSGSIKVHGIEVNDPNLNKLELRKNVGMVFQQYNLFPHKTALENIMMAPMLVLKETKQGAYEKALELVKKVRLEDKQHSYPGELSGGQQQRVAIARSLAMNPDIMLFDEVTAALDPETVKESF

SEQ ID NO: 145216 - protein, 140 aa, Unknown
  Bacterial polypetide isolated from the Sargasso Sea
SDEEIYEAARSAAAHDFISELPEGYDTYVGERGFMLSGGQKQRVAIARAILRNAPVLLLDEATSALDAENERSVQEAFDRLLKGRTTIVVAHRLATVKKADRIIVLDKGRIVEQGKHEKLISEKGVYARLASLQFTNGAN

SEQ ID NO: 145217 - protein, 260 aa, Unknown
  Bacterial polypetide isolated from the Sargasso Sea
TYALYPHMTVYKNMAFGLKQAKTPKDEIDQRVRNAAEILEISSLLDRTPKALSGGQRQRVAIGRAIVREPEVFLFDEPLSNLDAALRVQTRIEIARLHERLGTTMIYVTHDQVEAMTLADKIVVLRDGNIEQIGSPIELYRNPSNMFVAQFIGSPKMNFFDSDDLTDAGRALINSRADILGIRPEHFIVVPTGSGVIQGKPNLVEPLGEYALVHCETVRGSPFIVKTTDPENIKKGSVMSFDVDPAVTHRFDQLSQGRIV

SEQ ID NO: 145218 - protein, 269 aa, Unknown
  Bacterial polypetide isolated from the Sargasso Sea
TVYENLAFPLKVRKLSKDDIDKKVDKALSMVSLSGFERRMPNQLSGGQQQRVAVARSLVFDPQLVLMDEPLGALDKNLRESMQYEIKHIHENIGVTVVYVTHDQSEALTMSSRIAVFNDGKVQQLSSPDKLYEEPVNSFVAEFIGENNTFTGEVTDISGGKCKVKLASGAEILSNPIRVKSKGEKTKVSLRPERAIIDPEDKMDNKHKGKIEEIIYHGDHARVRLNLLGNAEFILKVPNSSARMDIKRGNEINVGWNSHDARALDPKSI

SEQ ID NO: 145219 - protein, 273 aa, Unknown
  Bacterial polypetide isolated from the Sargasso Sea
KKIERFKIIEKENKNQRETNIKILNRWTKKEIINQDLIKIKNLSKTFDDSFFTESSKNAVMAVDDISFNIKEGQSFGLVGESGSGKSTIAKMIVNLFRPSSGDIYFDNVCITKIKSNKEMMKFRKQIQMIFQDPYSSLNGRLKVKDIVAEPIKLHNPSISAKDLNDYIYDLLESVELSQQSADRYPHEFSGGQRQRISIARALATQPRLLVCDEPTSALDVSIQAQILNLLKDLQEQLNLTILFISHDLPVVRQMCDRIAVLKNGKLCEISMT

SEQ ID NO: 145220 - protein, 279 aa, Unknown
  Bacterial polypetide isolated from the Sargasso Sea
RGSIPDLEESLKILELKKTRSYSKIKEETDFNFPVKNIELLSLNYKYSSRDEFALKNINLKIPIGSKIAFVGKTGSGKSTIANHILCLLRPNTGKILIDNKEIKNNHIGLWQSQCSYVPQSINLLNSDFIANVAYGLELDEVDESKIWRCLEAAQLGELVKDLPDGLNTKIGENGIRLSGGQRQRIAIARAFYRDSKLLILDEATSALDNKTESKLIDSLYFKNKELTIIFIAHRLSTIKKCDCIYEFDQGEIKAQGKFEELKLRSQTFKEMIRIAENK

SEQ ID NO: 145221 - protein, 112 aa, Unknown
  Bacterial polypetide isolated from the Sargasso Sea
EKGVRLSGGQRQRIAIARAILRNTPLLLLDEATSALDSESELSVQLALEKAMSKSTTLVIAHRLATVLKADRIIVMDKGKIVESGTHKSLLSKGGLYARLAALQFHLQGNDT

SEQ ID NO: 145222 - protein, 298 aa, Unknown
  Bacterial polypetide isolated from the Sargasso Sea
ALRLRQTTTLRMIAGLENLSSGELAVGDRVVDCPETATFVAPEKRGMGLVFQSYALWPHLTIEQNVEFGLKLRKVPKAERQKRTAEVMEALGIGKYGKRYPSQLSGGQQQRVALARMLAVNPSVLLLDEPLSNLDARLRLEMRAELKRIHTQFSTTIVFVTHDQWEAMTLADTIAVMNEGTLQQLGTPDDIYERPANRFVAEFVGSPPINILDFDRKDELVQNVMRFLARRHPEISGIGSVGIRPEAISLVAGKDDLADSDFGAPARVAAILPTGGSWIIELETGNEVIFMNTHVAPS

SEQ ID NO: 145223 - protein, 150 aa, Unknown
  Bacterial polypetide isolated from the Sargasso Sea
ENIISEGLLIHYPKINKKEKEEKIKKILDKVGLDYKNTIEKYPHEFSGGQRQRIAIARALILEPKILILDEPTSALDVTIQNQIISLLDKLQKQLQLSYIFISHDMTVIKAISDRIIVLKDGLIIEENISSNIFNSPKSDYTKKLISSVV

SEQ ID NO: 145224 - protein, 277 aa, Unknown
  Bacterial polypetide isolated from the Sargasso Sea
MNRWTKKEIIDQDLVKVKNLSKTFDDNFFTESTKNSVMAVDDVSFNIKEGESFGLVGESGSGKSTIAKMIVNLYSPSAGDIDFDNVCITKIKSNKEMMKFRKQIQMIFQDPYSSLNGRLKVKDIVAEPIKLHNPSISTKDIDSYIYDLLESVELTQQSAERYPHEFSGGQRQRISIARALATQPRLLVCDEPTSALDVSIQAQILNLLKDLQEQLNLTILFISHDLPVVRQMCDRIAVLKNGKLCEISKTEELFKNPSHDYTKELLKLMPKIESIYN

SEQ ID NO: 145225 - protein, 247 aa, Unknown
  Bacterial polypetide isolated from the Sargasso Sea
MENKKSEEFIVKFDEVTKQYGDLIVLDKLNLEIKKNEMVSIIGPSGSGKTTVLRVLMTLEKINGGVIHLDGETLTHMNSNGKLVEADEKYLRERRSKIGMVFQQFNLFPHMTALQNCIEAPVEVLGMKKEDAEQRALELLELVGLTDKKDQHPTRLSGGQQQRVAIARALAMRPKVMLLDEITSSLDPEVVGEVLNVIRSLNKEHNLTMIMVTHQMGFAREISDRVCFFNEGKIFEQGPPEQLFGDP

SEQ ID NO: 145226 - protein, 294 aa, Unknown
  Bacterial polypetide isolated from the Sargasso Sea
TNKVIVMRHGVIVEQGDTKDLLTKPKSTEARSLVISVPPTNKKIDRFKLISPDGKEITSSSANLTKNIIKTWGIRKTTNQKLLKLSNITKVFDDRSISIYKKLNDENIVKAVNNVSFELFEGETLGLVGESGSGKSTIAKIITGLVKPSSGEIIYDNFKLYDSKRKYQIKKSRGQIQMIFQDPYSSLNPRFKVKDIIGEPLKFLQKKITRNDLNQSVFDLIDIVGMTRQSLDRYPHEFSGGQRQRISIARALATRPRLLICDEPTSALDVSIQAQILNLLKDIQDELHLTMLFI

SEQ ID NO: 145227 - protein, 140 aa, Unknown
  Bacterial polypetide isolated from the Sargasso Sea
APIWVKKMPKKEAEELALKQLKQVQIDDQAHKYPGQLSGGQQQRCAIARALCMQPKIMLFDEPTSALDPEMIKEVLDAMVSLAKAGMTMIVVTHEMGFAKEVADEVIFMDEGMIIEKADTKEFFANPKSERTKLFLSQIL

SEQ ID NO: 145228 - protein, 217 aa, Unknown
  Bacterial polypetide isolated from the Sargasso Sea
MSFLDLKNVTKIYPNGTKAVHETSLSVDEGEFMVFVGPSGCGKSTLLRMVAGLEDVTEGDINLDGKLMNEVDPSERDVAMVFQNYALYPHMNVYNNLAYGLKNRGIDKETIEQKVNDAAKLLQISDYLQRKPSMLSGGQRQRVAMGRAIVRNPKIFLFDEPLSNLDAKLRIQMRLEIKKLQQKVGVTSIFVTHDQVEAMTLADRLAVINNGIIEQLG

SEQ ID NO: 145229 - protein, 291 aa, Unknown
  Bacterial polypetide isolated from the Sargasso Sea
SGDFVCLLGPSGCGKTTTLRMIAGLESPDNGEIYYGKKIFFSSRTGEFLKTEKRNLGLMFQSYALWPHMTVFQNIVFGLVIKKKSMKEKENRFRELEQLFHLEGLRNRYPSELSGGQQQRIALARMLAVKPSLLLLDEPLSNLDSNLRLEMRAELKRLHQTLGCTIIFVTHDQMEAMTLATSIAVMNNGIIEQLAKPMDIYRYPKSLFVGKFVGSPPMNVIQIENGGEIFECLVKATNLDKNKIKTFGVRPESISMVPSEKADIVAIVETIQPTGADWIVGLIVSGKSFFA

SEQ ID NO: 145230 - protein, 267 aa, Unknown
  Bacterial polypetide isolated from the Sargasso Sea
IDRFKLISPDGKEITSSSNDLTKNIIKTWGIRENKNQKLLKLEEVTKVFDDNSLGSGFSFISNKSLNDKIVKAVDNVSFELFEGETLGLVGESGSGKSTIAKIITGLIGPNKGDLTYNNEPLYNSNKKYQIHNSRGQIQMIFQDPYSSLNPRFKVRDIIAEPIKFFQKNISNNDLLQNVYDLIDIVGMSRQSLDRYPHEFSGGQRQRISIARALATRPRLLICDEPTSALDVSIQAQILNLLKDIQDELHLTMLFISHDLPVIRLNV

SEQ ID NO: 145231 - protein, 259 aa, Unknown
  Bacterial polypetide isolated from the Sargasso Sea
AGLEDSLKVRFQLCKKTVNEVAPKDRDIAMVFQNYALYPHMSVYDNMAFSLKLRKLPKDEIDQKVKEAAKTLEISELLDRKPKALSGGQRQRVAMGRAIVRNPQAFLMDEPLSNLDAKLRVQMRAELGQLHTQLQTTTLYVTHDQVEAMTMGDRVAVIRKGELQQIDTPREIYSNPKNIFVAGFIGSPSMNFVYANVKGKKGSIELSFGDDKIAYNGPNLDKLREFENTEIVMGIRPEAFEDSNYANKTEFSESMKVTV

SEQ ID NO: 145232 - protein, 174 aa, Unknown
  Bacterial polypetide isolated from the Sargasso Sea
MHPLEPRGSWSTRGTDAMASVTIEAVTKVFGRVTALDHVSLDIAEGELLVLVGPSGCGKTTLLRLIAGLDQVSTGNIWIDRTAMTNVPAKARDLAMVFQNYALYPHMTVAENMDFGLRMRGQSKAARRVPVARAAAMLGLDALLERVPAELSGGQRQRVAMGRAIARRPAVFLM

SEQ ID NO: 145233 - protein, 149 aa, Unknown
  Bacterial polypetide isolated from the Sargasso Sea
GEGLDIHFDFSNEEKIEKISNVMKDVGLDDSLIFKYPHEFSGGQRQRIAIARSIILNPKFMILDEPTSALDRSIQIQVIDVLKRLQDKYELTYLFISHDLKVIRSMCDQIFVMSEGKLVEYGKADEVFENPQQEYTQKLLRAALKYSSN

SEQ ID NO: 145234 - protein, 299 aa, Unknown
  Bacterial polypetide isolated from the Sargasso Sea
QENEEVKFGEINEVNRRHHMKLLRTKAIGDALTIFVASLGVAGVVYVATLDEVKGSMTVGDFSGFITAMVLLMTPLKRLTNVNAMIQRGIAAAASIFSLLDERNEIDRGTKDAQRLIGAVHFKDVNFSYGSEKETLKNINTNIKAGQTIAIVGKSGSGKTTFVNLIPRFYDVEKGSIEIDGLPIEEYTLESLRSNISLVTQEVTLFNDTIENNIMYGGHSKQEITDAVKASHIDEFIHDLPDGLQTKVGDQGILLSGGQRQRIAIARALLKDAPILILDEATSALDSESEKLIQKAFDR

SEQ ID NO: 145235 - protein, 260 aa, Unknown
  Bacterial polypetide isolated from the Sargasso Sea
VFENISFGLKSEKISKNEIKSKVIEAAKILKIEELLDRRPKELSGGQRQRVAIGRAITRNPKLFLFDEPLSNLDAALRSEMRVEISKLHKKLKSNIVYVTHDQIEAMTLADKIVIMNKGKIEQSGTPDDIYSNPTNIFVAEFIGNPKMNIFKIESKDIINKNSFKLFNNEIKFENINFKNGFYVGIRPEDISLENKSEFEVKICVDLIENLGSEKIIYSHLNNTEIRIKSSKNIKDKDITIYLPKNKLYLFDSDKNRLKT

SEQ ID NO: 145236 - protein, 263 aa, Unknown
  Bacterial polypetide isolated from the Sargasso Sea
GSTVLTPAHRGTSMMFQNYALFPHLSVLDNVAFALKLKGVSKLERYETASKFIEMVRMQGYDSRFPDQLSGGQKQRVALARALITKPKILLLDEPLSALDPALRIDMRAELKQMQRDLGITFIHVTHSQDEALALATVGVVMNEGRIEQFASPLDLFNRPINVFVADFVGGHNILEVDDCIYSLRTDKLILSKITNGQKTGNSAFKVKDIEFLGNSVSVTVSGLKKSTLKAKLSDADFYNQEFKIGQNVNCKWSKTDLHKLNV

SEQ ID NO: 145237 - protein, 145 aa, Unknown
  Bacterial polypetide isolated from the Sargasso Sea
MTLKLNNVGKNFDKVEVLRNISLEIEEGDFLVLLGGSGCGKSTLLNCIAGLEEVSSGTIEIKGRNVNMVDPADRNVAMVFQSYALYPTMSVSRNISFGLECKGVGKVERAKAVNRISKLLQIEELLDRKPSQLSGGQRQRVAIGR

SEQ ID NO: 145238 - protein, 206 aa, Unknown
  Bacterial polypetide isolated from the Sargasso Sea
MLGPNGSGKTTTIGMILGLLKPTSGEVLINGIKIEEKPIEILQKINFISPYIELPKKLTVKQNLIVYGKLYSVKNLSEKIDYLVSKLRLENLLNRVTGELSSGQKNRISLAKAIINDPKVLLLDEPTASLDPEIGDFVRTFLENYKKERKVSILLASHNMDEVTRLCSSILMMKNGLIIDQGKPNDLIKKHGRKNLEEVFLKLVRN

SEQ ID NO: 145239 - protein, 180 aa, Unknown
  Bacterial polypetide isolated from the Sargasso Sea
MKFRKQIQMIFQDPYSSLNGRLKVKDIIAEPITLHNPSISNSDLNNYVNDLLDSVEMSQKSADRYPHEFSGGQRQRISIARALATQPRLLVCDEPTSALDVSIQAQILNLLKDLQEQLNLTILFISHDLPVVRQMCDRIGVLKDGKLCEVSNTEDLFLHPSHEYTKELLHLMPKIESIYN

SEQ ID NO: 145240 - protein, 152 aa, Unknown
  Bacterial polypetide isolated from the Sargasso Sea
MSKNQEFVKFDKVDKSYDGKVLVVKDLNLDIAEGEFITMLGPSGSGKTTCLMMLAGFETPTNGEIYLDANPISNIPPHKRGIGMVFQNYALFPHMTVYENLAFPLKVRKISKEDIDKKVDKALSMVSLSGFENRMPAQLSGGQQQRVAVQGH

SEQ ID NO: 145241 - protein, 270 aa, Unknown
  Bacterial polypetide isolated from the Sargasso Sea
MPVISWSFVVGQTPVIEFSEVQLRIHQQQILTALNFVIQPGQFVALLGPNGAGKTSLLRLLQKEYQPSFGQIKLQGRPLSAFSQSELAAKVALVSQLSGPLFDLTVADVVLMGLIPHKALWQTNTEQDLQQLKHSLELVGLANKERHSFAHLSGGEQQRVLLARAVMQKPLLLLLDEPTNHLDLYYQHQVLRIAKALDITVIASIHDLNLASRYCDRLLLLNKGQLVADGTAEQVLTQQLLTEVFRIPCLIDQNPFGDCPRVSFGYKDNL

SEQ ID NO: 145242 - protein, 437 aa, Unknown
  Bacterial polypetide isolated from the Sargasso Sea
MTLLSVRNLSVAIHEKPIVKDISFNLGTGEILALTGESGSGKSISALALMGLLPLGSKKGGIINFDGNDLNKISENKFCKLRGKKISMVFQEPMTALNPLKNIGRQISETLVQHKACAPNELKNRVRNIMDRVGLSGIDPSRFPHQLSGGQRQRVVIAMAVCLEPSILIADEPTTALDVTTQAKILELLKKFAKQDGISIILITHDLAIVANIANYLILMKQGILVDQGEPKRVFRDLAHPYTKKLFSASSQKLILKENEISEGKLLEVNSVSVNYKSHNRGLFSKGTSIEAVSDVSFDIKRGERLGLVGESGSGKSTLTRTILGLQSTSSGYIKFEGKKISKDNRSFKKNIQVVFQDPYGSFNPRHKVERLIAEPFFALGKEAPHETEQKSIVKEMLEEVRLPLNSTKKYIHEFSGGQRQRIAIARALVIKPKLII

SEQ ID NO: 145243 - protein, 150 aa, Unknown
  Bacterial polypetide isolated from the Sargasso Sea
MNNPENLEFAILTKKYGETIAVDSINLKIPAGTYCCFLGPSGCGKTSTLRMIAGHEEISGGDILLGSSIINDLPPAKRGTAMMFQNYALFPHLSCLDNVAFALKMRGIKKKERYDKSLEILKLVQMEDYSNRYPNQLSGGQQQRVALARA

SEQ ID NO: 145244 - protein, 155 aa, Unknown
  Bacterial polypetide isolated from the Sargasso Sea
MANIKFSNVGKSFGDNKVINNFNFLGKDDEFLVLVGPSGCGKSTLLRMIAGLEQIDEGEIQINNEVINEMHPSKRHTAMVFQSYALYPHMNVYDNMSFGLKIEKKTKEEIQTKVLSAAKTLKIEDLLERRPKELSGGQRQRVAIGRAITRNPKIF

SEQ ID NO: 145245 - protein, 157 aa, Unknown
  Bacterial polypetide isolated from the Sargasso Sea
RRISDFIELVGLTDFTRAYPHQLSGGMAQRVAIARGLVASPRILLLDEPFGALDALTRQQMQDELLAIRARARITTVLVTHDVEEAIFLADRVVVMEPRPGRIKQVVEIALPHPRQRSSFEFHQLREELLHELTSDDHYQPPVREQIRDLPLAFIAC

SEQ ID NO: 145246 - protein, 547 aa, Unknown
  Bacterial polypetide isolated from the Sargasso Sea
MIILKKIYTLLNPKERKQALLLFCLHLLMASLEVLGIASIMPFMAVVANPQIIETNLILNWIFELLDFDEIVNFLFFLGLVVFTLLLVAITAKALHSYVYFHFCLQREANISSRLIEGYLRQPYSWFLNRNSSDLAKSILSEVNEVVFGAILPLIHLISQSIVTLAILSLLFFVDPKLVIIVGLSISFAFITIFFISTKYLVKIGSGRLQANEQRFKAVGETFGAIKEIKITGAEHIYLNKFITATQICAQTSASSQIIKELPKYIVESIAFGGILIILLYLLNQPGGITTALPLISLYALAGYRLLPAVQSIYSAASQLNFTKPALDALFLEFKNLTNKEVQTKNIPSISLRQNILLSEISFKYENEIKPALKNINLNIEAKKTFGIVGTTGSGKTTLVDIVLGLITPTQGCLTIDGQQITKKNIRQWQNSIGYVPQDIYLTDSSIEENIAFGIEPSFIDKNAVREAAKVCCIHDFIMSELSQGYATLVGERGIRLSGGQRQRLGIARALYQKPSVMVLDEATSALDTITEQAGVKAIHTMKHTPT

SEQ ID NO: 145247 - protein, 223 aa, Unknown
  Bacterial polypetide isolated from the Sargasso Sea
LDLLQLQELRHRKPAGLSGGQRQRVALGRALLRRPRLMLLDEPMSNLDAKLREELRTELQHILRSIGAPVIYVTHDQHEAMGLADRIAVLERGHLQQLGSAEDLYRRPANSFVAGFLGNPSINLLPLRPGQLIGLRPEQLNLAAPETQPAAGVSLSATLQTREWLGDRLLLHLSSASGPLKVMRPSSDTLAADLPPGTNVCVEWNRDDALAFDARTGARINAS

SEQ ID NO: 145248 - protein, 165 aa, Unknown
  Bacterial polypetide isolated from the Sargasso Sea
QKSGHVFQNFNLFPHKTVLQNITLAPVSLKLMTQAEADNKALALLTQVGLQDKANAYPSSLSGGQKQRVAIARALAMEPDLILFDEPTSALDPEMVGDVLDVMKDLAQKGMTMVIVTHEMGFARDVSDRVIFMDGGYVVESNIPEELFTRPKEARTQSFLSKVLR

SEQ ID NO: 145249 - protein, 424 aa, Unknown
  Bacterial polypetide isolated from the Sargasso Sea
RVGDFSGGWRMRLNLAQALMCPSDLLLLDEPTNHLDLDAILWLEGWLQNYPGTLLLISHDRDFLDAVVDHVAHVEQRKLTLYRGGYTAFERTRAERLAQQQQAYEKQQAQRAHMEKYIARFKAQATKARQAQSRIKALERMEELSAAHVDSPFDFVFREADKISTPLLSLSEGRLGYGDKTVLQQVKLSLVPGARIGLLGPNGAGKSTLIKNLSAELQPLGGSLTRGENLVIGYFAQHQLDSLDDKASPLLHLQRLAPSEREQTLRDFLGGFDFRGPRCDEPVVNFSGGEKARLALALIAWEKPNLLLLDEPTNHLDLEMRLALTMALQEFAGAVVVVSHDRHLLKSTTDEFLLVAEGRVVPFDGDLDDYARWLVDYRQRQAPPSATAEGAAGQTTSAPSARAAPRCVSNWRRTRSRPTSSSRS

SEQ ID NO: 145250 - protein, 529 aa, Unknown
  Bacterial polypetide isolated from the Sargasso Sea
MNDTVLSVKNLSISFKNNSDSKTVLINSNFKIKRGTTLSLVGESGSGKSITSLALVSLLPLNASIVGSINFNGEELIGLSEIELQKIRGNKISFIFQEPMTSLNPLHTIEKQIGESLSFHQNLSGIEKTQKVIELLEKVKIPNAHTRLKDYPHQLSGGQKQRVMIAIALANKPDLLIADEPTTSLDVTIEKEIIDLLMEIKSTEKMSILFITHNLRIVKQISDYVCVMQNGKIIEQGSTQEIFESPKSNYTKKLLNSSPKGFRKNNSERISKILNVENLKVWFPIKRGFLRRTKGFIKAVDQISFDLMEEETLGIVGESGSGKTSLALAILKLINSEGSITFQNQSLQNFKSRNLLTFRKNAQIIFQDPYGSLSPKMNIEAIVGEGLDVHKKISKSKRTEMILQILHEVGLDEDMITRYPHEFSGGQRQRIAIARALILKPKLLILDEPTSALDVSVQSQVINLLKTIQKKYSLSYIFISHDIALIKSVSDKIIIMKDGIIVESGETKSLFSKQKNNYTQELIVSSTLK

SEQ ID NO: 145251 - protein, 244 aa, Unknown
  Bacterial polypetide isolated from the Sargasso Sea
MSEPIIKINDVNKWFGDFQVLKNINLDVKPKQKIVVCGPSGSGKSTLIRCINRLEEHQEGTIIVDGNELSENTKNIEEIRAEVGMVFQQFNLFPHLSILDNCTLAPIWVKKMPKKKAEELALKQLEQVQIADQAYKFPGQLSGGQQQRSAIARALCMEPKIMLFDEPTSAFDPEMIKEVLDAMVNLAKGGMTMIVVTHEMGFAKEVADEVIFMDEGMIVEKNTTKEFFANPKSDRTKLFLSQIL

SEQ ID NO: 145252 - protein, 228 aa, Unknown
  Bacterial polypetide isolated from the Sargasso Sea
LPAQCSGGESQRVAVARTLITDPGAFLLDEPLSSLDAKLRREMRAEVDRLHKELNKTFIYVTHDQEEAMTLADRIVVMDGGNIRQVGSPIDIYNNPNSYFVADFFGSPSMNLIEGDIVTKGKKVVFHSSDIKLDLPTSLAKTPPGPATLGIRPEQILVNNKSGTKKKIYLVEPLGKDTLLYFETETGNELISVVDSNSKFKAGDTPGITFPDDQIFLFDENGNRVSTK

SEQ ID NO: 145253 - protein, 242 aa, Unknown
  Bacterial polypetide isolated from the Sargasso Sea
MSIQLNGINCFYGAHQALFDITLDCPQGETLVLLGPSGAGKSSLLRVLNLLEMPRSGTLSIAGNRFDFTKTPSDKAIRDLRQNVGMVFQQYNLWPHLTVVQNLIEAPCRVLGLTKEQAMARAEKLLERLRLKPYSDRYPLHLSGGQQQRVAIARALMMEPQVLLFDEPTAALDPEITAQIVSIIRELAETNITQVIVTHEVEVARKTASRVVYMENGHIVEFGDASCFANPQTEAFKNYLSH

SEQ ID NO: 145254 - protein, 218 aa, Unknown
  Bacterial polypetide isolated from the Sargasso Sea
MVLNLNSIRKSYRTNEGNVSVLNDVSLTLLAGETLALRGESGSGKSTLLHIAGALELPDEGSVEIGGKELSKMDDTGRAAVRRKDIAIVFQHFNLIPSLNVAANINFQANLSGPVDKIKLEKIVSSLGLSDQMGKYPEALSGGQQQRVAIARALVTEPKLLLADEPTGNLDEHSAQSVLEQMLTLVAETNTALMIVTHSRNVAARMDKQLQLIGGRLK

SEQ ID NO: 145255 - protein, 172 aa, Unknown
  Bacterial polypetide isolated from the Sargasso Sea
PSSGFLICLIIKPVSDLSDDELAKIRNSEIGFVFQSFHLLARNTALDNVMLPLKYAGKQKAEAITLAKDVLGQVGLSDRYSHSPSELSGGQQQRVAIARALVNKPSILFADEPTGNLDSKTGSEIMKLFKKLNEEGQTIILITHEDEIAKKSKRVITIMDGLIESDVENNNE

SEQ ID NO: 145256 - protein, 254 aa, Unknown
  Bacterial polypetide isolated from the Sargasso Sea
RKIPKDEADKKIDKALSMVSLSGFENRMPGQLSGGQQQRVAVARALVFDPSVVLMDEPIGALDKNLRESMQYEIKHIHESIGVTVVYVTHDQGEALTMSNRIAVFNDGKVQQLSSPDQLYEKPVNSFVAEFIGENNTFAGEVSDISKDMCKVRVNGGEIMANPISVKTKGEKTTVSIRPERALINPKSGMDNNHKGKIEEVIYHGDHTRVRLSLLGNSDFILKVPNSSENLDIKLGNTINIGWNSQDARALDPK

SEQ ID NO: 145257 - protein, 303 aa, Unknown
  Bacterial polypetide isolated from the Sargasso Sea
QWIMWEVSSLFENIGVVHDGMSMMAKPLEVVDHEQAATLKISSGKVDFDHVGFHYGRPGGIMEDFSLSIAAGEKVGVVGRSGAGKTTLMNLLLRFYDLEKGGIRIDGQNISGVTQESLRAQIGVVTQDTSLLHRSIRDNIAYTSPEISDENVIEAAKKANAWEFIQDLEDSFGRKGLEAHVGERGVKLSGGQRQRIAIARMFLKDAPILVLDEATSALDSEVEAAIQENLFELMEGKTVIAIAHRLSTIAQLDRLVVIDAGAVIETGTHEELVRNSLIYADLWNRQSGGFLAPEEYEKKPEAA

SEQ ID NO: 145258 - protein, 198 aa, Unknown
  Bacterial polypetide isolated from the Sargasso Sea
MAAVQLSGIFKRYGDTQVVHGIDLDIDDGEFVVLVGPSGCGKSTLMRMVAGLEEISGGDLMIGGTRANTLAPQQRNISMVFQSYALYPHLSVYENIAFGPRIRKESSASFKPRIEAAAKMLNLGGYLDRLPRALSGGQRQRVAMGRAVVREPSLFLFDEPLSNLDAKLRVQMRTEIKALHQRLKNTVIYVTHDHVSKR

SEQ ID NO: 145259 - protein, 236 aa, Unknown
  Bacterial polypetide isolated from the Sargasso Sea
METRQIYKQYQSGSTTLDVLRGVDFTLEQGGFLAVVGQSGSGKSTLLHVMGLLDAPDSGEVWINGQRIDNLPVREKDRLRNNSIGMVFQAYHLLPEFTALENVLAPLLIRHGIFNWFSQKRAAHEQAEALLDRFGLSDRLHHRPRQLSGGEMQRVAIARALITKPRVLLADEPTGNLDEESGAGIIEALAELNQDNGLSIVLVTHDADIASQARGIVRLAAGTVDMINPGATGSAA

SEQ ID NO: 145260 - protein, 121 aa, Unknown
  Bacterial polypetide isolated from the Sargasso Sea
KSADRYPHEFSGGQRQRISIARALATQPRLLVCDEPTSALDVSIQAQILNLLKDLQEQLNLTILFISHDLPVVRQMCDRIGVLKDGKLCEVSNTEDLFLKPSHEYTKELLRLMPKIESIYN

SEQ ID NO: 145261 - protein, 382 aa, Unknown
  Bacterial polypetide isolated from the Sargasso Sea
MPHTEVLLSGENITKIFGDFKANDNVNFSISKGEIHALLGENGAGKSTFVKIIYGLLKPDSGNVIWKNEIIEINGPKHARELGIGMVFQHFSLFEALTVLENISLALPEKNQSDDLENRIETISNEYGLQIDPRSRVFNLSVGEQQRVEIIRCLLQNPELLIMDEPTSVLTPQEISKLFEVLEKLSKSGCSILFITHKLEEVRSLTTRATILRRGKNVSTVETKDHTAKSFSQMMVGHEINTNKYKKNKIENENLLKINNLSRPAQNQFSVGLKDINLSVRGGEILGIAGIAGNGQSELMEALTGEYLTMEADKILFNGFDISNFKPNERRKLGISFVPEERIGHATVSSFNLSENFYLTDYINDNSSNYGIINTSFNYENA

SEQ ID NO: 145262 - protein, 161 aa, Unknown
  Bacterial polypetide isolated from the Sargasso Sea
MSKNQQFVRFDKVDKSYDGKVLVVKDLNLDIAEGEFVTMLGPSGSGKTTCLMMLAGFETPTNGEIYLDKNPISNIPPHKRGIGMVFQNYALFPHMTVYENLAFPLRVRKTSKEDIDKKVDKALSMVSLSGFENRMPGQLSGGQQQRVAVARALVFDPQVVL

SEQ ID NO: 145263 - protein, 540 aa, Unknown
  Bacterial polypetide isolated from the Sargasso Sea
MASKNTNLSGVRLYGRLLSYVLPYIPLFIVSIIGFAIYSGSQVAATEWLKRVIDYVNDPVGDMRLILPIALIAIALVRGVGFFVGNYLLSSISNRLVHNIRTELFNKLTVLPSSYYDQHSSGHLISRITFNVMQVTGAATNALKIFIREGLLVIGLITYLMFLNWKLAMFLFIAAPFIAIIVGVAARRLRKISGRIQTAMGDVTHVASETITGHEEVKSFGGEEYEISRFNDASDNNRKQNLKLEATNSIASPLVQLFVSAALALITWLALDASIVSNMTPGTFIAFFSAAGMLAKPVRQLSEINSQIQKGLAAAEDIFSQLDETPERNEGTYTSEEVKGEIVFSNLNFSYEGEGGGNTLEDINLKINQGETVAFVGKSGAGKTTLMRLLPRFYDGYEGDIKVDDISISEYEITDLRSHIALVSQNVTLFNDTIANNISYGSSNVDFDQIKNAAKKANADSFIELMADGYETQAGDDGVLLSGGQRQRIAIARAILKDASILILDEATSALDSESENYIQEALVELTKNKTTLVIAHPSF

SEQ ID NO: 145264 - protein, 227 aa, Unknown
  Bacterial polypetide isolated from the Sargasso Sea
MSLIRVKNLKKQFQIGSETVNAIKDISFDVKAGEFISIMGPSGSGKTTLMNIIGCLDTPTSGEYHLDDNEVSLLDDNELAAIRNKKIGFVFQSFHLLSRNTALNNVMLPLTYAGFDKNEALKKAKSVLDKVGLEDRVSHKPNELSGGQQQRVAIARALVNDPSIVFADEPTGNLDTKTGEEIMSLFKELHKNGQTIIVITHENDIAYQTERIITVKDGLIESDERRV

SEQ ID NO: 145265 - protein, 246 aa, Unknown
  Bacterial polypetide isolated from the Sargasso Sea
DKKIDKALSMVSLQGFASRMPGQLSGGQQQRVAVARSLVFDPQLVLMDEPLGALDKNLRESMQYEIKHIHESIGVTVVYVTHDQSEALTMSNRIAVFNDGKVQQLSSPDELYEKPVNSFVAEFIGENNTFSGEVSDISGGKCKVKLSNSEILANPIRVKGKGERTIVSLRPERALINPSDKMDNIHIGKIEEIIYHGDHTRVRINLLGNSEFILKVPNSSSNLDIKLGKEIKIGWNSEDARALDPK

SEQ ID NO: 145266 - protein, 474 aa, Unknown
  Bacterial polypetide isolated from the Sargasso Sea
SSFYDAHSSGHLISRITFNVMQVTGAATNALKILIREGLLVIGLITYLMYLNWKLALFLFIAAPFIALIVGIAAKRLRKISGKIQTAMGDVTHVASETINGYEEVKSFGGEDYEIDRFNKASDNNRKQNLKLEATNSIASPLVQMFVSAALALVTWLALDASVVSVMTPGTFIAFFTAAGMLAKPVRQLSEINSQIQKGLAAAEDIFSQLDEEIEKNDGKFKSDEIKGEIQFSNVSFAYAKSSQNILNNINLEIGIGESVAFVGKSGAGKTTLMSLLPRFYDDFEGEIKIDGVLLNEFEIKNLRSHIALVSQNITLFNDTIANNINYGSEERSLEEIKVAAQKANAHDFIEALPDGYETIAGDDGVLLSGGQRQRIAIARALLKDAPILILDEATSALDSESENYIQEALIELTKNRTTLVIAHRLSTIENSDKIVVLDSGHIVEIGSHESLISQDGHYAELHKNQFKDDEGDV

SEQ ID NO: 145267 - protein, 560 aa, Unknown
  Bacterial polypetide isolated from the Sargasso Sea
MSDKYVFVMKELNKTWPGGKQVIKDGWLSFYPGAKIGVLGQNGAGKSTLLKIMAGLDKEFSGEAWAADGIKIGYLAQEPILDNDLNVFDNIMLGVSEIKDALKEFEDVSLKFGEVASDDEMNELLSKQAELQEKIDSIDGWDIDRHIEIAMDALRCPAAESNISDLSGGEKRRVALCQLLLTKPDILLLDEPTNHLDAESVAWLERTLADFSGTVVAITHDRYFLDNVAGWILEIDRGNLIPFEGNYSNWLEHKQKRLQQEAREEVSIQKTIANELEWVRQNPKARQSKSQARINAYEALVAESQAREKGPSPQQIVIPSGERLGSNVIELKNISKGFGDKLLIDDLSLKIPPGAIVGIIGPNGAGKTTLFNMISKKDTSDSGAIAIGESVNLGYIDQNRDSLIDKNTVWSEISGGSEQVDLGKQSVPSRAYVSWFNFKGGDQQKIIGQLSGGERNRVHLAKMLKSGANVLLLDEPTNDLDVDTLRALEEALTSFAGCALITSHDRYFLDRIATHILAFEGSSHVEWFQGNYEAYEEDRKRRLGDLSDRPHRIKYKPIAR

SEQ ID NO: 145268 - protein, 342 aa, Unknown
  Bacterial polypetide isolated from the Sargasso Sea
MHNGLIIENLDVSIDRHKILRDVSIDVEPGTITTLLGPSGCGKSTLLKAIVGLLSSDKGDVTLNTKSLVSTPAHKRGIGLMFQNNALFSHMNVERNVAFGVRMQGQKPEEYEEKVIEMLDLVGLSGFNKREIGTLSGGESQRVALARALVPSPKVLLLDEPFNSLDRSLRTALLDEVRDVLKTLGIVAIHVTHDWDEATRIADNIAFMNQGQIIRTGSIEEIIEKPKYSIVADLIGLESCWAPELFESAGIRYFDTPWGRREVDTPNSESIAALIRPENIYEKPDGIDVEIQTKKSVYGEWIYKCRLDTGFIVSFKTRKNYSIGEKISLYASVKNVETLEIL

SEQ ID NO: 145269 - protein, 218 aa, Unknown
  Bacterial polypetide isolated from the Sargasso Sea
LTKEYEAGSQIVKALNGIDLSVEKGEFISIMGPSGSGKTTLMNIIGCLDSPTNGTYYLNDRSVSELDDDELAKIRNEEIGFVFQSFHLLPRSTALENVMLPLKYAGCLENEAIERSKKVLEKVGLQDRVKHSPSELSGGQQQRVAIARALVNKPSILFADEPTGNLDSKTGNEVMNLFKDLNNQGQTIIIITHEDNIASQSNRIITIMDGLIESDTRN

SEQ ID NO: 145270 - protein, 447 aa, Unknown
  Bacterial polypetide isolated from the Sargasso Sea
SGKTLSALSILKLLPTNAIIKNGSIIFNDKDLLKLPQNEIEKIRGNKISTIFQEPMSSLNPLHKIDKQIKEIITTHNNNVNSKELDQFVLKLLKEVNLDNIMNRPNIYSYELSGGQRQRVMIAMSIANNPDLLIADEPTTALDVTVQQQILALLNKIQEERKMSILFISHDLGVVNEIADYIYVMREGKIIEHGKKAQIFNNPQDTYTKQLVSFQNKIRKHEENKGIEILKIKDLKVWYPIKKGIFKKTVDYVKAIDVINFTLSQKETLGIVGESGSGKTSLVLAILKLITSSGIIEFDKIDLNLIKKNKLKRIRKNIQIVFQDPYSSLSPRMNVEEILNEGIDVHFPKYSASEKKQILNDILKETGMDYERDHNKYPHEFSGGQRQRIAIARALILKPKILILDEPTSALDITIQNQILDLLQNLQEKYSLSYIFISHDMNVIRSV

SEQ ID NO: 145271 - protein, 189 aa, Unknown
  Bacterial polypetide isolated from the Sargasso Sea
PSGSGKTTLMIIIGCLDTPTSGEYELNGNQVSQLNDDELARIRNKEIGFVFQSFNLLAKNSTLNNVMLPLKYAGFGKSEAIEKSKEVINKVGLSDRLNHSPAELSGGQQQRVAIARALVNNPSIIFADEPTGNLDSKTGKEVMTLFKELNDTGQTIILITHEESVAKQSNRIITIKDGLIKSDNRETYE

SEQ ID NO: 145272 - protein, 528 aa, Unknown
  Bacterial polypetide isolated from the Sargasso Sea
MSNIVEVKDLSIDFNVRDGKFRAVEEISFNIQKNKTLALVGESGSGKSVTAMSIMQLLPHPQSSYSNGSSIKFENKEIINASKKELLNLRGNIISMVFQEPMTSLNPYHRVGAQITESVILHSDISQLGAKEEAINLMKLVEIDDVERRFNSYPHELSGGQRQRIMIAMALVNKPKLLIADEPTTALDVTIQAQILDLMYKLKRELGMSILFITHDLGLVKEFSDQVCVMQNGNIVEKGNTSDVFENPEHPYTQKLLNAEPKPKEIINRKHAPLIEIKNLNVFYNIPTKNFFKKNRFHAVKNTSLNIHKNTTIGLVGESGSGKSTLGKAIANLTPYEGKIYFNGQEIASSLKEIKRYIQIVFQDPYGSLSPRMTIGEIVGEGLDVHFSLTKNESEYRIDKVLSDVGIDLKAKNKYPHEFSGGQRQRIAIARSLILNPNFIILDEPTSALDRSIQIQVINLLKAIQEEYKLTYLFISHDLKVIRSMSDYIFVMKDGKIVESGLSNDVFNNPKEKYTKKLLSAALRYASN

SEQ ID NO: 145273 - protein, 298 aa, Unknown
  Bacterial polypetide isolated from the Sargasso Sea
TLRGQILDLLSDLQRQTGMAVLLITHDLNLVRRFADRVAVMEQGVLVEQGPVAEVFSAPQHAYTRRLIASQPRRDVIEADPPAGTAPVVRTQDLRVVYPTPLPGIKGWFKKGEFVAVQGATLQLLPGRTLGVVGESGSGKSTLAQAILGLLPSTGQLQVGGQAWQQPAMRNTPTNQQLRRRVQVVFQDPFSSLSPRLTVEEIVGEGLKVHEPTLSVAERRARVEAVLAEVGLAEAQYPRLLERYPHEFSGGQRQRLAVARALIVQPQVLVLDEPTSALDVTIQQQVLGLLQRCKKKRA

SEQ ID NO: 145274 - protein, 470 aa, Unknown
  Bacterial polypetide isolated from the Sargasso Sea
DPQTSLNPLFKIKDQLVETIQTHLNLNYEEALKKSIKLLNEVGIEDAEKRIEDYPHQFSGGMRQRVVIALAISCEPDLIIADEPTTALDVSIQYQILQLLKDLTKKRNLGVIIITHDMGVIAETTNKVIVMRNGVIVEYGTTKDVLTNPKSNEGKSLVISVPPTNKKISRFKLISPDGGEITNNSINLTNSIIQNWGTRDISNEKLLDFRNITKIFNEGSFIKRNKEDNNLKALNNVSFEIFEGESFGLVGESGSGKSTIAKIITNLIKPTAGEVFYENLSLHKDKNKKNKNKYRGQIQMIFQDPYSSLNPRFKVRNIIAEPIKFFQKGLNKKIIKDNVNDLIDIVGMTRQSLDRYPHEFSGGQRQRISIARALATRPRLLICDEPTSALDVSIQAQILNLLKDLQEQLNLTILFISHDLPVIRQMCDRIAVLKNGNVCEIEKTETLFNQPKHNYTKELIKLMPKIESII

SEQ ID NO: 145275 - protein, 226 aa, Unknown
  Bacterial polypetide isolated from the Sargasso Sea
MITDTKTVISINNISKTYEGPPPVKALDEVSLEVNQGDLVAIVGQSGSGKSTLLNMIGLLDSVTAGSIQIEGKDISELSDNELSKFRGEKIGFIFQSFFLLPGLNAQENVAEGLLYQGISRSDRLLKAGEVLEKVGLGDRLTHLPKELSGGQQQRVAIARALVQDPAFVLADEPTGNLDKESGINILNILKDLNNQGKTVIMITHNQEHANMFKKVVELVDGKIVK

SEQ ID NO: 145276 - protein, 506 aa, Unknown
  Bacterial polypetide isolated from the Sargasso Sea
GLHAWLVRPALDEVLIKGNKEMLLVIPVAIIVVTIFKGFATFLHSYQMSKVAHSVIAKLQSEMFEKLMYLNLKFFNDSKSGNLISRLINDTYFLRMAIVKSVTGIIKDFLVIIFLLGNMFYQSWELTIFAFFAFPLAIWPIKKIGKSIRKITHNIQSEIAVFSNSLSESIKGIRQVKAYNQEEYEKKKSFKTIEQIKNYFIRAAFVSNRLSPLMEFIGSLAIALSIYVGGVFVLDETMTTGQFMSFLVSLLLAYQPVKALGNLNISVQEGLAGADRIFKLLDTKEDLLEKNETNKNEIIVKKGKIEIKNLNFAYDNQNILENLNISIPEGKKVAIVGLSGSGKSTIISLLLRFFTDYKGEILIDDQNINLTSIKSLRQNIGLVTQETILFNDTIEANIKYGNLKASTQDIEKAAEEAGVNDFANVFPNKLQTIVGESGIKLSGGQRQRIAIARAIIKNAPILLFDEATSALDNLTEQKVQSSIKKIMQNRTSLIIAHRLSTIEDSD

SEQ ID NO: 145277 - protein, 165 aa, Unknown
  Bacterial polypetide isolated from the Sargasso Sea
MPFLEFEDIDKSFGNNNVISKFNLKVEKGEFLVLLGPSGCGKSTLLRMIAGLEKIDGGKITLEGTLLNDLLPSKRKIAMVFQSYALYPHMNVFQNISFGLTTEKITKDEIKEKVDVAAKILKIGDLLDRKPKELSGGQRQRVAIGRAITRNPKLFLFDEPLSNLD

SEQ ID NO: 145278 - protein, 207 aa, Unknown
  Bacterial polypetide isolated from the Sargasso Sea
LCPPGSNKTIIKNLNLSIDNNQSVLVVGPSGCGKTSLLRMISGLWEPDQGLIKKPKIGELLFIPQKPYMLLGSLREQLCYPTEVKKFSDEHLTSVLHEVNLKTLVDRYPNLDIKQDWPRILSLGEQQRLAFARLLLNSPRFAVLDEATSALDINTEKKLYSLLKERELSLISVGHRPSLKEFHENILELNGQGDWKLLTSDKYNFKD

SEQ ID NO: 145279 - protein, 205 aa, Unknown
  Bacterial polypetide isolated from the Sargasso Sea
MLQMKNISKVYQTEMVQTHALRDFNLNVNEGEFIAVTGPSGSGKTTFLNIAGMLEPFSEGDYILDGVNVGSLNDNQRADCRNQKIGFIFQGFNLIPDLNLYENIEVPLRYRGIKAKERKRRIEQCLEQVGLASRAKHLPLQLSGGQQQRVAIARALAGEPRFLLADEPTGNLDSLMARQVMELLEQINRDGATIIMVTHDSELAR

SEQ ID NO: 145280 - protein, 255 aa, Unknown
  Bacterial polypetide isolated from the Sargasso Sea
MKNAVEFVNVSLNFGGVKALDNISFEVKDGSLFSIIGPNGAGKTSVFNCVNGIYRPTSGEIKIYDQEIGDLKPDKIANLGVSRTFQNIELFENMTTLDNILIGAHKHINYGPVTSMLRTKKVKNQEDEARDIAEDVIDFLEIEEYRFSYILSLPYGIQKRIELGRALAMKPKVLLLDEPAAGMNNEETEDIARFILDIHEELGVTIILVDHDMNMVMDIATDVIVMDFGKKLFSGSPSDAAKDQSVIEAYLGVSD

SEQ ID NO: 145281 - protein, 263 aa, Unknown
  Bacterial polypetide isolated from the Sargasso Sea
MKNKNSEETIVKFEEVTKQYGSLVVLDKLNLDIKKNEMVSIIGPSGSGKTTVLRVLMTLEKINGGVIHLDGETLTHMNDNGKQVEANEKYLRERRSKIGMVFQQFNLFPHMTALQNCIEAPVEVLGMKKEDAEERALELLELVGLTDKKDQHPSRLSGGQQQRVAIARALAMRPKVMLLDEITSALDPEVVGEVLNVIRSLNKEHSLTMIMVTHQMGFAREISDRVCFFNEGKIFEQGPPEKLFGDPQNERTKQFLHAVLDAN

SEQ ID NO: 145282 - protein, 219 aa, Unknown
  Bacterial polypetide isolated from the Sargasso Sea
TLGIIGESGSGKSTLAKMVLNILSRDEGELELIASNERIKNLTMPNKNIGAVLQDSSGSLNPRMTIQQILSEPLKILGYSEKGEIKSKTIRAINEIGLDQGFLDRYPHTLSGGQRQRVSIARAMMLEPSVLILDEPTSALDTATKKKILHLLKSLQNKQKTSYLFISHDLHVISEIANEVSVLFRGEIIETGTIEKIMSNPKQNYTKKLVDSHRYNNVF

SEQ ID NO: 145283 - protein, 259 aa, Unknown
  Bacterial polypetide isolated from the Sargasso Sea
MAEHFIAEGLHYHVAGRAVIDDVSLALTKGELVALIGPNGAGKSTLLRLLTGFLKPATGRCVLADKPLHEWSTQTLSRHRAVMRQQTLLGFDWPVEAVIAMGRAPWTQQQEPRLIAQVMKMTGCTPLAGRQYAALSGGEQQRVQLARALAQLWCDGAPHGWLFLDEPTSALDLYHQQHLLRMLKTLTSSGELHVCIVLHDLNLAALWADRIVLLHNGRLVSQGTPETVLQADDLKRWYGAQVHVVQHPANASPQVFLAP

SEQ ID NO: 145284 - protein, 349 aa, Unknown
  Bacterial polypetide isolated from the Sargasso Sea
MLSVEIKDLSYSIKDKKVLNKISLELEKDKIACILGPSGCGKTTLLKLIAGLSHVQDGEIFLNDNLVSSNNVHLKTEKRKIGFLFQDYALFPHQTVKENLQFAIKNKSTSHSIKEILDVIKLSDALDKYPHELSGGEQQRVALARSIIAKPDILLLDEPFSSLDLNLREEVRDDTLHLLQKSNISVLVVTHDPFEAMFISNKIYIMDKDGRIVQSGSPKELYNLPNSSYVANFFGETNKFTGVVKNKTVETPVGEFNVDESLESKHVNVYIRPEAVKLNQEQTPVNGIKGTVMASKLMGGYSFVHLSVLNNNNEIVHVHSHMPPNFLPNQSSAVGIEIDKEQTFIFPAN

SEQ ID NO: 145285 - protein, 263 aa, Unknown
  Bacterial polypetide isolated from the Sargasso Sea
MKNKNSDEIIVKFEEVTKQYGDLVVLDKLNLDIKKNEMVSIIGPSGSGKTTVLRVLMTLEKINGGIIHLDGEPLTHMDSSGKLVEANEKYLRDRRSKIGMVFQQFNLFPHMTALQNCIEAPVEVLGMKKEEAEERALELLELVGLTDKKDQHPTRLSGGQQQRVAIARALAMRPKVMLLDEITSSLDPEVVGEVLNVIRSLNKEHNLTMIMVTHQMGFAREISDRVCFFNEGKIFEQGPPDQLFGDPKNERTKQFLHAVLDAN

SEQ ID NO: 145286 - protein, 350 aa, Unknown
  Bacterial polypetide isolated from the Sargasso Sea
MSFLELNKVTKVYPNGTKAVHETSMNVEDGEFMVFVGPSGCGKSTLLRMIAGLEDITEGDINLDGKLINKVDPSERDVAMVFQNYALYPHMNVYNNLAYGLKNRGIDKQTIEQKVNDAAKLLQISEFLQRKPSMLSGGQRQRVAMGRAIVRNPKIFLFDEPLSNLDAKLRIQMRLEIKKLQQKVGVTSIFVTHDQVEAMTLADRLAVINNGIIEQLGTPIEIYNNPKSLFVAGFIGSPQMNFIDGELKNKTLFAEGFEIKNVQSDFNGEITLGIRPEHMSQSDSGLINLSVELVEQLGSDNLIYGELKNKKDFCYRCPGNQLIEKGSKISLNINDNNYYVFDKSSGNRVN

SEQ ID NO: 145287 - protein, 265 aa, Unknown
  Bacterial polypetide isolated from the Sargasso Sea
MSTLEVRQVSVAYPGERGRPTTQALARVDLRIESGEFVVALGASGCGKTTLLNCMAGFVAPTTGDVCVDGVPVTGPGADRGVVFQKYALLPWLDVLDNVALGLRFARVSKAEREARAKEMLALVGLERHAHARVYELSGGMQQRVGIARALASDPRVLLMDEPMGALDAMTRGTMQALVLDVWARTGKTVFFITHDVEEALFLATRLVVMTPGPGRIAETFELPFARRYVESRDARAVKSSPDFIAWRERLIAYLHRDEAVAAAA

SEQ ID NO: 145288 - protein, 262 aa, Unknown
  Bacterial polypetide isolated from the Sargasso Sea
MDKNSQEIIVKFDEVTKQYGDLVVLDKLNLNIKKNEMVSIIGPSGSGKTTVLRVLMTLEKINGGVIHLDGEPLTHMDSNGKLIEANEKYLRDRRSKIGMVFQQFNLFPHMTALQNCIEAPVEVLGMKKEEAEERALELLELVGLTDKKDQHPSRLSGGQQQRVAIARALAMRPKVMLLDEITSALDPEVVGEVLNVIRSLNKEHNLTMIMVTHQMGFAREISDRVCFFNDGKIFEQGPPEQLFGDPKNDRTKQFLHAVLDAN

SEQ ID NO: 145289 - protein, 248 aa, Unknown
  Bacterial polypetide isolated from the Sargasso Sea
MDKNTQEIIVKFDEVTKQYGDLVVLDKLNLNIKKNEMVSIIGPSGSGKTTVLRVLMTLEKINGGVIHLDGEPLTHMDTNGKLIEANEKYLRDRRSKIGMVFQQFNLFPHMTALQNCIEAPVEVLGMKKEEAEERALELLELVGLTDKKDQHPSRLSGGQQQRVAIARALAMRPKVMLLDEITSALDPEVVGEVLNVIRSLNKEHSLTMIMVTHQMGFAREISDRVCFFNEGKIFEQGPPEQLFGDPKN

SEQ ID NO: 145290 - protein, 591 aa, Unknown
  Bacterial polypetide isolated from the Sargasso Sea
MLKQLWHHLSKRRQRQFVFMQILIVVASFFEMASLGAVIPFLTVLSEPELVYEYEYLRPFIQFFRINDASQLALPITLTFIALILLSAIVRLVLLWTMVRLSQMAGADLSIDIYRHTLFQDYSIHVARNSSEVINGIITKTTTVTKGVIAPVLNLISTCVTIVGIIAVLLLINVSVTLIGFIGFGGAYLLVIYLTRRDLKKNSQNIAEKSDLMVKSLQEGLEGIREVLINNNQQFYTELYRNSDLQMRRATWRNEVIYSSPRFGMEAIGIGIIALFAYSATLNLGGIDQFLPVLGAFVLGAQKLLPAIQKGYASYSRIKGGRYSLIDVINLLDQPIPDHADLPPPTPNSFNDSIDLKDLSFRYSEDTPWVLKNINLNIPKGSVIGIVGTTGCGKSTLLDVVMGLLSPTSGELKVDNLLIDNENKRAWQTHISNVPQHIYLTDGTIEENIAFGIPREQIDHQRVEKAAKQAQIADLVETWENGYQTLVGERGMRLSGGQRQRVGVARAFYKKSDVLILDEATSALDDETESAVMEAIENIDDDVTVIIIAHRLTTLKSCDKIVKFEKNHSTQILTYEEVMSLSKNIGDIDVK

SEQ ID NO: 145291 - protein, 230 aa, Unknown
  Bacterial polypetide isolated from the Sargasso Sea
MQDVLLQVQAVSKSYHDGDVTTQVLTEVDLQVFKGEQLAIVGTSGSGKSTLLHIMGTLDKPSSGKVLLAGEDLYQVSSARQAQIRNQDLGFIYQFHHLLPEFTALENVAMPAFIQGRDRSQAQADAKVLLERVGLGHRMSHIPAELSGGERQRVAIARALINKPKLVLADEPTGNLDAKSGEAVYELIRELANQLGTAFVVVTHDPKLAARMDRQLTMKNGYLQVPESTQ

SEQ ID NO: 145292 - protein, 202 aa, Unknown
  Bacterial polypetide isolated from the Sargasso Sea
MNKTILEVSNVTKKVTSPEGELTIVNDISLSLEEGVFASILGPSGSGKTTLLAIMAGLDLPSSGSVKLLDKEITSLNEDKRAQIRSKDVGFVFQSFHLLPRLSALDNVMMPLEILGAKDAKEKALKALDEVGLSKRTGHVPHQLSGGEKQRVAIARAMVKAPSILFADEPTGNLDQSSTDNILDLLLGINKQTKTTLVVVTH

SEQ ID NO: 145293 - protein, 226 aa, Unknown
  Bacterial polypetide isolated from the Sargasso Sea
MEDVSFTIQGGQTVALVGPSGAGKTTLAQLLMRFWDPSEGAILLSGIDIREYGLEALRSKIALVAQDTYLFNSTLKENILIAKPNASYPEMKKAIQMASLTELVETLPQGFDTKVGERGTSLSGGQRQRVAIARAFLKDAPILILDEATSHLDALSESEVRGALDKLKEDRTTIIIAHRLSTIRNADNIIVLDGGRIKESGNHDQLLKKNGLYSQLVYKQMNFSRG

SEQ ID NO: 145294 - protein, 371 aa, Unknown
  Bacterial polypetide isolated from the Sargasso Sea
MGTISLKNINKSFGSTEVLKQLSLDIQDGEFLTLVGPSGCGKSTLLKIIAGLEQQNSGDVIIDDKNVNSTRASKRDLAMVFQSYALYPHLTVRKNLETPLKLRDYSFVERLPLIGNFVPSRKEKKKSIDDLVFKTSETLKITELLDRKPGQLSGGQRQRAALGRAMVREPVAFLMDEPLSNLDAALRVHMRSELSELHNSLKTTFIYVTHDQAEALTMSTRMAVMIDGELLQLDTPSEVYNNPSSLRVAEFVGSPKINTFAAQISSDGSVEFMGIKLERKFNTNSQKALVAVRPEHLEITKDSNKPAFEATVSYRENLGSDIFYHVQVDQSDSKIIVRGSPAGLISNGETVRISPSHAEAMLFETSGERIR

SEQ ID NO: 145295 - protein, 354 aa, Unknown
  Bacterial polypetide isolated from the Sargasso Sea
MLDHISFKPTEEYHLNDISLRFDSGKMYTILGRTLSGKTTLLKTIAGLQTPDSGSINFEDTDFLSIPVWKRNVAMVYQQFINYPHLNVRDNIAFPLKQRKMDENLIEKEVKVAMEKVGLIGFESRKIQELSGGQQQRVALARSLAKKAKILLLDEPLVNLDYKLREGLREEFKKLFNVSDESNSILIYASTDPLEAMQLNGDIIVIDEGKILQTGTAKDVFENPATAKVAEITNDPAMNINKCLIQDNSLIMNDSVQIQIPDELKSVPNGKYLVGIRATDIFLDDQGFPFDVEISEISGSETFLHLRNKNLKCVATIEEVKTYNTNEVVKINFDKSKIYLFEESGELRHSPYQQ

SEQ ID NO: 145296 - protein, 555 aa, Unknown
  Bacterial polypetide isolated from the Sargasso Sea
MAQFVYSMLRVGKVVPPKKQILKDISLSFFPGAKIGVLGLNGSGKSTLLRIMAGIDTEIEGEARPMPGLKIGYLPQEPKLDPTQTVREAIEEAVSEAKNALKRLDEVYAAYADPDADFDALAKEQGELEAIIQAQDAHNLDNILERAANALRLPDWDEKIEVLSGGERRRVAICRLLLEKPEMLLLDEPTNHLDAESVAWLEHFLQEYSGTVVAITHDRYFLDNAAGWILELDRGEGIPWEGNYSSWLEQKDARLKQESAAESARQKTIAKELEWVRQGAKGRQSKGKARMARFEELNTSDYQKRNETNELFIPPGPRLGDKVIEVNNLTKSYGDRVLIDNLSFSIPKGAIVGIIGANGAGKSTLFRMLSGSEQPDSGTIELGETVQLASVEQFRDSMNDKNTIWQEISGGQDIMRINNMEIPSRAYVGRFNFRGADQQKVIGTLSGGERNRVHLAKLLQAGGNVLLLDEPTNDLDVETLRALEEAILEFPGCAMVISHDRWFLDRIATHILDYRDEGQVNFYEGNYTEYSAWLKNTYGADVVEPHRLKYKRMTK

SEQ ID NO: 145297 - protein, 171 aa, Unknown
  Bacterial polypetide isolated from the Sargasso Sea
MTSSKSFVKFDKVDKSYDGKVLVVKDLNLDINEGEFITMLGPSGSGKTTCLMMLAGFETPTNGEIYLDSKPISRIPPHKRGIGMVFQNYALFPHLTVYENLAFPLKVRKLSKDDIDKKVDKALSMVSLSGFEKRMPNQLSGGQQQRVAVARSLVFDPQLVLMDEPLGALDK

SEQ ID NO: 145298 - protein, 356 aa, Unknown
  Bacterial polypetide isolated from the Sargasso Sea
MSVKPKLLIADEVTTALDANLRNDILDLIDELRDQEKTSVLLISHDLLLVKNRCKKIAVMKSGKVIECSNTEMLFKNPKQKYSRKLIDALDYKKSKDVSKKHETDILFSIKNLYKTYVSQGKDHAALKNINFDIYKNEILGIVGESASGKSTLAKILLQIVPQDKGDIMFYSTGTTPTIHEKPNRLIGAVFQDTLGSLNPRMSIFDILMEPLDLTDGLDLDTKLNKLNKCIESVGLSTDLLKRYPHMLSGGQRQRVSIARALMTDPSLLILDEPTSALDVKSQKTILKLLRSLNNDKRLTIVLISHDLRIVMETVDRLAVLYKGEIIETGNPSTIYNNPQRSYTESLIRSEQDNEK

SEQ ID NO: 145299 - protein, 245 aa, Unknown
  Bacterial polypetide isolated from the Sargasso Sea
MKNLVEVKNIKKNYGKNEAVKGISFNIKEDEILGLLGPNGSGKTTTIGMLLGLLKPTSGEILINGQKLEGNRIEILEQINFISPYIELPKKLTVKQNLTVYGKLYKINNINERIEFLSEKLRLEDLLNSITGELSSGQKNRVSLAKALINEPKVLLLDEPTASLDPEVGDFVRSFLEDYKKEKKISILLASHNMNEVTRLCKSILMMKDGIIIDEGNPKELINKHGRKNLEEVFLKLSRSKNELN

SEQ ID NO: 145300 - protein, 352 aa, Unknown
  Bacterial polypetide isolated from the Sargasso Sea
QFKQEILKLLQSLQQKYQMSILFITHDLTIVRQISDRVCVMYNGKIKETGITKEIFENPKDDYTKHLLSSEPEERDLHYDKNGRSILSGENLNVTFNTKVKVSGRNKVLSINAVNNISLYLKEGETLGIVGESGSGKTTLGQTLLRLVDRESNTDVEGEIKFFDDRIDSLSRKQFKPFRNQMQIVFQDPYASLNPRLSVKQIIEEGLIVALNMKDKNERLNKIENIMSEVGLEPSSMLRFPHEFSGGQRQRIAIARSFVLNPKFVLLDEPTSALDLSIQKQILELLLQLQKNHKTTYIFISHDLRVIRSISHNLIVMKDGSILEQGVAKNILTNPQNDYTKNLIKSAFDIIY

SEQ ID NO: 145301 - protein, 439 aa, Unknown
  Bacterial polypetide isolated from the Sargasso Sea
MAQYVYSMHRVGKIVPPNRHILKNISLSFFPGAKIGVLGLNGAGKSTLLRIMAGVDTDIEGEARPQPGLKVGYLPQEPQLDETKDVRGNIEEAVADVKHALTRLDEVYAAYAEADADFDALAKEQGELEAIIQAKDGHNLENALERAADALRLPAWDADVSKLSGGERRRVALCRLLLEKPEMLLLDEPTNHLDAESVAWLERFLHDYEGTVVAITHDRYFLDNVAGWILELDRGEGIPWEGNYSSWLEQKENRLEQEERTETARMKSMKQELEWVRSNPKGRHAKSKARMARFEELSTSDYQKRNETNELFIPPGERLGDKVIEVSNLKKSYGDRVLIDDLTFKVPKGAIVGIVGPNGAGKSTLFRMLTGAEKPDSGTIDLGETVQIAAVEQFRDHMNENNTVWKEISDEQDIIRIGNFEINSRAYCSRFNFKGTDQQ

SEQ ID NO: 145302 - protein, 234 aa, Unknown
  Bacterial polypetide isolated from the Sargasso Sea
MLTMNKISKSFITDDVATHALRDIQLHVNEGDFVSVTGPSGSGKTTFLNIAGLLETSSSGEYLLDGEDIAKLNDSGRSRMRNQKIGFIFQSFNLIPDLNLFDNVDVPLRYRGLNASERKKRIEYHLDQVGLASRMKHLPSQLSGGQQQRVAIARALATSPRFLLADEPTGNLDSQMAQSVMSLLEDINKAGTTILMVTHDPSLAARAKRQIYIKDGHVSELTNQNSNLHLVGEA

SEQ ID NO: 145303 - protein, 528 aa, Unknown
  Bacterial polypetide isolated from the Sargasso Sea
MKNIVEVKNLSINFKVRDGSFSAVKDISFNIENNKTLALVGESGSGKSVTAMSIMQLLPMPQASFDLPSSITFNGKEIIGASKKDLLSIRGNIISMVFQEPMTSLNPYHKVGDQITESVLLHTDKSKKEAYEEAIELMRLVEIDDVERRFKSYPHELSGGQRQRIMIAMALVNKPKLLIADEPTTALDVTIQAQILDLMSKLKKELGMSILFITHDLGLVKEFSDQVCVMQDGKIVEQGNTSTVFENPSHPYTQKLLNAEPQPKENINGELNPLIEIDGLNVFYTMPSINFLKKNKFHAVKDVSLNIYKNTTIGLVGESGSGKSTLGKAIANLINFDGKIAFNGQEIAKSSKDIKKHIQIVFQDPYGSLSPRMTVGEIVGEGLGVHFRLSKKESTSRIDKVLTDVGIELSSKNKYPHEFSGGQRQRIAIARSLIMNPAFMILDEPTSALDRSIQIQVINLLKDIQDEYKLTYLFISHDLKVIRSMSDYIFVMKDGKIVESGISSDVFEYPKEKYTKKLLAAALRYASD

SEQ ID NO: 145304 - protein, 225 aa, Unknown
  Bacterial polypetide isolated from the Sargasso Sea
MIRLEKLSRKFQVGNQVVHALDEVDLEINTNDYVSIMGVSGSGKSTLLNILGLLDTPTSGDYILSGINTSKMDDDEMAGIRSAKIGFIFQSFHLIPRLTAFENIEMPMILSGISPNERSMKVDSALEKVGLTDRADHKPEQLSGGQRQRVAIARSIVMEPDVLLADEPTGNLDTTSGNEVVKLIEELNSAGLTLIVVTHDREMGERSNRLIELRDGKIINDQRKP

SEQ ID NO: 145305 - protein, 350 aa, Unknown
  Bacterial polypetide isolated from the Sargasso Sea
MSFLDLKNVTKIYPNGTKAVHETSLSVDEGEFMVFVGPSGCGKSTLLRMVAGLEDITEGDINLDGKLINEVDPSERDVAMVFQNYALYPHMNVYNNLAYGLKNRGIDKETIEQKVNDAAKLLQISDYLQRKPSMLSGGQRQRVAMGRAIVRNPKIFLFDEPLSNLDAKLRIQMRLEIKKLQQKVGVTSIFVTHDQVEAMTLADRLAVINNGIIEQLGTPIEIYDNPKSLFVAGFIGSPQMNFLDGNIKNKTLSAEGFEIKDIDSDFEGEVKLGIRPEHLSQSENSLINLKVDLVEQLGSDNLVYGQLKDKKDFCYRCPGNLTIEKGADLSLNIENNKYYIFDKSTGKRVN

SEQ ID NO: 145306 - protein, 248 aa, Unknown
  Bacterial polypetide isolated from the Sargasso Sea
MAFLEINSLVKKFSETTALNDVSLRISDGEMVGIIGKSGAGKSTLMRLINRLIEPTSGSISYDGVEVTSLKRKNLRQWRSKCAMIFQQFNLIDRLDVLTNVLSGTLGINFNLLKLFKFYSKKEKIEALTYLNNLDLSDKALQRVGTLSGGQQQRVAIARAMMQNPMILLADEPISSLDPKNSKVVMEDIKKINKQDGIMVICNLHSLEIAREYCDRLIGLSDGKIVFDGHPSSLTKELAEQLYDLENE

SEQ ID NO: 145307 - protein, 225 aa, Unknown
  Bacterial polypetide isolated from the Sargasso Sea
MIIKTENLTKDYETGTQVVNALKGINLSVEKGEFLSIMGPSGSGKTTLMNIIGCLDSPTNGSYYLNNKSVSKLDDDELAKIRNEEIGFVFQSFHLLARNTAFDNVMLPLKYAGVSKEEATKRSNNVLDLVGLSSRSKHTPAELSGGQQQRVAIARALVNEPSILFADEPTGNLDSKTGEDVMKIFKDLNKNGQTIILITHEDSIAKQSNRIITIMDGLIESDFRE

SEQ ID NO: 145308 - protein, 321 aa, Unknown
  Bacterial polypetide isolated from the Sargasso Sea
MVADGLAKHYSVKRGMFGQGTVKALNGVSFSLKRGKTLAVVGESGCGKSTLARQLTMIETPTSGSLTIDGKNVAGASRETVADLRRRVQMVFQNPFASLNPRKTVEQTLSEPLEINANLTAAERAQRIAQIMRTVGLRPEHAKRYPHMFSGGQRQRVAIARAMILDPRIVVADEPVSALDVSIQAQILNLFMDLQEQFKTSYVFISHNLSVVEHVADDVMVMYFGSVAELGDKATIYARPRHPYTRALMSATPAIFEEDRRVQIKLQGELPSPLNPPSGCAFHQRCPYAVERCRVEEPQLREVDGRRVACHRAEEVGEENA

SEQ ID NO: 145309 - protein, 470 aa, Unknown
  Bacterial polypetide isolated from the Sargasso Sea
LKDFSGGWRVRLNLAKTLMQPADLLLLDEPTNHLDLDAIIWLGNWIKSFKGAMLLISHDREFLDECVGFIAHLHNSTIELYKGNYSQFEIRKAARLAELESNYNKQQREISHMQDFVRRFKAKATKARQAQSRIKALERMELIAPAHIDSPFQFTIPKTEKISNPLIVLEDADLGYSDAIINKVKIAFRPGDRIGLLGVNGAGKSTFVKSLKGDLQLLQGNKTEGKNLKIGYFSQHQVDDLMLDKSPIDHLAKVEKKATESEIRNFLGGFNFRGDKAKDVIKNFSGGEKARLALAIIAFQKPNLLLMDEPTNHLDMDMRQALTVALQDFSGAIVLISHDRHLLANTVDEFLIINEGKIERFNGDLLDYRKMILQGPHKESFKSKKDNEDKVKDKKDQKKIKNQILAIEKTLKRLNRKLAETQEFLNSPELYNDSSKMNLHDLLRDQVNLDTEIKSTEQEWLELNEELENG

SEQ ID NO: 145310 - protein, 388 aa, Unknown
  Bacterial polypetide isolated from the Sargasso Sea
ALLDRVIVKWRHRTRRTWIRGTINGGLQGGMLVAIQAAILGAALLLWMRGEASVGDITFALTMFFMLQGYLRDVGMHIRNLQRSVNDMEELVQLESQPPGIEDRPGAGPIAIGKGEIRFEHVTFHYGAKATPLYENFSVRIAPGERVGLVGHSGSGKTTFIKLIQRLYDISEGRITIDGQDIARVRQASLRSQIAIVQQEPVLFHRSLAENIAYARPGASRAEIERAARLASAHDFIATLPQGYDTLVGERGIKLSGGERQRVAIARAFLADAPILILDEATSSLDSESEVLIQQAMERLMTGRTTLVVAHRLSTVRALDRLLVLDKGKVIEEGSHDALIRLENGLYRRLFERQALELIKGLGDSEVTRKTDNAKANLPDDSSLLVEK

SEQ ID NO: 145311 - protein, 553 aa, Unknown
  Bacterial polypetide isolated from the Sargasso Sea
MAQYIYSMYRMSKVVPPKRTILKDISLSFFPGAKIGVLGLNGSGKSSLLRIMAGVDTEFDGEARPLAGINIGYLPQEPQLDPEKTVREVVEEAVADVKNALTRLDQVYAAYAEEDADFDALAREQGELEAIIQAKEGHNLDNILDRAADALRLPQWDALIKHLSGGERRRVAICRLLLEKPDMLLLDEPTNHLDAESVAWLERFLHDYTGTVVAITHDRYFLDNVAGWILELDRGEGIPWEGNYSSWLEQKDARLEQEERSENARQRSIKQELEWVRTNPKGRHAKSKARMARFEELQSQDFQKRNETNELFIPPGPRLGDKVLEVKNLRKTFGDRVLIDDLSFSIPKGAIVGIIGPNGAGKSTLFKMITGMEQADGGTIEVGDTVQIASVDQFRDSMNPKNTVWQEISNGQDILQIGNFQIPSRAYVGRFNFKGNDQQKFIGELSGGERNRVHLAALLKAGGNMLLLDEPTNDLDVETLRALENAILDFPGCAMVISHDRWFLDRIATHILDYRDEGKVNFFEGNYSDYETWMKATYGSDAMQPHRIKYKKI

SEQ ID NO: 145312 - protein, 268 aa, Unknown
  Bacterial polypetide isolated from the Sargasso Sea
MSGLEIRRLHVAYEGVRGAAPTIALADVDLRIEPGEFVVALGASGCGKTTLLNCIAGFIQPTGGEVRLNDAPVLGPGADRGVVFQKYALMPWLDVLDNVALGLRFQRVPKAQRERIALEKLALVGLEKHAHSRVYALSGGMQQRVGIARALASDPQVLLMDEPMGALDAMTRESMQELVLDVWGRTRKTVFFITHSVEEALFLATRLVVMTPGPGRIAESYDLPFARRFLETRDARAVKSSPEFIEWRERLVRRLHERNERNQEEVLS

SEQ ID NO: 145313 - protein, 728 aa, Unknown
  Bacterial polypetide isolated from the Sargasso Sea
LDGIQGLATLKSFGQSKTRADLLTKRAYELFRSTMWVLATNVLSRGITDTSIALGAATALGYGAYRTTTGEMELTTLLIILMMGVEIFRPMRDLRTVLHQGMMGLSAAHGVFKILDASPAVIEKKLENIETVIEPSVSFDSVKFKYPGHSHVVHSSLSFNIKKGERVGIVGSSGCGKSSIVKLLLRFHDPVQGSVHIGGKDLRDISFDQIRGMISVVHQDTFLFHGTIEDNIKMGNPKANEDEIIKAAKNANIHEFVSTLPDGYKTLIGEKGIKLSGGQRQRVAIARALLRDTPILILDEALSAVDAENEFIIQQALDRLMKDRTTLVLAHRLSSIVKCDRILVIDQGIIAESGSHQSLMQQDGIYSVLMSQQVRESESKGLLVKEKESVIFEEKEREQLKETVMNVPTEGIVKAEGLNWKQLIIELMRHIFPWKGRLALSFCFGVLRVLSFIGVGIFSALIVLDLKNGDDYSSHLSWLITAAILSGILHWLESWIAHDMAFRLLSVMRINVFKKLDLLAPAYLVRRRTGDLMGIATHDVELVEYFFAHTVAPVFVSILIPATVVVILSVNSFWMTLALLPFLIAVGLSPFLMRKRVDMLGSKAREAAGELSAHAIDSVQGLAEIVAYQQGSYRGRSFEGLTDRHISLRLPFFKELTLQSNMLEVLTGWGGLAVVSTGALLTANGHFDSGILPLMTILAMSAFLPVSEIAQIGRQLADTLGATRRVYA

SEQ ID NO: 145314 - protein, 264 aa, Unknown
  Bacterial polypetide isolated from the Sargasso Sea
MATLAPRRFAACGAGDSRRRAHSGGDEHRRDDDRRGDRRGRPRHADHPRDRPEQHDETTGRRGACERARDRRRLAAASAATLADTEGSTKDMIELDKLTKTFTQKDGQPVRAVDSVSLTVGEGEICVFLGPSGCGKTTTLKMINRLIAPTSGRVLINGEDTSALNEVELRRHIGYVIQQIGLFPNMTIEENITVVPRLLGWDKKRCRERATELMSMVALDPKQYLKRYPRELSGGQQQRIGVIRALAADPPVLLMDEPFGAVDP

SEQ ID NO: 145315 - protein, 577 aa, Unknown
  Bacterial polypetide isolated from the Sargasso Sea
MNNGLQTYLRLLDYGKKYWIVFTIGALAMLIFAITDTGFAFLIKVLTDSFAGNVDSFESVNLKWLLPIGVILIFFVRGLSGFFSTYNMSWISRHVIRRIRSDVYQKFLYLPTSFLDQKSNADLLSKVIFNIEQVSESTANVLTVLIRDSLTIIALTIYMVYLSPMLSAVIFTAAPVIAIIVKILSNLFRRYSERIQDSMGDVTHAIKETLQNHRIIKIFNGQEDEGDKFGEINEINRQHNMKLLRTKAIGDALTIFVASLGVAGVVYVATLNEVKGSMSVGDFSGFITAMVLLMTPLKRLTNVNAMIQRGIAAASSIFSLLDEGNELDLGTKDAGRLNGSVSFKDVTFAYGKDKETLKDINTKINAGQTIAIVGKSGSGKSTIVNLIPRFYDVGSGSIEIDDVPIESYTIKSLRSNISLVTQEVTLFNDTIENNIVYGGHSNQDISDAIQASHIDEFIDELPEGLQTKVGDQGILLSGGQRQRIAIARALLKDAPILILDEATSALDSESEKLIQKAFDRLMENRTTFVIAHRLSTIENADKILVLSNGKIVEEGTHEELLNRDGEYSLLHKMQFND

SEQ ID NO: 145316 - protein, 613 aa, Unknown
  Bacterial polypetide isolated from the Sargasso Sea
MFSFFEKLTQPFPDTPPTQPPTGIVAFCKYYTKGMWGVILTVSVLSAIVAMLEVALFGFLGQLVDWFSDQNRDTFLADQKFTLIGMGLTVLVFIPLFILLRSLFSRQSLMGNYPMRIRWQAHRYLLGQSLTFFHDEFAGRVATKVMQTALSVRETVTKVLDLLVYISVYFISMVVLIFSTDWRLAMPLIVWFFVYIGILKVLVPKLKEVSQKQADARSLMTGRIVDSYTNITTVKLFSHSRREADYAKESMDGFLKTVYPQMRLVTVLEFCVEMANAILIFTIGALSVYLWMENIASPGDIAIAISLCLRLNGMSHWVMWEVSGLFENLGTVQDGMNTLAQPIAVKDKPKADALKVNGGGINFDNVHFSYSGADNKPIDVFTNLDLAIKPGEKVGLVGRSGAGKSTLVNLLMRFYDTQSGHIVIDGQDITEVGQETLRAKISMVTQDTSLMHRSVRDNILYGRTDATEEDMICAAKQAEAHDFILTLTDSHGRTGYDAHVGERGVKLSGGQRQRIAIARVLLKDAPVLVLDEATSALDSEVEAAIQACLDKVMEGKTVLAIAHRLSTIAQMDRLLVLDKGNIVEQGTHTELIAHNGIYAKLWAHQTGGFIGVE

SEQ ID NO: 145317 - protein, 312 aa, Unknown
  Bacterial polypetide isolated from the Sargasso Sea
TKSLVSSVPPTNKKISRFVIVEKENNNKKENNIKILNRWSKKEIINQDLIQIKNLNKSFDDNFFTENSKNSVMAVNDVSFEIKEGESFGLVGESGSGKSTIAKMIVNLFKPTSGDIIFDNVCITKIKQRSELMKFRKQIQMIFQDPYSSLNGRLKVKDIIAEPITLHNPSISNLDLNNYIYDLLESVELTQKSAGRYPHEFSGGQRQRISIARALATQPRLLVCDEPTSALDVSIQAQILNLLKDLQEQLNLTILFISHDLPVVRQMCDRIGVLKDGKLCEVSNTEDLFLKPTHEYTKELLRLMPKIESIYN

SEQ ID NO: 145318 - protein, 224 aa, Unknown
  Bacterial polypetide isolated from the Sargasso Sea
MSNLIAVQSVNKTYKRGEETLVVLDDLSLEVQKGDFLALMGPSGSGKSTLLNLIGGLDTPTSGQIVVNEQHLETMNASALSTWRANNVGFIFQFYNLLPVLTAHKNIEIPLLLTGLSGSQRKEHVSTALNVVGLSDRGGHKPNELSGGQQQRVAIARALVSDPDILVCDEPTGDLDRNTATEILDLLQILNRDHGKTILMVTHDPVAADSAKRTLHLDKGKLTH

SEQ ID NO: 145319 - protein, 577 aa, Unknown
  Bacterial polypetide isolated from the Sargasso Sea
MDNGLQTYLRLLEYGKKYWLVFTIGALAMLIFAITDTGFAFLIKVLTDSFAGNVESFESADLKWLLPVGVIIIFFVRGVSGFFSTYNMSWISRHVIRRIRSDVYKKFLYLPTSFLDQKSNADLLSKVIFNIEQVSESTANVLTVLIRDTLTIIALTIYMVYLSPMLSAVIFTAAPVIAFIVKILSTLFRRYSERIQDSMGDVTHSIKEILQNHRIIKIFNGQENEEVKFGEINEVNRRHHMKLLRTKAIGDALTIFVASLGVAGVVYVATLDEVKGSMTVGDFSGFITAMVLLMTPLKRLTNVNAMIQRGIAAAASIFSLLDERNEIDRGTKDAQRLIGAVHFKDVNFSYGSEKETLKNINTNIKAGQTIAIVGKSGSGKTTFVNLIPRFYDVEKGSIEIDGIQIEEYTLESLRSNISLVTQEVTLFNDTIENNIIYGGHSNQEITDAVKASHIDEFIHDLPDGLQTKVGDQGILLSGGQRQRIAIARALLKDAPILILDEATSALDSESEKLIQKAFDRLMENRTTFVIAHRLSTIEKADRILVLSDGKIVEEGTHQDLLSQDGEYSLLYKMQFND

SEQ ID NO: 145320 - protein, 575 aa, Unknown
  Bacterial polypetide isolated from the Sargasso Sea
MTTHAPAPHATPLVHVERLTIGFRGPRGTRPVVGPLDLVVHAGECVALVGESGSGKSVTARSLVGLNGPHAVVDAERLEIAGADARRHRERDWRAIRGRRIGYVLQDALVSLDPLWRVRDLVAEALHDTRRRDVHARSADLLRSVGIDEPERRLPQYPHQLSGGLRQRVLIGTALAGGASLLIADEPTTALDMTVQRQILSLLRARREAGDALLLISHDLAVVAELADRVLVMRAGQVVEQGPARDVLTAPAHPYTRQLLAAIPTPASRGFRLAMDPQADAAAAAAGPAARIPLPPKRIEAREKVLAVDAVTKRYGSHDAPVAVDGVSFALARGETLGIVGESGSGKSTIARIVLGLTEPDSGTVALDGEPWSGVPEAARRARRARLQLIAQDPYSSFDPRYSVGQIIGESLDAIGVRGDARRRRVLQLLDEVRLGAGCIDRYPRELSGGQRQRVAIARAFAPNPALLVADEPVSALDVSIQAQVLDLLADLQAEHGTAMLFISHDLGVVHHVADRILVMRRGRVVESGPVGTVFAAPSHPYTASLLDALPTLPTLPSLPSLPAARPSPARAAVA

SEQ ID NO: 145321 - protein, 359 aa, Unknown
  Bacterial polypetide isolated from the Sargasso Sea
MECRNLGKSYETFLALTGVSLRLDEQEFLSILGPSGCGKSTLLRLIAGLEVPSEGEVFLYGQEISGRKIILPPERRKFGMIFQDFALFPHLSVNDNVEYGATGSKKEKQLRVLELLELVSLSHLATKMPHQISGGEQQRIALARALAPRPCLMLMDEPFSNLDYQLRQQLRGEIREILKNEGVATVLVTHDQIEAITFSDRILLMQKGKVVQEGTPSEIYQLPQTIWASSFVGEANHLPVEWHNNYLKTPLGELNIPNEIAINARIMMVRPEDFKIESVPAEKANGIVKSVDFSGPVQTVGVALKSGVSVMVSGSPHLLWNQEDYVKITAERYLCFNSNGNRLDGTAEQKTNRKGCVPR

SEQ ID NO: 145322 - protein, 231 aa, Unknown
  Bacterial polypetide isolated from the Sargasso Sea
MSGEVVMARGLTRVYQEEAVPVHALRGVDFSLSSSEFVSLSGPSGSGKSTLLNIVGGLDRQDEGIIELDGEELAPLSEGDLAALRLRKIGFVFQAYNLVPVLSALENVEFILQLQGVGSAERKERAGEALKSLGLSELQDRRPGEMSGGQQQRVAIARAIVTNPVLLLADEPSANLDSETTKELMELLRNLNETQGMTIITATHDPMVMGYAKRQVHLRDGTVERDEVVTD

SEQ ID NO: 145323 - protein, 344 aa, Unknown
  Bacterial polypetide isolated from the Sargasso Sea
MSLEYKGKKGLSTLKNITFDLNVEEIGCILGPSGCGKTSLLRAIAGLEDISEGRIIVDGRCISTPTSKVPSNERSIGMVFQDYALFPNLNVEKNIAFSFNNKNQPDSQKKIKELLDLIGLSGQNKKFPHELSGGEQQRVALARAIANEPNILLLDEPFSSIDTEIKENLIRDIKNLLDHLSITTLMVTHDQYEAFSLADTIAVMNEGKFHQIGSPYDIYHEPLDRFVADFIGMGTFLPATVNSHGVETPLGTFPIFKKDIINLNKNQLEIFVRPDDVVHNDQSNLKAIVKEKHFRGADFLYHLMFKDQYELLCYAPSHHNHAIGESIGIEVHMKHAVLFEKELI

SEQ ID NO: 145324 - protein, 638 aa, Unknown
  Bacterial polypetide isolated from the Sargasso Sea
MKTGSLRRLLGYTFRYKWSFFISVVGFISFAFADIAAVEWIRRIIGFINSEEENFSSFLALSLILIALGRGVGFFVGNYFMSRVGFGIVHDLRAELFQKLHDLPKSYFDANQSGQLINRITFTTTQVSGAASNAVKTLIREGFLLIGLFVYLLILNFKLTLLLIGTAPLIALIVYVAGKRLKKLAKKIQTAMGDVTHIASEAVDGHVEIKSFNAQEYENSRFFEANSSNKNQNLKLEATGNMATPIIQVLVSISLSIVAYFALGAQLGISLDAETFVAFFTAAGLMAKPIRQLSNINMIVQKGLAAAVEIFEQLDQEIESDLGDKSDIIEGNIEFDNVNFSYETGRQVLNDISFSINKNETVAIVGKSGSGKSTIANLIPRFYNHSSGNILIDGTPVSEFSLDYLRSQISIVNQSPSLFNDTISKNIAYGDDEIDVDKLKESAKLSGCSEFIEDLPDGYESDIGDDGVLLSGGQRQRLAIARAFYKDSPIIILDEATSALDTESELIVQEALEKLIIDRTTIVIAHRLSTIENATKIIVLDNGSIVETGTHSELIENKDIYHSLYKNKFEDSPEAQSRTSKSVQLFMPEYEDEDSSSFVVDSWYKKSLWLYLLYPFSLIFSYLTTRRRKRYLNNKIES

SEQ ID NO: 145325 - protein, 271 aa, Unknown
  Bacterial polypetide isolated from the Sargasso Sea
MESMRVKNVSVVFPGRKSGQTVHALDDINLTINSGDFVVALGASGCGKTTLLSLMAGFIAPSSGELLLGGSPIAGPGSDRGVVFQKHALLPWLNVIDNAEFGLKLQGVPKAQRREIAARNLALVGLQDFHKHMIYQLSGGMQQRVGIARALTCDPAMLLMDEPMAALDALTRETIQELLLDVWTKTNKMFFFITHSVEEALFLASRLIVMSPRPGRITHTYELDFNRRFLETRDARAIKSSPDFIEMRERVLSIIYGDEKMHGAAAEVTHV

SEQ ID NO: 145326 - protein, 489 aa, Unknown
  Bacterial polypetide isolated from the Sargasso Sea
GGMRMRQQLFEKYIHLPVAFHDNHAVGGLISKVTYDTEQVANASGKALLTLVREGALVIGLLCVMFYYSWQLSLIFLLIGPIVAVIVSIVSKRFRVVSKNIQQSMGNLTSSVEQAVKGHKVVIMFGGQEIEQKRFEQKNNHNRQQSMKLNVTSILSVSSIQVIASIALAVVLFVASTPGMLEKLTAGVFINVVFCMVMLLKPLKQLTTINNQFQKGMAACASIFEILDEADEEDKGKTKVERATGKIEFDDVTFSYPGKQTPALSNVSFIANPGQSIALVGRSGSGKSTISSLLTRFYVPQEGEIRLDDTALNDIDLKDLRAQFAVVSQNVTLFNDTIANNIAYGARQNVSRKDIENAAKMAHVEEFLSNLPEGLDTVIGENGLMLSGGQRQRIAIARAILAEAPILILDEATSALDTESERLIQDALETLQKRCTSIVVAHRLSTIENADCIMVVEQGRIIEKGKHNELLEKGGHYAQLHALQFGETK

SEQ ID NO: 145327 - protein, 350 aa, Unknown
  Bacterial polypetide isolated from the Sargasso Sea
MSFLDLKNVTKIYPNGTKAVHETSLSINEGEFMVFVGPSGCGKSTLLRMVAGLEDITEGDINLDGKLMNEVDPSERDVAMVFQNYALYPHMNVYNNLAYGLKNRGIDKEAIEQKVNDAAKLLQISDYLQRKPSMLSGGQRQRVAMGRAIVRNPKIFLFDEPLSNLDAKLRIQMRLEIKKLQQKVGVTSIFVTHDQVEAMTLADRLAVINNGIIEQLGTPIEIYDNPKSLFVAGFIGSPQMNFLDGSLKNKTLSAEGFEIKDINSDYEGEVTLGIRPEHLSQTENGLINLKVDLVEQLGSDNLVYGQLKDKKDFCYRCPGNQTIEKSSSLSLNIDNNKYYIFDKSTGKRVN

SEQ ID NO: 145328 - protein, 223 aa, Unknown
  Bacterial polypetide isolated from the Sargasso Sea
MNKTILEVSNVTKKVTSPEGELTIVNDISLSLEEGVFASILGPSGSGKTTLLAIMAGLDLPSSGSVKLLDKEITSLNEDKRAQIRSKDVGFVFQSFHLLPRLSALDNVMMPLEILGAKDAKERALKALDEVGLSKRTGHVPHQLSGGEKQRVAIARAMVKAPSILFADEPTGNLDQSSTDNILELLLGINQQTKTTLVVVTHDQQLAARSDMVFELQEGKLKC

SEQ ID NO: 145329 - protein, 229 aa, Unknown
  Bacterial polypetide isolated from the Sargasso Sea
MKNAVVEIRDLAFAWPGHEVVLDLPALTISEGERVFIKGPSGSGKSTLLGLLAGIQTANHGTLEVLGQPLARLSGRARDHFRAANLGYIFQQFNLLPFLSVQDNVTSALTFSPEKRARLQGSPADEARRLLRELQLPEEALHRPVHALSIGQQQRVAAARALIGSPPLVIADEPTSALDTDNRAAFIKLLFEECDKQGSTLVFVSHDPYLEPLFPRVENLQQLNRRAAC

SEQ ID NO: 145330 - protein, 251 aa, Unknown
  Bacterial polypetide isolated from the Sargasso Sea
MELLVQNLCKRFGDKTVLEDINFSMQSGEFVTFVGSSGCGKSTLLRLIAGLDHPSGGRIQVDGSPVEGPGPDRGMVFQKYSLYPWLNAADNVAFGMRLQGMTSADVRNRTAYFLEVVGLRDAATKLPRELSGGMQQRVAIARALATNPSVLLLDEPFGALDLQNRETMQDFLHKLWQRTGLTVLLITHDVEEALVLAQRVHVLAPNPGRIIRSLDVTLDKSDLDQLRLSGEFLQLRRSLSGSLRQLEPTIG

SEQ ID NO: 145331 - protein, 224 aa, Unknown
  Bacterial polypetide isolated from the Sargasso Sea
MSNLIEVQSVNKTYERGRETLIVLDDLSLEVPKGDFLALMGPSGSGKSTLLNLIGGLDSPTSGQIVVNGEHLEEMGPSGLSDWRATNIGFIFQFYNLLPVLTANKNVEIPLLLTNLSSSQRKEHVTTALNVVGLSDRGGHKPNELSGGQQQRVAIARALVSDPGILVCDEPTGDLDRDTATEILELLQILNRDHGKTILMVTHDPVAAESAKRTLHLDKGKLTT

SEQ ID NO: 145332 - protein, 263 aa, Unknown
  Bacterial polypetide isolated from the Sargasso Sea
MENKNSDEIIVKFEEVTKQYGDLVVLDKLNLDIKKNEMVSIIGPSGSGKTTVLRVLMTLEKINGGIIHLDGQKLTHMESNGKLIEADEKYLRERRSKIGMVFQQFNLFPHMTALQNCIEAPVEVLGMKKEEAEERALELLELVGLTEKKDQHPSRLSGGQQQRVAIARALAMRPKVMLLDEITSALDPEVVGEVLNVIRSLNKEHNLTMIMVTHQMGFAREISDRVCFFNEGKIFEQGPPEKLFGDPQNERTKQFLHAVLDAN

SEQ ID NO: 145333 - protein, 256 aa, Unknown
  Bacterial polypetide isolated from the Sargasso Sea
MATLVAENLTFAYTKKSKPALNKVSVEIKPGTLTALVGPNGAGKSTLLRILQGQNTPDKGEIKIDGENLYRSRALVALMPQRSSMNWKFPITVEKLVSLGQIKYSKSKSNNPFQIKTLLAYPNSWINKCCELEATMQRVGIANLANRRLDSLSGGQQQRALLAKTLMSPAKIFLLDEPCAALDPPAKEDFLKIVRQLADAGLSLLVSSHDWGESLNNYDQVIVLDKSVLAVGSPDQIKDKLEAINISSINENNFCD

SEQ ID NO: 145334 - protein, 561 aa, Unknown
  Bacterial polypetide isolated from the Sargasso Sea
MSFLEIKNLNISYLTRKEKIVASKDVEFYLERGEILGIVGESGSGKSTIANAIINLIDPPGEITDGSIKIDNEEICNNEEIIQKARGKKIGFVFQDPQTSLNPLFKIKDQLIETIQTHLKLNYDQALQRSIQLLNEVGIEDAEKRIEDYPHQFSGGMRQRVVIALAISCEPDLIIADEPTTALDVSIQYQILQLLKDLTKKRNLGVIIITHDMGVIAETTNKVIIMRNGVIVEYGLTKDVLTNPKSNEGKSLIISVPPTNKKISRFKLINPEGGEITNESLNLTNSIIQNWGKRAVTKDKLLEIKNLTKIFDSDSIIKSKKEITALKALDNVSFNIFEGESFGLVGESGSGKSTIAKIITNLIKPTSGEVFYENISLNQKNNNKFRGQIQMIFQDPYSSLNPRFKVKNIIAEPIKFFQKNLDKKTIENNVNDLIDIVGMTRQSLDRYPHEFSGGQRQRISIARALATRPRLLICDEPTSALDVSIQAQILNLLKDLQEQLNLTILFISHDLPVIRQMCDRIAVLKNGNLCEIENTEILFNNPSHQYTKELINLMPKIETIL

SEQ ID NO: 145335 - protein, 227 aa, Unknown
  Bacterial polypetide isolated from the Sargasso Sea
MKTSTKTVISINNISKVYEGPPPVRALDGVSLEIKEGDFVSIVGQSGSGKSTFLNMIGLLDSITDGSIEIEGKDVSELSDNELSKFRGEKIGFIFQSFFLLPGLTAQENVAEGLLYQGISRSERLEKAKEVLEQVGLGDRLTHLPKELSGGQQQRVAIARALVQDPAFVLADEPTGNLDKESGINILNILKDLNNQGKTVIMITHNQEHASLFKKVIELVDGKIVNQ

SEQ ID NO: 145336 - protein, 125 aa, Unknown
  Bacterial polypetide isolated from the Sargasso Sea
GLHEFITEELDQNYFTEVGEIGIRLSGGQRQRIGIARALYNNPSLLVLDEATSALDNLTEKRIIKSIADHSEIITTIIIAHRLNTIKNCDCIYYLENGGIKSSGTYEELILKSKEFKKLATSLVV

SEQ ID NO: 145337 - protein, 225 aa, Unknown
  Bacterial polypetide isolated from the Sargasso Sea
MKIPALELKSLVFSWPDQAPLFNIPQLKLAQGQHLFIYGSSGSGKTTLLNLLAGIYPCQRGDIVIAGQSMAALSAAKRDQLRASSIGVVFQQLNLIPYLTVLQNVLLVSAFAKKIPQAEQRARYLLQKLGLEQQLWQAPANRLSVGQQQRVAIARALLSQPALLIADEPTSALDHKHRDSFMQLMLSEAELCGTTVIFVSHDPALRSYFHFELDMEQLHQGVQPC

SEQ ID NO: 145338 - protein, 218 aa, Unknown
  Bacterial polypetide isolated from the Sargasso Sea
FSRVNKTYQRGGETLTVLDDLSLEVPKGDYLALMGPSGSGKSTLLNLIGGLDSPTSGQVVINGEHLEKMSASSLSDWRASNVGFIFQFYNLLPVLTANKNVEIPLLLTNLSGSQRKTHVETALNVVGLSDRGGHKPNELSGGQQQRVAIARALVSDPDILVCDEPTGDLDRDTATEILELLQILNRDHGKTILMVTHDPVAAESAKRTLHLDKGKLTN

SEQ ID NO: 145339 - protein, 175 aa, Unknown
  Bacterial polypetide isolated from the Sargasso Sea
MGVISPNGGEINLDNIPLANIVDDWQHSIGYVDQNIFISNGTILKNIAFGIPNKEIDKNLIDEVIQKSSLDKFVKTLKDGLETEIGEHGAMISGGQRQRIGIARALYSKPKILILDEATSALDLETENEILEEINKLKNEITMVSISHRINAIKYCDEVYNLSDNRLSKKNFNER

SEQ ID NO: 145340 - protein, 101 aa, Unknown
  Bacterial polypetide isolated from the Sargasso Sea
MILIQCQGLSKHYGSKKALNNVNLTLESGAPIALVGPNGAGKTTLFSLLCGYLTPSAGTVRILGEAPNSPALLGQIAALPQDATLDPNFDIISQLSFFARL

SEQ ID NO: 145341 - protein, 232 aa, Unknown
  Bacterial polypetide isolated from the Sargasso Sea
MAESTSQAVAELSGVSKVYGQGDLEVRALDQLDLTVRSGDYLAVMGASGSGKSTAMNILGCLDRPTGGRYRLNGIAVEQLDDDELADLRNQSLGFVFQQFHLLPHASAMENVMLPMVYAGISLDERKERAASALDRVGLSQRLDNRPNQLSGGQQQRVAIARAIINRPSLLLADEPTGALDSNTTAEVLELFDELHRQGITLVMVTHEDDVAARAHRIARFQDGRIVNEASQ

SEQ ID NO: 145342 - protein, 264 aa, Unknown
  Bacterial polypetide isolated from the Sargasso Sea
TDINLDETPLLEIKNLDVYYEIPNINFLKKKRFHAVKNTSLNIYKNTTIGLVGESGSGKSTLGKAIANLTKFEGKIYFDDKDITSSPKGIKKHIQIVFQDPYGSLSPRMTISEIVGEGLGVHFKLSKLETQNKIDKVLTDVGIDLSAKNKYPHEFSGGQRQRIAIARSLIMNPTFMILDEPTSALDRSIQIQVINLLKDIQKEYKLTYLFISHDLKVIRSMSDYIFVMKDGKIVESGPSNEVFDYPKQKYTKKLLSAALRYASN

SEQ ID NO: 145343 - protein, 254 aa, Unknown
  Bacterial polypetide isolated from the Sargasso Sea
MYKLEVQDLHKRYGSHEVIKGVSMAAKAGDVISIIGSSGSGKSTFLRCLNLLEQPHAGKILLNNEELKLLPAKDGSLRAADAKQLQRMRSRLAMVFQHFNLWSHMSALENVMEAPVHVLGVSKAEARDKAEHYLAKVGVAHRKDAYPAHMSGGEQQRVAIARALAMEPEVMLFDEPTSALDPELVGEVLKVMQDLATEGRTMVVVTHEMGFAREVSNQLVFLHKGLVEERGCPKEVLVNPQSERLQQFLSGSLK

SEQ ID NO: 145344 - protein, 357 aa, Unknown
  Bacterial polypetide isolated from the Sargasso Sea
MAKIILDNIAHTYEPNASNPIFALKEMSLSWADGGRYALLGPSGCGKTTMLNIMSGLVNPSHGKVFFDEREVTSMITEERNIAQVFQFPVIYGTMTVFENLAFPLKCRQFPEDQIERKVKEVAEILNLQDYLNNRAKGLTADQKQLISLGRGLVREDVAAILMDEPLTVIDPDLKFRLRRKLKEINDKYKTTLIYVTHDQNEAMTFADNIIVMDQGEVVQAGSPKELFERPQTTFVGYFIGSPAMNLYECSASSKNEISIGANSFKVQTNINNSNSENLKLGIRSEYITVENEHSDNSLEADVIEVEDFGNYKLVTASFDSFKIKAKVKRELDIPSEKVILKLPAEHCCIYEDNKLI

SEQ ID NO: 145345 - protein, 216 aa, Unknown
  Bacterial polypetide isolated from the Sargasso Sea
MNEVILKIQNLSHSYDDDQLSLKKINLLVNKGERLSIQGPSGCGKSTLLRLIAGLEEPNEGQIFINEEEVSSPGFSVPPEKRQIGMVVQDKALFPHLSIYENICFGIKKNTNKEQIALDLLNLFKIEELKNKFPHQISGGEKQRVALARSMAPNPNFIMLDEAFSALDSDLKVSIYDEVLEIFQGKNITVILVTHDTEEAKILSTRQLNMDNGELL

SEQ ID NO: 145346 - protein, 227 aa, Unknown
  Bacterial polypetide isolated from the Sargasso Sea
MSLLKVTGLGKSFGGVKAVDGIHFELAAGELLALIGPNGAGKSTTFNMVNGQLPADAGSIQLNGQELVGRKPRDIWRMGVGRTFQIAETFASLTVVENVQMALISNDGLLFSMWRRAADHKRDEALALLDQVGMKSQADRPCSVLAYGDVKRVELAIAMANSPKLLLMDEPTAGMAPKERNELMALTKQLVIDRHMAVLFTEHSMERGVCLCRPHDRAGARAPDLRG

SEQ ID NO: 145347 - protein, 530 aa, Unknown
  Bacterial polypetide isolated from the Sargasso Sea
MISTANITMQFGPEPLFENISAKFGNGNRYGLIGANGCGKSTFMKILSGALAPTSGNVSITPGLKVGTLSQDQFAFEQYTVIDAVIMGDTQLWKIKQERDAIYAKPDMSEEDGMRVGDLESEFAEMDGYSAESRAGEILIEAGIEESFHYGPMSQVAPGWKLRVLLAQALFANPDILLLDEPTNNLDIHTISWLETELNKRKCTMIIISHDRHFLNAVCTHMADIDYGELRIYPGNYDYFLAQSALLREQLLAGNAKKSAEIEELQDFVNRFGANASKAKQASSRAKRMDKIKLDEVKSSSRITPSIRFAAGKKMHRQALVLENLGHGFDGENLFEGGDLILEAGAKLAIIGENGVGKTTLLRCLVNELIHNEGTIKWSENAAIGYCPQDSTSDFDNDLTIIEWMDQWRQPKHNDLMVRAMLGRLLFTEDDANKKAKNCSGGEKNRLIFGKLMMQDINVIIMDEPTNHMDMEAIEALNNALKDFEGTLIFVSHDREFVSSLATRIIDIRDRKLVNFQGTFDEYLANLASA

SEQ ID NO: 145348 - protein, 271 aa, Unknown
  Bacterial polypetide isolated from the Sargasso Sea
QNKIRKHKENKEIEILKIKDLKVWYPIKKGIFKKTVDYVKAINVINFTLNQKETLGIVGESGSGKTSLVLAILKLITSSGKIEFNKTDLNSIKKNKLKSIRKNIQIVFQDPYSSLSPRMNVEEILNEGIDVHFPKYSISEKKQILKDILKETGMDYNRDHNKYPHEFSGGQRQRIAIARALILKPKILILDEPTSALDITIQNQILDLLQNLQEKYSLSYIFISHDMNVIRSVSDKILVLKKGRLIEYNSAENVFNKPKDEYTKNLISSVV

SEQ ID NO: 145349 - protein, 79 aa, Unknown
  Bacterial polypetide isolated from the Sargasso Sea
MSGGQQQRVAIARALAVRPKLLLADEPTGNLDESTASAVLTAMLDLVGRTGAALMVVTHSAALAGKMDRRVRLKGGVLL

SEQ ID NO: 145350 - protein, 543 aa, Unknown
  Bacterial polypetide isolated from the Sargasso Sea
MTVYRENPVALSITIARLTAREGMYFDSRLWGFTRSVTLRIFGAVAVGVLAVFFGIARLGLLGWLIIQVFEGAPVQDLVLPFIGVGVVMVVRGWLEYLRTMVAHNTAARVQVHLRQVVFDQVTRLGPAHFGLERTGDAIVAMIEGVEQLEIYFGQYLPQLAVSILTPFLIFAVVAFFDVPIALVMLGAALFTLIAPQIFHRWDSQKSLERGEAYKAFAAEFLDSVQGLATLKSFGQSTARARKLKDTAHALFKSTMWVLATNSLARGITDTGITLGVAVTLAFGAFRVADGEMSLGVLLMVLMLGVEVYRPLRDMRALMHNGMLAQSSSQTIFQLMDAKPMVNESPSPLVVDALEPTVALEGVGFAYPGGRRTTHEGLSFTVAAGERVGFVGPSGAGKSSIVRLLLRFYDPDSGTVKIGGHDLKDLRLEDIRGQIAVVNQDTYLFHGTVADNLRVGKPDATPEELEAACRAANAHEFVSLLPQGYDTVIGERGIRLSGGQRQRVAIARAILRDAPILILDEALSAVDAENESIIQDALDRLMR

SEQ ID NO: 145351 - protein, 124 aa, Unknown
  Bacterial polypetide isolated from the Sargasso Sea
ALKQLKQVQIDDQANKYPGQLSGGQQQRCAIARALCMEPKIMLFDEPTSALDPEMIKEVLDAMVNLAKAGMTMIVVTHEMGFAKEVADEVIFMDEGMIVEKADTKEFFANPKNDRTKLFLSQIL

SEQ ID NO: 145352 - protein, 674 aa, Unknown
  Bacterial polypetide isolated from the Sargasso Sea
MTDIIQKVKNLSIGFRSKKGEEILILKNISTNIKKGETVGIVGESGSGKSTLALAMMGYVKHGLYTIEGECQFNSSNLLKMKSKDLEKIRGRKIAMIPQNAGQALTPNLKIGYQIDEALQLHSDLDEKEREKKISELLNKVRLPSPETIALRYPHELSGGQQQRVAVAMALAGTPDLLLLDEPTTGLDVTTQAHVLELLNYIAKETGTSMVYVSHDLGAIAQVSDRIIVMYSGEIVLEGPSRDILKRPIHPYTHGLLKSIPKLSLAGLPESMPGSQPQPGIIQSGCSFFDRCNFSDENCKNNSPKLEFLKDLNTSVRCFNYEKLVNESQASQTVNKIKNKSQDKEILNLSEVSISYAKQKLLDQIFNRISDDNPTVKDININIKKGETIALVGESGSGKSTILKSIAGLLRTKDGLIRFDENRNLSSDLKERDPNDLRIIQLIFQNPDESLNPNHTVEEIIAQPLKLYFGLKGEELKKNIIDLLQKVRLGEFYTSRYPRQLSGGEKQRVAVARAFAAKPDIILCDEVTSALDVSVQAAVLNLLQQLKEDFGTTYIFVSHDLAVVRAISDRVAVLYQGRLCEVGPSNDVYKFPSHPYTEVLLGAVLEPDPDIKPKLVAEDIVEERPPEKGCSFQGRCSRIVGDICKKEIPPWQLTDSGNAIRCHIPIKELQKEQF

SEQ ID NO: 145353 - protein, 354 aa, Unknown
  Bacterial polypetide isolated from the Sargasso Sea
LVLRAEKLSKTFHVSGAPLRAVDDVSIDLASGETLGLVGESGSGKTTLAKLMLGLLTPDAGSVLELDGTPLAARVTRRNDEQVKSLQIVFQNPDSALNRAHSVKRLIGRALSRLTALRGAAIDERLATLTAAVRLPERYLGSRTRQLSGGLKQRVAIARAFAGEPRVVVCDEPTSALDVSVQAAILNLLADLQRERGVSYVFISHDLHVVRYLSDRIAVLYLGRLLEIGPAAAVFGGPHHPYTEALLSSVPTLDAHDSRARIRLSGDLPSAATPPSGCVFHTRCPRKLGAICEQQDPPFLEAGGDDSTQSSAHRIRCHIPVDELRALQAASRDGTGKATGRGSEDTPEDAARNE

SEQ ID NO: 145354 - protein, 233 aa, Unknown
  Bacterial polypetide isolated from the Sargasso Sea
MKFDKDVLSDINLNIDSGEFVSILGPSGCGKSTLLRLASNLAKPTKGVVDYISPKDLSIGFVFQNPTLMPWRTVMENITLPLELNKKKFSKEEALMWLARVGLKDKEKSYPNELSGGQMMRVSIARSLINGCNLLLLDEPFAALDEITRRKLEDDLLEIWEKEKFTVLFVTHSVSEAIYLSQRVLVLSSGPGKIVYEKNISQYISKEEFRESKEFQAINSEIFEKLKSGVNNE

SEQ ID NO: 145355 - protein, 263 aa, Unknown
  Bacterial polypetide isolated from the Sargasso Sea
ENLAFPLKVRKISQEDIEKKVDKALAMVSLGGFANRMPGQLSGGQQQRVAVARALVFDPAVVLMDEPLGALDKNLRESMQYEIKHIHESIGVTVVYVTHDQGEALTMSNRIAVFNDGKVQQLSSPDKLYEEPVNSFVAEFIGENNTFGGEVSEISNGTCKVKLEKGEIIANPISVKSVGEKTTVSIRPERALINPKDKMDNNQKGKIEEVIYHGDHTRVRLNLLGNSEFILKVPNSSQNLDIKLGNEINIGWNSHDARALDPK

SEQ ID NO: 145356 - protein, 117 aa, Unknown
  Bacterial polypetide isolated from the Sargasso Sea
MSDKIIQITEMNKWFGDFQVLKDINLEVEKNKKIVVCGPSGSGKSTLIRCINRLEEHQKGSIIVDGNELTEDTKDIEKIRAEVGMVFQQFNLFPHLSILDNCTLAPIWVKKIQRKKQ

SEQ ID NO: 145357 - protein, 206 aa, Unknown
  Bacterial polypetide isolated from the Sargasso Sea
MSIEVKNLSFSYNERPIVKNLSFSVSKNQIGLISGVSGVGKTSLFNIISGLKMPDSGTILLNNITLNDEGTNLQTEKRNIGYVFQDFALFPHISSKKNMQYAMSKKDENLFKDLVSDLNMDEHLNKMPHELSGGQQQRVALIRAILMKPSILLLDEPFSNLDEKNFLICTNMIKKIIKLFEIPCLLVSHNSSQNNVIGIDHEILIK

SEQ ID NO: 145358 - protein, 101 aa, Unknown
  Bacterial polypetide isolated from the Sargasso Sea
QQRVAIARSLCMNPKIMLFDEPTSALDPEMIKEVLDVMIELAETGMTMLVVTHEMGFATAVADRVIFMDDGQIIEQNNPKDFFEKPKHKRTKLFLSQILAH

SEQ ID NO: 145359 - protein, 124 aa, Unknown
  Bacterial polypetide isolated from the Sargasso Sea
MSEVGLDPSMSQRYPHQFSGGQRQRIAIARALSMKPKLIIFDEPTSALDVIVQKNILKLIVDLQEKYSLSYCFISHDLKVISSISHRIYVIKDSKIVETNTTDELISNPQSDYTKKLIESSFIV

SEQ ID NO: 145360 - protein, 380 aa, Unknown
  Bacterial polypetide isolated from the Sargasso Sea
LTGIRVVQAFSHEVFDKIKFSNRVESAFDTAVERVRKRALLTAVVIAFIFGAVAVVLWIGGRDVLAGRISGGELSAFVFYAIIVAGSTGALSEVVGELQRAAGAMDRLTELLLVSSNIKIPSEPKELPEKVSGAIKFTGINFYYPSRPGQLALDDFNLEIKPGETVAFVGPSGAGKSTVFQLLLRFYDPSSGDIKLDDISLDQTDPRTVREQIGLVPQDGIIFSENVLENIRYGRPEASKAEIKSASKSANAIDYIEELPNGFETNLGEKGVQLSGGQRQRLAIARAILRDPAILLLDEATSALDAESERFVQRALDSIMVGRTTLIIAHRLATVLSADRIIVMEKGRVIASGGHDKLLKTCPLYARLANLQFDLNTSTK

SEQ ID NO: 145361 - protein, 227 aa, Unknown
  Bacterial polypetide isolated from the Sargasso Sea
MLRFEQVTKSYSGGFVALDRVSFHLEKGEMAFLTGHSGAGKSTLLKLISLIERPSTGKVFINGVDLSRVNKGQVPYVRRDIGMIFQNHKLLMNHSVFDNVALPLVIEGFSGKDMTKRVHAALDKVGLLDKVRCLPHTLSGGEQQRVGIARAVVNRPPLLLADEPTGNLDPDLSKDIMNVFEAFNQVGVSVLIASHDLSLLARMRYRTLTLKNGRMINDGLTSYGADE

SEQ ID NO: 145362 - protein, 279 aa, Unknown
  Bacterial polypetide isolated from the Sargasso Sea
MVFQNYALFPHMTVYENLAFPLKVRKVPKDEIDKKVDKALAMVSLSEFGQRMPGQLSGGQQQRVAVARALVFDPKVVLMDEPLGALDKNLRESMQYEIKHIHESIGVTVVYVTHDQGEALTMSNRIAVFNDGKVQQLSSPDKLYEEPVNSFVAEFIGENNTFAGEVTDISKNQCKVKLGNGTEILANPIRVKAKGEKTIVSLRPERAIIDPKENMQNKHKGKIEEVIYHGDHTRVRVNMLGNSEFILKVPNSSARMDIKLGNEINIGWDSHDCRALDPK

SEQ ID NO: 145363 - protein, 540 aa, Unknown
  Bacterial polypetide isolated from the Sargasso Sea
MFKVFRTPEFKKALSFYFEGIKENKKHFYISISSAVLWCFLVVLHPYIIKRVVDDGILTGNARIIVILLSSLIIIGYTRAISIGTRRYFGMSVSYSVEAGIRNNIFSHMQRLAFQYHDKVPTGELMARASSDASQVRLAYAIAPLASANLFLLFILSITLLSISLPLGSVVLLSIPGVLWVGAKFAEKAMVVSLRVKEAEATMTTEVEEQLGGIRVVKAFGNENFASDKVDSAIDNIYEKSLNYLNLRTKFVPIFELIPMIITLFVLVLGGYLSVNEFISLGDFIAFNQYVFLLMWPLRITAWFLSEIPGSISAANRILELLNEKPEIVNKKDLQKLPIDGNGTIKFNKVNFQYGNEKIFNDLSFSVEGKKTVAVVGSTGSGKSTLGYLIPRLYQIDSGKIEIDGVDINNLDLSELRNSVSLAFQESFLFSNTAKENIAIGLKDATQEEIENAANVARAHEFIAELPEAYETTVGERGYGLSGGQRQRVALARAILRNPRILILDDALSAVDASTEEEIRNELNSAMKDMTTLIITNRVP

SEQ ID NO: 145364 - protein, 227 aa, Unknown
  Bacterial polypetide isolated from the Sargasso Sea
MNVIEVNNITKHYLLGTQTVEALRGVSFGIKQGEFIAIMGPSGSGKSTLMNIIGCLDTPTNGTYHLNNKEVSTLEGDELAGIRNKEIGFVFQNFHLLARNSALDNVMLPLKYAGFNKQDQLDKAKDTLSKVGLESRMSHQPSELSGGQQQRVAIARALVNNPSILFADEPTGNLDSQTGHDVMQLFHNLHQQGQTIILITHENEVASEAERVIYIRDGLVESDTRKD

SEQ ID NO: 145365 - protein, 187 aa, Unknown
  Bacterial polypetide isolated from the Sargasso Sea
MKTLKIEELSKNFGSTEVLRKINLEIDEGNFLVLLGPSGCGKSTLLNIIAGLETINEGNVYIDDYNVSKVEPKDRNIAMVFQSYALYPSMNVRENMIFGLKQAKVSKEKIEEQLEKVSKFLQVDALLERKPSQLSGGQRQRVAIGRALVREPRIFLFDEPLSNLDAKLRVEMRREIKKLHQQLKTTV

SEQ ID NO: 145366 - protein, 575 aa, Unknown
  Bacterial polypetide isolated from the Sargasso Sea
MKENNLKKLFLYSQKQDTKIKRGIIYSILNKLFDLAPPVLIGVAIDIVVEGSDSFLGNLGYEDRRQQLIVLAVLTFVIWGLESTFDYVAAVTWRNISQDIEHKLRTETFHNVLDLDLEFFENKSSGRLMAILNDDVNQLEKFLDTGANKLLQTMTTVLVIGGTFIYISPLIALFAFIPIPIIIFGSFKFTKTIAKRYTKIRNTIESLNANLSNSLTGILTVKSFNREGKETERITKSSEEVKAANYHAIKLSAAFIPIIRIAILFGFTATLLIGGFMALDGQIKVAMYSVLLFITQRLLWPLTELGDTFDLYQRAMASFKRITTLKDTKPKITNGNNELKNFENSIVFDKVNFSYVEGFTVLDNVSVEINKGQTVAIVGSTGSGKSTMIKLILRLYDVTEGDIKFDHINIKDLDLKSLRNNIALVSQDIFLFEGTVFENIAYGNLEASEEEIWEAARLSESDEFINQLPNKEHTIVGERGQKLSGGQRQRISIARAILKNPEILILDEATSAVDNETEAAIQRSLDTLKEGRTVIAIAHRLSTIRNADKIYVLEDGEIVENGTHDELVTIGKVYQ

SEQ ID NO: 145367 - protein, 233 aa, Unknown
  Bacterial polypetide isolated from the Sargasso Sea
MSKNKMIINVKDIKKSYTVGTQEVNALRGINLSVEKGEFISIMGPSGSGKTTLMNIIGCLDTPSSGEYELNGSLVSKLEDDELARIRNKEIGFVFQSFNLLAKNSVLENVMLPLKYAGFEKSEAVKKSNEVIDKVGLSDRLAHTPAELSGGQQQRVAIARALVNKPSIIFADEPTGNLDSKTGKEVMTIFKELNASGQTIILITHEESIANQSNRIITIKDGLIKSDNRGTHD

SEQ ID NO: 145368 - protein, 164 aa, Unknown
  Bacterial polypetide isolated from the Sargasso Sea
MPHLAVNSVKAKYATVEVLKGVSFSLEKGEVIALVGPSGSGKSTVLRTLVGLTPPSSGRIEIHDNEIDYRNSASLRSARDQMAIVFQQYNLFQNMTVLRNVTLAPQKIKKRPAEEVRVEAERLLQLVGLAEKINEYPDQLSGGQQQRVAIARALALKPEILLLD

SEQ ID NO: 145369 - protein, 452 aa, Unknown
  Bacterial polypetide isolated from the Sargasso Sea
KSNSRPLYRFANEYSDETADEMAKLQDQIDAENLWDLDSQIDVSMEALRCPPDDANVTTLSGGEKRRVALCKLLLEAPEMLLLDEPTNHLDAETIAWLQQHLIDYKGTILIVTHDRYFLDDITGWILELDRGRGVPYEGNYSSWLEQKAKRLEQESREDKTRQKTLERELEWMRQGQKARQAKQKARINAYNDLATQSEREKISRAQIVIPNGPRLGGKVIEVENLNKAMGDKLLIEGLSFSLPPGGIVGVIGPNGAGKSTLFKVLTGQESEDSGSVSYGDTVQLSYVDQSRDDLKDGETVWEAISGGAEVIELGDAQVNSRAYCSSFNFKGGDQQKKVSLLSGGERNRVHMARLLKSGGNVLLLDEPTNDLDVETLRALEDALVDFSGCAVVISHDRFFLDRICTHIMAFEGDAHVEWFEGNFEDYEEDKKRRFGPDALEPKRIKHKKFTR

SEQ ID NO: 145370 - protein, 391 aa, Unknown
  Bacterial polypetide isolated from the Sargasso Sea
MAKIVCRGLTKRYDGGQPVLHPLDMEIDDGEFVVLLGPSGCGKSTMLRMIAGLEGITGGELAIGDTVVNDLPARERNVAMVFQNYALYPHMSVYDNVAFGLRRLKVPAAEIDRRVREVAAMLNLDTLLDRKPRAMSGGQQQRAAIARAMIKTPEVFLFDEPLSNLDAKLRAQLRGDIKRLHQRLKTTTVYVTHDQLEAMTLADRVILMRGGQIEQAGTPSDLYHFPHTLFAAGFIGTPAMNFISGTVERAAETCFVQVQGQRWALAGPRFATLQSGQAVKLAIRPNYLKVASADDEFDSLRLRGKVELIELLGAEALVTFEFAGERLAALMPASDLPEVDSVVTFQFKVADLHVFDTRTEQNVSLPVPKAARTMLAGSPHQNTGVQGAALH

SEQ ID NO: 145371 - protein, 261 aa, Unknown
  Bacterial polypetide isolated from the Sargasso Sea
MQKGLGITVQDLSWSVKQKKQKILYPLSFELSPRKILGVVGPNGAGKSTLLRLLYRYYKPTTGKVKIDGIDIWKLTSRQVACSIATVLQENLSDFSLTVKEIVTLGRTPYSKWLSNSNSKNDKKIVQSSIDRLSLNKFENRHLNTLSGGERQRVMIARALAQEPDILILDEPTNHLDIRQQLEILNLLKDLSITVITSLHDLNMARSNCDEILLLKDGYALGFGKPNLILSESNISEAFRVKACHELLTPSNSKQITFHLH

SEQ ID NO: 145372 - protein, 223 aa, Unknown
  Bacterial polypetide isolated from the Sargasso Sea
MNKTILEVSNVTKKVTSPEGELTIVNDISLSLEEGVFASILGPSGSGKTTLLAIMAGLDLPSSGSVKLLDKEITSLNEDNRAQIRSKDVGFVFQSFHLLPRLSALDNVMMPLEILGAKDAKERALKALDEVGLSKRTGHVPHQLSGGEKQRVAIARAMVKAPGILFADEPTGNLDQSSTDNILELLLGINKQTKTTLVVVTHDQQLASRSDMVFELQEGKLKC

SEQ ID NO: 145373 - protein, 359 aa, Unknown
  Bacterial polypetide isolated from the Sargasso Sea
ILDVKDRFKMSVIMITHDLGVVARTCDRVLVMKDGELQESGDTEAIFYSPNAAYTKELLEKSKEINLDDQQKYTETQETSIRNNLVKSSKAKVNFTLPKKTLFAANNVLTAVNEISMEALDGEVLGIVGESGSGKSTLAKTILGLQKLTSGQVEVFGEKLTQINKKELKEIRKKMQVVFQDPFSSLNPRMTVFEILKEPLDSFFPSMTKESAQKDIEDGLMEVGLTSDYLGRYPHELSGGQCQRVAIARALMPKPQLLICDEAVSALDASIRGEIIDLLLRIKSEKKLTMIFIAHDLAVVRKICDRVIVMQSGKIVEQGPTEKVFFEPEKEYTANLLSAVPVPDPRKEKEKYIQRTQAD

SEQ ID NO: 145374 - protein, 528 aa, Unknown
  Bacterial polypetide isolated from the Sargasso Sea
MKNIVEVKNLSIDFNVRNGTFRAVDNINFDIQNNKTLALVGESGSGKSVTAMSIMQLLPMPQASYSENSSIKFESKEIINASKQDLLSLRGNIISMVFQEPMTSLNPYHKVGNQITESVLLHSKVSKKEAKDEALNLMKLVEIDDVERRFNSYPHELSGGQRQRIMIAMALVNKPKLLIADEPTTALDVTIQAQILDLMSKLKKELGMSILFITHDLGLVREFSDQVCVMQNGHIVEKGNTVDVFKNPEHSYTQKLLNAEPQPKLDINTEEIPLIKIENVDIFYDMPSINFFNKNRFHAVKNASLNIYKNTTIGVVGESGSGKSTLGKAIANLIKYEGDILYDGKDIRYSSKEIKKHIQIVFQDPYGSLSPRMTVGEIVGEGLGVHFNLTKLETQKRIDKVLDDVGIEIDAKNKYPHEFSGGQRQRIAIARSLIMNPAFMILDEPTSALDRSIQIQVINLLKDIQNEYELTYLFISHDLKVIRSMSDYIFVMKDGKIVESGFSNQVFEYPKEKYTKKLLSAAIRYASD

SEQ ID NO: 145375 - protein, 220 aa, Unknown
  Bacterial polypetide isolated from the Sargasso Sea
MSEPVIKCEAVYKIFGENAKKMLQESNGNVDAKTFQENGCIVGVNNASFEVSKGEMLVVMGLSGSGKSTLLRCISRLTDATGGKIFIEGQDLLQLNNKELIELRRNKMGMVFQSFALLPHKTVVENIAFPLQIKGIKTEDSITKAMDMVKLVGLDGRENYFPRELSGGQQQRVGIARSLAVEPDIWFLDEPFSALDPLIRKEMQDEFLRLQDKLQKTIMF

SEQ ID NO: 145376 - protein, 609 aa, Unknown
  Bacterial polypetide isolated from the Sargasso Sea
MFKRFESWVEALPDGEPTKPPTGVYAFCRHYTKGYELPLILMSVLTALIAMLEVSLFGFMGQLVDWLVKKSPETLFQDEGSTLLLMGLMVLVVMPLLVLFHALIMHQTLLGNYPMSIRWLAHRYLLKQSVSFYQNDFAGRIATKVMQTSLAVRETVMKLLDVLVYILVYFTSMLVMVASADVRLVIPMLIWLALYIGLQWYFVPRLKTVSTEQADARSTMTGRIVDSYTNITTVKLFAHTDKEAEYAKASMRSFLDTVYRQMRLVTGISVSVQVINYMLAFSIAAVSILLWSDNAISVGAIAIAVSLALRLNGMSQWIMWEISSLFENIGTVTDGMNTLSKTTLIQDSPNANTLVVEQGRIDFNQVSFHYGEETGVIEDLNLNIKAGEKVGLVGRSGAGKSTLVNLLMRFYDVEKGQICIDGQDIKTVKQDSLRSQIGMVTQDTSLLHRTIRENILYGNPDASETQLEHAIKQAQAHDFINELTDPNGNHGLDAQVGERGVKLSGGQRQRIAIARVLLKNAPILLLDEATSALDSEVEAAIQESLYELMQGKTVIAIAHRLSTIAAMDRLIVLDQGRIVEQGTHQELIAAGGIYAQLWAHQTGGFLGIE

SEQ ID NO: 145377 - protein, 118 aa, Unknown
  Bacterial polypetide isolated from the Sargasso Sea
MSSLILQGVSYHYNGTKVIENLDLTVGKDEIVCLLGASGCGKTTTLKAIAGLVEAKHGSVFIDGKLVSDGSTFIAPEHRNIGMMFQDYALFPHLSVANNIAFGLGKMSQSEKQQRVDE

SEQ ID NO: 145378 - protein, 234 aa, Unknown
  Bacterial polypetide isolated from the Sargasso Sea
MKTDTKTVISINDISKVYEGPPPVKALDGVSLNVKEGDLVAIVGQSGSGKSTLLNMIGLLDSVTDGSIEIEGKDISDLTDNELSKFRGEKIGFIFQSFFLLPGLTAQENVAEGLLYQGISRSERLEKAGDVLEQVGLGDRLSHLPKELSGGQQQRVAIARALVQDPAFVLADEPTGNLDKESGINILNILKELNDQGKTVIMITHNQEHANMFKKVIELVDGKIVKNEKKKTKN

SEQ ID NO: 145379 - protein, 1192 aa, Unknown
  Bacterial polypetide isolated from the Sargasso Sea
MTFIIDQQAVDSGGVINSVIVTGVSSLTSAVVTDVSDDGNDSDGNTEDDPTVVTITATPSILITKTASTTDLNSNGKIDLGDRITYSITIVNDGDVTLTDVSLVDTLTDGNSSTLNLDSGPSFVSATTSSTSSTLQVSGVSTYTAVYNITQQAVDSGSVINIAKVTASSPGQSGNVSDTSDDPNTGAANDPTVVSISASPSLEVLKRASITDNGDGANGKGDIIEYTITIQNKGNVTLTGLTVSDTIVDGNGATLSLSNGPYFSGSNQGSAQGSLKVSETATYIAFYIVEQQAVDSGSVSNVAIAIASSPGQSNNVSDTSDDPTTGAANDPTVTSITASPSLEVTKTSSVNDTNSNGKNDQGDIITYSIKVENKGNVTLTGLTISDTLTDGNGGSLSLTSGPSVEGVGGSLGSPPGTIKPGEVQSYTALYVISAQTASTPSVINSAVAIASGPGQSNNVSDTSDNGNDIDGNTVDDPTVVIISSNPSIEATKTATVSDVNSNGVNDPGDIITYTIVVVNTGNVTLTGITLTDTIKDDNNNVLSLDGGPTFVSSSGSSAAGTLASSESATYTASYTIAPAAAFSGSVDNRVLVTASSPGNTNNVTDYSDNGNDSDGNIYNDWTEVETSAEASINVIKSATVSDTNANSKTDAGDIITYTIVVSNTGGVPLQGLTLNDTLKDGNNGNLALDSGPTFVSATTSSTSSTLAIGGVVSFTAVYTISPDASYTGSIKNQVVVQATGQGGSGIVNDTSDDPNTAAVDDPTIVTIDPLAAIEVTKTASVTDEGDGNIGAGDVINYVITIENKGNVTLTGLTISDTLTDGNGGVLPMSSGPSFSGSNRGSNTGTLVAGETATYIAYYIISDLAANTGSIINTVSATASSPGNSNDVSDISDDGIDNDGNTVSDTTVVEITPLPSMEITKTATVSDVNSNSVNDQGDIITYTIIVSNTGNVTLSGINLTDTLTDANAGSLSLNSSPTFVSATTSSTSSTLLVGGRTTFTASYTISQLAANTGSIVNTVSGTASSPGNTNDVTDVSDDGDDADGNTSNDSTVVITISDASIEVSKTATVTQNDGNATNDTGDVIVYTIVVTNTGNVTLSNLNLVDTLTNGNGGSLTLSSGPTFVSATAGSTSKTLIASGVASFTAQYTISQAAANTGSVNNTVTVTGSSPGQSNDVTDVSDDGIDNDGNTTND

SEQ ID NO: 145380 - protein, 190 aa, Unknown
  Bacterial polypetide isolated from the Sargasso Sea
MSKKVASLERISKTYGKDDLTVKALDCINLEIYKGDYLAVMGASGSGKSTAMNIIGCLDRPSEGIYKLNGTPVENLSDDALAEIRNQKLGFVFQQFHLLSDATALENVILPMIYAGIEPEQRLERGKNALKKVGLSERMNNRPNQLSGGQQQRVAIARAIINNPAILLADEPTGALDSKTTEDVLNLLTN

SEQ ID NO: 145381 - protein, 141 aa, Unknown
  Bacterial polypetide isolated from the Sargasso Sea
MKADHRVLLLSPASSPVELRGLWHRYGDSAESWTLRGVDLQLSEGELIGLLGPSGCGKTTLLRLIAGFETPSRGSVHLQNRPVAGEGRWLPPERRGVGMVFQDYALFPHLTAWQNACFGLRPGQDDSRASWLLDLLGLEGL

SEQ ID NO: 145382 - protein, 195 aa, Unknown
  Bacterial polypetide isolated from the Sargasso Sea
LSALDARVRASLRQEIRALHQRLGITTILVTHDQEEALSMADRIVVMDHGSIEQVGTPEEIYSTPASPFVADFIGVMNFMEAEVVASGTIRVGETSLSCDTTNVSSGDKARMTVRPEDLRCHTTTVDLPNGLPVHVETLEFLGSFCRLKLKGPEGFSTLRADLSLQQVHQLKAAPDVPLTIELPPDSLLLFPDIQ

SEQ ID NO: 145383 - protein, 226 aa, Unknown
  Bacterial polypetide isolated from the Sargasso Sea
MSKLECKDLSKSFSISGDTIEVINNINLSITEGDKVAITGKSGAGKSTLLQILASLDSPTSGRVYLDQTDFASLSNDGLSQIRLHNFGFVYQFHHLLDDLSVEENISIPLSLKNELNSESKTLVNKIMKELAIYERKNHLPWKLSGGEKQRVAIARAIVTKPKFLFLDEPTGNLDKKNASIIQSLIFEMSDRYGIALISATHDNDFISSFENIYEISGTKLNKIYE

SEQ ID NO: 145384 - protein, 603 aa, Unknown
  Bacterial polypetide isolated from the Sargasso Sea
MVSSRSLETEAEPDTEVQVPAKKIGPLFSLLPFLTPYASRWLLTFIALTVAAVATLTLPVAFRYLIDAGFSSDQAGHIDQYFLALFGLSVVLAVATALRFYYVSWLGERVTADLRSAVYAHVVKMSPQFFELTKTGEVLSRLTTDTTLIQAVVGTSLSMGLRNSFLLVGGLVMLFVTSAKLATYILLTLVLVILPIFLFGRKVRKLSRDSQDRIADASAVAGEVLNAIPTVQSYRQEQRETARFNGSVETAFTTALSRIRARSMLTLVAIVLVFGAISFVLWLGAQAVLANEMTGGELSQFILYAVLTAGAIGAIAEVWGDLQRAAGAAERLMQLLNVQSPVVERADPLPLVLPEHNLAGSGIEFNNVNFSYPSRPDTLALQDFSLQIKPGEHIALVGPSGAGKTTLFQLLLRFYDPQSGQVKFNGTDLKDLRLTDARQPFGIVLQDTVIFAGSVLDNIRYARPEASEQEVQDAAKMAAAHDFILALPEGYNTYLGERGVRLSGGQRQRISIARAILSNPSVLLLDEATSALDAQSERQVQQALDNAAQNRTTLVIAHRLATVLAADRIVVLEAGQIVAQGTHTELLQSSELYARLAALQFSH

SEQ ID NO: 145385 - protein, 139 aa, Unknown
  Bacterial polypetide isolated from the Sargasso Sea
MSSSIINIENVNKWFGDFQVLKDINLEVQAKQKIVVCGPSGSGKSTLIRCINRLEEHQEGKIIVDGTELSENTKNIEQIRAEVGMVFQQFNLFPHLSILDNCTLAPIWVKKMPKKQAEELAMQQLEQVQIADQAHKYPG

SEQ ID NO: 145386 - protein, 335 aa, Unknown
  Bacterial polypetide isolated from the Sargasso Sea
GTKAVHETSLSIDEGEFMVFVGPSGCGKSTLLRMVAGLEDITEGDINLDGKLMNEVDPSERDVAMVFQNYALYPHMNVYNNLAYGLKNRGIDKQTIEQKVNDAAKLLQISDYLQRKPSMLSGGQRQRVAMGRAIVRNPKIFLFDEPLSNLDAKLRIQMRLEIKKLQQKVGVTSIFVTHDQVEAMTLADRLAVINNGIIEQLGTPIEIYDNPKSLFVAGFIGSPQMNFLDGNLKNKILSTEGFEIKDINSDFEGEVTLGIRPEHLSQNENGLINLKVDLVEQLGSDNLVYGQLKDKKDFCYRCPGNLTIEKGADLSLNIENSKYYIFDKSTGKRVN

SEQ ID NO: 145387 - protein, 263 aa, Unknown
  Bacterial polypetide isolated from the Sargasso Sea
MENKNSDEIIVKFEDVTKQYGDLIVLDKLNLEIKKNEMVSIIGPSGSGKTTVLRVLMTLEKINGGLIHLDGEPLTHMNSEGKLTEANEKYLRERRSKIGMVFQQFNLFPHMTALQNCIEAPVEVLGMKKEEAEERALELLELVGLTDKKDQHPSRLSGGQQQRVAIARALAMRPKVMLLDEITSALDPEVVGEVLNVIRSLNKEHNLTMIMVTHQMGFAREISDRVCFFNEGKIFEQGPPEKLFGNPQNERTKQFLHAVLDAN

SEQ ID NO: 145388 - protein, 179 aa, Unknown
  Bacterial polypetide isolated from the Sargasso Sea
MTEIILKDIFKSYDQTEVIHGVDLKVESGKFLVLVGPSGCGKSTLLRIIAGLERITSGEILIDGNEVSNIPASERGLAMVFQSYALYPHMSVFKNMAFALENLKIDKKTIEEKVNSAAKLLQIEEYLQRKPKALSGGQRQRVAIGRAIVRDPKAFLFDEPLSNLDAELRVTMRKELSAL

SEQ ID NO: 145389 - protein, 103 aa, Unknown
  Bacterial polypetide isolated from the Sargasso Sea
KEHVTTALDVVGLSDRGGHKPNELSGGQQQRVAIARALVSDPGILVCDEPTGDLDRDTATEILELLQILNRDHGKTILMVTHDPVAAESAKRTLHLDKGKLTS

SEQ ID NO: 145390 - protein, 197 aa, Unknown; identical to SEQ ID NO: 145086
  Bacterial polypetide isolated from the Sargasso Sea

SEQ ID NO: 145391 - protein, 89 aa, Unknown
  Bacterial polypetide isolated from the Sargasso Sea
MQDIIAILGMDELSDEDKLVVSRARKMQKFMSQPFFVAEQFTGIEGRYVKLEDSIAGFEAILNGEVDDLPENAFSYVGSIDEAIEKGKK

SEQ ID NO: 145392 - protein, 196 aa, Unknown
  Bacterial polypetide isolated from the Sargasso Sea
NIFGHNVLQKTQKTKTSLIRRKMQMIFQDPYSSLNSRMTVEDIISEPIRFHRSTGNSSETLKVVRDLISFVGMPITSLKKYPHEFSGGQRQRISIARALASRPEILICDEPTSALDVSVQANILNLLKDLQEELSLTMLFISHDLPVIRQMCDRVAVMQNGKICEIAKTDKLFDHPEHDYSKHLLGLMPRMDLFRL

SEQ ID NO: 145393 - protein, 494 aa, Unknown
  Bacterial polypetide isolated from the Sargasso Sea
RRDKAVQRVLAQMQLDGGAEFNCLSSGMKRRVLLAQAIVDRPDVLLLDEPTNHLDIDSITWLEGFLKAYPGTLLFVTHDRAFLQAIATRILEIDRGHLFDWTCDYQTFLERKQAALEAEEKQNAQFDKKLAQEEVWIRKGIQARRTRNEGRVRALKKMRAERSQRRERQGTLQMQAAEADRSGQLVVETRELTFAYDGPPVVRDLSTLITAGDKVGIIGPNGAGKTTLIKLLLGELQPTDGKVRRGTKLEIVYFDQLREQIDDRLSILENVADDRKTVIVNGRSRNVYSYLQDFLFTPDQARKPASTLSGGEKNRLLLAKLFQQPANLIVMDEPTNDLDAETLELLEEVIGAFNGTLLLVSHDRAFLNNVVQSTLVFEGNGFVKEYTGGYDDYLAQHQPAPNAAKPTRQPKPKPAGDPDKPKKLSFKEKRLLESLPGRIAELEAEQETLQQQINDPDFFKRPHEETTAVTERLEALENELLEIYGQWETLDARA

SEQ ID NO: 145394 - protein, 140 aa, Unknown
  Bacterial polypetide isolated from the Sargasso Sea
IGVVFQQLNLIPYLSVLQNVLLVSAFAKKIPQAEQRARYLLQKLGLDKQLWQAPANQLSVGQQQRVAIARALLTQPALLIADEPTSALDHKHRDGFMQLMLSEAELCGTTVVFVSHDPALRSYFKFELDMEQLQQGVQPC

SEQ ID NO: 145395 - protein, 247 aa, Unknown
  Bacterial polypetide isolated from the Sargasso Sea
MKNSSEEIIVKFDQVTKQYGDLVVLDKLNLDIKKNEMVSIIGPSGSGKTTVLRVLMTLEKINGGVINLDGEPLTHMNENGNLIEASEKYLRERRSKIGMVFQQFNLFPHMTALQNCIEAPIEVLGLKKEEAEERALDLLELVGLTDKKDQHPSRLSGGQQQRVAIARALAMRPKVMLLDEITSALDPEVVGEVLNVIRSLNKEHNLTMIMVTHQMGFAREISDRVCFFNEGKIFEEGPPEKLFGDPK

SEQ ID NO: 145396 - protein, 263 aa, Unknown
  Bacterial polypetide isolated from the Sargasso Sea
MRDVHLSYGTTPVLRGIDLDVHRGQAVSIIGPSGSGKSTILRCITGLLRPQRGLIDVDGTRVDRLASERDEIALRKRVGFVFQQYNLFPHLSVLDNLVAAPVRILGRDRAEAVRTAHALLERVRLADKAHAYPGELSGGQQQRVAIARALAMQPDLILFDEVTSALDPETVGDVLAVIRDLVRDGMTCVLVTHEMRFAEEISDVVYFTEAGVIVEHGPATQLFRAPQSARTRAFLAHALGPTGSPHPSRDSAPIALDLTRFAV

SEQ ID NO: 145397 - protein, 223 aa, Unknown
  Bacterial polypetide isolated from the Sargasso Sea
MKEVAKLIQVSKSFRDGEQRHTVLQAVDLTLHQGETIALTGPSGSGKSTLLNLIAGFETADSGQIVLNHQSTTKWQDKQWSEFRRTHLGVVFQQFNLLTPLNVKNNIGFSLHLNGDSWNPWCDYLVEKLGLAALLNRQVEALSGGQQQRVAIARALAHNPSLLLADEPTGNLDDESGKQVMSLLCELAKESQTSILMVTHSEECAAFMNKRWHLSHAAVSISG

SEQ ID NO: 145398 - protein, 317 aa, Unknown
  Bacterial polypetide isolated from the Sargasso Sea
PRSDVKLVRFPLVSYIEDAGAADTSIDLKTHWLGQSQDERAYEGALLRVENVDLKFVTKDSLFPSRRQYVRACNNISFEIFEGETFGLVGESGSGKSTIARAITGLYPPDTGKIFFEGIDLTALKGEHERRPLRRQMQMVFQNPYSSMNPRMKVRDIIAEPIRFHKLAGSESQIEGIVGDLLDHVGLGRGAGVKYPHEFSGGQRQRISIARALATRPRFLICDEPTSALDVSVQAQILNLLKDLQQELGLTMLFISHDLPVIRQMCDRIGVMQHGHLVEVAETEKLFTNAEHEYSRKLISLMPEFKGMSREGLEIAS

SEQ ID NO: 145399 - protein, 167 aa, Unknown
  Bacterial polypetide isolated from the Sargasso Sea
MGKIIELKNVNKWFDKFQALKNINLEVNQQEKIVICGPSGSGKSTLIRCINRLEEHQDGQIIVDGNEISENTKDIEKIRAEVGMVFQQFNLFPHLSILDNCTLAPIWVKKMPKKKAEEIAMNNLERVQIADQAKKFPGQLSGGQQQRSTLARALCMEPKNNVIDEPT

SEQ ID NO: 145400 - protein, 343 aa, Unknown
  Bacterial polypetide isolated from the Sargasso Sea
CVQGLNYLLVFSIATLAIWLWSVNAVTVGSIAIAVSLALRLNGMSQWIMWEVSALFENIGTVADGIATLSQPQQIVDIATAKPIEVPQGQIDFKQLNFNYGKAAGEHGPVIDGLELSIKPGEKVGLVGRSGAGKSTLVNLLLRFYDVNSGQILIDGQDIKTVSQESLRAHIAMVTQDTSLLHRTVRENILYGRPGATEAEMVEAARLAEADAFIQELTDPKGNSGYDAQVGERGVKLSGGQRQRIAIARVLLKNAPILILDEATSALDSEVEAAIQHSLTQLMIGKTVIAIAHRLSTIAAMDRLIVLDQGRIVEQGSHQELIAKGGIYAQLWAHQTGGFIGVE

SEQ ID NO: 145401 - protein, 205 aa, Unknown
  Bacterial polypetide isolated from the Sargasso Sea
MNLIIKSLDFSYQNEEVFKDLNLNFNSGVLNLVSGPSGSGKTTLLNLIAGLEKPSSGLIMLDNNIQSSIDKFVEPEKRNIGFVFQDFALFPHLNIKQNIEFSENGNKELFNTLIDNLSIKNHLSKYPHELSGGQQQRASIARAIYSEPKILLIDEPVSNQDKNNKIEIIKIISDFAKDREIVCILVSHEEINSIAQVETRSYTLS

SEQ ID NO: 145402 - protein, 245 aa, Unknown
  Bacterial polypetide isolated from the Sargasso Sea
MKNLVEVKNIKKNYGKNEAVKGISFNIKEDEILGLLGPNGSGKTTTIGMLLGLLKPTSGEIFINGQKLESNRIEILEQINFISPYIELPKKLTVKQNLTVYGKLYKINNINERIEFLSEKLRLERLLDSITGELSSGQKNRVSLAKALINEPKVLLLDEPTASLDPEVGDFVRSFLEDYKKEKKISILLASHNMNEVTRLCKSILMMKDGIIIDEGNPEELINKHGRNNLEEVFLKLSRSKNELN

SEQ ID NO: 145403 - protein, 572 aa, Unknown
  Bacterial polypetide isolated from the Sargasso Sea
MSFLEVKNLNISYPTRKETIVASKNVEFSLERGEILGIVGESGSGKSTIANAIINLIDPPGEITDGSIKIDNIELRSNEEIIQNIRGKKIGFVFQDPQTSLNPLFKIKDQLIETIQAHLNLSYQDSLKKSIQLLKEVGIENAEKRIEDYPHQFSGGMRQRVVIALAISCEPDLIIADEPTTALDVSIQYQILELLKDLTKKRNLGVIIITHDMGVIAETTDKVIVMRYGHIVEQGETKELLTNPKSTEARSLVISVPPTNKKINRFKLISPDGNEITSSSKDLTKNIIKTWGIRENKNEKLLKLEEVTKVFDDNSLGSGFSFISNKSSNDKIVKAVDNVSFELFEGETLGLVGESGSGKSTIAKIITGLISPNKGDLIYNNEPLYNSNKKYQIHNSRGQIQMIFQDPYSSLNPRFKVKDIIAEPIKFFQKNISNNELLQNVYDLIDIVGMTRQSLDRYPHEFSGGQRQRISIARALATRPRLLICDEPTSALDVSIQAQILNLLKDIQDELHLTMLFISHDLPVIRQMCNRIIVLKNGAVCETKDTEELFNNPEHEYTKELIRLMPKIESII

SEQ ID NO: 145404 - protein, 212 aa, Unknown
  Bacterial polypetide isolated from the Sargasso Sea
MLEFKNINFSYNNHQVINDFSLKVPHRKVTSILGPSGCGKTTLLRLLSGLEQIQDGQIMFENNLLSANSFDLPPNKRKIGYVFQDCALFPHLNVIENIYYGISKNEEEIKKKVDFILKENNFYKYSERYPHELSGGQKQLVALFRAIACEPKIILMDEPFSNLDTRLRESLRDQVLHILKANEITTLLVTHDADEAMFMSDFIALLNKGEVT

SEQ ID NO: 145405 - protein, 252 aa, Unknown
  Bacterial polypetide isolated from the Sargasso Sea
MSFLSLENVTISFGGIRAVKSVSLDIKEGEIFALVGPNGAGKSTIFNLISRLYKQNEGNIFFDGKSLNQLKPFDMPDIGIARTFQNIELFGNATVLQNLLVGTNVRKSSNFLSEILFTRSVRKEEVTSRVMVEEVMDFLDLQQYREKYIMGLSYGTRKIVELGRALALKPKVLLLDEPASGLSAEETEDLAFWIEDIKKIMGITVLMVEHNLNLVNKVADRVAALVDGEIISVGNPKSVQSDPKVIEAYIGV

SEQ ID NO: 145406 - protein, 253 aa, Unknown
  Bacterial polypetide isolated from the Sargasso Sea
MIECKNIGKFYGTLRALSGINLRLYEHEFLSILGPSGCGKSTLLRLIAGIEVPCQGQIFLDGKEISGRKIIVPPERRKFSMIFQDFALFPHLSVNDNVRYGASGSKKEKQQRVNELLELVSLPHLAEKMPHQISGGEQQRIAVARALAPRPSLILMDEPFSNLDYQLRQQLRRDIKEILQHEGVATILVTHDQVEAITFSDRMLLMQKGAIVQAGTPSEIYQRPQTIWASSFIGEANHLIVEWQNDSLQTPFG

SEQ ID NO: 145407 - protein, 185 aa, Unknown
  Bacterial polypetide isolated from the Sargasso Sea
KVLINGISIEEKRVELLNNLNFISPYIELPKKLSVMQNLEVYGRLYDVKNLRSKIEELTEKLRLNEIINKITGELSSGQKNRVSLAKSIINNPKVLLLDEPTASLDPETGDFVRNFLEDYQKENEASILLASHNMTEVERLCSYVFMMKNGTIIDQDSPNELIKKHGRKNLEEVFLKLTREKYES

SEQ ID NO: 145408 - protein, 202 aa, Unknown
  Bacterial polypetide isolated from the Sargasso Sea
MENKNSDEIIVKFEEVTKQYGDLVVLDKLNLDIKKNEMVSIIGPSGSGKTTVLRVLMTLEKINGGVIHLDGETLTHMNSNGKQIEADEKYLRERRSKIGMVFQQFNLFPHMTALQNCIEAPIQVLGMKKEEAEERALELLELVGLTDKKDQHPSRLSGGQQQRVAIARALAMRPKVMLLDEITSALDPEVVGEVLNVIRSLN

SEQ ID NO: 145409 - protein, 378 aa, Unknown
  Bacterial polypetide isolated from the Sargasso Sea
MQSYKYLSATNQIKSLRKNVIHSIKKLTGFQVKTTIAAGFTQSVREPIAVIFIMLIIYIQIYIFNGKIEPIFVAIILFYRALTAALQVQSFFQGTYQYIGSMELINKEFKNLNLNRIEEGENDINELKKMITLQNISFSYDSSDDYQLKDISLNIPALSSVAFVGESGSGKSTILDVITLLNEPNLGNLIIDDLDSRSIKKESWRQMIGYVSQETIIFDATIGDNISMWSGDYKKNKEIESKIKEAAEKANILDFINNLPDGLDTNVGDRGVLLSGGQRQRLFIARELYKNPLVLILDEATSALDTSSERAIQHSIESLKGYITVIQVAHRLSTIKNVDLIYVLKNGKLIEKGTYKDLTKDQDSNFSKMIELQSLSDS

SEQ ID NO: 145410 - protein, 217 aa, Unknown
  Bacterial polypetide isolated from the Sargasso Sea
MLELKDITKSFSGVDGDVEVLRGVSLALDAGETLALTGESGSGKSTILHISAGLEVPDGGSLHLEGVEINGLGEAERANLRRSEVGIVFQQFNLIPSLTVEANIGFQAALAGRRDKIFESELVEALGLEDQLKKYPESLSGGQQQRVAIARALAVRPKLLLADEPTGNLDESTSSAVLTAMLDLVGRTGAALMVVTHSVALAEKMDRRVRLKGGVLL

SEQ ID NO: 145411 - protein, 245 aa, Unknown
  Bacterial polypetide isolated from the Sargasso Sea
MKKLVEVKNIKKNYGRNEAVKGISFNIKEDEILGLLGPNGSGKTTTIGMLLGLLKPTSGEILINGQKLEGNRIEILEQINFISPYIELPKKLTVKQNLTVYGKLYKINNIKERIEFLSEKLRLGGLLNNITGELSSGQKNRVSLAKALINEPKVLLLDEPTASLDPEVGDFVRSFLEDYKKEKKISILLASHNMNEVTRLCKSILMMKDGIIIDKGNPEELINKHGRKNLEEVFLKLSRSKNELN

SEQ ID NO: 145412 - protein, 206 aa, Unknown
  Bacterial polypetide isolated from the Sargasso Sea
MGIHINNLTFSHDDSSLLHDLSFSVEKNQIGFVSGSSGIGKSSLFNIIAGLILPENGKIMLDDILFNDKNFSLETEKRKIGYVFQDFALFPHINVKRNIQYAMSSEENELFDELISKLGLLEFLDKMPHELSGGQQQRAALLRAILMKPKILLLDEPFSNLDKDNIIAAQKIISQIISLFDIPCLLISHDIQSSENFQVDKEIIIS

SEQ ID NO: 145413 - protein, 257 aa, Unknown
  Bacterial polypetide isolated from the Sargasso Sea
MIKIRNISKQFTIKNNIVKALSNINLEILERDCFAIVGESGSGKTTLANIILGIYQQDEGEVLFENKILIKNRSLHLRKLIQFVQQNPMSTLNPKKTIYSTIALPLKIHKIVENNKYKEKVEELLSFVGLERNFMDRYPDTLSGGQKQRVAIARALATEPKVLILDEPTSALDVIVQSKVLNLLLDIKKKFDLTYIFITHDLSVVKNIANKVVVMNKGKIEETGETIKIFQNPKSEYTKTLIRAIPTVTDEEDATKP

SEQ ID NO: 145414 - protein, 227 aa, Unknown
  Bacterial polypetide isolated from the Sargasso Sea
MLRFEQVTKSYSGGFVALDRVSFHLEKGEMAFLTGHSGAGKSTLLKLISLIERPTTGKVFINGVDLSRVNKGQVPYVRRDIGMIFQNHKLLMNHSVFDNVALPLVIEGFSGKDMTKRVHAALDKVGLLDKVRCLPHTLSGGEQQRVGIARAVVNRPPLLLADEPTGNLDPDLSKDIMKVFEAFNQVGVSVLIASHDLSLLARMRYRTLTLKNGRMINDGLTSSGADE

SEQ ID NO: 145415 - protein, 226 aa, Unknown
  Bacterial polypetide isolated from the Sargasso Sea
MSDRGVLEAAGLGKTYHDARREIVVLNDLALSVSTGEWLAIVGASGAGKSTLLNLLGGLDTPSAGDVSVAGELLSRMSENERSRWRNQRLGFVFQMHHLLPEFTALESVAMPARIGGAPKQQAEAKAKTLLEQLGLSERLNHRPAALSGGERQRVAIARALVNEPACVLMDEPTGNLDPDTAEQVLAAMSALRDRDTAFVVVTHDPVIAQRMDRQLTLANGRLEPR

SEQ ID NO: 145416 - protein, 139 aa, Unknown
  Bacterial polypetide isolated from the Sargasso Sea
MKEVPIKEKQQMIVDILNEVGLNYADVRNRFPHEFSGGQRQRIAIARAIILKPKLLILDEPTSALDVSIQNQIIKLLIKLQKKYELSYIFISHDIKVIRSVSDYIIVLKKGEIVEEGSAEEVFNLPKSNYTKELLTSVI

SEQ ID NO: 145417 - protein, 111 aa, Unknown
  Bacterial polypetide isolated from the Sargasso Sea
MPASLSGGQKQRVAIARALAMQPRVMLFDEPTSALDPELVGEVLQVMKLLASEGMTMVVVTHEMGFAKEVADVVVVMDGGVIVEAGPPAEIFSAPSQPRTRAFLQAVLSRA

SEQ ID NO: 145418 - protein, 620 aa, Unknown
  Bacterial polypetide isolated from the Sargasso Sea
MTRKTSHLGGQAFQAVFGFTFRYWRKQPGRTALVASLALLAALADVLTPLFAGRLVDALSTGLTDRAAAWHAALVAFGTLAALGLGATVLRQGVYLNIITLTLKMMSEIAAASFHRVQRFSTDWHANSFAGSTVRKITRGIWALDLLNDTVLIALLPSVTMLVGATVLLGTHWPVMGLVVGAGSLLYITVTVAVSLGIVAPAARLGNLWDTRMGGALADAVSCNAVVKAFGAETREEARLARVIGKWRQRTRRTWVRGTLNGGLQGAMLVAMQAAMIGVALRLWVNNEASVGDIAFALTMFFMLQGYLRDVGMHIRNLQRSVNDMEELVALERQPLGIDDRPGAPAIRIEQGEIRFEHVTFRYDNHPVPLYDDFSMRIAPGERVGLVGHSGSGKTSFIKLIQRLYDVSGGRITIDGQDIAQVRQDSLRSQIAIVQQEPVLFHRTLAENIAYARPDASRADIERAARLASAHDFIATLPDGYDTLVGERGIKLSGGERQRVAIARAFLADAPILILDEATSSLDSESELLIQQAMERLMVGRTTLVVAHRLSTVRALDRLLVLDRGKVIEEGSHDALIRIDGGIYRRLFERQALELAKGLIDTPRRMVNGDAGPLGEPAEA

SEQ ID NO: 145419 - protein, 189 aa, Unknown
  Bacterial polypetide isolated from the Sargasso Sea
MSKNQEFVKFDKVDKSYDGKVLVVKDLNLDIAEGEFITMLGPSGSGKTTCLMMLAGFETPTNGEIFLDKNPISNIPPHKRGIGMVFQNYALFPHMTVYENLAFPLKVRKINKDDIDKKVDKALSMVSLSGFENRMPGQLSGGQQQRVAVARALVFDPQVVLMDEPLGALDKNLRESMQYEIKHIHESIG

SEQ ID NO: 145420 - protein, 206 aa, Unknown
  Bacterial polypetide isolated from the Sargasso Sea
MSIHINNLTFSHDDSALLHDLSFSVEKNQIGFVSGSSGIGKSTLFNIIAGLILPENGKIILDDILLNDKNFSLETEKREIGYVFQDFALFPHINVKRNIKYAISSEVSELFDELISKLGLLELLDKMPHELSGGQQQRAALLRAILMKPKILLLDEPFSNLDKDNIIAAQKIISQIIGLYDIPCLIISHDIQSTENFQIDKEIIIS

SEQ ID NO: 145421 - protein, 219 aa, Unknown
  Bacterial polypetide isolated from the Sargasso Sea
MSEPIITLQNVSKSFGQNSSSIQVLEDLSLDLKKGESLALVGASGSGKSTLLHVICGLEKPNKGNVYIKGVNITDLSTDERSLFRGKEVGFVYQFHHLLPDLTALENIALPAMLSGIGKEEAFEISASLLEQVNLNDKKENRPNELSGGERQRVAIARAMSNNPSCLIMDEPTGNLDKKNVENFMNLLMDMVSTREIALIIATHDNNVSSRLDKLLNLE

SEQ ID NO: 145422 - protein, 328 aa, Unknown
  Bacterial polypetide isolated from the Sargasso Sea
NEPILDDFSIDVNEGEFVTVLGDSGVGKTTLFRAINGLEKIENGYIRVDGNLMSSSFYHLPPEKRPVGTIFQDYALFPHFNVEKNIYYGLDKINFDKNFVDEIVNLLRVENLFDRYIDQLSGGQRQRVSLARSLVRKPKLLLMDEPYSNLDKNLRQDIRRDLKKIFSKMGSTVLLITHDSEEALSLSDKIGYLYKGKIIQFDSPYEIFHNPLHKIIAKSISNSNILEGTPSNGKIITKIGEFIISEKITSSNNISINVRPNQLSLDHTGNKYEIVEEEFLEGSQLYLVKDTENNQIISISMIGENDFSVGDKVGVQIINNNANLIDIS

SEQ ID NO: 145423 - protein, 269 aa, Unknown
  Bacterial polypetide isolated from the Sargasso Sea
FGMVEGSLFYVVNQIEELAQFTAGISRLEGFQSEVEQLSREARGADPVQQGAESIVVRHADLTPPGADQPIVRDLSLSVGETDRLLVVGPSGCGKTSLLRMISGLWSPSQGDVERPPTGELLFIPQKPYMLLGSLREQLCYPTDEGRFSDDQLRHVLDEVNLSTLSTRYPDLDVKQDWPRILSLGEQQRLAFGRLLLNAPRFVVLDEATSALDVATEDHLYALLRQRELAVISIGHRPTLKQFHDSVLELSGNGDWRLMPATSYDFGRS

SEQ ID NO: 145424 - protein, 583 aa, Unknown
  Bacterial polypetide isolated from the Sargasso Sea
MTRNKHTNKKIIFRLIKDYIFPHKFKIFLALIMMIISAAATGLHAWLVRPALDEVLIKGNKEMLFLIPIAIILVTLCKGLATYTHSFQMSKVAHLVISKLQSEMFEKLMFFNIKFYNDSKSGNLISRLINDTYFLRMAIVKSVTGVIKDVLVIIFLLGNMFYQSWELTIFAFFAFPLALWPIRKIGNSIRKITRNIQQQIAIFSNSLSESIKSIRQVKAYNREDFEKQKSFETINQIKDYFIKSAFISNRLSPLMEFIGSLAIALSIYVGGVFVLNESMTTGQFMSFLVSLLLAYQPVKALGNLNISIQEGLAGADRIFQLMDSEDENKETDNFKDELLVKKGKIQIKNLNFAYENINVLENLNITIPEGKKVAIVGLSGSGKSTIISLLLRFYNNYDGEIFIDEQDISKYSLKSLRDNFSLVSQETILFNQSIKTNIEYGNLKANTAEILNAAEEAGVNEFANSFPNKLDTIVGESGVKLSGGQRQRIAIARAILKNAPILLFDEATSALDNLTEQKIQNSINKLMKNKTSVIIAHRLSSIEDADLIYVLDKGKIVGEGQHKELLNKCNLYSKLQLQQELNL

SEQ ID NO: 145425 - protein, 91 aa, Unknown
  Bacterial polypetide isolated from the Sargasso Sea
MSGGQRQRIGIARALYNKPDVLVLDEATSALDDETEQAVMDAVNNLGRELTIVIIAHRLSTLSKADIVYRLEKGRLHSKGSYEEMCKISGD

SEQ ID NO: 145426 - protein, 610 aa, Unknown
  Bacterial polypetide isolated from the Sargasso Sea
RGDKGTKAENERTPAEYLWRVMALAKLEWQLIALAICTTFVTSAAALFVPHFQGGAIDAAIAVDKERFNRTALMLLISSAGVSLFSAFKGVCFSLVGRRLAYKVRTGLLRNILSQDIAYFDGVNTGDLLSRLSYDCANLTAPCNTVLSLAAQNLVVICGGLVMCFWVSWRLAMVSFAVVMPITFLIKRYARWSQSLNREISAMLGLASNAANEALGNIRTVRAVSTEDVEFKRYEEHARAALNAGIKDAFGGALTVALTNLLELGTAVLILWLGGGMTMERPNPRLTIGSLITFQLYFNSVTSSYTALSNCLTTLVRAAGSASRVFQLQDNLPDISPHAGEIFRPAPSRAPAGPEIRFEKVKFWYQMRPNTMVIDDMDMVVAAGSTAALVGKSGGGKTTVVSLLLRYYDVKAGAILLDGKDIRSLNLASTHRHIGLVAQDMQMFNHSIGGNIGYGLDPETEATRERVEAAAKAANAHDFIMTFPDGYETRLGERGIRLSGGQRQRLAIARVFLRNPTLLLLDEATSALDLESEAAVQEALDRLIATGGHTAVVVAHRLSTVRHATNINVISAGKVCESGTHEELVGKDGGVYAGLLALQQRKKEETIADQ

SEQ ID NO: 145427 - protein, 245 aa, Unknown
  Bacterial polypetide isolated from the Sargasso Sea
MNDKIVKAVDNVSFELFEGETLGLVGESGSGKSTIAKIITGLISPNKGNLIYNNEPLYNSNKKYQIHNSRGQIQMIFQDPYSSLNPRFKVKDIIAEPIKFFQKNISNNDLLQNVYDLIDIVGMTRQSLDRYPHEFSGGQRQRISIARALATRPRLLICDEPTSALDVSIQAQILNLLKDIQDELHLTMLFISHDLPVIRQMCNRIIVLKNGAVCETKDTEELFNNPEHEYTKELIRLMPKIESII

SEQ ID NO: 145428 - protein, 210 aa, Unknown
  Bacterial polypetide isolated from the Sargasso Sea
MSNLILEIKDVSHSYDDKETTLSNINLEVDQGEKVSILGPSGSGKTTLLRLIAGLERPKSGSINLQGAVVSTKNFILAPEKRNLGLVVQEKALFPHLTVKENITFGIRKEKGKNDTALDLCSLFKINHLADKYPHEISGGEQQRTALARSMAPNPEILLLDEPFSALDQELKEELYTELSHIFKEREQSILLVTHDLKEAEILSNRKINI

SEQ ID NO: 145429 - protein, 215 aa, Unknown
  Bacterial polypetide isolated from the Sargasso Sea
MENENSDEIIVKFEEVTKQYGDLVVLDKLNLDIKKNEMVSIIGPSGSGKTTVLRVLMTLEKINGGVIHLDGESLTHMNLNGKQVEADEKYLRERRSKIGMVFQQFNLFPHMTALQNCIEAPIQVLGMKKEEAEERALELIELVGLTDKKDQHPSRLSGGQQQRVAIARALAMRPKVMLLDEITSALDPEVVGEVLNGIRSLNKEHSLTMIMVTHQ

SEQ ID NO: 145430 - protein, 560 aa, Unknown
  Bacterial polypetide isolated from the Sargasso Sea
MSPLKRLFSYTYRFKFSFFLSILGFILFASADIAAVEWIRRIIEFINSDQQDFSIYLVLALIFIAVGRGLGFFVGNYFMSRVGFGIVHDLRSELFSKLINLPKTYFDQNQSGQLINRITFTTTQVSGAASNAIKTLVREGFLLIGLLLYMLTLNWKLTLLLLITTPFIALIVYLAGRRLRKLAKTIQTAMGDVTHVASEAVDGNLEIKSFNAEKYEKDRFFDANASNKNQNLKLEATSNLATPIIQLLVSISLSIVAYFALGSQLGIELKAEDFVAFITAAGLMAKPIRQLSNINAVIQKGLAAALEIFDQLDEKDEEDSGKVDSSILGNIKFLDVSFSYNSKEFVLSNLNFEISQNETVAIVGKSGSGKSTIASLISRFYSNYSGDISIDGISIHDYKLSHLRRCISIVNQSPTLFNDTIEKNIAYGESDIDQDKLIEAAEISGCNEFISKLPEGYKSEIGDDGVLLSGGQRQRIAIARAFYKDSPIIILDEATSALDNESELIVQEAIEKLINNRTTIVIAHRLSTIENADKILVLDQGSVAESGTHSILLDQDGIYK

SEQ ID NO: 145431 - protein, 127 aa, Unknown
  Bacterial polypetide isolated from the Sargasso Sea
ASHIDEFIDELPEGLQTKVGDQGILLSGGQRQRIAIARALLKDAPILILDEATSALDSESEKFIQKAFDRLMENRTTFVIAHRLSTIENADKILVLSNGKIVEEGTHEELLNQDGEYSLLHKMQFND

SEQ ID NO: 145432 - protein, 316 aa, Unknown
  Bacterial polypetide isolated from the Sargasso Sea
SGDVIIDDKNVNSTRASKRDLAMVFQSYALYPHLTVRKNLETPLKLRDYSFVERLPLIGNFVPSRKEKKKSIDDLVFKTSETLKITELLDRKPGQLSGGQRQRAALGRAMVREPVAFLMDEPLSNLDAALRVHMRSELSELHNSLKTTFIYVTHDQAEALTMSTRMAVMIDGELLQLDTPSEVYNNPSSLRVAEFVGSPKINTFDAEIRSDGFAEFNGIRLEKKFNTNSQKALVAVRPEHLEITKDSNKPAFEAKVSYKENLGSDIFYHVQVDQSDSKIIVRGSPQAGLISNGETIKISPSHSEAMLFEISGERIR

SEQ ID NO: 145433 - protein, 255 aa, Unknown
  Bacterial polypetide isolated from the Sargasso Sea
MNKKNLVKNDALIIDDLHHKYDKRECSKWILNSINLKIENGELLGLLGPSGCGKTTLLRLIAGFEYPSRGRISLNDKEISSEKKFLSPEKRNIGMVFQDYALFPHLTVLENVIFGLKNKKDRSRVDYLLNVVGLDSFIGRYPHELSGGQKQRLAIARALAPGTNFILLDEPFCSLDMHVKLKLRSELPNILKGCNASGLMVTHDPEEAMSICDKVAVMNEGKIHQIDTPINLLNNPKTLFVSSFILGNNIINLQK

SEQ ID NO: 145434 - protein, 196 aa, Unknown
  Bacterial polypetide isolated from the Sargasso Sea
NFDNVCITNITNNKEMMKFRKQIQMIFQDPYSSLNGRLKVKDIISEPIKLHNPSISSQEIDSYIYDLLESVELTQQSAERYPHEFSGGQRQRISIARALATQPRLLVCDEPTSALDVSIQAQILNLLKDLQDQLNLTILFISHDLPVVRQMCDRIAVLKNGKICEISETENLFKKPSHEYTRELLTLMPKIESIYN

SEQ ID NO: 145435 - protein, 152 aa, Unknown
  Bacterial polypetide isolated from the Sargasso Sea
MKKAEVKFENITKKFNETVAVDNVSCSFEAGTLTTLLGPSGCGKTTSLRIIAGLERATSGKILVDNEDVTLLPATDRDVSMVFQSYALFPHMNVIENVSYGLKMIDIDKNEYTQKSLETLKLVNLEGYENRMPSELSGGQQQRVAVARAIVL

SEQ ID NO: 145436 - protein, 264 aa, Unknown
  Bacterial polypetide isolated from the Sargasso Sea
MTPDGRQIGGVVMEMKNITLKFGGVTAIEDISFDIHEGEIRAIIGPNGAGKSSMLNVISGFYVPQKGEVFFRGTKRAQLKPFQVARQGIARTFQNIALFEGMSVLDNVMTGRLTHMKAGIISQSLWRGSAEREETENREICERVIDFLEIQSIRKTPVSRLPYGLKKRVELARALASEPKLLLLDEPMAGMNVEEKEDMSRFILDVNDEFGTTIALIEHDMGVVMDLSDRVVVMDYGKKIGDGTPSEVRNNQAVIDAYLGVSHD

SEQ ID NO: 145437 - protein, 306 aa, Unknown
  Bacterial polypetide isolated from the Sargasso Sea
MAGVRFEALSKTYPGRRGSDPVPVIRELDLSIEDGEFLVLVGPSGCGKSTLLRLLAGLESPTAGEIVIGERPVSQVRPGRRDVAMVFQSYALYPHLSVRDNLSFGLRRSRHRSLPQQLQDQLSQLSRGLPAFLRVRSPREELIEQRVHTVAQALELEPLLDRLPKELSGGQKQRVALGRAMARKPAVFLMDEPLSNLDAKLRNSTRTRIVDLQRELGTTTVYVTHDQVEAMTMGHRIAVLNQGRLQQLGTPMELYRWPSNLFVAQFIGSPPMSMLPVVIGPGATLLLGAKRLSVEGPLATALPVLE

SEQ ID NO: 145438 - protein, 464 aa, Unknown
  Bacterial polypetide isolated from the Sargasso Sea
FNLRDSVFHAVKNASFEISENEIVGLVGESGSGKSVTAMSLMRLLPEPKAEFGPNSKISFRDNDVLSLAANQLRLTRGSEISMIFQEPMTSLNPFHKVGKQIQESIRLHQKLTKEKSKNEAINLMKLVEIPNSENRYHSYPYELSGGQRQRIMIAMALANKPKLLIADEPTTALDVTIQAQILDLISKLRNEVGMAVLFITHDLGLIESFSEKVIVMKEGEIVEQGQTKEIFSNPQHAYTKMLLASEPKPLESNQKEESISLEVKSLSVRFNLKSDFFLTRKQFTAVDDVTFKINTNSTVGLVGESGSGKSTLGKAIAGLLNYEGEILFDGKNLANISSSERQRIKKDIQIIFQDPFGSLSPRMTAGEIIGEGLDVHFDLPKKEKISLIKDSMEDVGLNPEYMFKYPHEFSGGQRQRIAIARSIILKPKLLILDEPTSALDRSIQIQVLELLKDLQKKLKLTLF

SEQ ID NO: 145439 - protein, 139 aa, Unknown
  Bacterial polypetide isolated from the Sargasso Sea
PIWVKKMPKKEAQELALDQLKKVQIDDQANKFPGQLSGGQQQRCAIARALCMQPKIMLFDEPTSALDPEMIKEVLDAMVSLAKGGMTMIVVTHEMGFAKEVADEVIFMDEGMIIEKADTKEFFANPKSDRTKLFLSQIL

SEQ ID NO: 145440 - protein, 349 aa, Unknown
  Bacterial polypetide isolated from the Sargasso Sea
MLSVNIKDLSYSIKDKKILNKINLELEKDKIACILGPSGCGKTTLLKLIAGLSHVQDGEIYLNNNLVSSNNIHLKTEKRKIGFLFQDYALFPHQTVKENLQFAIKNKSISHTIKEILDVIKLSDSLDKYPHELSGGEQQRVALARSIIAKPDILLLDEPFSSLDLNLREEVRDDTLHLLQKSNISVLVVTHDPFEAMFISNKIYIMNKEGRIVQSGSPKELYNLPNSSYVANFFGETNKFSGMVKNKTVETPVGEFKVDESLESKNVNVYIRPEAVKLNQEQTPVNGIKGTVMASKLMGGYSFIHLSVLNNDNEIVHVHSHMPPNFLPNQSSAVGIEIDTEKTFIFPAN

SEQ ID NO: 145441 - protein, 219 aa, Unknown
  Bacterial polypetide isolated from the Sargasso Sea
MNKEIISIENIDKSFGEGDEILQVFKNFSLSLHQGESIGLVGASGSGKSTLLHIICGLDRPDSGSVKIQGIDITELNYDERSELRNTEIGFVYQFHHLLPELTALENIVLPALLAGTNQAEAIKNASLLLEQVNLSGKENNTPNELSGGERQRVAIARAMSNNPSCLIMDEPTGNLDTKNVENFMTLLMDMVSIKNVTLLIATHDTKVSSRLDRLLSLE

SEQ ID NO: 145442 - protein, 233 aa, Unknown
  Bacterial polypetide isolated from the Sargasso Sea
MKFDKEILSNINLNIDSGEFVSILGPSGCGKSTLLRLASNLVQPNNGTVNYNLEEKLSIGFVFQNPTLMPWRNVLENVLLPLELNKKNSSKEEAMLLLERVGLKDKEKNYPHELSGGQMMRVSIARSLINGCNLLLLDEPFAALDEITRRKLEDDLLEIWKKEKLTVLFVTHSVSEAIYLSQRIIVLSSGPGRIIYEKNIDYNFSKKDFLASNEYQIINNEIFEKLRTGVNNE

SEQ ID NO: 145443 - protein, 386 aa, Unknown
  Bacterial polypetide isolated from the Sargasso Sea
ERRYKSYPHELSGGQRQRIMIAMSLINEPELLIADEPTTALDVTIQAQILDLMNRLKEKLGMSILFITHDLGLVEKFSDRVCVMKEGKIVEQGVTTEIFSNPKHEYTIKLLKSEPKEKDHLLISEDNILDISNLSVFYKIPSKKLFKTDRFCAVSDISLKIPRNSTVGVVGESGSGKSTLGKAIINLLDFEGSIKFNGKSIKDLSSVEKKLLKKDIQIVFQDPYGSLSPRMTVGEIIGEGLDIHFDFSSEEKIEKISNVMKDVGLDDSLIFKYPHEFSGGQRQRIAIARSIILNPKFMILDEPTSALDRSIQIQVIDVLKRLQDKYKLTYLFISHDLKVIRSMCDQIFVMSEGKLVEFGKADEVFENPQQEYTQKLLRAALKYSSN

SEQ ID NO: 145444 - protein, 166 aa, Unknown
  Bacterial polypetide isolated from the Sargasso Sea
MIISTKDIKKSYKVGPQNVHALKGINLSVEKGEFISIMGPSGSGKSTLMNIIGCLDTPTSGNYLLNNKQVSSLTDDELAKIRNNEIGFVFQSFHLLPRNSAFENVMLPLRYAGIKKDEAVTLSNKALDQVGLSDRADHSPSELSGGQQQRVAIARALVNKPKHSIC

SEQ ID NO: 145445 - protein, 300 aa, Unknown
  Bacterial polypetide isolated from the Sargasso Sea
MSFLDLKNVTKIYPNGTKAVHETSLSVDEGEFMVFVGPSGCGKSTLLRMVAGLEDITQGDINLDGKLINEVDPSERDVAMVFQNYALYPHMNVYNNLAYGLKNRGIDKEKIEQKVNDAAKLLQISDFLERKPSMLSGGQRQRVAMGRAIVRNPKIFLFDEPLSNLDAKLRIQMRLEIKKLQQKVGVTSIFVTHDQVEAMTLADRLAVINDGIIEQLGTPIEIYNNPKSLFVAGFIGSPQMNFLDANLNNKTLSAENFEIKNIDSDYNGEVTLGIRPEHLTESENGLINLKVELVEQLGSD

SEQ ID NO: 145446 - protein, 300 aa, Unknown
  Bacterial polypetide isolated from the Sargasso Sea
MPPYAARGGAAPAGHPVPDAPVAGRPAPDAAQAGAHSERLLAIDRVNLEYRSGARIVRATHQVSFDVYGSDRFVLLGPSGCGKSTLLKAIAGFIEPVSGSIALDGRPVRGPGPDRVVVFQEFDQLPPWKTVVENVAFPLRAAAKLSRTEARERALHYLDKVGLSGFADAYPHTLSGGMKQRVAIARALAMQPRVLLMDEPFAALDALTRRKMQEELLRLWDEFRFTLLFVTHSIEEALVVGNRILLLSPHPGRVRAELNSHEHSLDDVDTGDFRDNVARIHRLLFDTDTTSAPTTEEAAS

SEQ ID NO: 145447 - protein, 238 aa, Unknown
  Bacterial polypetide isolated from the Sargasso Sea
MVLVKISGLERHYQMASETVRALDGVDLEINEGERIILLGPSGSGKTTLLNCLSALDSPTSGEYQFSGNKVPKNESEAMTTFRRENIGYVFQFFNLLQDLTVLENLLLIQELAGSRDEDRARNLLALVGLEGEVDRFPAEISGGQQQRVAIARSLAKRPRLLLGDELTGNLDSWTSSVVMEVLVKACDSEGITCVFVTHDESLVQYATRVIRIDSGKIISDESGGGHAPPSSPIHIVG

SEQ ID NO: 145448 - protein, 371 aa, Unknown
  Bacterial polypetide isolated from the Sargasso Sea
MSDSSSSRPLVTFDGVSKRYGDVTAVHTMNLEIYEGEFLAIMGPSGCGKTTSLRMLAGLEDPSDGEIRLDGQRINEISSVERDTPMVWQSLALFPFLNVQKNVEFGLKMRQVPSEERQARARKWLERMEILELAERDISQLSGGQKQRVALARSLVTEPRILLLDEPLSALDANLVIRMQGVLSRLQKELGITFVYVTHSQSEAFAMSDRVVIMSQGRIEQLGSPKEIYRSPASRFVADFVGANNILSGTVAQVGDNLEIETTLGMFQCDAGTKGARHVGDSLDMVISADLVQISLDDPKTQNSLQCRFISEEFVGSIVTLFAELQDGSDFKIQTRQRDLAKISLEEGNTFFVSWNPTDTHLISSGRSSDA

SEQ ID NO: 145449 - protein, 528 aa, Unknown
  Bacterial polypetide isolated from the Sargasso Sea
MKNIVEVKDLSINFKVRDGSFRAVDKISFDIETNKTLALVGESGSGKSVTAMSIMQLLPIPQASYSQESSIKFNNREIINASKKDLLSIRGNIISMVFQEPMTSLNPYHRVGDQITESVLLHTKATKQEAKDEAIKLMNLVEIDDVERRFKAYPHELSGGQRQRIMIAMALVNKPQLLIADEPTTALDVTIQAQILDLMSKLKRDLGMSILFITHDLGLVKEFSDQVCVMQNGNIVESGDTSNVFENPKHPYTQKLLSAEPQPKEDINSEEAPFLEIQNLDVYYDIPSINFFKKNRFHAVKDTSLNIYKNTTIGLVGESGSGKSTLGKAIANLTKFEGNIYFEGKNIISSSKEIKKHIQIVFQDPYGSLSPRMTIGEIVGEGLGVHFKLSKLETQNRIDKVLSDVGIELSAKNKYPHEFSGGQRQRIAIARSLIMNPAFMILDEPTSALDRSIQIQVINLLKDIQNEYKLTYLFISHDLKVIRSMSDYIFVMKDGEIVESGLSNEVFDYPKQKYTKKLLSAALRYASD

SEQ ID NO: 145450 - protein, 245 aa, Unknown
  Bacterial polypetide isolated from the Sargasso Sea
MKTLVEVQNLKKNYGDKQAVKSISFKINENEILGLLGPNGSGKTTTIGMMLGLLKPTSGEILIEGDKIEEDRIRILQKINFISPYIELPKKLTVKQNLIVFGKLYKIKNLNDRIDYLTSKLRLSDILNRITGELSSGQKNRASLAKSLINDPKVLLLDEPTASLDPEIGDFIRSFLEDYKKEKKISILLASHNMNEVTRLCKSILMMKDGIIVDSGSPANLIEKHGRKNLEEVFLKLSRRPNEHN

SEQ ID NO: 145451 - protein, 266 aa, Unknown
  Bacterial polypetide isolated from the Sargasso Sea
MSVASTSAEANAVEAKNLDLVFQTRDSPVHALSEVNLEIRRGDFISFIGPSGCGKTTLLRVIADLEKPTGGSIVVNGVSPEQARLQRAYGYVFQSPALFPWRTVEGNLKLPLEIMGIDAAERTRRAKESLKMVNLEGFEKKFPWQLSGGMQQRVSIARALTFDPELLLMDEPFGALDEIVRDQLNEHFLRLWEKNRKTVVFVTHSIPEAAYLSTRIVVMSPRPGRIIECIDSDLPSDRTLDIRETSEFLDLSHRIREGLRAGHSYD

SEQ ID NO: 145452 - protein, 144 aa, Unknown
  Bacterial polypetide isolated from the Sargasso Sea
MGSLNSHPNPRLWYQAFAPSEIRSRALNCLDQVGLKNFAKNNVNTLSGGESQRVAIARALMQKPKLMIADEPVASLDPKVGIEVMNLLKDLTLKQGITLFFTTHDLKHAEHYANRVIGLKDGVIKINIKSKELNELDVDEFYAA

SEQ ID NO: 145453 - protein, 327 aa, Unknown
  Bacterial polypetide isolated from the Sargasso Sea
MYLKKLEFISLLKNYENITAVDRINLKINSGTYCCLLGPSGCGKTSTLRMIAGHEEITDGKILLGDLIINRLPPSKRGTSMMFQNYALFPHLNCIDNVAFALKIKDVKKKDRYIEASKILKMVQMENFADRFPNQLSGGQQQRIALARSLITKPSILLLDEPLSALDPFLRIKMRTELKNLQKKLGITFIHVTHSQEEALALADLVVVMNKGVIEQSDTPYNVFNKPKNEFIAHFVGSHNVVQVGAKKYAVRMDQIKINISKKPENDDIKINDIEFQGEKVKITCIDKNNNEIYVLVDDSFFYKSNFKLAQNVNLNWSKNRAHLLKE

SEQ ID NO: 145454 - protein, 593 aa, Unknown
  Bacterial polypetide isolated from the Sargasso Sea
METQNTLRKPMDGTGTSPVTVLKRLWPYIRPLIGIVVLAVMTMGVVAATEAGIPALLKPLLDHGFGSHGSDRAKWYVPMAVIGLALVRGVSQYASNYLLNYVSNRILLQLRLEMFQRMLHTGASFFQRETASTVINAIVFEVNQILSVLTGVMVTLVRDSLTVIFLLGYLFYLNWRLTLIVAVILPGIGWLVSKINRRLRRLNREHQTLTNELSYIVEETVGGYKVVKVHNGEAYEMDRFTQMSKRLRGYAMRMTISGGLAQPLTQFLASIALAVVITIAVVQSSNDQTTVGGFVAFVTSMLLVISPLKHLIDVNQPLQRGMTAAELIFGLIDEPAEPQGGGRPLEHARGDIEFRNVTFDYGTAERPTLDRISFKVAPGEMIALAGPSGSGKTTLVNLLPRFFDPTDGAILVDGVPVADYDLHALRGQMAMVSQDVVLFNDTIAANVAYGQTPDRARVQAALEAANLADAVAAMPDGLDTLVGGNGMRLSGGQRQRLAIARAIYKDAPILILDEATSALDSESERHVQAALERLMEGRTTLVIAHRLSTIERADRILVLEAGKIVEEGSHDELLRHGGLYAHLHRIQYQQQAA

SEQ ID NO: 145455 - protein, 213 aa, Unknown
  Bacterial polypetide isolated from the Sargasso Sea
TIAKMIVNLFKPSSGDIFFDNICITKIKKSSEMMKFRKQIQMIFQDPYSSLNGRLKVKDIVSEPIKLHNPSINRKDLDNYIFDLLDSVELTQNSADRYPHEFSGGQRQRISIARALATQPRLLVCDEPTSALDVSIQAQILNLLKDLQEQLNLTILFISHDLPVVRQMCDRIGVLKDGKLCEVSNTEELFLKPQHGYTKELLHLMPKIESIYS

SEQ ID NO: 145456 - protein, 429 aa, Unknown
  Bacterial polypetide isolated from the Sargasso Sea
MTSLNPLHTINKQIEEVITTHNTISKKEVKKRTIKLLNEVGLNDISSRPKIYPYELSGGQRQRVMIAMSIANEPDLLIADEPTTALDVTIQLQILELLQNIQRKMGMSLIFISHDLSVVKKLSDYIYVMKDGKIIEFGSSEKIFNNPKHKYTKELVSSQNNIKEIKSNKSKSIINIKNLNVWYPIKKGLLKRTIDYVKAINNISFNLYVGETIGIVGESGSGKTSLILAMLNLIKSKGEIIINNKNLEHLSKKEILDLRKDIQVVFQDPFSSLSPRMNIEDIISEGLMVHYPTIGLEEKKQKLKNILEKVGLEYENTIEKYPHEFSGGQRQRIAIARALILEPKILILDEPTSALDVTIQNQILSLLNSLQKELSLSYIFISHDMRVIRAVSNKIIVLKDGLIVEENYSRDIFISPKSEYTKKLISSVI

SEQ ID NO: 145457 - protein, 227 aa, Unknown
  Bacterial polypetide isolated from the Sargasso Sea
MKTSTKTVISINNISKVYEGPPPVRALDGVSLEIKEGDFVSIVGQSGSGKSTFLNMIGLLDSVTDGSIEIEGKDVSELSDNELSKFRGEKIGFIFQSFFLLPGLTAQENVAEGLLYQGISRLERLEKAKEVLEQVGLGDRLTHLPKELSGGQQQRVAIARALVQDPAFVLADEPTGNLDKESGINILNILKDLNNQGKTVIMITHNQEHASMFKKVIELVDGKIVNQ

SEQ ID NO: 145458 - protein, 105 aa, Unknown
  Bacterial polypetide isolated from the Sargasso Sea
NYLGGQQQRVAIARALCMEPKIMLFDEPTSALDPEMIKEVLDVMVNLANQGMTMIVVTHEMGFAKEVADKMIFMDEGMIVEKADTKEFFANPKSERTKLFLSQIL

SEQ ID NO: 145459 - protein, 206 aa, Unknown
  Bacterial polypetide isolated from the Sargasso Sea
MSIHINNLTFSHDDSPLLHDLSFSVEKNQIGFVSGRSGIGKSTLFNIIAGLILPENGKIMLDDILLNDKNFALETEKRKVGYVFQDFALFPHINVKRNIQYAISLEVSELFDELISKLGLLELLDKMPHELSGGQQQRAALLRAILMKPKILLLDEPFSNLDKDNIIAVQKIIIQIISLFDIPCLLISHDIQSTQNFPIDKEIIIS

SEQ ID NO: 145460 - protein, 226 aa, Unknown
  Bacterial polypetide isolated from the Sargasso Sea
PGQLSGGQQQRVAVARSLVFDPQLVLMDEPLGALDKNLRESMQYEIKHIHESIGVTVVYVTHDQSEALTMSNRIAVFNDGKVQQLSSPDELYEKPVNSFVAEFIGENNTFAGEVSDISGGKCKVKLANAEIMANPISVKGKGEKTTVSLRPERALINPSDKMDNIHKGKIEEVIYHGDHTRVRINLLGNDQFILKVPNSSSNLDIKLGNEIKIGWNSEDARALDPK

SEQ ID NO: 145461 - protein, 189 aa, Unknown
  Bacterial polypetide isolated from the Sargasso Sea
VSISGKSGSGKSTLFHIMSGLEKFTSGDVLIDGKNVKNLNDKDMSAFRKDHIGYIYQFHHLLYEFSVIENVMMPLHIKGMNKDLAYEASIEILKRVALEKRLDFNINKLSGGERQRVAIARALVGSPKYIFADEPTGNLDKKNALNIFSIMKELVVENNSTFLLATHDSEISNKMSHKYLLENGEMKAI

SEQ ID NO: 145462 - protein, 529 aa, Unknown
  Bacterial polypetide isolated from the Sargasso Sea
MSILSVENLSLKIGTENILGGISFRLDQGRILAITGESGSGKSMTALSIIQLQPKNAKLEGEIFFHDQEITKKDEFELCKIRGAKIGMIFQEPMTALNPVKTVGDQISETIILHSTKNKKSADKETLKILERVGLSPAAEVKKRYPHELSGGQRQRVVIGIAIALKPSIIIADEPTTALDVTTQAQILLLLKKLVTEDNIAMVLITHDLAVVADMADEIAVMQNGIIVEIDETDNLFQNMKHQYTRSLFAASGHSVNLPVTEVNSDPLLTINNVTCRYRLARTKIFSKSDYFTAVSNVSFDIKNGERVGLVGESGCGKSTLTRAILGLEPIYKGEINVDNQNILKATSSTRKNIQVVFQDPYGSFNPRHKVSTLIKEPFYLIKDSPESKNIESKIDKVLEDVGLSATDKNKYIHEFSGGQRQRIAIARALIIKPKLVIFDEAVSALDVTVRAQILDLIAELAAEYGLSYLFISHDLSVIRSITDRCLVMKDGKIIEEGSTKKVLEQPQNAYTQTLINAAPKLPNFQLEL

SEQ ID NO: 145463 - protein, 190 aa, Unknown
  Bacterial polypetide isolated from the Sargasso Sea
SGKSTLIDLLMLLLHPNNGEILVDGNPLKDNEIRPWQLSIAHVPQNIFLSDKSITENIAFGIPKEDIDHEKVLEASKKSQIFEFISQSPDGFKTLVGERGVRLSGGQRQRIALARAFYRNASILIFDEATSALDSKTEDDVMNSIRELDSDLTLIIIAHRITTLSHADQVIQLEHGKITYSGPYEGLSAL

SEQ ID NO: 145464 - protein, 171 aa, Unknown
  Bacterial polypetide isolated from the Sargasso Sea
MKTLKIEELSKNFGATEVLRKINLEIDEGNFLVLLGPSGCGKSTLLNIIAGLESINEGNVYIDDYNVSKVEPKDRNIAMVFQSYALYPSMNVRENMIFGLKQAKVSKEKIEEQLEKVSKFLQVDALLERKPSQLSGGQRQRVAIGRALVREPRIFLFDEPLSNLDAKLRVK

SEQ ID NO: 145465 - protein, 503 aa, Unknown
  Bacterial polypetide isolated from the Sargasso Sea
VSFCVNSNAITAIIGESGSGKSVTCYAILGLLPKPAGRLDGGEAKFLERDLLATSETDLRKIRGSDIGMVFQDPMTCLNPYMRIGKQLMEPLLIHTETNARIAKSQAIEMLDEVGIKDPSITMDAYPFELSGGMRQRVMIAMALINSPKLLIADEPTTALDVTIQAQILRLIKSLQRKRNIGVLLVSHDLAVVADIADEIVVMQNGRIVESGEPDSIFNDPKHDYTKKLISAIPRGKSEISTQSRETLLEVKNLKTWFYRESNQEPIRAVDDVSLTIDKGEVLGLVGESGSGKSTLGRSILRLTSITGGKVFFGETDLSNLKKNDLKVFRKRMQMIFQDPYASLNPRMTVFDTLAEPLLLHTSVEKQNLSRSVKKLMEDVGLQWAFAKKYPHEFSGGQRQRVAIGRALATRPEFIVADEPVSALDVTIQAQILDLLKALKDEHNLTMLFVSHDLAVIRQIADRVAVLYQGKIVEKGITHEVFERPKEKYTQELIASIPGKLLY

SEQ ID NO: 145466 - protein, 177 aa, Unknown
  Bacterial polypetide isolated from the Sargasso Sea
MKNNQTNDDLFNLVNVNKTVLSPEGSLTILSDISLRIKEGESVAIIGTSGAGKSTLLSLMAGLDVPSSGQINFKGNDLVTLNEDQRAEIRAKNVGFVFQSFHLIPSLNALENVMFPMEMNNVSDYRNKATEILTNMNMKDRLTHYPSQLSGGEKQRVAIARAFASNPSVLFADEQTG

SEQ ID NO: 145467 - protein, 246 aa, Unknown
  Bacterial polypetide isolated from the Sargasso Sea
MGIELIGIEKSWHKVPVLQQVSFRTAPGETLVLLGPSGAGKSSLLRMMNLLDTPDAGVLRIGESEFSFPSSLSTAEFNRQTQALRRKVGMVFQQYNLWPHLTVMENLIEAPVKLLGMSKAAAMEKGGYLLAQLQLADKRDAWPARLSGGQQQRVAIARTLMMDPQVLLFDEPTAALDPEITKEVAEIIRNLGQTGITQVVVTHEVEFARKVASQVIYLEKGRIIEAGSAAIFQAPQTSRFAEFLMH

SEQ ID NO: 145468 - protein, 232 aa, Unknown
  Bacterial polypetide isolated from the Sargasso Sea
MLSMKNINKVFKTDLVETHALRDFSLEVNEGEFVAVTGPSGSGKTTFLNIAGLLEGFSSGEYSLDGVNVSNLSDNHSAKVRNEKIGFIFQGFNLIPDLNLAENVEVPLRYRGMNASERKRRVESALEQVGLGARMKHLPTQLSGGQQQRVAIARALAGEPRFLLADEPTGNLDSLMARQVMELLENINQQGTTIIMVTHDPELARRAQRNIQIVDGQVCDFSMYQPAATGTR

SEQ ID NO: 145469 - protein, 236 aa, Unknown
  Bacterial polypetide isolated from the Sargasso Sea
MTTATLTPVLELRDVSRVYEGAGRVVAVRGATISIGQRDVVALVGPSGSGKSTLLNLAGFLDVPSTGERWLEGRRIDDAPDTLERIRRERIGFVFQQFNLIPVMSALENVELGCFAWGTPRTRRERARAMLDAVGLAARERHRPGELSGGEQQRVALARALAKEPAIVIADEPTASLDSTNARAVAELILDTNRTLGTAFLIASHDDRLCAHLPRRIEMRDGVPGVNRELVDVCVA

SEQ ID NO: 145470 - protein, 222 aa, Unknown
  Bacterial polypetide isolated from the Sargasso Sea
MASVVVENLTKEFGNVKAVNDINLKVNDGEFLVLLGPSGCGKSTLLRMISGLEFPTYGKILIGDNDVTRTIPKDRNISMVFQNYALYPHMTIGENIQFPLESRGYNKSEIKEKVEWASELLKISDLLDRKPRETSGGQRQRTALARALVRDPEAFLMDEPLSNLDAKLRHSAREEIRQFQNQVKITTIYVTHDQIEAMGLGDRIIIMEDGIIKQIGTPQRNL

SEQ ID NO: 145471 - protein, 476 aa, Unknown
  Bacterial polypetide isolated from the Sargasso Sea
FKARQTGQIIARVKEMAQIRQFLTGSTLMLVLDLLFILLFVGVMFHYAPRLTACVLGSLLIYFLLWLLIGPLVRRKVEAEYQADADATSFLTEAVTGIETIKTTATERRFYQEWQRLLARQLRRGFQAKKVGLAAGQGIDLVQKLTAALLLWLGVGEVLNGRMSPGELVAFNMLAGHVTQPVLRLAQVWQDFQHTLIALRRVGDILDEAPEHGNNGLASVPALQGAIEFRHIRFRYQPDAPEVLANLSLTVEPGQFIGITGPSGCGKSTLTRLLQRLYVPQHGQVLVDNMDLAIADPVSLRRNMSVVLQESVLFSGTIADNIRICRPDASQAELEQAALLAGALAFIRELPQGFEQQVGEKGARLSGGQRQRIALARALLVNPRILLLDEATSALDYESEAAIMANMAAIRRGRTLISIAHRLNTLREADRILVMEAGQIVESGSHDELLACEGLYARLWRQQTGAETSQTLTHTG

SEQ ID NO: 145472 - protein, 290 aa, Unknown
  Bacterial polypetide isolated from the Sargasso Sea
LITDRLGLFFFKVFSNKDGQDSSAFTPYPALRLSPKTTMVFSFNDKLSEAFTVMKTESKIAENTPRHPLKDLILEVKNITKEVNSPEGPLTIVKDINLSVERGKPISLVGPSGSGKTTLLAIMAGLDTPTKGSVKLLGSNISLMNEDQRAQIRAKDVGFVFQSFHLMPRLSALDNVMLPLEIAGDPEAIEKSQIALDQVGLSSRAKNFATQLSGGEKQRVAIARAIVNKPKILFADEPTGNLDQKSSNAVTDLLFSINELINTTLVLVTHDLLLAEKCKDLYELSDGSLL

SEQ ID NO: 145473 - protein, 527 aa, Unknown
  Bacterial polypetide isolated from the Sargasso Sea
MSKLLEIKNLSVDFKLRENVFRAVDNISFEIDKNQTLALVGESGSGKSVTAMSILKLLPYPKAMHPKNSKIIFEGENILEFDNKSLRQVRGNIVSMIFQEPMTSLNPFHRVGDQIIEAIITHSKTSKKEAKNKAFELLDLVEIPDLSRRFKSFPHELSGGQRQRVMIAMALVNNPKLLIADEPTTALDVTIQAQILDLMSKLQKELGMSILFITHDLGLVDKFSDKVAVMKEGKIVEIGETKKVFTNPKEEYTKLLLASIPKEKTKIKSEPKPLVEISDLDVFYRIESQNIFKENYFHAVKNVNLKINKKTTIGLVGESGSGKSTLGRAIANLLPYKGSVIFDGKEISSINDRSIRKDIQIIFQDPYGSLSPRLTVGDIIGEGLDIHMNLSKKERNDLIEQTMKEVELDPKYRFKYPHEFSGGQRQRIAIARSIILKPKFIILDEPTSALDRSIQIQIIDLLKSLQEKYSLTYLFISHDLKVIRAMSDRILVMQNGEMVEEGNAKSIFEKPKEEYTRELLSAAIKYS

SEQ ID NO: 145474 - protein, 149 aa, Unknown
  Bacterial polypetide isolated from the Sargasso Sea
IKLHNPSISSNDLDSYIYDLLESVELTQQSAERYPHEFSGGQRQRISIARALATQPRLLVCDEPTSALDVSIQAQILNLLKDLQEQLNLTILFISHDLPVVRQMCDRIAVLKNGKLCEISKTEELFKNPSHDYTKELLTLMPKIESIYN

SEQ ID NO: 145475 - protein, 96 aa, Unknown
  Bacterial polypetide isolated from the Sargasso Sea
MDEVGLSKRTGHVPHQLSGGEKQRVAIARAMVKAPSILFADEPTGNLDQSSTDNILELLLRINQQTKTTLIVVTHDQQLAARSDMVFELQEGKLKC

SEQ ID NO: 145476 - protein, 94 aa, Unknown
  Bacterial polypetide isolated from the Sargasso Sea
VQVGLGSRAKNFATQLSGGEKQRVAIARAIVNQPKILFADEPTGNLDSKSSSAITDLLFSINELIKTTLVLVTHDLSLAKKCDEIYELSDGSIL

SEQ ID NO: 145477 - protein, 189 aa, Unknown
  Bacterial polypetide isolated from the Sargasso Sea
IFYDGQDIASSSKEIKKHIQIVFQDPYGSLSPRMTIGEIVGEGLGVHFNLSKKESDIKIDKVLTDVGIELNAKNKYPHEFSGGQRQRIAIARSLIMNPNFMILDEPTSALDRSIQIQVINLLKDIQNEYELTYLFISHDLKVIRSMSDYIFVMKDGIIVESGLSNDVFDYPKEKYTKKLLSAALRYATD

SEQ ID NO: 145478 - protein, 312 aa, Unknown
  Bacterial polypetide isolated from the Sargasso Sea
VRPSERNLAMVFQSYALYPHLSVRENMMVPLRLRDLSAAERMPLLGNLLPSRATKMHAIRSKIDHAAETLQISHLLERKPGELSGGQRQRVAVGRAMVRQPTAFLMDEPLSNLDAALRVHMRAEISGLHRSLKTTFIYVTHDQAEALTMSSRMAVMMDGQILQVDTPERIYRNPADLRVAQFVGSPRMNIFPGEVDSLGRIQTLEFSLDHVPSEPVQGNVSVGFRPEHLRIVNGSGGHDFTLKVTHKENLGADYFIHGAVADGNHQVIVRATPEEVTGVSIGDELGVGCDKSSSLVFGDSNKRIDLRPGLTQ

SEQ ID NO: 145479 - protein, 176 aa, Unknown
  Bacterial polypetide isolated from the Sargasso Sea
MSDRGVLEAVGLGKNYHDARREIVVLNDLALSVSVGEWLAIVGASGAGKSTLLNLLGGLDTPSAGDVSVAGESLSGMSENERSQWRNQRLGFVFQMHHLLPEFTALESVAMPARIGGAPKQEAEAKSKTLLEQLGLAERLNHRPAALSGGERQRVAIARALVNEPACVLMDEPTGN

SEQ ID NO: 145480 - protein, 111 aa, Unknown
  Bacterial polypetide isolated from the Sargasso Sea
SGGQRQRISIARALATQPRLLVCDEPTSALDVSIQAQILNLLKDLQEQLNLTILFISHDLPVVRQMCDRIAVLKNGKLCEISKTEELFKNPSHNYTKELLKLMPKIESIYN

SEQ ID NO: 145481 - protein, 261 aa, Unknown
  Bacterial polypetide isolated from the Sargasso Sea
MKDIPPVVEASKVDLIFQTADGPVHAISDIDLEINKGDFISLIGPSGCGKTTLLRLIADLEKPTGGMLRVNGISPEEARLNRDYGYVFQSPALYPWRTVDGNLKLPLEIMGVDKNDQEKRAREALEMVDLAGFEKKFPWQLSGGMQQRVSIARALTFHPDLLLMDEPFGALDEIVRDQLNEHFHRLWEQTQKTVVFVTHSIPEAAYLSTKIVVMSPRPGKIIKVIESTLPEKRTLDIRETKEFLELSQRIRKGLRAGHSYD

SEQ ID NO: 145482 - protein, 358 aa, Unknown
  Bacterial polypetide isolated from the Sargasso Sea
TTAVDVTTQAQILVLLDELCQQLNMALLLITHDLGVVRKTADRVYVMQGGKVVESGNTDQIFQAPSQTYTRTLIEAEPKTRRAAGAASGKLLLEADELGVWFDVRKGLLRRTVDYVRAVDGVSLTLRAGRTVGVVGESGSGKTTLALALLRLTQSRGAICFKDQRIDGVSRKALQPLRRQMQIVFQDPFGSLSPRMNVGDIVAEGLEAHGVVERPDQDSKVIEALREVGLDPDTRLRYPHEFSGGQRQRIALARALILKPELIVLDEPTSALDRAVQSQMIDLLLRLQETYGLSYLFISHDLRVVRALADEIIVMRSGRVVEQGGAEQIFCAPQDDYTRSLIKAAMDFEVWKGEALEQ

SEQ ID NO: 145483 - protein, 137 aa, Unknown
  Bacterial polypetide isolated from the Sargasso Sea
SRVGGSAQIKAMKKIAGKLRLDLAQFRELEAFAKFASDLDESTAAQITRGRRMVEILKQNQYVPMTTEKQVAIIYAASQGYLDDIELESVKEFEIGLLEHFESKHSECLEEINSSGDISDDLGKKMNKAIEEFKKSF

SEQ ID NO: 145484 - protein, 316 aa, Unknown
  Bacterial polypetide isolated from the Sargasso Sea
MSFLDLKNVTKIYPNGTKAVHETSLSVDEGEFMVFVGPSGCGKSTLLRMVAGLEDITEGDINLDGQLINEVDPSERDVAMVFQNYALYPHMNVYNNLAYGLKNRGIDKEAIEQKVNDAAKLLQISDFLQRKPSMLSGGQRQRVAMGRAIVRNPKIFLFDEPLSNLDAKLRIQMRLEIKKLQQKVGVTSIFVTHDQVEAMTLADRLAVINNGIIEQLGTPIEIYNNPKSLFVAGFIGSPQMNFLDANLNNKTLSAENFEIKNIESDYNGEVTLGIRPEHLIESENGLINLKVELVEQLGSDNLVYGQIKNIKDFCYR

SEQ ID NO: 145485 - protein, 228 aa, Unknown
  Bacterial polypetide isolated from the Sargasso Sea
MSIIKTENLVRHFTVGTQTVEALRGVSLDIDRGEFVAIMGPSGSGKSTLMNIIGCLDSPTSGTYHLNDKNVSTLDDDALALIRNHEIGFVFQNFHLLARNTALDNVMLPLKYAGIDKSEQEEIAMEVIKSVDLESRAHHQPSELSGGQQQRVAIARALVNKPSILFADEPTGNLDSKTGDDVMNLFTNFHKQGQTIIVITHEIEVANQAERIISIKDGKIFEDQKVLK

SEQ ID NO: 145486 - protein, 121 aa, Unknown
  Bacterial polypetide isolated from the Sargasso Sea
MSIEGVSKKFEQFQAVRHTNLKIRKGEIFCLLGPSGCGKTTLLRMLAGFEQPSEGKIFLDGSELTGIPPFRRPVNMMFQSYAIFPHMTVEQNVAFGLKQDQVAKDKIRGKVQEALELVEMP

SEQ ID NO: 145487 - protein, 103 aa, Unknown
  Bacterial polypetide isolated from the Sargasso Sea
SGGQRQRIAIARELYKNPQLLIFDEATSALDSDTENYIKDEISNMKGKKTMLIIAHRLSTIMDCDRVYVLSNGAILETGTVNELYKNKDSKFFSMCQKQGVIL

SEQ ID NO: 145488 - protein, 496 aa, Unknown
  Bacterial polypetide isolated from the Sargasso Sea
GGSIILDGTDIYENPDNILKLRGKKIGLIFQDPQTSLNPILTIGDQLIETIQTHLKLTTEEAKNKATSLLKEVGIKDAETRFNNYPHQFSGGMRQRVVISLALCCEPELLIADEPTTALDVSIQSQILDLIKRLTKERNLAVILITHDMGVISETTDRVAVMKNGDLVEIGPTKEILTKPKEIYTKALVSSVPPTNKKINRFKIIEKENKTEGETNIKILNRWTKKEIIDQDLVKVKNLSKTFDDNFFTESSKNSVMAVDDVSFNIKEGESFGLVGESGSGKSTIAKMIVNLYSPSAGDIDFDNVCITKIKSNKEMMKFRKQIQMIFQDPYSSLNGRLKVKDIVSEPIKLHNPSISSKDLDSYIYDLLESVELTQQSAERYPHEFSGGQRQRISIARALATQPRLLVCDEPTSALDVSIQAQILNLLKDLQDQLNLTILFISHDLPVVRQMCDRIAVLKNGKLCEISMTEELFKNPSHEYTKELLNLMPKIESIYN

SEQ ID NO: 145489 - protein, 170 aa, Unknown
  Bacterial polypetide isolated from the Sargasso Sea
MNSKKSDFVKFEQVDKSYDGKELVVKGLDLDIAEGEFLTLLGPSGSGKTTTLMMLAGFETPTNGEIYFDGRPINNIPPHKRGIGMVFQNYALFPHLSVYENLAFPLKVRKVDKSEIEERINKTLKMVSLTGFENRMPAQLSGGQQQRVAVARALVFDPKLVLMDEPLGAL

SEQ ID NO: 145490 - protein, 329 aa, Unknown
  Bacterial polypetide isolated from the Sargasso Sea
MPDPSAENLLEVQGLKMHFPISEGFFFNKNVSLVKAVDGINFSIKRGETLGLVGESGCGKTTTGRCILQLEKATEGKIVFEGQDLTQLDSSELSPLRQKIQVIFQDPYSSLNPRLKIGDTISEPMKVHNIQPDPKLRNKRVAELLNICGLPSVMADRYPHEMSGGQRQRVGIARALSLNPEFIICDEAVSALDVSIQAQVINLLEDLREEFNLTYLFIAHDLSVVRHLCQKVAVMYLGKIVEMADCDELYDNPQHPYTKALLNAVPVPDPEVEKNREHNIMTGEVPSPINPPSGCVFHPRCSLAVESCKSDIPVLEDKRAGHFVACTQV

SEQ ID NO: 145491 - protein, 204 aa, Unknown
  Bacterial polypetide isolated from the Sargasso Sea
GDFVSVTGPSGSGKTTFLNIAGLLETSTSGEYLLDGEDIAKLNDSGRSRMRNQKIGFIFQSFNLIPDLNLFDNVDVPLRYRGLNTAERRKRIEYHLDQVGLASRMKHLPSQLSGGQQQRVAIARALATSPRFLLADEPTGNLDSQMAQSVMSLLEDINKAGTTILMVTHDPSLAARAKRQIYIKDGHVSELTNKNSNLHVVGEA

SEQ ID NO: 145492 - protein, 357 aa, Unknown
  Bacterial polypetide isolated from the Sargasso Sea
MSLLKIENLSVSINSQRILDKISLDVEKGEITAITGESGSGKSMTAFAVMQLLPNGSFQSGEILLSGLNLPSLTETELCEIRGNQIGMVFQEPMTALNPLKTIGNQVAETVRLHRSVTYFEALEIAKATLNRVELPPENFPLSLYPYQLSGGQRQRVVIAMAIASMPKLLIADEPTTALDVTTQAQILKLLKDLVDDLNMGMIMITHDLAVVNNMASNIYIMHKGKIVEKGLAENIFTEMKHPYTKMLFNASNHKVNLPKQNTNKPLLEVRNLSRDYVLPRTKIFSKPKIVRAVNNVSFTLNKGERLGLVGESGCGKSTLTRALLGLEEIQREKLEFQVVWYQKIMKPVLPQKKICR

SEQ ID NO: 145493 - protein, 350 aa, Unknown
  Bacterial polypetide isolated from the Sargasso Sea
MSALKINNLNHQINQNLILNDISLDIEEDKITCILGPSGSGKTTLLKLIAGLEKTQKGKIHIKDKLVSSSDTHLKTESRNIGFLFQDFALFPHLNVKENLKFAINGKSDANIEIDEIMKLIKLPNALHKYPHELSGGEQQRVALARAIISKPQLLLLDEPFSNLDLSLKEEIRDDTLHLLQKFNTSVIIVTHDPFEAMFISNKIYILEQRGSIVQAGSPNDLYNHPVSSYVAEFFGETNKFSGKVKNSKIETAVGEIPIDSSYESKLVDIHIRPQAIKLSEEKTPVNGVKGTVMASKLMGSYSFIHLSVLDENKEVIHVHSHMPANFNPKQSTAVGIEIDEEKVFVFPKK

SEQ ID NO: 145494 - protein, 149 aa, Unknown
  Bacterial polypetide isolated from the Sargasso Sea
MQFNKMRNKLFGYAYQFHYLLDDLTVFENCNLVFKISNNKNIEKNSKKIFQILNELGIEDLKNSYPSMLSGGERQRVAIARAIVHEPMFILMDEPTGNLDHENANVIQDLTIKLAKNHNIGIMVATHDLNYANKLDKVFRIENEGLVKK

SEQ ID NO: 145495 - protein, 409 aa, Unknown
  Bacterial polypetide isolated from the Sargasso Sea
NVAGRRLRKIAKSIQTVMGDVTHIASEAVEGNTEIKSFNADSYEKDRFKDANLSNKNQNLKLEATSNLATPIIQVLVSISLAIVAYFALGDQLNINLDSETFVAFFTAAGLMAKPVRQLSSINAIIQKGLAASEEIFEQLDHDEEDDQGNVDSKITGEIIFKDVSFSYDQEKLILNKINLFINKNDTVALVGKSGSGKTTIANLISKLYSPDSGNITIDSVNIEDYKLSHLRNNISIVSQNPTLFNDSIEKNIAYGANDINHEKVEEAAKLSGCIEFIEKLPEGFDTEIGDDGVLLSGGQRQRIAIARAFYKDAPIIILDEATSALDSESEKIVQSAIDRLIKEKTTIVIAHRLSTIENADNIFVIDNGSVVEAGTHGELIELNGLYKSLYKNIDSEIVDKSNNSDKST

SEQ ID NO: 145496 - protein, 247 aa, Unknown
  Bacterial polypetide isolated from the Sargasso Sea
MINQQQILTGLIFAIEPGQFVALLGPNGAGKTSLLRLLQKEYQPSSGQIKLQGQPISTFSQNELAAKVALVSQLSGPLFDLTVTDVVLMGLIPHKALWQTNTEQDLQQLKQSLELVGLVDKERHSFAHLSGGEQQRVLLARAVMQKPLLLLLDEPTNHLDLYYQHQVLRIAKALNITVIASIHDLNLASRYCDRLLLLNQGQLVADGTAEHVLTQELLTEVFRIPCLIDQNPFGDCPRVSFGYKDYI

SEQ ID NO: 145497 - protein, 65 aa, Unknown
  Bacterial polypetide isolated from the Sargasso Sea
FLSQPMFVAEQFTGFEGKFVSIKDTVEAFKTILSGELDSVPEQAFYMTGGLDEVMSKAKELEESV

SEQ ID NO: 145498 - protein, 206 aa, Unknown
  Bacterial polypetide isolated from the Sargasso Sea
MFKAKRAFGAFTLDCELALELGGILGLFGPSGCGKSSLLRIIAGLDRAPGDKLNWQGRALSALLPEARRIGLVFQDSRLFPHLSVLGNLQLAARKGRGRWQPEVLATRLGFAELLPQPAHGLSGGQRQRVALARALLAEPDLLLLDEPFSALDRRSRIHQAHVLKGLQQESGIPMIFVSHAMEEVSLLCDQLVLLADGRVEAQGRP

SEQ ID NO: 145499 - protein, 589 aa, Unknown
  Bacterial polypetide isolated from the Sargasso Sea
MNKSLPELVRQLWKHLDKNKRIKFFFLVIIMIFASFAEVISIGAVIPFLGAMTTPEAIMEISYLQPVIAYLNITDSKDLLLFFTVIFVAAALFSGGMRLFLLWFQTRLGHSVGASIGIEIYRRTLFQPYSLHVTRNSSEVISGITQKASVVVELILIPAFTLIGSTLILLSILTALILIDPFIAIFSFIGFGSIYFLIIKLTQTGLLKDGDRINYERVKIIKSLQEGLGGIRDVLLSGSQMMYVENYKKSEIPMRRAYARINILTMSPRFIIESLGMILIAFMAYSLSNRPEGISSAIPILGAFALGAQRLLPILQQAYGGWQTIRGGQAQFSDAINLLNQPIPDHLNDTETSDNKIEFNEYIEFKNISFSYTSKSPQVLKNISLKITKGQKIGFIGETGSGKSTLLDIIMGLLNPSDGDFIVDGQVISSEHYRFWQKNIAHVPQTIFLSDSSIKENIAFGVSKNKIDDELVKDSARKAQISKTIESWQKKYDTSVGERGIKLSGGQRQRIGIARALYNKANILIFDEATSALDNKTEKLVMNELECLDENLTIIMVAHRLTTLKECDLIIELKDGEIKSQGTYSEIVK

SEQ ID NO: 145500 - protein, 253 aa, Unknown
  Bacterial polypetide isolated from the Sargasso Sea
NEDIEKKINKALSMVSLTTFENRMPNQLSGGQQQRVAVARALVFEPKLVLMDEPLGALDKNLRESMQYELKHIHESLGVTVVYVTHDQGEALTMSNRIAVFNDGYIQQLSSPDELYERPNNSFVAKFIGENNTINGEIVESSQNECKVKTKTGELISANPITVKEVGQKTSLSLRPERVIINPEGNVKNSFDSSIEEIIYHGDHTRLRVNVLNQNDFILKVPNANNSISLTNGNKIKIGWNSEDCRALDLIDN

SEQ ID NO: 145501 - protein, 415 aa, Unknown
  Bacterial polypetide isolated from the Sargasso Sea
SILSHEDVSKKDAEKKAKELMELVEIPDLERRYKSYPHELSGGQRQRIMIAMSLINEPELLIADEPTTALDVTIQAQILDLMNRLKEKLGMSILFITHDLGLVEKFSDRVCVMKEGKIVEQGVTTEIFSNPKHEYTIKLLKSEPKEKDHLLVSEDNILDISNLSVFYKIPSKKLFKTDRFCAVSDISLKIPRNSTVGVVGESGSGKSTLGKAIINLLDFEGSIKFNGKSIKDLSSAKKRLLKKDIQIVFQDPYGSLSPRMTVGEIIGEGLDIHFDFSNEEKLEKISNVMKDVGLDDSLIFKYPHEFSGGQRQRIAIARSIILNPEFMILDEPTSALDRSIQIQVIDVLKRLQDKYKLTYLFISHDLKVIRSMCDQIFVMSEGKLVEFGKADEVFENPQQEYTQKLLRAALKYSSN

SEQ ID NO: 145502 - protein, 163 aa, Unknown
  Bacterial polypetide isolated from the Sargasso Sea
MSKIIELKNVNKWFDKFQALKDVNLEVNQQEKIVICGPSGSGKSTLIRCINRLEEHQDGQIIVDGKEISENTKDIEKIRAEVGMVFQQFNLFPHLSILDNCTLAPIWVKKLPKKQAEEIAMENLKRVQIADQARKFPGQLSGGQQQRGALARALCMKPKIMLF

SEQ ID NO: 145503 - protein, 590 aa, Unknown
  Bacterial polypetide isolated from the Sargasso Sea
LEKIRGRKIAMIPQNAGQALTPNLKIGYQIDEALQLHSDLKEEEREKKISELLNKVRLPSPETIALRYPHELSGGQQQRVAVAMALAGTPDLLLLDEPTTGLDVTTQAHVLELLNFIAKDTGTSMVYVSHDLGAIAQVSDRIIVMYSGEIVLEGPSRDILKKPIHPYTYGLLKSIPKLSLAGLPQSMPGSQPQPGTMHRGCSFFDRCDFSEEKCKNNSPQLEYLEELNTSVRCFNYKSLMNDSQVNQTVNKIKTSLQDKEILNLSEVSISYAKQKLLDQVLNRISDDNPTVKDININIKKGETIALVGESGSGKSTILKSIAGLLRTKGGIIKFDQNRNLSSDIKERDPNDLRIIQLIFQNPDESLNPNHTVEEIIAQPLKLYFGLKGEELKKNIIDLLQKVRLGEFYMSRYPRQLSGGEKQRVAVARAFAAKPDIILCDEVTSALDVSVQAAVLNLLQQLKEDFGTTYIFVSHDLAVVRAISDRVAVLYQGRLCEVGPSKDVYQFPSHPYTEVLLGAVLEPDPDIKPKLVAEDIVEEKPPQKGCSFQGRCSRILGDICKNEVPPWQITNSGNSIRCHIPLKELQKDQIN

SEQ ID NO: 145504 - protein, 221 aa, Unknown
  Bacterial polypetide isolated from the Sargasso Sea
MLLDIENLTKTFPGVNNTSPVEVLKGLELKVEEGETTAIIGQSGSGKSTLLSLLAGLDQPTSGTLKLKERHLDSMTEEELTQFRAENIGIIFQQFHLMTHLNAMENVSLPLEMNHQQDALELAGKALEQVGLGSRMDHFPHQLSGGESQRVAIARAIVIRPALLLADEPSGNLDHDTGEQVADLLFDLVGRTGMTMVLVTHNSELALRCSKQLTLSQGLLQ

SEQ ID NO: 145505 - protein, 609 aa, Unknown
  Bacterial polypetide isolated from the Sargasso Sea
MFKRFESWVEALPDGEPTKPPTGVYAFCRHYTKGYELPLILMSVLTAFIAMLEVSLFGFMGQLVDWLVKKSPETLYQDEGSTLILMGVMVLVVMPLLVLFHALIMHQTLLGNYPMSIRWLAHRYLLKQSVSFYQNDFAGRIATKVMQTSLAVRETVMKLLDVLVYILVYFTSMLVMVASADVRLVVPMLIWLALYIGLQWYFVPRLKMVSTEQADARSTMTGRIVDSYTNITTVKLFAHTDKEADYAKASMRSFLDTVYRQMRLVTGISVSVQIINYLLAFSIAAVSITLWSDNAISVGAIAIAVSLALRLNGMSQWIMWEISSLFENIGTVTDGMNTLSKTTLIQDSPDANTLVVEQGRIDFNQVSFHYGENTGVIDELNLTIKAGEKVGLVGRSGAGKSTLVNLLMRFYDVEKGQICIDGQDIKSVKQDSLRSQIGMVTQDTSLLHRTIRENILYGNPGASETQLEHAIKQAQAHDFINELTDPNGNHGLDAQVGERGVKLSGGQRQRIAIARVLLKNAPILLLDEATSALDSEVEAAIQESLYELMQGKTVIAIAHRLSTIAAMDRLIVLDQGRIVEQGTHQELIAAGGIYAQLWAHQTGGFLGVE

SEQ ID NO: 145506 - protein, 162 aa, Unknown
  Bacterial polypetide isolated from the Sargasso Sea
MEWFFNSSIYFPHLSILDNCTLAPIWVKKMPKKDAEALAMKNLERVQIADQAKKFPGQLSGGQQQRSALARALCMEPKIMLFDEPTSALDPEMIKEVLDAMVDLAKAGMTMIVVTHEMGFAKEVADNMIFMDQGQIVEKAKTKDFFENPKSDRTKLFLSQIL

SEQ ID NO: 145507 - protein, 254 aa, Unknown
  Bacterial polypetide isolated from the Sargasso Sea
MSKVISFQDVSLSFGGVQALKNVSFDIEENSLFAIIGPNGAGKTSLLNCINGIYKPTDGLINIFEQNSNDLHPDEIANLGISRTFQNIELFENMTALDNILIGAHRHVEYGPVSGMLFSKKVRSEEEKARKIAEDVIDFLEIEEYRYSFILSLPYGIQKRIELARALAMQPKVLLLDEPAAGMNNEETEDIARFILDIHEELGITVILIDHDMNMVMDIATEVVVMDFGEKLFQGNPQDAARDQKVIDAYLGVG

SEQ ID NO: 145508 - protein, 530 aa, Unknown
  Bacterial polypetide isolated from the Sargasso Sea
MISTANITMQFGPEPLFENISAKFGNGNRYGLIGANGCGKSTFMKILSGALAPTSGNVSITPGLKVGTLSQDQFAFEQYTVIDAVIMGDTQLWKIKQERDAIYAKPDMTEEDGMRVGDLESEFAEMDGYSAESRAGEILIEAGIEESFHYGPMSQVAPGWKLRVLLAQALFANPDILLLDEPTNNLDIHTISWLETELNKRKCTMIIISHDRHFLNAVCTHMADIDYGELRIYPGNYEYFLEQSALQREQLLSSNAKKSAEIEELQDFVNRFGANASKAKLASSRAKRMDKIKLDEVKSSSRIAPSIRFAPGKKMHRQALVLENLAHGFDGELLFEGGDLILEAGAKLAIIGENGVGKTTLLRCLVNELIHNQGVIKWSENASIGYCPQDSTSDFDNDLTIIEWMDQWRQPKHNDLMVRAMLGRLLFTEDDANKKAKNCSGGEKNRLIFGKLMMQDINVIIMDEPTNHMDMEAIESLNNALKDFEGTLIFVSHDREFVSSLATRIIDIRDRKLVNFQGTFDEYLANLASA

SEQ ID NO: 145509 - protein, 302 aa, Unknown
  Bacterial polypetide isolated from the Sargasso Sea
MILIQCQGLSKHYGSKKALNNVNLTLESGAPIALVGPNGAGKTTLFSLLCGYLTPSAGSVRILGEAPNSPALLGQIAALPQDATLDPNLTIISQLSFFARLQGMDSKQANQEALRVLNLVDLAEVAQQKPPSLSHGMSKRVAIAQALIGSPKLVLLDEPTAGLDPANAKKIRELVRSLSPTTTFVISSHNLDELEKLCDQVLYLDKGELGQSISMRSSNSGSDYLTLTMEHCDSETLIQTVGQIPGVVNITSKQAHVFVIQLDDTANRHYEFETALLTLFKQQHWQYKMLLKGRTLEETLFS

SEQ ID NO: 145510 - protein, 555 aa, Unknown
  Bacterial polypetide isolated from the Sargasso Sea
MAQFVYSMLRVGKVVPPKKQILKDISLSFFPGAKIGVLGLNGSGKSTLLRIMAGIDTEIEGEARPMPGLKIGYLPQEPKLDPTQTVREAIEEAVSEAKNALKRLDEVYAAYAEPDADFDALAKEQGELEAIIQAQDAHNLDNILERAANALRLPDWDEKIEVLSGGERRRVAICRLLLEKPEMLLLDEPTNHLDAESVAWLEHFLQEYTGTVVAITHDRYFLDNAAGWILELDRGEGIPWEGNYSSWLEQKDARLKQESAAESARQKTIAKELEWVRQGAKGRQSKGKARMARFEELNTTDYQKRNETNELFIPPGPRLGDKVIEVKNLTKSYGDRVLIDNLSFSIPKGAIVGIIGANGAGKSTLFRMLSGSEQPDSGTIEIGETVQLASVEQFRDSMNDKNTIWQEISGGQDIMRINNMEIPSRAYVGRFNFRGADQQKIIGTLSGGERNRVHLAKLLQAGGNVLLLDEPTNDLDVETLRALEEAILEFPGCAMVISHDRWFLDRIATHILDYRDEGQVNFYEGNYTEYSAWLKNTYGADVVEPHRLKYKRMTK

SEQ ID NO: 145511 - protein, 303 aa, Unknown
  Bacterial polypetide isolated from the Sargasso Sea
PTNKKIDRFIIIEKENKKQSETNIKILNRWTKKEIINQDLVQVKNLSKTFDDSFFTESSKNSVMAVDDVSFNIKEGQSFGLVGESGSGKSTIAKMIVNLFRPSEGDIYFDNVCITKIKSNKEMMKFRKQIQMIFQDPYSSLNGRLKVKDIVAEPIKLHNPLISSKDMDSYIYDLLESVELTQQSAERYPHEFSGGQRQRISIARALATQPRLLVCDEPTSALDVSIQAQILNLLKDLQEQLNLTILFISHDLPVVRQMCDRIAVLKNGKLCEVSMTEELFKNPNHEYTKELLTLMPKIESIYN

SEQ ID NO: 145512 - protein, 256 aa, Unknown
  Bacterial polypetide isolated from the Sargasso Sea
MSSPILEIKNVTLTFGGVNAITDISFNVMEGEICAVIGPNGAGKSSMLNVINGIYLPQEGSVTYNGNVITKIKPRDAAISGMARTFQNIALFQGMTVLDNIMTGRNLFMKSTWLEQGLNIGRAKKEEVENRIEVEKVIKFLQIEAIRKTPVAKLPYGLQKRVELARALVAEPKVLLLDEPMAGMNLEEKQDMSCFILEINKEFGVTTVIIEHDVGVVMDISDHVVVLDYGKKIGDGTPEEVMNNQDVIDAYLGVSH

SEQ ID NO: 145513 - protein, 376 aa, Unknown
  Bacterial polypetide isolated from the Sargasso Sea
VSIQSQILDLIKRLTKERNLAVILITHDMGVISETTNRVAVMKNGDLVEIGSTKEILTKPKEIYTRALISSVPPTNKKINRFKIIEKENKNEGETNIKILKRWTKKEIIEQDLVKVKNLSKTFDDNFFTESSKNSVMAVEDVSFAIKEGESFGLVGESGSGKSTIAKMIVNLYSPSAGDIDFDNVCITKIKSNKEMMKFRKQIQMIFQDPYSSLNGRLKVKDIVSEPIKLHNPSISSKDIDSYIYDLLESVELTQQSAERYPHEFSGGQRQRISIARALATQPRLLVCDEPTSALDVSIQAQILNLLKDLQEQLNLTILFISHDLPVVRQMCDRIAVLKNGKLCEISKTEELFKNPSHDYTKELLTLMPKIESIYS

SEQ ID NO: 145514 - protein, 227 aa, Unknown
  Bacterial polypetide isolated from the Sargasso Sea
MSLIKVKNLKKQFQIGSETVNAIKDISFDVNAGEFISIMGPSGSGKTTLMNIIGCLDTPTSGEYHLDDNEVSLLDDNELAAIRNKKIGFVFQSFHLLSRNTALNNVMLPLTYAGFDKNEALKKAKSVLDKVGLEDRVSHKPNELSGGQQQRVAIARALVNDPSIVFADEPTGNLDTKTGEEIMSLFKELHRNGQTIIVITHENDIADQTDRIITVKDGLIESDERRV

SEQ ID NO: 145515 - protein, 349 aa, Unknown
  Bacterial polypetide isolated from the Sargasso Sea
MLAVSIKNLSHKINNKSILNDVNFELKKDSIACILGPSGCGKTTLLKLIAGLSHVQDGEIFLNDNLVSSNDFHLKTEKRKIGFLFQDYALFPHQTVKENLQFAIKNKSTSHTIQEILDVIKLSDSLNKYPHELSGGEQQRVALARSIISKPDILLLDEPFSSLDLNLREEVRDDTLHLLQKSNISVLIVTHDPFEAMFISNKIYIMNKEGKIVQSGSPKELYNLPNSSYVANFFGETNKFSGIVKNKTVETPVGEFKVDDSLESKNVDVYIRPEAVKLNQAQTPVNGIKGTVMASKLMGGYSFVHLSVLNNDNEIVHVHSHMPPNFLPNQSSAVGIEIDKEQAFIFPAN

SEQ ID NO: 145516 - protein, 263 aa, Unknown
  Bacterial polypetide isolated from the Sargasso Sea
MENQNSNEIIVKFSDVTKQYGDLVVLDKLNLEIKKNEMVSIIGPSGSGKTTVLRVLMTLEKINGGVIHLDGETLTHMNSKGKLIEANEKYLRERRSKIGMVFQQFNLFPHMTALQNCIEAPIEVLGMKKEQAEERALELLELVGLTDKKDQHPSRLSGGQQQRVAIARALAMRPKVMLLDEITSALDPEVVGEVLNVIRSLNKEHNLTMVMVTHQMGFAREISDRVCFFNEGKIFEQGPPEKLFGDPKNERTKQFLHAVLDAN

SEQ ID NO: 145517 - protein, 231 aa, Unknown
  Bacterial polypetide isolated from the Sargasso Sea
DEIKNGRLEEIINMTNLQPYRKKYPQDISGGQQQRVSIARALAPKPEVILLDEPFTSLDAQMARDLREEVVSLLRATKTTGIIVTHDQEEALSVCDIVSVLENGKVIQSATPQEIYLNPISQTVANSVGDPNIIKGTSTNGRVKTSLGTFNSAYDGDLDVSIRPECIEVNLDSNGDYIVKECIFYGHDQVISFENKNGEVFRARSLPSMIFEPGDQVCIDVTEVTTFPSKR

SEQ ID NO: 145518 - protein, 253 aa, Unknown
  Bacterial polypetide isolated from the Sargasso Sea
MTPLLELNAVNKQFGQNRVLDEVSLTVNAGEVIVILGPSGCGKSTLLRTLNGLESIQGGDIRFDGERLDANTDWQRLRQRIGMVFQSYHLFPNLTVLENVLLGPLQVQKRERQEALLQAEQLLTRIGLWERRHDYPRQLSGGQQQRIAIVRALCMNPQVMLFDEVTAALDPEMVQEVLEVIRDLAGSGMTLLIVTHELAFAQAVADRIVFMDGGHILEQAAPHQFFENPRSQRARQFLAKFSYTTVIKRKESA

SEQ ID NO: 145519 - protein, 358 aa, Unknown
  Bacterial polypetide isolated from the Sargasso Sea
MNKKNLVKNDALIIDDLHHKYDKRECSNWILNEINLKIENGELLGLLGPSGCGKTTLLRLIAGFEYPSKGMISLNDKEISSRKKILSPEKRNIGMVFQDYALFPHLTVLENVIFGLKNKKDRSRVDYLLNVVGLDSFVERYPHELSGGQKQRLAIARALAPGTNFILLDEPFCSLDMHVKLKLRSELPNILKGCNASGLMVTHDPEEAMSICDKVAVMNDGKIHQIDTPINLLNNPKTIFVSSFILGNNIVNLKKNGNSYISCLGEINCSEYSKNTGIKSMSISPKFISIKRSESGDAIVISKEFLGEFLIYKVSINGNILRVRSDINNLLNNGDKCSLSINKNSHYFLYPGAYKEYL

SEQ ID NO: 145520 - protein, 225 aa, Unknown
  Bacterial polypetide isolated from the Sargasso Sea
MIIKTKNLTKEYEAGSQIVKALNGIDLSVEKGEFISIMGPSGSGKTTLMNIIGCLDSPTNGTYYLNDRSVSELDDDELAKIRNEEIGFVFQSFHLLPRSTALENVMLPLKYAGCLENEAIERSKKVLEKVGLQDRVKHSPSELSGGQQQRVAIARALVNKPSILFADEPTGNLDSKTGNEVMNLFKDLNNQGQTIIIITHEDNIASQSNRIITIMDGLIESDTRN

SEQ ID NO: 145521 - protein, 418 aa, Unknown
  Bacterial polypetide isolated from the Sargasso Sea
MIVAVLLPGIGWLSQKINRRLRRLNREHQLLTNELSYIVEETVGGYKVVKVHNGEQYEMDRFTAMSKRLRGYAMRMTVSGGLAQPLTQFLASIALAVVITIAVVQSSSDQTTVGGFVAFVTSMLLIISPLKHLMDVNQPLQRGMTACELIFGLIDEPSEPAGGGKPLERARGEVEFRDVSFSYGSNATHNRHTLTEVSFKVAPGEMVALAGPSGSGKTTLVNLLPRFFDPTGGEILVDGVALPEYGLHALRSQIAMVSQDVVLFNDTVANNVAYGQTADPDRVKAALRAANLWDTVEAMPEGIDTLVGDNGMMLSGGQRQRLAIARAIYKDAPILILDEATSALDSESERHVQAALETLMKGRTTLVIAHRLSTIERADRILVMEAGRIVESGSHRELLTQGGLYAHLHRIQFQKDAA

SEQ ID NO: 145522 - protein, 350 aa, Unknown
  Bacterial polypetide isolated from the Sargasso Sea
MSFLELNKVTKIYPNGTKAVHETSMNVENGEFMVFVGPSGCGKSTLLRMIAGLEDITEGNINLDGILINKVDPSERDVAMVFQNYALYPHMNVYNNLAYGLKNRGISKEDIEKKVNEAAKLLQISEYLQRKPSMLSGGQRQRVAMGRAIVRSPKIFLFDEPLSNLDAKLRIQMRLEIKKLQQKVGVTSIFVTHDQVEAMTLADRLAVINNGLIEQLGTPIEIYNNPKSMFVAGFIGSPQMNFLEGELKNKTLTSEGFEINNVTSDFNGPVILGIRPEHMSQTDKGLINLSVDLVEQLGSDNLIYGEIKNKKDFCFRCPGSQIIKKGSKLSLNINDNNYYVFDKSNGNRVN

SEQ ID NO: 145523 - protein, 197 aa, Unknown
  Bacterial polypetide isolated from the Sargasso Sea
AQCSGGQKQRVGIARALATRPQILLCDEATSALDPQTTASVLKLLGRINRELGLTIVLITHEMDVIRRVCDRVAVLDAGALVETGPVTEVFLHPQHPTTRRFVTESEQVDEGELHKDFDAVAGRIVRLTFLGADTYEPLLGRIARDTGVDYNILSGRIDRIKDTPYGQLTVSLVGGDVQAAQAGFVAAGVHLEELRR

SEQ ID NO: 145524 - protein, 524 aa, Unknown
  Bacterial polypetide isolated from the Sargasso Sea
MAQYIYSMYRMSKVVPPKRTILKDISLSFFPGAKIGVLGLNGSGKSSLLRIMAGVDKEFDGEARALSGINIGYLPQEPELDPEKTVRAVVEEAVADVKNALTRLDQVYAAYAEENADFDALAREQGELEAIIQAKDGHNLDNILDRAADALRLPAWDALIKHLSGGERRRVAICRLLLEKPDMLLLDEPTNHLDAESVAWLERFLHDYTGTVVAITHDRYFLDNVAGWILELDRGEGIPWEGNYSSWLEQKDARLEQEERSENARQRSIKQELEWVRTNPKGRHAKSKARMARFEELQSQDFQKRNETNELFIPPGPRLGDKVLEVKNLRKTFGDRVLIDDLSFSIPKGAIVGIIGPNGAGKSTLFKMITGMEQADAGTIEVGDTVQIASVDQFRDSMNPKNTVWQEISNGQDILQIGNFQIPSRAYVGRFNFKGNDQQKFIGELSGGERNRVHLAALLKAGGNMLLLDEPTNDLDVETLRALENAILDFPGCAMVISHDRWFLDRIATHILDYRDEGKGILRR

SEQ ID NO: 145525 - protein, 285 aa, Unknown
  Bacterial polypetide isolated from the Sargasso Sea
MKIEDNISDEKIVNVVNVKKYFPINSGILFQKKIGDIKAIDDISFSVNKGETLGLVGESGCGKTTTGNIVVRLFQATEGEVWFKGQNITNLKGSKLRRIRRGMQMIFQDPYSSLNRRMNIGDIIGEPLQVHGIEEGKNKVEKVKYLLNTVGLSSLFINRYPHEFSGGQRQRIGIARALAVNPEFIVLDEPVSALDVSIQAQIINLLMKLQDELNLTYLFIAHDLSVVRHISTRVAVMYLGKIVELTDTVELYNNPKHPYTRALLSAVPIPDPDIEESRERIILSR

SEQ ID NO: 145526 - protein, 262 aa, Unknown
  Bacterial polypetide isolated from the Sargasso Sea
MDKNSQEIIVKFDEVTKQYGDLVVLDKLNLNIKKNEMVSIIGPSGSGKTTVLRVLMTLEKINGGVIHLDGEPLTHMDTNGKLVEANEKYLRDRRSKIGMVFQQFNLFPHMTALQNCIEAPVEVLGMKKEEAEERALELLELVGLTDKKDQHPSRLSGGQQQRVAIARALAMRPKVMLLDEITSALDPEVVGEVLNVIRSLNKEHNLTMIMVTHQMGFAREISDRVCFFNEGKIFEQGPPEQLFGDPKNERTKQFLHAVLDAN

SEQ ID NO: 145527 - protein, 377 aa, Unknown
  Bacterial polypetide isolated from the Sargasso Sea
FAHNYHEDRAALNAMAYFRDRSLEYGTVAAWFRFSLNGLAGILPVIMVGGSLWFWSKGGVTAGDIAAAGAISLRLSQMTGWVSYTLMSLYTNIGEVEDGMRTLSPPHDLIDAHNAEPLRVASGKIHFKGISFAYNREIGGVDDISLTIGAGEKVGLVGASGAGKSTLVSLLLRLYDPEKGSIYIDDQNLRSITQESLRSQIGMVTQETALFNRSARDNILYGRAEAKEQEVVSAAKQAEAHQFILNLKDHNGRTGYQAHLGEQGVKLSGGQRQRIALARAILKDAPILVLDEATSALDSEVEACIQTALDRVMKGKTVLAIAHRLSTLSKMDRIIVMDQGRIVETGTHKQLLALDGLYCRYWRRQSGGFIETRQAAE

SEQ ID NO: 145528 - protein, 325 aa, Unknown
  Bacterial polypetide isolated from the Sargasso Sea
ETKKILTNPQENYTKSLVSSVPPTNKKISRFVIVEKEHNKKKENNIKILNRWSKKEIISQDLVQIKNLNKSFDDNFFTENSKNSVMAVNDVSFEIKEGESFGLVGESGSGKSTIAKMIVNLFKPTSGDIFFDNVCITKIKQRSELMKFRKQIQMIFQDPYSSLNGRLKVKDIIAEPITLHNPSISNIDLNNYIYDLLESVELTQKSADRYPHEFSGGQRQRISIARALATQPRLLVCDEPTSALDVSIQAQILNLLKDLQEQLNLTILFISHDLPVVRQMCDRIGVLKDGKLCEVSITEDLFLKPTHEYTKELLRLMPKIESIYN

SEQ ID NO: 145529 - protein, 254 aa, Unknown
  Bacterial polypetide isolated from the Sargasso Sea
MSKIISFDNVSLKFGGVQALKEISFDIDEGSLFAIIGPNGAGKTSILNCINGIYKPSSGKINIFGEDSANLNPDEIANLGVSRTFQNIELFENMTTLDNILIGAHKHVNYGPIRSLIYSKKVRIEEEKARKISEDVIDFLEIEEYRYSYILSLPYGIQKRIELGRALAMEPKVLLLDEPAAGMNNEETEDIARFILDIHEELGITVILIDHDMNMVMDIATEVVAMDFGEKLFQGDPKDAAKDQKVIDAYLGVG

SEQ ID NO: 145530 - protein, 285 aa, Unknown
  Bacterial polypetide isolated from the Sargasso Sea
MTKNIIKTWGIRENTNQKLLKLSNITKIFDDRSISYRKKLIDEKAVKAVNDVSFELFEGETLGLVGESGSGKSTIAKIITGLVRPTAGELEYNNFSLYNSKKKYQISKSRGQIQMIFQDPYSSLNPRFKVRDIIAEPLKFFQKNITKNDLDQSVFDLIDIAGMTRQSLDRYPHEFSGGQRQRISIARALATRPRLLICDEPTSALDVSIQAQILNLLKDIQDELHLTMLFISHDLPVIRQMCNRIIVLKNGIICETNEAETLFNNPKHQYTKELINLMPKIESII

SEQ ID NO: 145531 - protein, 365 aa, Unknown
  Bacterial polypetide isolated from the Sargasso Sea
NNIGLVIITHDMGVVAETADNVLVMKGGKEVEHAEVNNLFKKPTKPYTKSLLAAVPRLDIKTFENQTSSNTSTIPLVKINQVSKTFSKDNYLFFDSLKTHALDNVSLEIKYGETVALVGESGSGKSTLGRAIVKLENIDSGDIIVDSLNINSSKSDDLKILRSNAQIIFQDPYSSLDPRYSVGRSIAEPILIQRQCSRSEAKDRVSDLLKSVGLTNEMANRYPHEFSGGQRQRIAIARALASEPKFIVADEPTSALDVTIQAQILELLNNLKNERNISLLFITHDLAVVRQISNQVAVMCQGKILEKGPTDSVLDNPQNDYTKSLLSAAPYPDPEKRKKLKRNIDLKSFNTGPLIEIANNHWAAS

SEQ ID NO: 145532 - protein, 263 aa, Unknown
  Bacterial polypetide isolated from the Sargasso Sea
MKNKNSDEIIVKFEEVTKQYGDLVVLDKLNLDIKKNEMVSIIGPSGSGKTTVLRVLMTLEKINGGVIHLDGEPLTHMDSSGKLVEANEKYLRDRRSKIGMVFQQFNLFPHMTALQNCIEAPVEVLGMKKEEAEERALELLELVGLTDKKDQHPTRLSGGQQQRVAIARALAMRPKVMLLDEITSSLDPEVVGEVLNVIRSLNKEHNLTMIMVTHQMGFAREISDRVCFFNDGKIFEQGPPEKLFGDPQNERTKQFLHAVLDAN

SEQ ID NO: 145533 - protein, 233 aa, Unknown
  Bacterial polypetide isolated from the Sargasso Sea
MPLAVDIRKTFQSAERCFTLDVAFRTTTQRVVLFGPSGAGKSLTLQAIAGLLRPDEGSITLHGNALFDSARGVDQKPQARKIAYLFQDYALFPHLNVRQNIGFGLQQGWLNPRARFSHPQVDYWLEALELKSVAGNYPAQLSGGQKQRVALARALVAQPQLLLLDEPFSALDSALRQRMRSELSDLQTRLDIPMVLITHDPDDVAAFGDQVVKVSDGCVRENQTFAGYVRSES

SEQ ID NO: 145534 - protein, 156 aa, Unknown
  Bacterial polypetide isolated from the Sargasso Sea
KDIVSEPIKLHNPSISSKDIDSYIYDLLESVELTQQSAERYPHEFSGGQRQRISIARALATQPRLLVCDEPTSALDVSIQAQILNLLKDLQEQLNLTILFISHDLPVVRQMCDRIAVLKNGKLCEISKTEELFKNPSHDYTKELLTLMPKIESIYN

SEQ ID NO: 145535 - protein, 176 aa, Unknown
  Bacterial polypetide isolated from the Sargasso Sea
MIKIKNISKRFFIKNSEVQALNKINLLIEEKDCFAVVGESGSGKTTLANIILGIYQQDEGDISFFEKQLFKKRNLEERKLIQYVQQNPMSTLNPKKTIFSTISLPLKIHKIVKKDKIEERVKKLLSYVGLNPEFMVRYPDTLSGGQKQRVAIARALAAEPKVLILDEPTSALDVIV

SEQ ID NO: 145536 - protein, 232 aa, Unknown
  Bacterial polypetide isolated from the Sargasso Sea
MKNNQTNDDLFNLVNVNKTVLSPEGSLTILSDISLRIKEGESVAIIGTSGAGKSTLLSLMAGLDVPSSGQINFKGNDLAALNEDQRAEIRAKNVGFVFQSFHLIPSLNALENVMFPMEMNNVSDYRNKATEILTNMNMKERLTHYPSQLSGGEKQRVAIARAFASNPSVLFADEPTGNLDSKTGENIIETMFSLNKLSSTTLILVTHEKRLAKMCDREICLDAGKLSSNSEH

SEQ ID NO: 145537 - protein, 158 aa, Unknown
  Bacterial polypetide isolated from the Sargasso Sea
FIYFPYDSSSNCIEAPVEVLGMKKEEAEERALELLELVGLTDKKDQHPSRLSGGQQQRVAIARALAMRPKVMLLDEITSALDPEVVGEVLNVIRSLNKEHSLTMIMVTHQMGFAREISDRVCFFNEGKIFEQGPPEQLFGDPKNERTKQFLHAVLDAN

SEQ ID NO: 145538 - protein, 517 aa, Unknown
  Bacterial polypetide isolated from the Sargasso Sea
MLLSLQNVTLKSYNRNIETVILDSINLDIEPGESVGLVGETGSGKTMLAWTILNQLPITNHTLSGNVVFNKQELTLDTKNIKGNQISIVFQSPMQSLNPIQTVGKQFSLILMKRFQINKTDTLSLEKEWMKRVHLDDQDILSRYPHQLSGGQMQRVMIAIAMSVKPKLLIADEVTTALDANLRNDILDLIDELRDQEKTSVLLISHDLLLVKNRCKKIAVMKSGKVIECSSAEMLFKNPKQKYSRKLIDALDYKKSKDVSKKHETDILFSINNLYKTYVSQGKDHAALKNINFDIYKNEILGIVGESASGKSTLAKVLLQIVPQDKGDIMFYSKGTAPIIHEKPNRLIGAVFQDALGSLNPRMSIFDILMEPLDLAGGLDLDTKLNKLNKCIESVGLSTDLLKRYPHMLSGGQRQRVSIARALMTDPSLLILDEPTSALDVQSQKTVLKLLRSLNKDKRLTIVLISHDLRIVMETVDRLAVLYKGEIIETGNPNTIYNNPQRSYTKSLIRSEHDNEK

SEQ ID NO: 145539 - protein, 205 aa, Unknown
  Bacterial polypetide isolated from the Sargasso Sea
MNLIIKSLNFSYQSEGVFKDLNLNFNSGILNLVSGPSGSGKTTLLNLIAGLEKPSSGLIMLDDNIQSSIDKFVEPENRNIGFVFQDFALFPHLNVKQNIEFSENGNKELFNTLIDNLSIKNHLSKYPHELSGGQQQRASIARAIYSEPKILLIDEPISNQDKNNKIEIIKIISDFIKDKEIVCILVSHEEINNIAQVETRSYTLS

SEQ ID NO: 145540 - protein, 524 aa, Unknown
  Bacterial polypetide isolated from the Sargasso Sea
MPYLWPKNNKNFKIRLILAICFLIFAKLANVSVPIFLGKAVDSLDGLNKNSLIIFVPIVFIAAYGIARFLHVGFGEIRDALFARIGQNAIRRAALKVFEHLHNLSLKFHLNRQTGALSRIIDRGIGAIDFILRFVTFNIFPTLLEMILVCLILLNLFSWYFSIITFFVILFYISFTFIVTEWRVQIRKKMNDADNVRGQKSIDSLLNYETVKYFNNENFESSNYDKSLEEYEKFAIKSAISLNFLNLGQALIITIGIIGMMVLTVYEIQSNKMSIGDFIIVNTYLIQLSIPLNFIGFVYWQIKQSLVDMENMFTLLNEKTEITDNIHAKDLIISDASVTFKNVSFHYDEKRKIIKDISFKIYPNQTVAIVGPTGAGKSTISKIFFRFFDPISGSILIDNQDIRKVTQKSLREQIAVVPQDTVLFNETLFYNISYGNPNSSKEEIVQVTKMAKLHEFIENLPDGYNTIVGERGLKLSGGEKQRVAIARALLKKPKIFFFDEATSSLDTKTEKEIQNNLRTFIKKI

SEQ ID NO: 145541 - protein, 158 aa, Unknown
  Bacterial polypetide isolated from the Sargasso Sea
MSDPIIKIEGMNKWFGDFQVLKDIDLEVEKNKKIVVCGPSGSGKSTLIRCINRLEEHQKGTITVDGTELTENTKNIEAIRAEVGMVFQQFNLFPHLSILDNCTLAPIWVKKMPKKQAEELAMKQLEQVQIADQAQKFPGQLSGGQQQRCAIARALCME

SEQ ID NO: 145542 - protein, 208 aa, Unknown
  Bacterial polypetide isolated from the Sargasso Sea
MSNLIEVQSVNKTYKRGEETLVVLDELSLEVPKGDYLALMGPSGSGKSTLLNLIGGLDTPTSGQVVINGEHLEKMGASALSDWRASNVGFIFQFYNLLPVLTANKNVEIPLLLTNLSGSQRKMHVETALNVVGLADRGGHKPNELSGGQQQRVAIARALVSDPDILVCDEPTGDLDRDTATEILELLQILNRDHGKTILMVTHDPVAA

SEQ ID NO: 145543 - protein, 248 aa, Unknown
  Bacterial polypetide isolated from the Sargasso Sea
MASLEINSLVKKFSETTAINDISIRILDGEMVGIIGKSGAGKSTLMRLINRLIEPTSGSIAYNGIEITSLKGKNLKQWRSKCAMIFQQFNLIDRLDVLTNVLSGTLGINFKLLKLLKIYSKKEKIEALTYLNNLDLSDKALQRVGTLSGGQQQRVAIARAMMQNPSILLADEPISSLDPKNSKVVMDDIKKINKQDGIMVICNLHSLEIAKEYCDRLIGLSDGKIVFDGHPSSLTKELAEQLYDLENE

SEQ ID NO: 145544 - protein, 675 aa, Unknown
  Bacterial polypetide isolated from the Sargasso Sea
MNEIIESVKNLSIGFNSQKGKQISILRNVSTNIKKGETVGIVGESGSGKSTLALAMMGYIKQGLFPLKGECLFKSEDLLKMSSRQLEKIRGRKIAMIPQNAGQALTPNLKIGYQIDEALRLHTDLNKTERDKKISELLNKVRLPSPETMAFRYPHELSGGQQQRVAVAMALAGKPDLLLLDEPTTGLDVTTQAHVLELLRFIAKDTGTSMIYVSHDLGAIAQVSDRIVVMYAGEIVLEGPARKILKEPIHPYTYGLLKSIPKLSLAGLPASMPGSQPQPGSINEGCSFYDRCNLATDNCKKNSPDLEHIKELDTNVRCFNYKELINQNNNLQTSITKKSNNSEANEVLKLKDVSISYAKQKFFDQLLNKISDQNPTVKDINIDIKKGETIALVGESGSGKSTILKSIAGLLKTKDGQIKFENDRILSSDLKMRNPNDLRAIQLIFQNPDESLNPNHTVEQILSQPLKLYFNLSGEELKKNIIDLLKKVRLGEFYMSRYPRQLSGGEKQRVAVARAFAAKPDIILCDEVTSALDVSVQAAVLNLLQQLKEDLGTTYVFVSHDLAVVRAISDRVAVLYQGRLCEIGPSQNVYKFPSHPYTEVLLGAVLEPDPDIKPKLVAEDIVEEKPPEKGCSFQGRCPRKIGDICNSEVPPWQIGENGNAIRCHINIEELASLQQ

SEQ ID NO: 145545 - protein, 506 aa, Unknown
  Bacterial polypetide isolated from the Sargasso Sea
YRHNIFLATIIIAALIRLFNTWINIRLAAAIGSDISIKAFESLVNKPYKFFISSNSSSILSISTLYVNYVSQIVKQFLTFFTSLVLSCSIVIILLSINFKLTSLIFISLCFCYFIQAYFSKKYLNRNSKLLAAASQKHVQTVQESYSSIRDLIIDNSQKTFTENYSNIDIQMRRYEANMQFVQAFPKYVIECFGLVLVAILCVFLYKTSDSNLTVISTVGTISLGLQKLLPLLFAMYSSWAILKSYVYAVNMVLDLTESPYKPYKLPIKTIKDFNFKSLVVRNLSFKYKKNSQYILNNVNFNIQAGDRIGIIGETGSGKSTLIDLLMGLLIPDSGTINFNSINIHNNKKTLLNWRKLISHVPQDVVLCDASIAENIAFGLKKDEIDLIKLEEVIVNSKLEDLVKSLPDGYETFVGERGINLSGGQKQRIAIARALYKNKKIIFLDEATSALDKKTEKEIIESIKALDKNITVFFISHRMSALKFFNKILNVENGKLEQIDQNRINK

SEQ ID NO: 145546 - protein, 168 aa, Unknown
  Bacterial polypetide isolated from the Sargasso Sea
MSKNTEFVKFDKVDKSYDGKVLVVKDLNLNISEGEFITMLGPSGSGKTTCLMMLAGFETPTNGEIYLDSNPISNIPPHKRGIGMVFQNYALFPHMTVYENLAFPLRVRKVQKDEIDKKVDKALSMVSLSGFESRMPAQLSGGQQQRVAVARALVFDPAVVLMDEPLGA

SEQ ID NO: 145547 - protein, 303 aa, Unknown
  Bacterial polypetide isolated from the Sargasso Sea
IAGLEKIDNGKILLEEKLLNDLLPSKRKISMVFQSYALYPHMNVYQNISFGLVTEKISKIEIKKKVIEVSKILKILDLLERKPAELSGGQRQRVAIGRAIIRNPKLFLFDEPLSNLDAALRSEMRVEISKLHKKLKTNVVYVTHDQIEAMTLADKIVIMNKGNIEQYGSPDEIYNSPQNIFVAEFIGNPKMNILKISSSDIIDQNTIKLFDRKIKFENIKFSNNVYVGFRPEDISLDKNSEIFTKINIELVENLGSEKIIYGNLNGKEIRVKSAKNITDKNITIYLPKNKIYLFDEDKNRLKA

SEQ ID NO: 145548 - protein, 247 aa, Unknown
  Bacterial polypetide isolated from the Sargasso Sea
MSFIELVDLKKRYGEHEVLRGIDLNIEKHQVVTLIGASGCGKSTLLRCINALETIDTGKVLIGGDVVSGPGVDVNRLRKRVGMVFQSYNLFPHMTVLDNVALGPVKLLGENVGAARERARALLDRVNLSHRAEYYPDQLSGGQQQRVAIMRTIAMRPEAMLLDEITSALDPELVSEVLNIVRDLAADGMTMILATHEMQFAREVSDQVVFLEQGRVLEKGPPSQLFGDPVEARTREFLKKIVDAGRL

SEQ ID NO: 145549 - protein, 192 aa, Unknown
  Bacterial polypetide isolated from the Sargasso Sea
RRRFCLIVGQSGSGKSTFLNMIGLLDSITDGSIEIEGKDVSELTDNELSKFRGEKIGFIFQSFFLLPGLTAQENVAEGLLYQGISRSERLEKAKEVLEQVGLGDRLTHLPKELSGGQQQRVAIARALVQDPAFVLADEPTGNLDKESGINILNILKDLNNQGKTVIMITHNQEHASMFKKVIELVDGKIVNQ

SEQ ID NO: 145550 - protein, 134 aa, Unknown
  Bacterial polypetide isolated from the Sargasso Sea
MRCLTAEQNVQMGADLIKGLTYLQRREIARNWLSAVGLEEHHKKLPNDLSGGQKQRVAIARALSANPKLLLADEPTSALDSVTGREIVTLLRKLAKEQNCSVLMVTHDPRISDMADRILNMEDGKIYSAHSELI

SEQ ID NO: 145551 - protein, 279 aa, Unknown
  Bacterial polypetide isolated from the Sargasso Sea
LSERIKSVTSIQQVTKAMKMVAAAKVKKAQEKMEISRPYSKSTQELICRILPQISVSDISLVEKRKVKNTGIIVITSDRGFAGSFNSSVIRLAEREIEKLGKDSVELFCLGKKASEYFSKRDFNVKKTYFDFWKDMNYDTASKISASFINSFENNEIDEVHVIYNKFKTLASQDLIMEKVLPVDFTADYNATNYNYDYEPGQKEIVSTLIPKHINVQMWQQLLESYSSEEAARMIAMDNATENAKEIIKELKLEFNKARQAAITTEMLEIVGGAEALVD

SEQ ID NO: 145552 - protein, 246 aa, Unknown
  Bacterial polypetide isolated from the Sargasso Sea
MLSMKNISKVFKTDLVETHALRDFNLEVNEGEFVAVTGPSGSGKTTFLNIAGLLEGFTHGDYFLDGINVSNLSDNKSAAVRNEKIGFIFQGFNLIPDLNLAENIEVPLRYRGFSAKERKRRVEQALEQVGLGARMKHLPTQLSGGQQQRVAIARALAGEPRFLLADEPTGNLDSLMARQVMELLENINQSGTTIIMVTHDPELARRAQRNIQIVDGQVCDFTMYQPNAARSASHSSVDKLVANAQG

SEQ ID NO: 145553 - protein, 357 aa, Unknown
  Bacterial polypetide isolated from the Sargasso Sea
MASITLKNISKSFADNQVIKNVDLEINDGEFVVFVGPSGCGKSTLLRIISGLEDLNEGNIFIDSDNVTDKIPYDRALSMVFQSYALYPHMNVFENIGFSLKTSGIKKDILSKKVVEIAKILRLEDLLNRLPKQLSGGQKQRVAIGRAIIREPKAFLFDEPLSNLDATLRVEMRLEISRLHKKLGITSIYVTHDQVEAMTLADKIVVLNEGQIIQTGTPYELYNYPKNLFVAGFIGTPKMNILDCYQRGGFIYLVGNKDKKINIKTKLMDVKKIGFRADNVILSDPNKNTLLGEIKFCEYLGSEQFVYVDCDINDKLIVIKISPKIKVVLNNKVGLKFTSENTYFFSQNGNRINKNLN

SEQ ID NO: 145554 - protein, 246 aa, Unknown
  Bacterial polypetide isolated from the Sargasso Sea
MLSMKNISKVFKTDLVETHALRDFNLEVNEGEFVAVTGPSGSGKTTFLNIAGLLEGFTHGDYFLDGINVSNLSDNKSAAVRNEKIGFIFQGFNLIPDLNLAENIEVPLRYRGFSAKERKRRVEQALEQVGLGARMKHLPTQLSGGQQQRVAIARALAGEPRFLLADEPTGNLDSLMARQVMELLENINQSGTTIIMVTHDPELARRAQRNIQIVDGQVCDFTMYQPNAARSASHGSVDKLVANAQG

SEQ ID NO: 145555 - protein, 339 aa, Unknown
  Bacterial polypetide isolated from the Sargasso Sea
MNAVFEPRRQSDHAGDHVLVADKLARYYTVKRGLFASGTVKALNGVSFALERGKTLAVVGESGCGKSTLARQLTMIEAPSAGRLLIDGEDVAGADHAKIAALRRRVQMVFQNPFASLNPRKTVEQTLGEPLAINTQLSSTERAERIAQMMRTVGLRPEHAKRYPHMFSGGQRQRVAIARAMILDPQIVVADEPVSALDVSIQAQILNLFMDLQEQFKTSYVFISHNLSVVEHIADDVMVMYFGGVAELGDKKRIFSNPRHPYTRALMSATPSIFEADRTIKIKLQGEMPSPLHPPSGCTFHQRCPYVIDRCRSEEPKLREVDGRQVSCHRAEEVGDVDA

SEQ ID NO: 145556 - protein, 252 aa, Unknown
  Bacterial polypetide isolated from the Sargasso Sea
MRDVFGHGVYPCHLESIARISMQDVLLQVQAVSKSYHDGDVTTQVLSEVDLQVFKGEQLAIVGTSGSGKSTLLHIMGTLDKPSAGKVLLAGEDLYQVSSARQAQIRNQDLGFIYQFHHLLPEFSALENVAMPAFIQGRDRAQAQADAKVLLERVGLGHRMSHIPAELSGGERQRVAIARALINKPKLVLADEPTGNLDAKSGEAVYELIRELANQLGTAFVVVTHDPKLAARMDRQLTMKNGYLQAVAEHAQ

SEQ ID NO: 145557 - protein, 1146 aa, Unknown
  Bacterial polypetide isolated from the Sargasso Sea
MPEDRRDDRADAFLALTAAQPVRPWPITAFIWRHYRGRIGLLTLLQMLGMLATLASPWLLNHSMTQLGAGAPTEQKLLLAFALFASVLASGMLAEHSLQLALKMHVPIRRLLAESLLAKVMKLGGKSFDDRAGGRVQNLINRDVWDITWILADPAMPLTMLLQLLGTIALLVWQVGSAGLVGFAVLTLLLLISTRVVRRMNQQEQQLKRQQDERNGILAEYIKKLRLVRQNGLGAFFTRAAGHKRQQELGVLGRVLRLDAINESLMLSTPLLVTLATFTTYLVSGRELTLPQVFTTIALFTVLRIPMMRLPYLIRTLINFNTGFNRLCEFLNSPEQHRDLTDPSLPVGGLRLDNVTALHQQKPVLEGISLHIQPGELVGITGATGAGKSCLLHLIAGFDNGFEGSIRRHGRVAHLGHKPWLMNDTIRNNILFGQPWHGERYRWVLGACALGADLTLLSHGDQTLVGELGTRLSGGQQQRVALARALYAQADILLLDNPLSALDPIVSAQVLEQGLAFKPGPTRLLVSHDPDVLAHCDRVIRIEQGRLVELDAHQLADLIQHPRPTPPVPPQEAEQFSEEKVVEGKVDWGLFGFMWQRLAAPGAILLALLLTLGQEGLRIASDLWLGGKAGVTGVSELLGIYVLLGAGSLTCIMVVRVINYKLGLKLAWTLFDGMLGRISRAPMAFFDKVPQGRILNRFDRDLGEAQEILLSMLMGLFGMLVSVALQVVVIGVNMPLLLLIAPLVGWALYVLQRRYRAVQLKLRRQASVLRSPLYISISETIRGAPALRLAGAERFALDQVLLHYDNNLRSWYTTTSINRWLGMHQTLLSAALVGAVALMVAFGNSSLLGAVAITYAFTASAMLNSLIRTFAEVEQVMNAVERVREYSEIESERQEGEALATAHPAVRFDNLGLRYPQASQWALHKVNFELAPGEKVGVCGRTGAGKSSLLGVLQAMYPASQGEIYYGEQPLSRLAPEAVRDLYDTVSQIPLTFFGTLRANLAPLTEHDDAALEQALARVGLAERSAGRLDEELDKLQLSAGETQLLVIARILLSRRPLIVLDEATSDLDHIGMRKMAELLYRYRPEASYLVIAHHLEPLLSVDRVVVMEAGTVVEQGSPVSLLANSHSRFHQLFVGQVNRQVPQTA

SEQ ID NO: 145558 - protein, 231 aa, Unknown
  Bacterial polypetide isolated from the Sargasso Sea
MQEYVLQARGITKAFVQGGFNVQVLNNTELTVRRGEKLAVVGASGSGKSTLLHVLGGLDEPSAGEVSLLGKPFTQLAERERNELRNRALGFVYQFHHLLPEFTALDNVAMPLRIRRMTTEDAREQARAMLERVGLGPRAKHRPGELSGGERQRVAIARALVTKPACVLADEPTGNLDGTTADTVFNLMLELSETLETSFVIVTHDPDLAARCDRIMRLRDGVLHEEPALPV

SEQ ID NO: 145559 - protein, 357 aa, Unknown
  Bacterial polypetide isolated from the Sargasso Sea
MSKIDLNNISHTYNPNDPEPTYALNPFSMTWENGKRYAILGPSGCGKTTMLNIVSGLVRPSAGSILFDDKDVTDLKTEDRNIAQVFQFPVIYNTMTVFENLAFPLICRDFKKEKINERVNSVAETLNLQSFLKSPARKLTADQKQLISLGRGLVREDVAAVLMDEPLTVIDPDLKFRLRRKLKEINEEFKTTLVYVTHDQNEAMTFADNIIVMSDGEVVQAGTPKELFERPNTTFVGYFIGSPAMNLFETEASSNDCVKINGTLIKTTTNLSKLKDKKIKLGIRSEFINLAEDQKDNLLSVEVDKVEDLGNFKLLTAKMGELTIKSKINRETEVPSSDVKLHIPADKCCIYENEILI

SEQ ID NO: 145560 - protein, 610 aa, Unknown
  Bacterial polypetide isolated from the Sargasso Sea
MESLTPAQRNAHNAKLSSYAHRPIAFLFRYIRLHPVAHLIVLCSVLAAVGCALGSQYAIKHLIDVLATGRHHPGPLWSAFALLVGLIAADNLLWRVGGWFAAHTFVAVTGDLRRDLFQYLIGHSPTYYAEKQPGTLASRITATSNAVYTSENTMAWNVLPPCIAVMGAILMIIVVNPMMAAGLLGCSAVLSVVLFKLAGRGSARHHAFAAKAAAVDGELVDVIGNMGLVRAFGMTLREQKRFGATVKAEMDARQQSLLYLEKLRLLHAVITAMLSAGLLGWALWLWDQGRATSGDIVLVSSLGFTILHGTRDLAVALVDVTQHIARLSEAVKTLLEPHGMPDRSDAQPLSAKGGRVDFERVTFAYPHRRAILDHFDLHIEPGQRVGLIGKSGAGKSTVLALLQRFYDTQDGAVKVDGQDVKTITQDSLRQAIALVPQDISLLHRTIYDNIAYGRPEATRDEVLAAARDARCAEFIEAMPEGYDTIVGDRGVKLSGGQRQRIAIARAILKDAPILLLDEATSALDSASEEAIQSALDRLMVGRTVIAIAHRLSTLRNFDRIIVMNNGKVIDDGAPDVLRNRPGLYRDLLAKQHGRHHPAPDGSTPTGERVA

SEQ ID NO: 145561 - protein, 541 aa, Unknown
  Bacterial polypetide isolated from the Sargasso Sea
MVGRPVRDARIRGAQRRLLDRGDPARVAHRCLGGCRARRGRAARHRLRAHRGGAYRRDARAQYRADDPQHRDVRADDGAARFARRARAARGRARHPRHRRGACRARAVPVFAAADRVERRGRARPGAAARDRSGARDGHDARAAVAARRSRARAAGDPERRAHRARAEHRIDRGRRADRRRRLRHLHLPGDRAVGRRSRAARRDPDDRARAGGGRHIRSRDHAREGACRMIEIERAGKRFGDIVAVDDVTLTMKRGTITALVGASGSGKSTLLRMINRLIAPTSGTIRIDGVDTATVAPEQLRRGIGYAIQGHGLFPHWSVARNIATVPRLLGWPADRIDARVSELLDLFHLPPAEFADKLPHELSGGQQQRVGVARALAAEPAMLLMDEPFGALDPIIRNKAQDDLFALQRRLGITVVIVTHDIEEALKLGDTIAVMDGGRLLQVATPAEILGKPAAGVVEQLVAGVDRPLRLLALTPIDAVAEPGHADGEPIAATRTLRDAVSELLWRGVDALPVDDGDGRNPRRITLDAIRAHARKPA

SEQ ID NO: 145562 - protein, 296 aa, Unknown
  Bacterial polypetide isolated from the Sargasso Sea
RLHLKLQEGLAAIKRIFEIMDTEPDIVSKPDAKPFKSFEKSIELKVSAFHYPEQPEATLEDIQLKVKKGEAVALVGSSGAGKTTLANLIPRFFDVTRGEVLIDGVNVKDYDLQAMRSQIAIVTQDTILFNDSVANNIIYGQPDCSKERMYAAARAANAHEFVSQLTDGYDTLIGEKGVKLSGGQRQRLSIARALVKDSPILILDEATSALDSESEIEVQQAIENLMENRTTMVIAHRLSTIRNADRICVMEEGRIVEEGTHEELLLLEGRYSQLHALQFRSETEEELGLSGSYLVS

SEQ ID NO: 145563 - protein, 285 aa, Unknown
  Bacterial polypetide isolated from the Sargasso Sea
KQLANVNSDMQRGISAAQSIFLILDENIEKDIGTVSVTKAKGLIEVKNVTFKYPTKDEPVLNNLTLTIQAGESIALVGRSGSGKSTISNLLPRYYDLDLPSQILLDGIPLNDYKLTDLRRQFALVSQQVVLFNDTIANNICYGIQRDITDAELLEVAKQAHVWEFVKDLPEKLNTMVGENGVMLSGGQRQRIAIARAILKDAPILILDEATSALDTESEKLIQHALDDLMKDKTSIVIAHRLSTIENSDKIYVIDNGRVIESGDHTSLLSNDGTYSALCKMQFGE

SEQ ID NO: 145564 - protein, 532 aa, Unknown
  Bacterial polypetide isolated from the Sargasso Sea
CSFQGDILETYKLATGPIRFNNINLNSNIMHFRDESLGSNNWAVSPKRTKTKSAILANDPHRTHAVPSLRYISHLNGPGINVIGAGEPALPGISIGHNDNIAFGLTIFAIDQEDLYYYDIDDKNPNHYKYKGQYEVISSITEEILVRDQDPEIVKLEFTRHGPIIKRDKNRIYALRAAWLDEGMAPYFGSVEYMRSNNWREFLAALNRWGAPAENQVYADKEGNIGYKPAGLFPKRIGFDGLLPVSGHGDYEWNGYFDMDVLPEEYNPDRGYVFTANGMNLPDDYPIDDYPLGFEWSAPWRHQRIDKVLNIQENHSFDDSLDLQRDYHSVLAEKLIQKLPSTAPDNIKSFFSKWNGYMARDSKEAALFAIWYYRHLNPALTEAIFGNQSLINSIDSYTVLDLIDDKAYEGVVLTSLETSFNEAKHLLGEDSNNWKWGDLHKTNFNHPLLDNKNNIYANIMKINNYSRGGTGNTPNSTSFSPDDFLVRSGGSWRFVVDTNNWNGARMTNAPGQSGDPRSKFYDNLVEGWANEK

SEQ ID NO: 145565 - protein, 196 aa, Unknown
  Bacterial polypetide isolated from the Sargasso Sea
QKQRVGIARALANNPDVLLCDEATSALDPQTTDQILDLLLDINRRFKLTIVLITHEMHVVRKICDRVAVMENGKVVEEGDVLSVFTHPQQPITRQFVRQVSQYTEEDEFNPQLASELGGVVIKLTFTGQRTHRPVVGELTLRYGLPFNILHGKMTQTAHGVFGQLWVHVVASEEQLNNILADLRQSDIEGEVIQHG

SEQ ID NO: 145566 - protein, 115 aa, Unknown
  Bacterial polypetide isolated from the Sargasso Sea
MSEVEYINIKKNFGSVEVLKDINLNIGNQKFVVLLGPSGCGKTTLLRMTAGLETISSGEISIGGDIINNIHPRDRDIAMVFQNYALYPQMNVFDNIAFSLQIRKMASQEIKEKVE

SEQ ID NO: 145567 - protein, 219 aa, Unknown
  Bacterial polypetide isolated from the Sargasso Sea
MSVGQRQRVAMGRALVRDPKVFLFDEPLSNLDAKLRAHMRLEIRKLHNQQNATTIYVTHDQIEAMTMADEIVIMNNGIIEQIATPNEIYEKPNNLFVADFIGTPAINLLEGVVTDKSSIKLKSQDLPHSKTNVSNNQNVVYGIRPTDVSIDPSSNIKAEVVLVETTGSETHIIAMLDDNEFRVVQNGGRTTIKNGDVIPLSINIEKAHLFDHSSSKRID

SEQ ID NO: 145568 - protein, 438 aa, Unknown
  Bacterial polypetide isolated from the Sargasso Sea
KNLSVDFRQGKLEYNAVSNASLDLFQGETLALVGESGSGKSVTAHSILRLLPFSASHPNGEIIFEGENLLQLADSKIRSIRGNRIGMIFQEPMSSLNPLHTIEKQIKEVLFIHQGLGHKKAQERTIELLKMVEIQNPEKRLGAFPHELSGGQRQRVMIAMALANHPDILIADEPTTALDVTVQAQVLKLLDQIQEQFKMAIILITHDLGLVRKHANRVAVMTQGKIIETSNTESIFLKPKHQYTKKLLDSEPSGIPVPISNSEKTFVKSKNLKVWFPIKKGILKRTFDHVKAVDGVSLNIRKGHCLGIVGESGSGKTTLGLALLRLVKSEGEIQFGDTLINSLNQKQITPLRRTMQIVFQDPFGSLSPRMTVEQIVAEGLEIHNINNHKDHKNLIIQALQEVDLDPDSRNRYPHEFSGGQRQRIAIARALVLKPSFLV

SEQ ID NO: 145569 - protein, 105 aa, Unknown
  Bacterial polypetide isolated from the Sargasso Sea
MDNIVGERGIRLSGGQRQRIALARAFYHRRNVLVMDEATSALDNKTEEEIVDQIRRLKGQITTIIIAHRHSTVEHCDKIYRLEQGKLVQEGSPHNVLTEFHRAKN

SEQ ID NO: 145570 - protein, 362 aa, Unknown
  Bacterial polypetide isolated from the Sargasso Sea
IADEPTTALDVTIQKQILELLKDIQKKLNMSLLLITHDLTVVRSLANRICVMTKGDIVEQGPATEIFETPKHDYTKHLLAAEFLELPPAAKEDAPIVADIKNLQVRYPKGRHWFGKQEYLDAVKGISMQIRQGHTVGIVGESGSGKTTLGLALLRMINSSGEIWVDNRDLQSLNKKDMKPLRRDLQIVFQDPYGSLSPRMTVSQIVGEGLRIHEPEISEADRDQKVLEAIVEVGLEPDMLQRYPHEFSGGQRQRISIARALVLKPKLIVMDEPTSALDVSVQAQIVDLLRDVQQKYDLVYLFISHDLKVVKALAHHIVVMKEGLVVEQGEAATIFDSPKDVYTKELLNAAFMPETLGESQSN

SEQ ID NO: 145571 - protein, 594 aa, Unknown
  Bacterial polypetide isolated from the Sargasso Sea
TDTPPREISNFLKDYTKPFYFLFGVTAFFAFLLATIELLLIYGIGQIVDLMQNGSRQEILDNGLFIAFFLILAGIGMPLIASITVLLNNNSLMPNIATLFRWRGHRQVMRQSVGWFENDFAGRIANRVMQTPRSAGEVIYHVFDAFSYIIAYLVGALFLLLNAEMELIIPLLLWMFSYGYLIVFVVKRIQPASQAAADARSNLNGYIVDAYTNIQSVKLFSNEQKELEYAREAITDTRNTIIKELRLYSIMDISLSFLNGILTAGTIGWAIWLWYSGQTSVGVVAAAATLVLRISAMSGWIMWAASTFFRELGVIREGLETITEKVELVDHEKADQLNLGHAKIEVQNLYHHYGKDFGGLDNLNIKIPAGQKVGLVGPSGAGKSTLFKLLLRFYDVEKGKILIDDQNISLIKQESLRHHIGTIQQDSSLLHRSIRENISYGKPDATEEEIINAAKKARAHEFIINLRDTDGNQGYSSKVGERGVKLSGGQRQRIALARVILKDAPILLMDEATSALDSDIEAAIKETFSYLMEGKTVIAIAHRLSTIVNMDRILVMNNGRIIEDGSHTDLLTNNGLYAKLWAQQSGGFIQTTVK

SEQ ID NO: 145572 - protein, 490 aa, Unknown
  Bacterial polypetide isolated from the Sargasso Sea
GHSPTYYSEKQPGMLASRITATSNAVYTAENTTAWNVLPPCIAVLGAIVMIIAVNPLMAGGLMLCSAILSVVLYKLAGRGSARHHHFATKAASVDGELVDVISNMGLVRAFGMTFREQQRFGATVKAEMEARQQSLLYLEKLRLLHAVITALLSAGLLGWALWLWDQGKATSGDIVLVSSLGFTILHGTRDLAVALVDVTQHVARLAEAVRTLLEPHGMPDRDGATELVPQGGRVDFESVTFAYPRRRPILDHFDLHIEPGQRVGLIGKSGAGKSTVLALLQRFYETQGGAIKIDGQDIATITQDSLRHAIALVPQDISLFHRTVYENIAYGRPDASREEVIAAAREARCSDFIDAMPEGFDTIVGDRGVKLSGGQRQRIAIARAILKNAPILLLDEATSALDSASEEAIQKALDRLMVGRTVIAIAHRLSTLNNFDRIIVMSQGKVIDDGSPEELRLRPGLYRDLLSKQYGKGATLHVGGKKVDEQHVV

SEQ ID NO: 145573 - protein, 445 aa, Unknown
  Bacterial polypetide isolated from the Sargasso Sea
KKSIQLLKEVGIENAEKRIEDYPHQFSGGMRQRVVIALAISCEPDLIIADEPTTALDVSIQYQILELLKDLTKKRNLGVIIITHDMGVIAETTDKVIVMRYGHIVEQGETKELLTNPKSTEARSLVISVPPTNKKIDRFKLISPDGKEITSSSRDLTQNIIKTWGIRENKNQKLLKLEEVTKIFDDNSLGSGFSFISNKSSNDKIVKAVDNVSFELFEGETLGLVGESGSGKSTIAKIITGLIAPNKGDLIYNNEPLYNSNKKYQIHNSRGQIQMIFQDPYSSLNPRFKVKDIIAEPIKFFQKNISNNELSQNVYDLIDIVGMTRQSLDRYPHEFSGGQRQRISIARALATRPRLLICDEPTSALDVSIQAQILNLLKDIQDELHLTMLFISHDLPVIRQMCNRIIVLKNGAVCETKDTEELFNNPEHEYTKELIRLMPKIESII

SEQ ID NO: 145574 - protein, 228 aa, Unknown
  Bacterial polypetide isolated from the Sargasso Sea
VIGIGKSTLANLISRFYSDYTGQILIDGIPNNEYDLSFLRKSISIVTQSPTLFNDTIERNIAYGDDEFDTERVMESARLAGCLDFIDKLPEGMNSEIGDDGVLLSGGQRQRLAIARAFYKNSPIIILDEATSALDTESEELVQESLEKLISDRTTIVIAHRLSTIENADQIVVLDNGLISQQGKHSDLLEDEGIYASLYKNVPIESKKSSSTSLQKVSYLQPIDDVRK

SEQ ID NO: 145575 - protein, 345 aa, Unknown
  Bacterial polypetide isolated from the Sargasso Sea
NINKSFGENKVINNFSIKIDSGEFVVLVGPSGCGKSTLLRMVSGLETIDQGQILLNDKILNDLIPSKREIAMVFQSYALYPHMNVYENMSFGLKMENKNKNYIDEKVKEAAKMLQIEDLLERKPKELSGGQKQRVAIGRAITRNPKIFLFDEPLSNLDAALRSEMRVEISKLHKKINTNMIYVTHDQVEAMTLADRIVILNKGNIEQFSTPNEVYSDPNNIFVAEFIGTPKMNIIKLEKKYIKSNIINFFENQIRLDGYNFKDEVFLGIRPEHIDVNNNNNIKLDIKVDLIENLGSEKIIYASIKNQEIRIKTAEKLVKNLNKISFSQDNIYFFDKNGNRLRKTT

SEQ ID NO: 145576 - protein, 745 aa, Unknown
  Bacterial polypetide isolated from the Sargasso Sea
MAENQLTYGNKAKNLEFVARNTDIEIPYFKQIYLEDLEHIEKILVSFSKKIMIRSNSSEEDEERFSSAGKYLSLGPIDKQNIVAIKKSFTMVLDSYGEKVNQSVIFQNYVDNAKSVSVITSYKVGTDSAYRSFSTYFGSETEAVTSGKYSEIENFFMHRSVDYLPNKYEKNNVYLKVMTQLEDLFKNKQLDIEMVLDKNNSPQLLQVRPLMGKKLNKDSIFDEKKIIDKNLEKYNKLRETTSDRFGSNKIYSNMSDMNPAEMIGKKPDNIAFGLYKFMFTDTTWNIQRGEFGYREYSGGKLMEMFNNVAYINVNHSLNSFLTRNLQKESCEKIIDYQLNKLKENPHLHDSIEFDISRSSYIFDTVEEFSKEYKNIIDKNEIIQWHNDLVQIDSKNKTTLEKNKEIILRTFSKLDKSFEYLKKENITLIRDTMALPFTHHSRLGFVYFAQLNSLLEKGVITEDQKKLLLLSVNSISTKMKTDAYEVKIGKKTLNDFFDVYGHIRAGNYNLSSSNLKNNLSFTESLINNSEQPLEGNILPKEIFTNIEKYFIVNNIPLKASAWIDMFQDGISTRENSKFYYTKGIDGILNEISKKNTSDRELFELLDIEFNEENTSDMRLKNVLMPDLITSNEDFYFYKEMSKNGNYIGQGIINGDVLLIDDEANRPENLDNKIVVIPAADPGWDWIFNYKIKSLITKYGGPNSHMAIRCAEHNIPAILGVGENNFTVIANSKSLEIDFSNESFSNV

SEQ ID NO: 145577 - protein, 290 aa, Unknown
  Bacterial polypetide isolated from the Sargasso Sea
MAAAAKRGILIKGGVYLEEGRKLKWLALDKTGTITHGKPAQTDVVAWNGADASAAQILAASLAARSDHPVSLAVARAAQDQGLALRDVTDFAALPGRGVRGHVNGALYHLGNHRLVEELGVCSPALEAQLAVLETQGKTVVMLIGQDGVRALFGVADTIKDSSRQAIKELHALGIKTLMLSGDNPHTAEAIAQQVGIDEARGNLLPEDKQREIERRSAQGTIGMVGDGINDAPALARADIGFAMGAAGTDTAIETADVALMDDDLRKLPAFVRLSRSTAGVLKQNIALAL

SEQ ID NO: 145578 - protein, 298 aa, Unknown
  Bacterial polypetide isolated from the Sargasso Sea
PECIFPSRKRPRTRVVPLAKVPTRRLWIVFLILCTGLVGLVGRMAWLQLVQTDALESRARRLQTQTSATLGQRRPIVDRTGRLVAMDEVRFRLWAHPRYFNLPGDAPDLVRPPEDVVELLATPLAQPAPQLLEELGQRRSGVKLAEGLDPETAERIRSLGISGLDLEAYPQRVYPQGDLFANVVGFLNDERVPQAGLEQSRNGELLRHEQSRRLRRGADGTPLPDDLAPGAFYGDDLRLQLTLDARLQELAVKALAAQVGNWKAKKGAAIVMDATNGELLVLASTPTYDPNRYWRFSP

SEQ ID NO: 145579 - protein, 83 aa, Unknown
  Bacterial polypetide isolated from the Sargasso Sea
DHPAAGQYRADPARDAAKLAELRPQEQRYWRLVAERKGAVDARMQELRWLLEELRVSFFAQELRTPQPVSVKRLDKLWAQIQS

SEQ ID NO: 145580 - protein, 303 aa, Unknown
  Bacterial polypetide isolated from the Sargasso Sea
LTSDTKGSRSVAVGYSALTVQNFTTATNSYNTGVGYEGGTNITTGIHNTLAGGLAGRALTDADYNTAVGMQALTSDTLGSRSTAIGMGALYAQNFTTATDAYNTALGFYAGVSLTTGNRNTLAGANSGDALTTGYYNAVLGYGALGSDTKGAISTAVGYSALAAQNFTTAVLSYNTAVGYQAGFSLTTGQSNVFVGANAGDALTDADGNVAVGYAAIGGDTLGARAVAVGYGTLASQNFTTATSNYNTAVGYAAGNQITTGIYNTLVGGLAGNQITTGQNNVLMGVATGDALQGGNQNTAIGR

SEQ ID NO: 145581 - protein, 258 aa, Unknown
  Bacterial polypetide isolated from the Sargasso Sea
MTRNKVHYRLCKSGVRENIDLRQIRQVGRTPEYNLMLVRNMERYLEMFPSSEEISIVYATYGLPWPGRNPEGPLGAPHPWIKEVYHENAFNNYLSFKRYAESYFSKKNNGNFSLNFNRNDGSGSNDSRTRSLYGYSRFPSSIFGHPEDELRFQTIRDQLKHAVSNGRKNIVIVPSHWYYNGQDTGLKIRELNGIPLNTIEEMESGIFEISWCERYETDGSLMQILDKGIDCPDGYSRITLMEAFDEVKEQFNLGYAQR

SEQ ID NO: 145582 - protein, 352 aa, Unknown
  Bacterial polypetide isolated from the Sargasso Sea
MTRDPFIKKIDRGEGKELILFSKNDLNYKFFKGLPPILDNQTHLRFHPTRSEWVGYSTTRQNRTFLPNSLDCPLCPMTNNKNPTDIPVDQYEVAIFTNRFSSLQLERSEFPSLEINTDRATGNCDVISYSSNHNDEFSKLPLERVELIIQALSFRTKELINNSKIEYILPFENKGKEIGVTLEHPHGQIYSFGHIPEIIKKQSIAQKINPLNKYLFDIPEELILKKNNTAISFVPRWARYPFEIWVVPYRKISHLFELSDKEQQDLAELILEASKKLDAIFNSPMPYTLAWQLSPKGYEKFHHLHICFQPIRRSKTKLKYLAGVEQIAGFFLVDLPPERSARILRGDEKPDE

SEQ ID NO: 145583 - protein, 193 aa, Unknown
  Bacterial polypetide isolated from the Sargasso Sea
MKTLIRPLVVIFVVLTAVTGLAYPAVMTVIGQAVFPSQANGSLIEKDGKAVGSALIGQQFDAPKYFWGRLSATTPMPYNATGSGGSNLGPLNPSLADQVKGRIAALRDAGTDMSKPVPVDLVTASASGLDPEITPAAAAYQVERVAKARNLAPDAVAQLVAANTKGRQFGVLGEPRVNVLQLNLALDAAQAAH

SEQ ID NO: 145584 - protein, 277 aa, Unknown
  Bacterial polypetide isolated from the Sargasso Sea
MNQRDVESILDIVREHAPSFNAVNVSTALHRIAKLSGAAFPRRRPLALGNADSRFSTLLEMVLPHVCTFDSQGLANTAWSFATLKLEQEELFGAIGGRALVKLEEFNPQDLANTAWSFCHFEVGAGGVVEGDRREGVGEARGVQPAGFGKHGVVVCHFEVGAGGVLWRDRRQGVGEARGVQPAGFGKHGVVVCLFEVGAGGVVEGDRRQGVGEARGVQPAGFGKHGVVVCYFEVGAGGVVEGDRRQGVGEARGVQPAGSDKSVLGARRGLCAKKSPG

SEQ ID NO: 145585 - protein, 872 aa, Unknown
  Bacterial polypetide isolated from the Sargasso Sea
MTDAQRTHDPRHRHAGGAAPCCADAHDTDTATVAEAAPTAGEHAHGKAAAARGAQSHAHSHDHDHEHDHDHDHDHAHAVREEGHAHGAGCNHGSGKEHDHDQGHGPAHEHGDGHVHGAACAHGSAAHDHDHDHDHAAGDCCAPAALTLAPLPVAQATASGHVRSAFRIMQMDCPTEETLIRKKLGGMSEVSALEFNLMQRMLTVEHVPDAQPAIESAIRSLGMTPEAATAGAPAARAADAPAKPWWPLALAGVAAIASEGATWAALPVWLAAALALAAVLACGLTTYKKGWIAIRNGNLNINALMSIAVTGAMAIGQWPEAAMVMVLFTIAELIEAKSLDRARNAIQGLMQLAPDTATVQDADGAWRTIEAAQVALGAVVRVKPGERIGLDGEVVAGRSTVNQAPITGESLPVEKTTGDAVYAGTINESGSFDYRVTAVAANSTLARIIHAVEEAQGAKAPTQRFVDQFARVYTPIVFAVALLVAVVPPIVMGGAWHDWIYRALVLLVIACPCALVISTPVTIVSGLAAAARRGILVKGGVYLEEGRKLAWLALDKTGTITHGKPVQTDFDLHATDADAARVRHLGASLAARSDHPVSQAIATAARDTGTTAFADVQDFEAIVGRGVQGTIDGTRYWLGNHRLVEELERCSPALEAKLDALERQGKSVVVLVDEARVLGIFAVADTIKDTSREAIADLHALGIRTAMLTGDNPHTAQAIAQQAGIDDARGNQLPEDKLAAVEELSAGGTGAVGMVGDGINDAPALARADIGFAMGAMGTDTAIETADVALMDDDLRKIPAFVRLSRATHRVLVQNIGFALGVKIVFLGLTVAGLGTMWMAVFADAGASLIVVANGLRLLSSSGAFGSAQAKR

SEQ ID NO: 145586 - protein, 192 aa, Unknown
  Bacterial polypetide isolated from the Sargasso Sea
MKNLFRPLIVIFAVLTAVTGLAYPAVMTAVGQAAFNNQANGSLLEKDGKVVGSKLIGQQFDAPQYFWGRLSATSPMPYNPQGSSGSNLGPTNPALLDEVKGRIDALKAAGTDMSKPVPVDLVTSSGSGLDPEISPAAAAYQIERVAKARKLAVNDVQALVDRYTTGRQFGVLGEPRVNVLQLNLALDEMKQG

SEQ ID NO: 145587 - protein, 481 aa, Unknown
  Bacterial polypetide isolated from the Sargasso Sea
SPSGIETEWVLNYNGISFVTNTIPTTLTNLSPTTDYSCNVSAICSPIDTSGNSISISFTTGCAFTIAPFTETFDSVPSGDAIPICWSQEQINDDFDWELEAGGTPSQNTGPDDDITGGGLYMYTEASAPRQNGDFAIMYSEQIDLSNMPNAKLHFYTHMYGSAIGELQIDMFDGSSYVPVFNKIGEQGDFWVEENVIINPTSNFVHFKITGILGVNSNGDTWPGDIAIDEFSVVEAISNDLELYSGSIYSACDLSNAETVSIELVNTALNTQNNFDVSYSVNGASPIVETISNPINPGDTISYDFNTTVDLSLDGVYNFEFKCILQNDQDSTNNIFSGISENLLSPSAPLTIDDTVCYGDTAFLEASTNQGIINWYSDVNGVSPINYSNVNPTITTTYYAEVQAADFYKDDFESYPTGSLIAQSSPNWSTLSGTGGGQDDAFISSAQMSSGANSIYVNQLNDDDIYLVFNSVGKFWYCRNK

SEQ ID NO: 145588 - protein, 171 aa, Unknown
  Bacterial polypetide isolated from the Sargasso Sea
MVTIRLSRSGAKKKPFFHITVTDSRKPRDGRFIERIGYFNPIAKGKELRLKVDHERIDYWLGVGASLSDKVALLVKQSKFTPEEQENYFKFKEEKRLKILSKKKEKAFKEATPEAEAEAEATPEAEAEAEVEAAPEPEAEAKVEAAPEPEAEATPEAEATPEAEAEATPEA

SEQ ID NO: 145589 - protein, 250 aa, Unknown
  Bacterial polypetide isolated from the Sargasso Sea
FPYIIHTIIVWLLPMSFFFFVGRYLNNKKFSRMLLGVMLMGFVVTCIPLIYGEMSGNPKLSAMGIDASLANMEGKEVRFGTYYSSFYSAVNMIIPAGTITGMHDSYMPLSSIGMFIGMQVDAFFGGLGTGWINMFIYLIIATFIGSLMVGRTPELFGKKISIKEVQVAVLVNLCALAIPLLFSAIAVHVYLYVPEAVEWLSNTGPHGFTTIVYEYVSSMAGNGSGFEGLADNTPFWNLTTSVTMLAGRFI

SEQ ID NO: 145590 - protein, 212 aa, Unknown
  Bacterial polypetide isolated from the Sargasso Sea
MNAPVTAQRSAQSSSSQPQTGLGALWRPALKQAFVKLDPRQLVRSPVMLVVELTALVTSVLCFVPNPAVSTALGVQIALWLWFTVLFANFAEALAEGRGKARADSLKSGSQGLIARKQVGAQFQSVPASSLRKGDVVRVEAGELIPGDGEVIEGVAAVNEAAITGESAPVIRESGGDRSAVTGNTRLVSDWLLVRISANPGESTLDRMIALV

SEQ ID NO: 145591 - protein, 49 aa, Unknown
  Bacterial polypetide isolated from the Sargasso Sea
MRWTAVLREAFRKLAPRVQLKNPVMFVVYLGSIVTTVLWLQALTGTVVT

SEQ ID NO: 145592 - protein, 428 aa, Unknown
  Bacterial polypetide isolated from the Sargasso Sea
MAGIVVFLVALPLCIGIALASNAPPLAGIVAGIVAGLIVGPLSNAQVTISGPAAGLTAVVAAEIAAIGSFEGLLVAVALAGVIQIVLGIIRGGFIKSFVPSSVVRGLLSAIGVILILKQIPHLFGHDTDPEGEMSFFQPDKQNTFSELLQILSDLHPGAIVVGFVSLAIIYFWGRVSFLKKTGIPAPLVVVLFGVLCSLGFDQLGGSWIITASHKVEVPLPETIRGFFGLLPNPDFSQITNPAVSSAALTIALVGSLQALLTLEAVDRLDREKRSTSPNRELIAQGIGNIVSGMAGGLPMTCEIVRSSVNIDAGARTKISTILHGALLAIAVVLLPRAINLIPLSALAAILIATGLKLASPKVVAELWRAGRYQFVPWLVTLLAIVLTDPLIGILIGLAVSTIFILWSNLRRPLRLVVEHHLGGDVTR

SEQ ID NO: 145593 - protein, 215 aa, Unknown
  Bacterial polypetide isolated from the Sargasso Sea
MQQFEVYRIGPEINLGSINLSFTNASLFMLISATAILILLFVGTKKKLLVPSKIQLITEMSYSFVAKMINDTAGSSAKPFFPFIFTLFMFVLFCNMVGMLPYSFTVTSHIIITFILAAIIFIGVTIIGFMKHGIKYLELFVPKGVPIALLPLIIIIEIISYLSRPISLSVRLFANMMAGHTMLKVFGGFVISLGLLGGWLPLGFSVALTGLEILV

SEQ ID NO: 145594 - protein, 239 aa, Unknown
  Bacterial polypetide isolated from the Sargasso Sea
MSQFDVYRIGPEIKVGTFDISFTNASLFMILSTVSILLIFNLGSKKNSILPNKIQLLAELSYTFVSKMISDTAGSKAKPYFAFIFSLFMFVLFCNMFGMIPYTFTVTSHIIVTFVLASFIFIGVTVIGFIKHGFRYLKLFVPSGVPAVLLPLIVIIEIISYLSRPISLSVRLFANMMAGHTMMKVFGGFVISLGIVGGWLPLSFSVALTGLEILVAFLQAYVFAILTCIYLNDALNLHH

SEQ ID NO: 145595 - protein, 239 aa, Unknown
  Bacterial polypetide isolated from the Sargasso Sea
MTQFEVYRIGPEIKVGAFDISFTNASLFMVISSLAILIIFNLGSKKNSLLPNKIQLLAELSYTFVSKMISDTAGSKAKPYFSFIFSLFMFVLFCNMFGMIPYTFTVTSHIIVTFVLAAFIFIGVTIIGFIKHGIGYLKLFVPSGVPIVLLPLIVVIEIISYLSRPISLSVRLFANMMAGHTMMKVFGGFVISLGVVGGWLPLSFSVALTGLEILVAFLQAYVFAILTCIYLNDALNLHH

SEQ ID NO: 145596 - protein, 244 aa, Unknown
  Bacterial polypetide isolated from the Sargasso Sea
MANLKEIRDRIVSVKNTRKITEAMRLVAAAKVRRAQDQVLKSRPFADKLARVLENIQSRVQFEAVDSPLLSKREVKSISLVCITADRGLCGGYNTNIIKKVEIRYAELVKKGYQPSLILVGKKAIGYFQNRKDRYVIKSTFKELEQVPTLKDSEGVTNEILAEFLSENSDRVEIIYTKFITLVSCAPVVQTLLPLDPQGIAEENDEIFRLTTKDSKLLVEKSNIEKSDSEKLPSDIVFERKSSI

SEQ ID NO: 145597 - protein, 122 aa, Unknown
  Bacterial polypetide isolated from the Sargasso Sea
SFIFMGVTVIGFIKHGFGYLKLFVPSGVPAVLLPLIVVIEIISYLSRPISLSVRLFANMMAGHTMMKVFGGFVISLGIVGGWLPLSFSVALTGLEILVAFLQAYVFAILTCIYLNDALNLHH

SEQ ID NO: 145598 - protein, 239 aa, Unknown
  Bacterial polypetide isolated from the Sargasso Sea
MSQFDVYRIGPEIKVGAFDISFTNASLFMILSTVSILLVFNLGSKKNSILPNKIQLLAELSYTFVSKMISDTAGSKAKPYFAFIFSLFMFVLFCNMFGMIPYTFTVTSHIIVTFMLAAFIFIGVTVIGFIKHGFGYLKLFVPSGVPAVLLPLIVVIEIISYLSRPISLSVRLFANMMAGHTMMKVFGGFVISLGIVGGWLPLSFSVALTGLEILVAFLQAYVFAILTCIYLNDALNLHH

SEQ ID NO: 145599 - protein, 298 aa, Unknown
  Bacterial polypetide isolated from the Sargasso Sea
RPCHEFSGGWRMRVALAAVLFSQPDLLLLDEPTNYLDLEGTVWLENFLAKYARTVLVISHDRELLNKSVTSILHLTDLKLQYYTGTYDQFDAERRLKQEQQQSMKRKQDAQRAHIQSFVDRFRYKASKARQAQSRLKQLEKMQPIVALSENAVASFTFPTPQPLPPPLMTLEQGSVGYDGKPVLRGLDLRLDQDDRIALLGANGEGKSTLSKLLADRLPLIDGSVAKSSKLRVGFFAQHQLDELVPGETPLWHMMRLRPAEVPTKIRAGLGAAGIGADIVENPVERLSGGQKARLLMA

SEQ ID NO: 145600 - protein, 122 aa, Unknown
  Bacterial polypetide isolated from the Sargasso Sea
AFIFIGVTIIGFLKHGLGYLKLFVPSGVPIILLPLIVVIEIISYLSRPISLSVRLFANMMAGHTMMKVFGGFVVSLGLVGGWLPLGFSVALTGLEILVAFLQAYVFAILTCIYLNDALNLHH

SEQ ID NO: 145601 - protein, 107 aa, Unknown
  Bacterial polypetide isolated from the Sargasso Sea
GFGYLKLFVPSGVPVVLLPLIVVIEIISYLSRPISLSVRLFANMMAGHTMMKVFGGFVISLGIVGGWLPLSFSVALTGLEILVAFLQAYVFAILTCIYLNDALNLHH

SEQ ID NO: 145602 - protein, 190 aa, Unknown
  Bacterial polypetide isolated from the Sargasso Sea
MAANPMTQFEVYRIGPEIKVGAFDISFTNSSLFMVVSTLAILIIFNLGSKKNSLLPNKLQLLSELSYTFVSKMISDTAGSKARPYFAFIFSLFMFVLFCNMFGMIPYTFTVTSHIIVTFVLAAFIFIGVTIVGFIKHGFGYLKLFVPSGVPVVLLPLIVIIEIISYLSRPVSLSVRLFANMMAGHTMMKV

SEQ ID NO: 145603 - protein, 107 aa, Unknown
  Bacterial polypetide isolated from the Sargasso Sea
SQFASDLDDATKEQLEHGKRITELLKQKQYSPMSVADQAMSLYAADKGYMKDVDIDKVGDFESALLAYFESEKPDLKNQINDTGDWDDDIENQFKELVEDFKKTQTY

SEQ ID NO: 145604 - protein, 49 aa, Unknown
  Bacterial polypetide isolated from the Sargasso Sea
MSKGIITQVIGAVVDVKFDGELPEILTALECKNGDNRLVLEVAQHLGET

SEQ ID NO: 145605 - protein, 239 aa, Unknown
  Bacterial polypetide isolated from the Sargasso Sea
MHQFNVYRIGPEIKIDQIDISFTNASLFMVISSLIILIFFNLGSVKKNIIPNKIQLLAELSYSFISKMISDTAGSKGKPYFGFIFSLFMFVLFCNMLGMLPYAFTVTSHIIVTFVLAAFIFIGVTVIGFIKHGLGYLKLFVPSGVPIVLLPLIVVIEVISYLSRPISLSVRLFANMMAGHTMMKVFGGFVISLGLVGGWLPLGFSVALTGLEILVAFLQAYVFAILTCIYLNDALNLHR

SEQ ID NO: 145606 - protein, 27 aa, Unknown
  Bacterial polypetide isolated from the Sargasso Sea
MYFIFYSRLLERAAKLSDEHGGGSLTA

SEQ ID NO: 145607 - protein, 187 aa, Unknown
  Bacterial polypetide isolated from the Sargasso Sea
KFQLMSEMLYNFISKMISDTAGKKAKPYFSFIFSLFIFVLFCNMVGMLPYSFTVTSHIIVTLAFAIFIFIGVTILGFVIHGFKYLKIFVPSGVPMVLLPIITIIEIISYLSRPVSLSVRLFANMMAGHTMLKVFGGFVISLGLVAGWLPLTFSVALTGLEILVAFLQAYVFAILTCIYLNDALNLHH

SEQ ID NO: 145608 - protein, 252 aa, Unknown
  Bacterial polypetide isolated from the Sargasso Sea
VIGLIGERGREVKEFVENTLGEEGMTRAIVVAAPADQSPLLRIRSTHLAHLYAEHYRAQGKDVLLLVDSLTRVAHAQREIGLAVGEPPTAKGYPPSVFSLLPNLIERTGTGRADEGSITAIYTFLAEGDDLNDPIVDLARASLDGQVVLSRDLADAAHYPAIDLAGSISRLMPIIVENENLSLANRFRRLWTLYQQNQDLIQVGAYSAGTNRDIDRAIELRDLMEGFLRQPMNERASLEESFAGLVEFIESE

SEQ ID NO: 145609 - protein, 172 aa, Unknown
  Bacterial polypetide isolated from the Sargasso Sea
MISDTAGSKAKPYFSFIFSLFMFVLFCNMFGMIPYTFTVTSHIIVTFVLAAFIFIGVTIIGFIKHGVGYLKLFVPSGVPIVLLPLIVVIEIISYLSRPISLSVRLFANMMAGHTMMKVFGGFVISLGVVGGWLPLSFSVALTGLEILVAFLQAYVFAILTCIYLNDALNLHH

SEQ ID NO: 145610 - protein, 148 aa, Unknown
  Bacterial polypetide isolated from the Sargasso Sea
MDNLNPSEISQIIKERINNLESSTQESNEGTIVFLSDGIARIHGLSEVMYGELIEFEGGITGMALNLERDSVGVVIFGDYKKLAEGDTAKCTGKILEVPVGPELIGRVVDALGNPIDGKGPMDCSSTSPIEKVAPGVMTRKPVDQPVQ

SEQ ID NO: 145611 - protein, 125 aa, Unknown
  Bacterial polypetide isolated from the Sargasso Sea
TFAMFIFVGVTILGFITHGFKYLKIFVPSGVPIVLLPIISIIEIISYLSRPVSLSVRLFANMMAGHTMLKVFGGFVVSLGLIGGWLPLSFSVALTGLEILVAFLQAYVFAILTCIYLNDALNLHH

SEQ ID NO: 145612 - protein, 140 aa, Unknown
  Bacterial polypetide isolated from the Sargasso Sea
MPYSFTVTSHIIVTLTFAIFIFLGVTILGFIIHGFKYLKIFVPSGVPIVLLPIISIIEIISYLSRPVSLSVRLFANMMAGHTMLKVFGSFVISLGLIGGWLPLSFSVALTGLEILVAFLQAYVFAILTCIYLNDALNLHH

SEQ ID NO: 145613 - protein, 287 aa, Unknown
  Bacterial polypetide isolated from the Sargasso Sea
EAETARDPTRISEIHNRLADIDAHSAPARAATILSGLGFSDEAQQRPCSDYSGGWRMRVALAATLFLRPTFLLLDEPTNHLDLEAVMWLESHLARWQGSILLVSHERGLLNRAVREIVHLENQKLVRYTGGYDDFERMRREKLSQQSKMQARQMAERKRIQAFIDRFRYKPTKARQAQSRIKLLEKMEPIASVIEGTAISFAFPNPDPLSPPLISLDQATAGYDDVTVLRNLNLRIDMDDRIALLGANGNGKSTLIKLLADKISAQSGKLTKSRKLKIGYFAQHQTE

SEQ ID NO: 145614 - protein, 145 aa, Unknown
  Bacterial polypetide isolated from the Sargasso Sea
NMFGMIPYTFTVTSHIIVTFVLASFIFIGVTVIGFIKHGFGYLKLFVPSGVPVILLPLIVVIEIISYLSRPISLSVRLFANMMAGHTMMKVFGGFVISLGIVGGWLPLSFSVALTGLEILVAFLQAYVFAILTCIYLNDALNLHH

SEQ ID NO: 145615 - protein, 166 aa, Unknown
  Bacterial polypetide isolated from the Sargasso Sea
WVKAKPYFAFIFSLFMFVLFCNMFGMIPYTFTVTSHIIVTFVLAAFIFIGVTIIGFIKHGFGYLKLFVPSGVPIVLLPLIVVIEIISYLSRPISLSVRLFANMMAGHTMMKVFGGFVISLGIVGGWLPLSFSVALTGLEILVAFLQAYVFAILTCIYLNDALNLHH

SEQ ID NO: 145616 - protein, 239 aa, Unknown
  Bacterial polypetide isolated from the Sargasso Sea
MTQFNVYRIGPEIKVGAFDISFTNASLFMIISTLAILIIFNLGSKKNSLLPNKIQLLAELSYTFVSKMISDTAGLKAKPYFAFIFSLFMFVLFCNMFGMIPYTFTVTSHIIVTFVLAAFIFIGVTVIGFIKHGFGYLKLFVPSGVPAVLLPLIVVIEIISYLSRPVSLSVRLFANMMAGHTMMKVFGGFVISLGIVGGWLPLSFSVALTGLEILVAFLQAYVFAILTCIYLNDALNLHH

SEQ ID NO: 145617 - protein, 93 aa, Unknown
  Bacterial polypetide isolated from the Sargasso Sea
IVLLPIISIIEIISYLSRPVSLSVRLFANMMAGHTMLKVFGGFVISLGLVGGWLPLSFSVALTGLEILVAFLQAYVFAILTCIYLNDALNLHH

SEQ ID NO: 145618 - protein, 79 aa, Unknown
  Bacterial polypetide isolated from the Sargasso Sea
MDINPSEITKILKEQIKNLGDKTEVSEIGKVLSVGDGIARVYGLDNVQAGEMVEFKDGSKGMALNLESDNVGIVIFGDD

SEQ ID NO: 145619 - protein, 222 aa, Unknown
  Bacterial polypetide isolated from the Sargasso Sea
ARDIKRAGLIVVTTDKGLCGGLNTNVLRAVTTQLRDLQNKGVETQTTAIGTKGMQFLGRVGAKVVSNVVHLGDTPHLEKLIGAIKVQLDAFNAGQIDAVYLAYTRFINTMKQEPVVEQLLPLTADKLAQSDAEKQAYSWDYIYEPDAQTVVDELLIRYVEALVYQAVAENMASEQSARMVAMKAASDNAKNVIGELQLVYNKTRQAAITKELSEIVSGAAAV

SEQ ID NO: 145620 - protein, 91 aa, Unknown
  Bacterial polypetide isolated from the Sargasso Sea
SASLIVVIEIISYLSRPISLSVRLFANMMAGHTMMKVFGGFVISLGIVGGWLPLSFSVALTGLEILVAFLQAYVFAILTCIYLNDALNLHH

SEQ ID NO: 145621 - protein, 78 aa, Unknown
  Bacterial polypetide isolated from the Sargasso Sea
DLKKRISTVKSTQKITKAMKIIATAKLRRPQENAEKRRPYSEKMNNIILNLSSRISDKENSPRLLTVTREEKTHLCVV

SEQ ID NO: 145622 - protein, 132 aa, Unknown
  Bacterial polypetide isolated from the Sargasso Sea
DYGGKVELEEIGKVLAIGDGIARVHGLQRVQAGEMVEFDSGLRGMALNLENDNVGVVVFGNDRAIKEGDTVKRTGAIIDIPVGEGMLGRVVDGLGKSLGPLHTTLPARARMRRLPPPSLLFIPPRRPLPAPS

SEQ ID NO: 145623 - protein, 136 aa, Unknown
  Bacterial polypetide isolated from the Sargasso Sea
FTVTSHIIVTLIMALFIFVAVTIIGFAKHGFKYLSIFVPSGVPAVLLPLITVIEIISYLSRPVSLSVRLFANMMAGHTMLKVFGGFVISLGLLGGWLPLSFSVALTGLEILVAFLQAYVFAILTCIYLNDALNLHH

SEQ ID NO: 145624 - protein, 142 aa, Unknown
  Bacterial polypetide isolated from the Sargasso Sea
MSGLNPSEISSVLKDKISGLDLKAETKNEGTVVNVSDGIIRIHGMGDVMYGELVEFENGVFGLALNLEQDSVGVVVLGDYLGLSEGQKVTCTGKILEVPVGEEMLGRVVDALGNPIDGKGELKRKQTAPIEVVAPRGYARQS

SEQ ID NO: 145625 - protein, 51 aa, Unknown
  Bacterial polypetide isolated from the Sargasso Sea
SPGKLVDLESTIKGFDAICKGDYDHLPEAAFYMVGSIEEVVEKADKLSKDN

SEQ ID NO: 145626 - protein, 228 aa, Unknown
  Bacterial polypetide isolated from the Sargasso Sea
SDQPPLLRMRGAYVATSIAEYFRSEKKDVLLSMDSLTRFAMAQREIGLAAGEPPTTKGFPPSVFALLPGLLERTGTHDGEGSITGFYTVLVEGDDANDPIADAIRAIVDGHIFLSRDIAEKGIFPAIDLLASTSRVMVDVVDQKHLDLNLIMRRTLATYREAEDLINIGAYVQGSNPEIDYAITKNPLIHEFVQQGMNEQTSLNVCKERLQNIFGDRIEEKSIEDVSS

SEQ ID NO: 145627 - protein, 61 aa, Unknown
  Bacterial polypetide isolated from the Sargasso Sea
MSTGNIVEIIGAVVDVEFPRGAVPRVYDALTVSENGLTLEVQQQLGDGVVRSIAMGSSDDS

SEQ ID NO: 145628 - protein, 176 aa, Unknown
  Bacterial polypetide isolated from the Sargasso Sea
MRISIPRTAPSRAARILAGLGFDEHAQQRPCSEYSGGWRMRVALAATLFANPDFLLLDEPTNHLDLEAALWLENYLLNWPGTMMVISHDRTLLNKVVTEIIHLENLKLSRYAGGYDRFERTRRERQELNSKMRAKQAVQKRHIQAFVDRFRYKASKARQAQSRLKMLERMEPIASA

SEQ ID NO: 145629 - protein, 60 aa, Unknown
  Bacterial polypetide isolated from the Sargasso Sea
MEIKAAEISSVIKDQIANFETKADVAEVGTVLSVGDGIARVYGLDQVQAGEMVEFPGGIK

SEQ ID NO: 145630 - protein, 154 aa, Unknown
  Bacterial polypetide isolated from the Sargasso Sea
SIYVCFYFVTCVGMIPYTFTVTSHIIVTFVLAAFIFIGVTVIGFIKHGFGYLKLFVPSGVPAVLLPLIVVIEIISYLSRPISLSVRLFANMMAGHTMMKVFGGFVISLGIVGGWLPLSFSVALTGLEILVAFLQAYVFAILTCIYLNDALNLHH

SEQ ID NO: 145631 - protein, 297 aa, Unknown
  Bacterial polypetide isolated from the Sargasso Sea
MVSSMLKIQNLSFSIQGKPLFENASAVIPTGHKVGIVGRNGSGKTTLFRLIRGEWEVDSGEIEHPPHFRVGGVDQEAPASNVSLLDMVMTADVERSHLMAQAETATEPDRIAKIHTRLADIDAYSAESRAASILSGLGFNASAQARACHEFSGGWRMRVALAAVLFSQPDLLLLDEPTNYLDLEGVVWLESFLAKYRHTSLVISHDRKLLNRSVAGILHLTNYKLAYYAGNYDQFDTERRMKLEQRQSMALKQEAQRKHIQSFVDRFRYKASKARQAQSRLKQLEKMQPILALSEQA

SEQ ID NO: 145632 - protein, 313 aa, Unknown
  Bacterial polypetide isolated from the Sargasso Sea
EVPKTFKVGSVSQEAPSTEETLLHTVLSADIERSKLLHESQVEKDPNKIAEILTRLSDINAYSAEARASSILNGLGFNKDDLLKPCSNFSGGWRMRVALASVLFSNPELLLLDEPTNYLDFEGSVWLENYLQKFKNTALIISHDRNLLNKSVTSILHLTQKKLIFYNGNYDFFDNERRVKLEQKISQKNKQDAQRAHLESFVNRFKAKASKAKQAQSRIKILEKMKPILIEENQKVPTFKFEKVTKFSPPLVTIEQAYVGYNNNPILKNINLSIDPDDRIGLLGVNGEGKSTFSKLIAKKINLMKGKLNFPIN

SEQ ID NO: 145633 - protein, 244 aa, Unknown
  Bacterial polypetide isolated from the Sargasso Sea
MASNPMYQFNVYRIGPEIKIGEVDLSFTNASLFMVISSLAVLIIFNLGSKKNSLIPNKIQLLAELSYTFVSKMISDTAGSKAKPYFSFIFSLFMFVLFCNMFGMIPYAFTVTSHIIVTFVLAAFIFFGVTIIGFIKHGFGYLKLFVPSGVPVVLLPLIVVIEVISYLSRPVSLSVRLFANMMAGHTMMKVFGGFVISLGIVGGWLPLGFSVALTGLEILVAFLQAYVFAILTCIYLNDALNLHH

SEQ ID NO: 145634 - protein, 192 aa, Unknown
  Bacterial polypetide isolated from the Sargasso Sea
MAANPMHQFTVYRIGPEINLGGVDISFTNAGLFMLINVFLILGFLFLAAKKKSMVPSKIQILSELTYTFVAKMINETAGSKAKPFFPFVFTLFMFVLFCNMVGMLPYAFTVTSHIIVTFVLAIAIFIGVTILGFVKHGMGYLKLFVPSGVPVFLLPIIIVIEIISYLSRPVSLSVRLFANMMAGHTMLKVFG

SEQ ID NO: 145635 - protein, 213 aa, Unknown
  Bacterial polypetide isolated from the Sargasso Sea
MASNPMYQFNVYRIGPEIKIGDVDLSFTNASLFMVISSLAVLIIFNLGSKKNSLIPNKIQLLAELSYTFVSKMISDTAGSKAKPYFSFIFSLFMFVLFCNMFGMIPYAFTVTSHIIVTFVLAAFIFFGVTIIGFIKHGFGYLKLFVPSGVPVVLLPLIVVIEVISYLSRPVSLSVRLFANMMAGHTMMKVFGGFVISLGIVGGWLPLGFSVAL

SEQ ID NO: 145636 - protein, 262 aa, Unknown
  Bacterial polypetide isolated from the Sargasso Sea
DIEAIVKIANEVGVPLVVDNTLATPFLSQPFEWGADLIVHSTTKYLSGQGNAIGGVVIDSGKFPWLGNPKYPSLSAPSVEYNGLIFAETFGDLAYTMYSHAVSLRDLGCTQSPMNAWITLNGVETLPLRMERHCSNGLAVAEFLEKHQNVEWVSHAGLKSSPYYKLGKKYFPNGTGSLFAFGVKGGYESGLKLLESVELFSHVANLGDTRSLILHPASTTHRQLTEEQRIAASAGPEVVRLSVGIECAEDLIADLDQALNKL

SEQ ID NO: 145637 - protein, 233 aa, Unknown
  Bacterial polypetide isolated from the Sargasso Sea
VVVATSDQPPLLRMRGAYVATSIAEYFRSEGKDVLLSMDSLTRFAMAQREIGLAAGEPPTTKGFPPSVFALLPSLLERTGTHEGAGSITGFYTVLVEGDDANDPIADAIRAIVDGHIYLSRDIAEKGIFPAIDLLASTSRVMVDVVDQEHLDLNMIMRRTLATYREAEDLINIGAYVQGSNHEIDYAITKKTLIQEFVQQNMNEHTSLDECKKRLKQIFGERLEEKKAEENNS

SEQ ID NO: 145638 - protein, 113 aa, Unknown
  Bacterial polypetide isolated from the Sargasso Sea
MPNLKSLSLRIKSINSTSKITKAMKMVAASKLGKAERLMKGARPFVVGAQGSLLDILTPAPEDEKPATSLLVAISSDKGLCGGLNSKCAKEVRFTHMHASTVYLASFLSRLRP

SEQ ID NO: 145639 - protein, 129 aa, Unknown
  Bacterial polypetide isolated from the Sargasso Sea
YCYFRLSSFIFLAVTLIGIVKHGIGFLKFFVPSGVPYALLPILIPIEIISYFVRPISLSLRLFANMMAGHTMLKVFASFIVLLGFIGGWAPLLLVIILTGFEIMIAVLQAYVFTILCCLYLNDALHLHH

SEQ ID NO: 145640 - protein, 124 aa, Unknown
  Bacterial polypetide isolated from the Sargasso Sea
VSTIVFVGVTIIGFLKHGLKYLGLFVPKGVPVILLPLIVVIEIISYLSRPVSLSVRLFANMMAGHTMLKVFGGFVISLGLLGGWLPLGFSIALTGLEILVAFLQAYVFAILTCIYLNDALNLHH

SEQ ID NO: 145641 - protein, 212 aa, Unknown
  Bacterial polypetide isolated from the Sargasso Sea
MHQFKVYRIGPEIKLGNVDLSFTNASLFMLISALTICLFLYFGSKQKNIIPGRLQLIAELFYNFIAKMISDTAGSKAKPYFPFIFTLFMFVLLCNMIGMLPYSFTVTSHIIVTLVMALFIFFAVTLIGFIKHGFKYLSIFVPKGVPIVLLPLITIIEIISYLSRPVSLSVRLFANMMAGHTMLKVFGSFVISLGLLGGWLPLSFSVALTRFR

SEQ ID NO: 145642 - protein, 99 aa, Unknown
  Bacterial polypetide isolated from the Sargasso Sea
VPSGVPAVLLPLIVVIEIISYLSRPISLSVRLFANMMAGHTMMKVFGGFVISLGIVGGWLPLSFSVALTGLEILVAFLQAYVFAILTCIYLNDALNLHH

SEQ ID NO: 145643 - protein, 119 aa, Unknown
  Bacterial polypetide isolated from the Sargasso Sea
FIGVTILGFVMHGFKYLKIFVPSGVPIVLLPIISIIEIISYLSRPISLSVRLFANMMAGHTMLKVFGGFVISLGLVGGWLPLSFSVALTGLEILVAFLQAYVFAILTCIYLNDALNLHH

SEQ ID NO: 145644 - protein, 272 aa, Unknown
  Bacterial polypetide isolated from the Sargasso Sea
MGACNTMNDSEKKIKKIQDMAKRMRKKVLDMALIAGTNSSHFGGGLSIIDITATLYGEIMNLDPKNPIWENRDRFILSKGHGVLGYYTALSEIGYISEEDLKTFEKDGTYLFGHPVMKRSKGIEFSNGSLGMGLSLGIGVALAGKRNNKDYNVYVLMGDGECNEGSVWEAAMAGPHYKLDNLVAILDKNNLQQTGTNSEIMSVGDLSSKWKSFGWKVFEIDGHNVTEIYNTFLSAKDLNCPVAIVANTIKGKGFTFAKNNNAWHHAPLSSSQ

SEQ ID NO: 145645 - protein, 215 aa, Unknown
  Bacterial polypetide isolated from the Sargasso Sea
MHQFEIKRLLDINIAGFDISFTNSALFMLIAVFIISFTTIISVRKNSIIPSRMQSIVELSYEFVADMVRQNVGSQGKNYFPFIFTLFMFVLFLNMLGMIPYGFTVTSHIAVTFALAMLIFIGVTIIGFVKHGLGFFGFFVPKGVPIFMLPLLVVIEVISYFTRPISLSVRLFANMMAGHTMLKVFSGFVILMGFLGGWLPLAVMVAFTGLEILIA

SEQ ID NO: 145646 - protein, 139 aa, Unknown
  Bacterial polypetide isolated from the Sargasso Sea
PYTFTVTSHIIVTFVLAAFIFIGVTIIGFIKHGIGYLKLFVPSGVPIVLLPLIVVIEIISYLSRPISLSVRLFANMMAGHTMMKVFGGFVISLGVIGGWLPLSFSVALTGLEILVAFLQAYVFAILTCIYLNDALNLHH

SEQ ID NO: 145647 - protein, 215 aa, Unknown
  Bacterial polypetide isolated from the Sargasso Sea
ASLFMAISATLILSLLFFGTKKKSLIPSKIQLVTEMSYTFVAKMINDTAGSSAKSFFPFVFTLFMFVLFCNMVGMLPYSFTVTSHIIVTFMLAAVVFIGVTIIGFAKHGIRYLELFVPKGVPFVLLPLIIIIEIISYLSRPVSLSVRLFANMMAGHTMLKVFGGFVISLGLLGGWLPLGFSVALTGLEILVAFLQAYVFAILTCIYLNDALNLHH

SEQ ID NO: 145648 - protein, 244 aa, Unknown
  Bacterial polypetide isolated from the Sargasso Sea
MASNPMYQFNVYRIGPEIKLGEIDLSFTNASLFMVISSLAVLIIFNLGSKKNSLIPNKIQLLAELSYTFVSKMISDTAGSKAKPYFSFIFSLFMFVLFCNMFGMIPYAFTVTSHIIVTFVLAAFIFFGVTVIGFIKHGFGYLKLFVPSGVPVVLLPLIVVIEVISYLSRPVSLSVRLFANMMAGHTMMKVFGGFVISLGIVGGWLPLGFSVALTGLEILVAFLQAYVFAILTCIYLNDALNLHH

SEQ ID NO: 145649 - protein, 225 aa, Unknown
  Bacterial polypetide isolated from the Sargasso Sea
IAGIDLSFTNASLFMVISATLIILFLFLGSKEKKIIPDKLQLIVEMFYTFVVKMISDTAGSKAKPYFPFIFSLFMFVLFCNMVGMLPYSFTVTSHIIVTLIMALFIFIAVTIIGFIKHGFKYLSIFVPSGVPALLLPIIIIIEIISYLSRPVSLSVRLFANMMAGHTMLKVFGGFVVSLGILGGWLPLGFSVALTGLEILVAFLQAYVFAILTCIYLNDALNLHH

SEQ ID NO: 145650 - protein, 188 aa, Unknown
  Bacterial polypetide isolated from the Sargasso Sea
MASNPMYQFNVYRIGPEIKIGEIDLSFTNASLFMVISSIAILIVFNLGSKKNSLIPNKIQLLAELSYSFVAKMINDTAGSKAKPYFSFIFSLFMFVLFCNMFGMIPYAFTVTSHIIVTFVLAAFIFIGVTVIGFIKHGLGYLKLFVPSGVPIILLPLIVVIEIISYLSRPISLSVRLFANMMAGHTMM

SEQ ID NO: 145651 - protein, 92 aa, Unknown
  Bacterial polypetide isolated from the Sargasso Sea
QLARGQRLRELLKQPQGSPLSVAEQVAIVYAGINGLIDDLEVSQIKTFSANLISYLGSSKPEYGSSIASSGKFDDAAEATLKAAVETVKAGL

SEQ ID NO: 145652 - protein, 193 aa, Unknown
  Bacterial polypetide isolated from the Sargasso Sea
MAANPMTQFEVYRIGPEIKIGTFDISFTNASLFMVVSCVAILFIFNLGSKKKSILPNKIQLLAELSYSFVSKMINDTAGSKAKPYFSFIFSLFMFVLFCNMFGMIPYTFTVTSHIIVTFVLAAFIFIGVTIIGFIKHGFGYLKLFVPSGVPIILLPLIIVIEIISYLSRPISLSVRLFANMMAGHTMMKVFGG

SEQ ID NO: 145653 - protein, 171 aa, Unknown
  Bacterial polypetide isolated from the Sargasso Sea
ISDTAGSKAKPYFAFIFSLFMFVLFCNMFGMIPYAFTVTSHIIVTFVLASIIFIGVTVIGFMKHGFGYLKLFVPSGVPIVLLPLIVVIEIISYLSRPISLSVRLFANMMAGHTMMKVFGGFVISLGIVGGWLPLSFSVALTGLEILVAFLQAYVFAILTCIYLNDALNLHH

SEQ ID NO: 145654 - protein, 58 aa, Unknown
  Bacterial polypetide isolated from the Sargasso Sea
MAKTKSGKITQVIGAVVDVKFEEDLPPILNALEVDNNGTRLVLEIAQHLGENTVRCIA

SEQ ID NO: 145655 - protein, 239 aa, Unknown
  Bacterial polypetide isolated from the Sargasso Sea
MTQFEVYRIGPEIKIGTFDISFTNASLFMVISSLAILIIFNLGSKKNSILPNKIQLLAELSYSFVSKMISDTAGSKAKPYFSFIFSLFMFVLFCNMFGMIPYTFTVTSHIIVTFVLASFIFIGVTVIGFIKHGFGYLKLFVPSGVPVILLPLIVVIEIISYLSRPISLSVRLFANMMAGHTMMKVFGGFVISLGIVGGWLPLSFSVALTGLEILVAFLQAYVFAILTCIYLNDALNLHH

SEQ ID NO: 145656 - protein, 174 aa, Unknown
  Bacterial polypetide isolated from the Sargasso Sea
AKMISDTAGSKAKPYFPFIFSLFAFVLICNMVGMLPYSFTVTSHIIVTLIMALFIFFAVTVIGFLKHGFKYLSIFVPSGVPVVLLPLITVIEIISYLSRPVSLSVRLFANMMAGHTMLKVFGGFVISLGLLGGWLPLSFSVALTGLEILVAFLQAYVFAILTCIYLNDALNLHH

SEQ ID NO: 145657 - protein, 39 aa, Unknown
  Bacterial polypetide isolated from the Sargasso Sea
TIRGFREILDGKHDKLPEQAFYMVGTIEQVLEKASKMAS

SEQ ID NO: 145658 - protein, 52 aa, Unknown
  Bacterial polypetide isolated from the Sargasso Sea
MEIKAAEISSVIKDQIANFETKADVAEVGTVLSVGDGIARVYGLDQVQAGEM

SEQ ID NO: 145659 - protein, 107 aa, Unknown
  Bacterial polypetide isolated from the Sargasso Sea
MSSGRIVSVIGAVIDVEFPRDEVPQVFDALKVDEVDLTLEVQQQLGDGVVRTIAMGSSEGIARGLPVSNTEAPIQVPVGDETLGRIMDVLGTPIDEKGPIGEKDRMP

SEQ ID NO: 145660 - protein, 209 aa, Unknown
  Bacterial polypetide isolated from the Sargasso Sea
MATNPMHQFQVYRIGPEIKLGSLDFSFTNASLFMLISALSICLFLFLGTKQNRLIPGRLQLITELFYNFISKMISDTAGSKAKPYFPFIFTLFMFVLLCNMIGMLPYSFTVTSHIIVTLVMALFIFVAVTIIGFIKHGFKYLTIFVPKGVPVVLLPLITIIEIISYLSRPVSLSVRLFANMMAGHTMLKVFGSFVISLGLLGGWLPLSF

SEQ ID NO: 145661 - protein, 159 aa, Unknown
  Bacterial polypetide isolated from the Sargasso Sea
FSFIFSLFMFVLFCNMFGMIPYTFTVTSHIIVTFVLAAFIFIGVTVIGFIKHGFGYLKLFVPSGVPVILLPLIVIIEIISYLSRPISLSVRLFANMMAGHTMMKVFGGFVISLGIVGGWLPLSFSVALTGLEILVAFLQAYVFAILTCIYLNDALNLHH

SEQ ID NO: 145662 - protein, 116 aa, Unknown
  Bacterial polypetide isolated from the Sargasso Sea
VTVIGFIKHGFGYLKLFVPSGVPIVLLPLIVVIEIISYLSRPVSLSVRLFANMMAGHTMMKVFGGFVISLGIVGGWLPLSFSVALTGLEILVAFLQAYVFAILTCIYLNDALNLHH

SEQ ID NO: 145663 - protein, 260 aa, Unknown
  Bacterial polypetide isolated from the Sargasso Sea
MSDLFNNENGLDALEAPLADRMRPQSLDEVIGQNHLLGEEGPLQNMLTSGIFSSIILWGPPGVGKTTIARLLADHSNSHFEQLSAIFTGVGDLKKVFEAAKFRRTNGHKSVIFVDEIHRFNKSQQDSFLPFLEDGTIILIGATTENPSFELNPAILSRVQVLVLERLNNTDLKKLLERAERVLGSKINLDLDAKIELLKVADGDGRALLNLIENIISWEISNPITVKDLSVRLSKRLKKYDKKGEEHYNLISALHKSIRG

SEQ ID NO: 145664 - protein, 151 aa, Unknown
  Bacterial polypetide isolated from the Sargasso Sea
MASAQQLKRRIKSVDNTSKITKAMSMIAASKMTRAQQMALQGRPYAERMMSLLSDLAAQPQFEDDPHPLLTPREIKRIGVIVITPDRGLTGGLNTAVNRFAAQHILNSGHEAEVVAVGKKARDFFGRTSNLKAVFTDMGDRPSVDARHRSP

SEQ ID NO: 145665 - protein, 239 aa, Unknown
  Bacterial polypetide isolated from the Sargasso Sea
MHQFEVHRIGPKIEISGIDLSFTNASFFMFVSGALITLFLLFGTREKKLIPSKIQLIAEILYNFIAKMISDTAGKKAKPYFPFIFSLFVFILFCNMVGMLPYSFTVTSHIIVTLTFAIFIFVGVTILGFFIHGFKYLKIFVPSGVPIVLLPIISIIEIISYLSRPVSLSVRLFANMMAGHTMLKVFGGFVISLGLVGGWLPLTFSVALTGLEILVAFLQAYVFAILTCIYLNDALNLHH

SEQ ID NO: 145666 - protein, 139 aa, Unknown
  Bacterial polypetide isolated from the Sargasso Sea
PYSFTVTSHIIVTFTLAAFIFIGVTIIGFIKHGLGYLKLFVPSGVPIILLPLIVVIEIISYLSRPVSLSVRLFANMMAGHTMMKVFGGFVISLGIVGGWLPLSFSVALTGLEILVAFLQAYVFAILTCIYLNDALNLHH

SEQ ID NO: 145667 - protein, 44 aa, Unknown
  Bacterial polypetide isolated from the Sargasso Sea
MTAMDNATRNAGDLVDKLTINYNRSRQASITKELIEIISGAESL

SEQ ID NO: 145668 - protein, 207 aa, Unknown
  Bacterial polypetide isolated from the Sargasso Sea
MAANPMSQFDVYRIGPEIKIGAFDISFTNASLFMIISTVSILLIFNLGSKKNSVLPNKIQLLAELSYTFVSKMISETAGSKAKPYFAFIFSLFMFVLFCNMFGMIPYTFTVTSHIIVTFVLAAFIFVGVTVIGFIKHGFGYLKLFVPSGVPAVLLPLIVVIEIISYLSRPISLSVRLFANMMAGHTMMKVFGGFVISLGIVGGWLPT

SEQ ID NO: 145669 - protein, 171 aa, Unknown
  Bacterial polypetide isolated from the Sargasso Sea
KNSLIPNKIQLLAELSYGFVSKMISDTAGSKDKPYFSFIFSLFMFVLFCNMFGMIPYAFTVTSHIIVTFVLAAFIFIAVTIIGFMKHGFGYLKLFVPSGVPIVLLPLIVIIEIISYLSRPISLSVRLFANMMAGHTMMKVFGGFVISLGIVGGWLPLSFSVALTGLEILVA

SEQ ID NO: 145670 - protein, 93 aa, Unknown
  Bacterial polypetide isolated from the Sargasso Sea
MPSLKDLKIRIDSVKSTRKITKAMQMVAAAKLRKAQEAAERGRPYAEKMRSIVSNLASSVRNIDVDNKFLRDGSSNNKFLLIVATAERGLCGG

SEQ ID NO: 145671 - protein, 180 aa, Unknown
  Bacterial polypetide isolated from the Sargasso Sea
HAQREIGLAIGEPPTAKGYPPSVFAVLPKFIERAGVGRHGYGSITAVYTVLAEGDDKSDPVVDIARASLDGQVMLSRQMADAAHYPAIDLAGSISRVMASILSPEQLNASNRFRRLWTLFQQNQDLIQVGAYEPGTNLDLDEAIRIRPAMESLLQQLGDESVSLADSQELLIQLTGAPAQ

SEQ ID NO: 145672 - protein, 111 aa, Unknown
  Bacterial polypetide isolated from the Sargasso Sea
LESFSQFASDLDDATKEQLENGQRITELFKQTQFSPRSVACISIVLYAIENKYLINIEKDKMQSFEENLRTYFKANHKDVWEEVNKTGDWNDDLEKKYKKITDSFMKEGSW

SEQ ID NO: 145673 - protein, 264 aa, Unknown
  Bacterial polypetide isolated from the Sargasso Sea
MASLKDLRVRINSVRSTQKITRAMQMVAASKLRRAQEQAEAGRPYANHMRRMISSLMSALTNPDDAPDLMVGRGEATVHLLVVATSERGLCGSFNTNIVRRARLRISTLLHSGHEVKILCIGKKGRDMLRRDYDVHIIDTIDMSEVRRLGFSDVAPIAERITDMFAAGEFDACSLFFSQFKSVLSQEVTEHQLIPVSVPEVSEEDVPLEGVDAMYEYEPEEDEILAELLPRNLAVQVYSALLENAASEQGARMTAMDNATRNAG

SEQ ID NO: 145674 - protein, 187 aa, Unknown
  Bacterial polypetide isolated from the Sargasso Sea
MFFNSLLTNFAALEVGQHLYWQIGNIRLHGQVFLTSWILLGALLIFISLGTKKMENDPKGLQNLLEFLWDYIRDLARTQIGEKVYRDWMPFIGTLFLFVFVSNWGGALIPWRLIKLPSGELGAPTADINTTIALALLVSLSYFYAGLSNKGWRYFEYYVHPTPIMLPFKILEDFKKPLSLSFRLLEI

SEQ ID NO: 145675 - protein, 72 aa, Unknown
  Bacterial polypetide isolated from the Sargasso Sea
LSVRLFANMMAGHTMLKVFGGFVVSLGLIGGWLPLSFSVALTGLEILVAFLQAYVFAILTCIYLNDALNLHH

SEQ ID NO: 145676 - protein, 210 aa, Unknown
  Bacterial polypetide isolated from the Sargasso Sea
MAANPMTQFEVYRIGPEIKIGSFDISFTNASLFMVISSLAILIIFNLGSKKNSMLPNKIQLLAELSYSFVSKMISDTAGSKAKPYFAFIFSLFMFVLFCNMFGMIPYTFTVTSHIIVTFILAAFIFIGVTIIGFIKHGFSYLKLFVPSGVPVVLLPLIIVIEIISYLSRPISLSVRLFANMMAGHTMMKVFGGFVVSLGIVGGWLPLSFS

SEQ ID NO: 145677 - protein, 55 aa, Unknown
  Bacterial polypetide isolated from the Sargasso Sea
MANNLTGKISQVLGAVVDVEFDGELPAIMNALEVDNNGTRLMLEVAQHLGENAVR

SEQ ID NO: 145678 - protein, 240 aa, Unknown
  Bacterial polypetide isolated from the Sargasso Sea
MATNPMHQFKVYKIGPKIEISGIDLSFTNASLFMLISGAIIGLFFLLGTKEKKIIPSKIQLISEMIYNFIAKMISDTAGKKAKPYFPFIFSLFIFILVCNMVGMLPYSFTVTSHIIVTLTFALFIFIGVTILGFIMHGFKYLKIFVPSGVPLVLLPIISIIEIISYLSRPVSLSVRLFANMMAGHTMLKVFGGFVISLGLIGGWLPLSFSVALTGLEILVAFLQAYVFAILTCIYLNDAL

SEQ ID NO: 145679 - protein, 190 aa, Unknown
  Bacterial polypetide isolated from the Sargasso Sea
FLGKIQLISEMLYNFIGKMINDTAGKKAKPYFPFIFSLFIFVLFCNMIGMLPYSFTVTSHIIVTLAFAMFIFIGVTILGFVIHGFKYLKIFVPSGVPIVLLPIIMIIEIISYLSRPISLSVRLFANMMAGHTMLKVFGGFVISLGLVAGWLPLTFSVALTGLEILVAFLQAYVFAILTCIYLNDALNLHH

SEQ ID NO: 145680 - protein, 97 aa, Unknown
  Bacterial polypetide isolated from the Sargasso Sea
MEINPSEVTKILKEQIKNFGDKAEVSEVGQVLSVGDGIARIYGLNNVQAGEMVEFSDGSKGMALNLESDNVGVVIFGDDRAVKEGDTVKRTGAIVDT

SEQ ID NO: 145681 - protein, 135 aa, Unknown
  Bacterial polypetide isolated from the Sargasso Sea
MALTLRVLCPDQNVFDGQADEVILPSTTGQLGVLPGHVSLLTALDVGVLRVRDGNSWSAIALMGGFAEIDEDEVNVLVNAAEPASSINTDIAQQDLSSAQQAWDSFDGKPNSPEKIKAQQAFQKARARLQATRAN

SEQ ID NO: 145682 - protein, 58 aa, Unknown
  Bacterial polypetide isolated from the Sargasso Sea
MEINPSEITKLLKEQIKNYGDKAEVSEIGKVLTVGDGIARVYGLDNVQAGEMVEFNDG

SEQ ID NO: 145683 - protein, 80 aa, Unknown
  Bacterial polypetide isolated from the Sargasso Sea
MEIKAAEISSVIKDQIANFETKADVAEVGTVLSVGDGIARVYGLDQVQAGEMVEFPGGIKGMALNLEMDNVGVSIFGDDT

SEQ ID NO: 145684 - protein, 221 aa, Unknown
  Bacterial polypetide isolated from the Sargasso Sea
LDISLTNSSLWMILIVICSTLLFGLGIRRGALIPNRLQSIAEITYEFVANMVHDNAGKEGKVYFPFIFTLFIFILFANVLGLIPYSFTVTSHIIVTFAMAIVVFIGVTIIGLVKHKLKFFTLFVPKGIPVFLAPLLILIELISYLVRPITLSVRLFANMMAGHTLLKVFGGFVVALGFLGIGPLIVTVALYGLELIVAGLQAYVFAVLTCLYLNDALHLHH

SEQ ID NO: 145685 - protein, 34 aa, Unknown
  Bacterial polypetide isolated from the Sargasso Sea
FQGIINGQYDDIPEQAFYMVGGIEEAVEKAKTVT

SEQ ID NO: 145686 - protein, 256 aa, Unknown
  Bacterial polypetide isolated from the Sargasso Sea
MLNLNNITARLGGETILAGASAMLPTGSRVGLVGRNGAGKSTLLKIIAGLLEADDGTVETPRGTRIGYVAQEVPGGNATPFEMVIAADIERTDLMTEADAATDADRIASIHERLGIIDAHGAPARAARILAGLGFDETDQHRPLSDFSGGWRMRVALAGLLFSRPDLLLLDEPSNHLDLEAALWLENFLKSYPASMVIVSHERDLLNNVVDHILHVQGGKVTLYTGGYDAFEKIRADRLSQVAAMRAKQQEKRAKL

SEQ ID NO: 145687 - protein, 53 aa, Unknown
  Bacterial polypetide isolated from the Sargasso Sea
SRASTILAGLGFDHNDQKRPCREFSGGRRMRVALASTLFSNPDLLLLDEPTNY

SEQ ID NO: 145688 - protein, 94 aa, Unknown
  Bacterial polypetide isolated from the Sargasso Sea
LSSEDRGLGMVGGSPYIDESADAYSLLVEKVVKAAEMEATLKRLLEEIEATKRRVNALEFKVIPEMEEAQTFIQLRLEEMEREETFRLKRFKNK

SEQ ID NO: 145689 - protein, 103 aa, Unknown
  Bacterial polypetide isolated from the Sargasso Sea
GLKRGDEVSHTNAPIQVPVGPETLGRIINVIGEPIDERGDVNTKESWPIHRAAPEFNDQSTETEILVTGIKVIDLLDPLCKRRKNWVVWWCWCWKNSFDHGIN

SEQ ID NO: 145690 - protein, 165 aa, Unknown
  Bacterial polypetide isolated from the Sargasso Sea
RTLLSEMIEAREGLVGTYRQAVQSISLAGAIEGGLAVKSAAIAISNRPEVEVSPRNIMGVVVPSVQGTNLTSTISERGVGLIGGSAYIDEAADSYSALIENIVKAAEMEATLKRLLVEIEATKRRVNALEFKVIPEMQEAQSFIQLRLEEMEREETFRLKRFKNK

SEQ ID NO: 145691 - protein, 194 aa, Unknown
  Bacterial polypetide isolated from the Sargasso Sea
MIRLEKLSKSFPDGDLFNNVNVSIKPGMRIGLIGPNGSGKTTLLRIMLGKESPDSGNVHVDKSTTIGYLAQDIVAGTGRSILEEVLVSYPEVRELEGKMLALSEAISKDHNNMDLVNKLGDAQHRFEALGGWNLEDKAKKILSGLGFADEKFTEPMDVFSGGWRMRVALASILLQQPDILFLDEPTNHLDLEAT

SEQ ID NO: 145692 - protein, 203 aa, Unknown
  Bacterial polypetide isolated from the Sargasso Sea
MELKGRVAFGRMEAVTFGRPANEALLEDIKNYDANRVFLLASGTLNRNTDEIDKIRTSLGNKCVGEFFEMSPHTPRKDVVAATKLAMDKKADLIVTFGGGSLTDAAKAITLCISNNITEVSKLDELRNGNSVDGGTLIGPSIPQITIPTTLSGGEFSAISGVTDESSKTKELFRHPGIMPKVVILDPAPTIHTPEWLFLSTGI

SEQ ID NO: 145693 - protein, 292 aa, Unknown
  Bacterial polypetide isolated from the Sargasso Sea
WFPAHVGTLCKVEINKNETVFAEVIGFSNGQNVLSLYETGSHLRVGATVSVFDEGREIPVGPQLLGRVVDAMGNPLDSNGPVQAQDSWPIKGKQSNPLSKKPIDTPLDVGVRAINSLITVGQGQRIGIIAGSGVGKSVLLGMMSKFTSADVVVVGLIGERGREVGSFVKSIFTGESKKKTCIVAVPADRSPLLRIRGANTATAIAEYFRSIGKNVLLIMDSLTRVAHAQREIGLALGEQPTAKGYPPSVISLLPKLIERSGTGDYNEGSITSFYTVLADSDDTNDPVVDTAR

SEQ ID NO: 145694 - protein, 118 aa, Unknown
  Bacterial polypetide isolated from the Sargasso Sea
IGVTVIGFLKHGFGYLKLFVPSGVPIVLLPLIVIIEIISYLSRPISLSVRLFANMMAGHTMMKVFGGFVISLGIVGGWLPLSFSVALTGLEILVAFLQAYVFAILTCIYLNDALNLHH

SEQ ID NO: 145695 - protein, 206 aa, Unknown
  Bacterial polypetide isolated from the Sargasso Sea
MTLNPMHQFEVYRIGPEIKLGTINLSFTNASLFMLISALLILLLLFMGSKKKLLVPTKIQLITEMSYSFVAKMINETAGNNAKAFFPFIFTLFMFVLFCNMVGMLPYSFTVTSHIIVTFVLAALVFIGVTIIGFVKHGIKYLELFVPKGVPMLLLPLIIVIEIISYLSRPVSLSVRLFANMMAGHTMLKVFGGFVISLGLLGGWLP

SEQ ID NO: 145696 - protein, 237 aa, Unknown
  Bacterial polypetide isolated from the Sargasso Sea
MAANPMTQFEVYRIGPEIKIGYFDISFTNASLFMVVSSLAILIIFNLGSKKNSMLPNKIQLLAELSYTFVSKMISDTAGSKAKPYFAFIFSLFMFVLFCNMFGMIPYTFTVTSHIIVTFVLAAFIFIGVTIIGFIKHGFGYLKLFVPSGVPIVLLPLIVIIEIISYLSRPISLSVRLFANMMAGHTMMKVFGGFVISLGIVGGWLPLSFSVALTGLEILVAFLLSICFCNLNMHLFK

SEQ ID NO: 145697 - protein, 151 aa, Unknown
  Bacterial polypetide isolated from the Sargasso Sea
MFVLLCNMVGMLPYSFTVTSHIIVTLIMALFIFIAVTIIGFLKHGFKYLSIFVPKGVPALLLPLITIIEIISYLSRPVSLSVRLFANMMAGHTMLKVFGGFVISLGVLGGWLPLSFSVALTGLEILVAFLQAYVFAILTCIYLNDALNLHH

SEQ ID NO: 145698 - protein, 74 aa, Unknown
  Bacterial polypetide isolated from the Sargasso Sea
MDINPSEITKILKEQIKNLGEKTEVSEIGKVLSVGDGIARVYGLDNVQAGEMVEFKDGLKGMALNLESDNVGIV

SEQ ID NO: 145699 - protein, 115 aa, Unknown
  Bacterial polypetide isolated from the Sargasso Sea
MANLKEIRDRIVSVKNTRKITEAMRLVAAAKVRRAQDQVLKSRPFADKLARVLENIQSRVQFEAVDSPLLTKREVKSISLVCITADRGLCGGYNTNIIKKVEIRYAELVKQSYQP

SEQ ID NO: 145700 - protein, 42 aa, Unknown
  Bacterial polypetide isolated from the Sargasso Sea
FSLEDSIKGFNGILNGDYDDLPEQAFYMVGTIEEAVEKAKTM

SEQ ID NO: 145701 - protein, 116 aa, Unknown
  Bacterial polypetide isolated from the Sargasso Sea
MNWNYPTNIWFGEKRINEINNACEILNIKNPLIVTDPGILKTNIVEKITKAMNNKVSIFSDVQSNPTGTNVEQGVLAFNSNSHDGVIAVGGGSGMDVGKGIAFMAGQKRPLWDFED

SEQ ID NO: 145702 - protein, 255 aa, Unknown
  Bacterial polypetide isolated from the Sargasso Sea
MIYPAVAIALLPYNTLIVAAGVAAVGCAAGVIGTFGVLRKRALVGDAAAHATLVGVASALLITGHRDLAVLLVGGLLSAIFAIVLLVLIRKFTRTRDDAATAIVLSVSFGLGITLISGMVSRGIPGSGGLERFLLGHTASLTAHDALLLGIVSIIGVLCIVVGLKEATMVAFDPGFAAAAGWPAATIDLVLIALIAVMVVVGLPAAGAVLVTALVVIPPAVARQWTDRLIPMLVIAGAVGLLSALAGVVLSSLAV

SEQ ID NO: 145703 - protein, 244 aa, Unknown
  Bacterial polypetide isolated from the Sargasso Sea
NLGEEGMRRSVVVVATSDQPPLLRMRGAYVATSIAEYFRSVEKDVLLSMDSLTRFAMAQREIGLAAGEPPTTKGFPPSVFALLPGLLERTGTHEGAGSITGFYTVLVEGDDANDPIADAIRAIVDGHIYLSRDIAEKGLFPAIDLLASTSRVMVDVVDQKHLDLNLIMRRTLATYREAEDLINIGAYVQGSNPEIDYAITKNPLIQEFVQQGMNEQTSLNECEERLQQIFGDKLEGNVVEEDSS

SEQ ID NO: 145704 - protein, 195 aa, Unknown
  Bacterial polypetide isolated from the Sargasso Sea
KKNSLIPNKVQLLAELSFSFVSKMISDTAGSKAKPYFSFIFSLFMFVLFCNMFGMIPYAFTVTSHIIVTFILASFIFIGVTIIGFAKHGFGYLKLFVPSGVPIVLLPLIVVIEIISYLSRPISLSVRLFANMMAGHTMMKVFGGFVISLGIVGGWLPLSFSVALTGLEILVAFLQAYVFAILTCIYLNDALNLHH

SEQ ID NO: 145705 - protein, 67 aa, Unknown
  Bacterial polypetide isolated from the Sargasso Sea
MQINPSEVTKILKEQIKKFGEKAEISEVGQVLSVGDGIARVYGLDNVQAGEMVEFMGGIKGMALNLE

SEQ ID NO: 145706 - protein, 239 aa, Unknown
  Bacterial polypetide isolated from the Sargasso Sea
MQQFTVHKIGPEIKIAGIDLSFTNSSLFMVISASTVLLFLFLGSKEKKIIPNKIQLIAEMSYAFVAKMISDTAGSKAKPYFPFIFSLFMFVLFCNMVGMLPYSFTVTSHIIVTLIMALFIFIAVTIIGFLKHGFKYLSIFVPSGVPVVLLPLITIIEIISYLSRPVSLSVRLFANMMAGHTMLKVFGGFVVSLGILGGWLPLSFSVALTGLEILVAFLQAYVFAILTCIYLNDALNLHH

SEQ ID NO: 145707 - protein, 145 aa, Unknown
  Bacterial polypetide isolated from the Sargasso Sea
MSAVKIRMRSVGNIQKITKAMKMVAASRLKGAQTKCEKSRALVQPFTRLLGDTPGANTESALVVPISSDKGLCGGINTAVVKYSSVLNTMNESTKFSIVGDKARAQLTRMFPEQVSNVVVDTTKQPLTFSTASAIADTIMEDNPA

SEQ ID NO: 145708 - protein, 191 aa, Unknown
  Bacterial polypetide isolated from the Sargasso Sea
MATNPMYQFNVNKIGPKIEIVGIDLSFTNSSLFMIISATLITILLFLGTKEKKIIPGKFQLISEMLYNFISKMISDTAGKKAKPYFPFIFSLFIFILFCNMVGMLPYSFTVTSHIIVTLTFAIFIFIGVTILGFFMHGFKYLKIFVPSGVPIVLLPIISIIEIISYLSRPVSLSVRLFANMMAGHTMLKVF

SEQ ID NO: 145709 - protein, 175 aa, Unknown
  Bacterial polypetide isolated from the Sargasso Sea
IAKMISDTAVRKAKPYFSFIFTLFVLILFCNMLGMLPYSFTVTSHIIVTLTFAIFIFIGVTILGFAIHGFKYLKIFVPSGVPILLLPIITIIEIISYLSRPISLSVRLFANMMAGHTMLKVFGGFVISLGLVGGWLPLTFSVALTGLEILVAFLQAYVFAILTCIYLNDALNLHH

SEQ ID NO: 145710 - protein, 38 aa, Unknown
  Bacterial polypetide isolated from the Sargasso Sea
IGAVVDVKFDGELPEILTALECKNGDNRLVLEVAQHLG

SEQ ID NO: 145711 - protein, 88 aa, Unknown
  Bacterial polypetide isolated from the Sargasso Sea
MEIKAAEISSVIKDQIANFETKADVAEVGTVLSVGDGIARVYGLDQVQAGEMVEFPGGIKGMALNLEMDNVGVSIFGDDTGIKEGDTS

SEQ ID NO: 145712 - protein, 207 aa, Unknown
  Bacterial polypetide isolated from the Sargasso Sea
MASNPMQQFSVHKIGPEINIVGIDLSFTNASLFMVISATLILLFLFVGTKEKKIIPSKVQLVTELTYTFVAKMISDTAGSKAKPYFPFIFSLFIFVLFCNMVGMLPYSFTVTSHIIVTLIMALFIFIAVTIIGFAKHGFKYLNIFVPSGVPVVLLPLITVIEIISYLSRPVSLSVRLFANMMAGHTMLKVFGGFVISLGLLGGGYHL

SEQ ID NO: 145713 - protein, 292 aa, Unknown
  Bacterial polypetide isolated from the Sargasso Sea
GIDTSAALESPGVLAVYTGADIEADGTVQHLDTPGASAVAPAPIVVPPRELLASDTVRFVGDNIAFVVAESLDQARDAADLITVDYEDLPVVTDPEAAVEDGAPLIWDGAANNVCCTWTKGDETGVESAFSRAHHITTVRLINNRLVVNSMETRGALGDYDPGMDKYTLYATTQGANLARNWLAPSLKVPISDLRVITPDVGGGFGMKVMVYPEYILVCWAARRLGRPVKWIGDRSDAFLSDSHSRDHVTTVELALDENAKFLGIRANTIANMGGCLSTMAPLVSTAASSNL

SEQ ID NO: 145714 - protein, 38 aa, Unknown
  Bacterial polypetide isolated from the Sargasso Sea
AEITEVGQVLSVGDGIARVYGLDNVQAGEMVEFVDGSK

SEQ ID NO: 145715 - protein, 169 aa, Unknown
  Bacterial polypetide isolated from the Sargasso Sea
DTAGSKAKPYFPFIFSLFMFVLFCNMVGMLPYSFTVTSHIIVTLIMALFIFVAVTIIGFAKHGFKYLSIFVPSGVPAVLLPLITIIEIISYLSRPVSLSVRLFANMMAGHTMLKVFGGFVVSLGILGGWLPLSFSVALTGLEILVAFLQAYVFAILTCIYLNDALNLHH

SEQ ID NO: 145716 - protein, 43 aa, Unknown
  Bacterial polypetide isolated from the Sargasso Sea
GNPIDGKGALDKGVKKSRREVKAPGIIPRKSVNEPMQTGLKSV

SEQ ID NO: 145717 - protein, 106 aa, Unknown
  Bacterial polypetide isolated from the Sargasso Sea
MANLKEIRDRIVSVKNTRKITEAMRLVAAAKVRRAQDQVLKSRPFADKLARVLENIQSRVQFEAVDSPLLSKREVKSITLVCITADRGLCGGYNTNIIKKVEIRYA

SEQ ID NO: 145718 - protein, 54 aa, Unknown
  Bacterial polypetide isolated from the Sargasso Sea
MTTKLGKITQVIGAVVDVQFEGHLPEILTALECDNSGNKLVLEVAQHLGESTVR

SEQ ID NO: 145719 - protein, 103 aa, Unknown
  Bacterial polypetide isolated from the Sargasso Sea
MKYIKYFFQFLLAIISFIFFKILGVNNSSNLSGKIFEFIGPYFRSKKLIYSNISKAYPNSDEKELKKITKAMWNNYGRVFSEYMFIKDFRSGKLSDKIEIVEK

SEQ ID NO: 145720 - protein, 261 aa, Unknown
  Bacterial polypetide isolated from the Sargasso Sea
MSKNTDADVIVVGLIGERGREVGKFVNEILTSKSKNRTVVVAVPADRSPLLRIRGANRATAIAEFFRSLGKNVLLIMDSLTRVAHARREIGLALGEQPTAKGYPPSVVSLIPKLVERSGTGIGKQGSVTAFYTVLADGDDANDPVVDTARAILDGHILLSRENAELGIYPALDIPKSISRVMTEITSKEHQELANKFKKLVSIYLENRDLVLMGGYSPGQDLDLDEAVNQWPNLVSFLKQTEDTKADFLSSLNELKKIMAG

SEQ ID NO: 145721 - protein, 257 aa, Unknown
  Bacterial polypetide isolated from the Sargasso Sea
FLSIKNGNKQNSVFSSKEMENRLSKLRSNMEKENIDLILFTSIHNINYYNHFVYCSFGRLYGLIVKKDKLKSISANIDGGQPRRRGFGDNIIYTDWEKDNFFKVVKNEIKNKGRIGIEYDHINYENLKKLQYLFPEVEFVDISKMSMRQRMVKSNEEIDLIRNGAQVADIGGAACVEAIGEGVPEYEIAIHSTSVMIREIAHRYPESDIMDTWTWFQSGINTDGAHNPVTTRKIKKGDILSLNCFPMIAGYYTALER

SEQ ID NO: 145722 - protein, 66 aa, Unknown
  Bacterial polypetide isolated from the Sargasso Sea
MEIKAAEISSVIKDQIANFETKADVAEVGTVLSVGDGIARVYGLDQVQAGEMVEFPGGIKGMALNL

SEQ ID NO: 145723 - protein, 131 aa, Unknown
  Bacterial polypetide isolated from the Sargasso Sea
HIIVTFVLAAFIFIGVTIIGFMKHGLGYLKLFVPSGVPMVLLPLIVIIEIISYLSRPISLSVRLFANMMAGHTMMKVFGGFVISLGIVGGWLPLSFSVALTGLEILVAFLQAYVFAILTCIYLNDALNLHH

SEQ ID NO: 145724 - protein, 42 aa, Unknown
  Bacterial polypetide isolated from the Sargasso Sea
MASLDDLKKRISSVIITQKITKAMKMVAAAKLRRAQESAEKG

SEQ ID NO: 145725 - protein, 61 aa, Unknown
  Bacterial polypetide isolated from the Sargasso Sea
FFSQPFFVAEQFTGNSGKFVSREETVRSFKAILDGEYDDLPEDAFYMVGSIEDAIEKAKTI

SEQ ID NO: 145726 - protein, 156 aa, Unknown
  Bacterial polypetide isolated from the Sargasso Sea
IFSLFMFVLFCNMFGMIPYTFTVTSHIIVTFVLATFIFIGVTVIGFIKHGFGYLKLFVPSGVPAVLLPLIVVIEIISYLSRPISLSVRLFANMMAGHTMMKVFGGFVISLGIIGGWLPLSFSVALTGLEILVAFLQAYVFAILTCIYLNDALNLHH

SEQ ID NO: 145727 - protein, 42 aa, Unknown
  Bacterial polypetide isolated from the Sargasso Sea
VSLEDTIRAFKGILNGDYDDLPEQAFYMVGTIEEAVEKAKTL

SEQ ID NO: 145728 - protein, 298 aa, Unknown
  Bacterial polypetide isolated from the Sargasso Sea
CLTCGRGQRIGIMAGSGVGKSVLLGMMARYTDADINVISLVGERGKEVLEFIEDNLGEEGMRRSVVVVATSDQPPLLRMRGAYVATSIAEYFRSEGKDVLLSMDSLTRFAMAQREIGLAAGEPPTTKGFPPSVFALLPSLLERTGTHGGAGSITGFYTVLVEGDDTSDPIADAIRAIVDGHIYLSRDIAEKGLFPAIDLLASTSRVMVDVVDQKHLDLNLIMRRTLATYREAEDLINIGAYVQGSNPEIDYAITKNPLIQEFVQQGMNEQTSLNECEERLQQIFGDRLEEKAVEEDSS

SEQ ID NO: 145729 - protein, 69 aa, Unknown
  Bacterial polypetide isolated from the Sargasso Sea
MEIKAAEISSVIKDQIANFETKADVAEVGTVLSVGDGIARVYGLDQVQAGEMVEFPGGIKGMALNLEMD

SEQ ID NO: 145730 - protein, 167 aa, Unknown
  Bacterial polypetide isolated from the Sargasso Sea
GFFQRIGGEVISQSTHLGDRPQIEDLLGTIKSTIDKFLSKEVDEVYIAYNRFINTVSQVPTIDKILPISPDAADETQKEYSHYWDYLYEPDAEEVLESLFTRYIESLTYRSVVENIACEQASRMVAMKSSSDNAADLIGELQIIYNKNRQAAITQEISEIISGAAAL

SEQ ID NO: 145731 - protein, 40 aa, Unknown
  Bacterial polypetide isolated from the Sargasso Sea
MGFKAICNGEYDDLPEAAFYMVGGIDEVIEKAKQMAAEAA

SEQ ID NO: 145732 - protein, 107 aa, Unknown
  Bacterial polypetide isolated from the Sargasso Sea
MEINPSEVTKILKEQIKKFGDKAEVTEVGQVLSVGDGIARIYGLDNVQAGEMVEFSDGSKGMALNLESENVGVVIFGDDRAVKEGDTVKRTGAIVDTPCWEMNCLVE

SEQ ID NO: 145733 - protein, 59 aa, Unknown
  Bacterial polypetide isolated from the Sargasso Sea
MLGNELLGRVVDGLGNPIDGKGALDKSLKRSRVEVKAPGIIPRKSVSEPMQTGLKSIDS

SEQ ID NO: 145734 - protein, 239 aa, Unknown
  Bacterial polypetide isolated from the Sargasso Sea
MYQFNVYRIGPEIKLGSVDISFTNASLFMVISSLAILIIFNLGAKKKTLIPDKLQLLSELSYSFVAKMISDTAGSKAKPYFSFIFSLFMFVLFCNMFGMIPYAFTVTSHIIVTFVLAAFIFIGVTIIGFMKHGLGYLKLFVPSGVPMVLLPLIVVIEIISYLSRPISLSVRLFANMMAGHTMMKVFGGFVISLGIVGGWLPLSFSVALTGLEILVAFLQAYVFAILTCIYLNDALNLHH

SEQ ID NO: 145735 - protein, 203 aa, Unknown
  Bacterial polypetide isolated from the Sargasso Sea
MAANPMSQFDVYRIGPEIKVGTFDISFTNASLFMILSTVSILVVFNLGSKKNSILPNKIQLLAELSYTFVSKMISDTAGSKAKPYFAFIFSLFMFVLFCNMFGMIPYTFTVTSHIIVTFMLAAFIFIGVTVIGFIKHGFGYLKLFVPSGVPAVLLPLIVVIEIISYLSRPISLSVRLFANMMAGHTMMKVFGGFVISLGIVGG

SEQ ID NO: 145736 - protein, 89 aa, Unknown
  Bacterial polypetide isolated from the Sargasso Sea
MHCEIVSAEKELFSGEIEMLSARGTIGELGIMPGHAPLLTGIQPGTVILRLADGTEEIFFASGGFLEIQPGFVTVLADVAARAEDLDEA

SEQ ID NO: 145737 - protein, 84 aa, Unknown
  Bacterial polypetide isolated from the Sargasso Sea
IEIISYLSRPISLSVRLFANMMAGHTMMKVFGGFVISLGIIGGWLPLSFSVALTGLEILVAFLQAYVFAILTCIYLNDALNLHH

SEQ ID NO: 145738 - protein, 134 aa, Unknown
  Bacterial polypetide isolated from the Sargasso Sea
MSISLKVLAPNKNVYQGEAEEVILPSTSGQIGVLPGHISLVTAIDIGVLRLRMNSQWKSIALMGGFAEIESDEVIVLVNNAEIGSEINVQNAEQDLKEAKLAISKFSENEKNPQKIKALKEISKAEARIQAAKN

SEQ ID NO: 145739 - protein, 189 aa, Unknown
  Bacterial polypetide isolated from the Sargasso Sea
MISLKTNYDAIVIGGGPAGSSTAALLAEKGHDVLIVEKEKFPRYHVGESLMPFCYFPLEKLGLVETLKESANPRKYCVQFVREDGFLSQPFYFFQHFDHPSSTTWQVWRSDFDKMIMDKARENGASVLEETKAKNLIKKGDTCVAGVKVVSKDLGELELKAPIVVDASGRDCFAAHNKTGWFEIRIKKV

SEQ ID NO: 145740 - protein, 75 aa, Unknown
  Bacterial polypetide isolated from the Sargasso Sea
MSINPSEVTKLLKEQIKNFGDKAEVSEIGKVLSVGDGIARVYGLDNVQAGEMVEFEDGSKGMALNLENDQCWSCN

SEQ ID NO: 145741 - protein, 276 aa, Unknown
  Bacterial polypetide isolated from the Sargasso Sea
MINETNIHKHVINSINFPILIIDKNKFILMVNPATEDFFKLSSKVLIKKSIEEILPFSSPVLSLIDSSIKKESTFKEYKVDLSTPISGSHKDVDVEVTPVIGLENYYQIILAEDFHEKKLVLQNENQKNKIAMSNMSQILAHEVKNPLSGIRGAAQILEKNVESHETIMTDLIITEVDRIRRLVDNLQIFDASTPIDLRPINIHSILRHVKDVMINSSNKEIKIKEVFDPSIPDVIGNEDQLIQVFINLIKNSIEAFSNEPDSDNEIILSTNYEHG

SEQ ID NO: 145742 - protein, 106 aa, Unknown
  Bacterial polypetide isolated from the Sargasso Sea
VWLFKIICSSGVPAVLLPLIVVIEIISYLSRPISLSVRLFANMMAGHTMMKVFGGFVISLGIVGGWLPLSFSVALTGLEILVAFLQAYVFAILTCIYLNDALNLHH

SEQ ID NO: 145743 - protein, 64 aa, Unknown
  Bacterial polypetide isolated from the Sargasso Sea
MSNQGGVQYSKIAEIKGPLVIVDGVDNAAFDELVEIETTDGERRLGKVLEVGNGKAVVQVFEGT

SEQ ID NO: 145744 - protein, 111 aa, Unknown
  Bacterial polypetide isolated from the Sargasso Sea
FIKHGFGYLKLFVPSGVPVVLLPLITVIEVISYLSRPVSLSVRLFANMMAGHTMLKVFGGFVISLGLLGGWLPLSFSVALTGLEILVAFLQAYVFAILTCIYLNDALNLHH

SEQ ID NO: 145745 - protein, 239 aa, Unknown
  Bacterial polypetide isolated from the Sargasso Sea
MHQFNVYRIGPEIKIDQIDISFTNASLFMVISSLIILIIFNLGSVKKNIIPNKIQLLAELSYSFISKMISDTAGSKGKPYFGFIFSLFMFVLFCNILGMLPYAFTVTSHIIVTFVLAAFIFIGVTVIGFIKHGLGYLKLFVPSGVPVVLLPLIVVIEVISYLSRPISLSVRLFANMMAGHTMMKVFGGFVISLGLVGGWLPLGFSVALTGLEILVAFLQAYVFAILTCIYLNDALNLHH

SEQ ID NO: 145746 - protein, 101 aa, Unknown
  Bacterial polypetide isolated from the Sargasso Sea
MGFKYLKIFVPSGVPVLLLPLITVIEIISYLSRPVSLSVRLFANMMAGHTMLKVFGGFVISLGLISGWLPLTFSVALTGLEILVAFLQAYLFAILTCIYFN

SEQ ID NO: 145747 - protein, 210 aa, Unknown
  Bacterial polypetide isolated from the Sargasso Sea
MYQFNVYRIGPEIKLGAVDISFTNASLFMVISSLAILIIFNLGAKKKTLIPDKLQLLSELTYSFVAKMISDTAGSKAKPYFSFIFSLFMFVLFCNMFGMIPYAFTVTSHIIVTFVLAAFIFIGVTIIGFMKHGLGYLKLFVPSGVPMVLLPLIVVIEIISYLSRPISLSVRLFANMMAGHTMMKVFGGFVISLGIVGGWLPLSFSVALTG

SEQ ID NO: 145748 - protein, 92 aa, Unknown
  Bacterial polypetide isolated from the Sargasso Sea
ILLPLIVIIEIISYLSRPISLSVRLFANMMAGHTMMKVFGGFVISLGIIGGWLPLSFSVALTGLEILVAFLQAYVFAILTCIYLNDALNLHH

SEQ ID NO: 145749 - protein, 229 aa, Unknown
  Bacterial polypetide isolated from the Sargasso Sea
MGLFFIGVSILTAPAVDVGASILDVSVVDSNSSILTVPAVASGASILTVSAADLGTSTFIIPLVSSGSSILTVPVVDLGASISIVSVVDSSSSTLTIPALSLDALVLTAPALDLGFSIFTVPASDSGSSILTVPVVGLDALIWTVPALDLGASILTVPTLDSGALILTGPALDSGAAILTAPVVDSGAVILTAPAAGPCAAILTVPVIDTGAPIPCIFPAGLLRVLHGQ

SEQ ID NO: 145750 - protein, 244 aa, Unknown
  Bacterial polypetide isolated from the Sargasso Sea
MASNPMQQFTVHRIGPEIKIADIDLSFTNASLFMVISASVILLLLFFGSKEKKIIPDKIQLISEMLYIFVAKMISDTAGSKAKPYFPFIFSLFMFVLFCNMVGMLPYSFTVTSHIIVTLIMALFIFIAVTIIGFIKHGFKYLSIFIPSGVPTILLPLITVIEIISYLSRPVSLSVRLFANMMAGHTMLKVFGGFVVSLGILGGWLPLSFSVALTGLEILVAFLQAYVFAILTCIYLNDALNLHH

SEQ ID NO: 145751 - protein, 72 aa, Unknown
  Bacterial polypetide isolated from the Sargasso Sea
LSVRLFANMMAGHTMMKVFGGFVVSLGIVGGWLPLGFSVALTGLEILVAFLQAYVFAILTCIYLNDALNLHH

SEQ ID NO: 145752 - protein, 224 aa, Unknown
  Bacterial polypetide isolated from the Sargasso Sea
MTREFYKTGQLVPVTVLKVEKARVIQVIEEEKRGYKAVQLGYGKVKNSKITKAMKGVFAKKNTEAKKKLKEFRVQDTSAYKEGNEFGLEIFKDIKFVDTRSKTIGKGFAGAMKRHNFGGLRASHGVSISHRAHGSTGHSQDPGKVFKGKKMAGHMGDKLRTMQNIEIIKADLENELLYLKGSIPGSKNSEVMVKKSVKNINKMTISEKQAAAEEAKKTPDKKKK

SEQ ID NO: 145753 - protein, 267 aa, Unknown
  Bacterial polypetide isolated from the Sargasso Sea
MANLKEIRDRIVSVKNTRKITEAMRLVAAAKVRRAQDQVLKSRPFADKLARVLENIQSRVQFEAVDSPLLSKREVKSITLVCITADRGLCGGYNTNIIKKVEIRYAELVKQGYQPNLILVGKKAIGYFQNRKDRYVIKSTFKELEQVPTVKDSEGVTNEILAEFLSENSDRVEIIYTKFITLVSCAPVVQTLLPLDPQGIAEENDEIFRLTTKDSKLLVEKSNMEKTDSEKLPSDIVFEQSPDQLLDSILPLYLQNQVLRALQESAA

SEQ ID NO: 145754 - protein, 74 aa, Unknown
  Bacterial polypetide isolated from the Sargasso Sea
MSKGIITQVIGAVVDVKFEGELPEILTALECKNGGNRLVLEVAQHLGESTARTIAMDATEGLKRGDEVVNTNAP

SEQ ID NO: 145755 - protein, 256 aa, Unknown
  Bacterial polypetide isolated from the Sargasso Sea
ERGKEVLEFIEDNLGEEGMRRSVVVVATSDQPPLLRMRGAYVATSIAEYFRSEAKDVLLSMDSLTRFAMAQREIGLAAGEPPTTKGFPPSVFALLPGLLERTGTHGGAGSITGFYTVLVEGDDANDPIADAIRAIVDGHIYLSRDIAEKGLFPAIDLLASTSRVMVDVADQKHLDLNLIMRRTLATYREAEDLINIGAYVQGSNPEIDYAITKNPLIQEFVQQGMNEHTSLNECVERLQQIFGDRLEENAVEEYSS

SEQ ID NO: 145756 - protein, 159 aa, Unknown
  Bacterial polypetide isolated from the Sargasso Sea
GETAGINYMKVFPTTDPNITLGMSISVFILMIFYSIKIKGVGGFAKELFLHPFGKWMIPFNFLLKVVEELAKPVSLALRLFGNLYAGELIFILIAVFTLSAGVNSLGENFTSLGTITLFIIQVILGLAWAIFHILIITLQAFIFMMLTIVYLSMAHEEH

SEQ ID NO: 145757 - protein, 243 aa, Unknown
  Bacterial polypetide isolated from the Sargasso Sea
PLYPEVINPMKRKRIKKPLDVGIRSINSCLTCGRGQRIGIMAGSGVGKSVLLGMMARYTDANINVISLVGERGKEVLEFIEDNLGEEGMRRSVVVVATSDQPPLLRMRGAYVATSIAEYFRSEEKDVLLSMDSLTRFAMAQREIGLAAGEPPTTKGFPPSVFALLPSLLERTGTHEGAGSITGFYTVLVEGDDANDPISDSIRAIVDGHIYLSRDIAEKGIYPAIDLLASTSRVMVDVVDQKH

SEQ ID NO: 145758 - protein, 41 aa, Unknown
  Bacterial polypetide isolated from the Sargasso Sea
MDNATRNAGDMIDKLTIEFNRSRQAVITNELIEIISGAEAL

SEQ ID NO: 145759 - protein, 104 aa, Unknown
  Bacterial polypetide isolated from the Sargasso Sea
YLKLFVPKGVPAILLPLIVVIEVISYLSRPVSLSVRLFANMMAGHTMMKVFGGFVISLGIVGGWLPLGFSVALTGLEILVAFLQAYVFAILTCIYLNDALNLHH

SEQ ID NO: 145760 - protein, 246 aa, Unknown
  Bacterial polypetide isolated from the Sargasso Sea
MISFENISFSVAGRTLVKNSTVNIPSGHKVGLVGKNGTGKTSLFRLIYGEITLDQGNLKLNKNARVGGVSQEVPGSSVTLLDTVLAADRERTDLLQKAEEETDPFKISEIQTRLADIDAWSGEARASTILNGLGFDTHKQKLACSEFSGGWRMRVALAAVLFSKPDLLLLDEPSNYLDLEGTIWLQAYISKYPSTIILISHDRALLNNSVNSILHLEDKELHLYSGNYESFAKTRAARLAHKQAEA

SEQ ID NO: 145761 - protein, 254 aa, Unknown
  Bacterial polypetide isolated from the Sargasso Sea
MANLKEIRDRIVSVKNTRKITEAMRLVAAAKVRRAQDQVLKSRPFADKLARVLENIQSRVQFEAVDSPLLSKREVKSIALVCITADRGLCGGYNTNIIKKVEIRYAELVKQGYQPNLILVGKKAIGYFQNRKDRYVIKSTFKELEQVPTVKDSEGITNEILAQFLSENSDRVEIIYTKFITLVSCAPVVQTLLPLDPQGIAEENDEIFRLTTKDSKLLVEKSNIEKSDSEKLPSDIVFEQSPDQLLDSLLPLYL

SEQ ID NO: 145762 - protein, 305 aa, Unknown
  Bacterial polypetide isolated from the Sargasso Sea
EEYLGRVVNAYGQSLDDGSVIKNDEKWPSRGKASNPLQRSQINQPLDVGVRAINGLFTIGRGQRMGIIAGSGVGKSTLLGMMAKYTDAEVVVVGLVGERAREVRSFVEDVILPETKERTVIVAEPAGTAPLLRIRAALRATSIAEYYREKGKQVLLIMDSLTRVAHAQREIGLALGEQATTKGYPPSVMALISHLVERTGPGSKDEGSITSFYTILADGDDVNDPVVDSAKAILDGHIVLSRQLAEMGVYPSIDIASSISRVMNQIVDETHINAAVSFKRAMAIYMENRDLIMMGGYKPGTDNAL

SEQ ID NO: 145763 - protein, 55 aa, Unknown
  Bacterial polypetide isolated from the Sargasso Sea
MSIEVTTGSVIEVIGAVVDVEFPRNAVPKIYDALRIESNNLTLEVQQQLGDGIVR

SEQ ID NO: 145764 - protein, 99 aa, Unknown
  Bacterial polypetide isolated from the Sargasso Sea
MEINPSEVTKILKEQIKKFGDKTEVTEVGQVLSVGDGIARIYGLDNVQAGEMVEFSDGSKGMALNLESENVGVVIFGDDKSVREGDTVKRTGAIVDTPV

SEQ ID NO: 145765 - protein, 139 aa, Unknown
  Bacterial polypetide isolated from the Sargasso Sea
LRSESSLLQVAGRAARNVSGLVILYGDKITKAMKNLIDETNRRRNMQIEHNEKLGLKPKTIRKSVEEILTSTSVADSVVDEKENFKIDDFIKYDISEQNSEMIVLELHKKMMEYADGLDFENAAKVRDEIEKIQKSLEV

SEQ ID NO: 145766 - protein, 244 aa, Unknown
  Bacterial polypetide isolated from the Sargasso Sea
MATNPMHQFKVYKIGPEIEIFGINLSFTNASLFMIISALLVFVLLMLSTKEKKLIPSKMQFIAESLYNFIAKMISDTAGKKAKPYFPFIFSLFIFILFCNMVGMLPYSFTVTSHIIVTLTFAIFIFIGVTILGFFIHGFKYLKIFVPSGVPIVLLPIISIIEIISYLSRPVSLSVRLFANMMAGHTMLKVFGGFVISLGIVGGWLPLTFSVALTGLEILVAFLQAYVFAILTCIYLNDALNLHH

SEQ ID NO: 145767 - protein, 61 aa, Unknown
  Bacterial polypetide isolated from the Sargasso Sea
FYLNRSLLLKILTGTPGKYVSLEDTIKAFKGILNGDYDHLPEQAFYMVGTIEEAVEKAKTL

SEQ ID NO: 145768 - protein, 201 aa, Unknown
  Bacterial polypetide isolated from the Sargasso Sea
MANLKEIRDRIVSVKNTRKITEAMRLVAAAKVRRAQDQVLKSRPFADKLARVLENIQSRVQFEAVDSPLLSKRDVKTISLVCITADRGLCGGYNTNIIKKVEIRYAELIKQGYAPNLILVGKKAIGYFQNRKDRYTIKSTFKELEQVPTATDSEGITSEVLAEFLSENSDRVEIIYTKFITLVSCAPVVQTLLPLDPQGIA

SEQ ID NO: 145769 - protein, 48 aa, Unknown
  Bacterial polypetide isolated from the Sargasso Sea
MNQNGKIIQVIGAVVDVQFEGDLPEILTALVADNSGNKLILEVAQHLG

SEQ ID NO: 145770 - protein, 181 aa, Unknown
  Bacterial polypetide isolated from the Sargasso Sea
SLVTPFVAKMINDTAGSGARPYFAFIFSLFMFVLFCNMFGMIPYTFTVTSHIIVTFVLAAFIFIGVTIIGFIKHGFGYLKLFVPSGVPIVLLPLIVVIEIISYLSRPISLSVRLFANMMAGHTMMKVFGGFVISLGIVGGWLPLSFSVALTGLEILVAFLQAYVFAILTCIYLNDALNLHH

SEQ ID NO: 145771 - protein, 211 aa, Unknown
  Bacterial polypetide isolated from the Sargasso Sea
MLISALSICLFLYFGSKQKNIIPSRLQLVAELFYNFIAKMISDTAGSKAKPYFPFIFTLFMFVLLCNMIGMLPYSFTVTSHIIVTLVMAMFIFIAVTIIGFLKHGLKYLSIFVPKGVPVVLLPLITIIEIISYLSRPVSLSVRLFANMMAGHTMLKVFGSFVISLGLLGGWLPLSFSVALTGLEILVAFLQAYVFAILTCIYLNDALNLHH

SEQ ID NO: 145772 - protein, 141 aa, Unknown
  Bacterial polypetide isolated from the Sargasso Sea
MEEPTRSVNTDLALGVLVFIVCHAYGLKNKGLGGYLKTYISEPFPSPIPMRGWLWVFAVVNPVVYFNLFMNIIGVVSTVVSHSFRLFGNIFGGGMIIVIVSSLLHYFIVPVGLFAFFGLFAGLVQAFVFSMLAVTYIQQQQ

SEQ ID NO: 145773 - protein, 244 aa, Unknown
  Bacterial polypetide isolated from the Sargasso Sea
IHGVNESWPLAGESINPLNRLPVNSPLDVGVRIINSLLTVGKGQRLGIIAGSGVGKSVLLGMITRFTTADIVVVGLIGERGREVGNFVTSNLNEDTKKRTVMVVEPADKSPLLRIRAANRATAIAEYFRDKGKDVLLIMDSLTRVAHARREIGLALGEQPTSKGYPPSVISLIPSLIERTGSGEAGKGTITSFYTILADGDDQNDPVVDTARAILDGHIMLSRDQAQLGIYPAVDVSSSISRVM

SEQ ID NO: 145774 - protein, 137 aa, Unknown
  Bacterial polypetide isolated from the Sargasso Sea
MKVEIVSAEEEIYSGTAEMVFAPAAEGEIGVAPGHAPLLTLLGPGEVRVKISNEEEASFYVSGGMIEVQPKLVTILSDTASRAEDLDEAAVQEARDAAQKLFEAGGASMDYAKARAQLAETAAQIRAIQRLRRRAGR

SEQ ID NO: 145775 - protein, 49 aa, Unknown
  Bacterial polypetide isolated from the Sargasso Sea
MEIKAAEISSVIKDQIANFETKADVAEVGTVLSVGDGIARVYGLDQVQA

SEQ ID NO: 145776 - protein, 203 aa, Unknown
  Bacterial polypetide isolated from the Sargasso Sea
MAANPMTQFEVYRIGPEIKIGAFDISFTNASLFMVVSSLAILIIFNLGSKKNSMLPNKIQLLSELSYTFVSKMISDTAGSKAKPYFAFIFSLFMFVLFCNMFGMIPYTFTVTSHIIVTFVLAAFIFIGVTIIGFIKHGFGYLKLFVPSGVPIVLLPLIVVIEIISYLSRPVSLSVRLFANMMAGHTMMKVFGGFVISLGIVGG

SEQ ID NO: 145777 - protein, 201 aa, Unknown
  Bacterial polypetide isolated from the Sargasso Sea
MAANPMTQFEVYRIGPEIKIGNFDISFTNASLFMVVSSLAILIIFNLGSKKNSMLPNKIQLLAELSYSFVSKMISDTAGSKAKPYFSFIFSLFMFVLFCNMFGMIPYTFTVTSHIIVTFVLAAFIFIGVTIIGFIKHGFGYLKLFVPSGVPVILLPLIVIIEIISYLSRPISLSVRLFANMMAGHTMMKVFGGFVISLGIV

SEQ ID NO: 145778 - protein, 203 aa, Unknown
  Bacterial polypetide isolated from the Sargasso Sea
SISPLKFSKSENCIIKDLSLEIYKGEFLGVIGKTGSGKTTLGKLFSNMLPVDLILKKGTIAYEIEKEKNVNQKLKGNIVSMVFQDPMTSLNPLQTIKDQFILILNKRFNYENDLVIIETKKWLNKVRVLNALDKYPHQLSGGQLQRIMIALAIAIKPQLIIADEITTALDANLKYEIINLLNVLRLDSRIALLFITHDLVLAK

SEQ ID NO: 145779 - protein, 205 aa, Unknown
  Bacterial polypetide isolated from the Sargasso Sea
TILLFLYLGSKEKRIVPNKLSLLAEMSYTFVAKMISDTAGSKAKPYFPFIFSLFMFVLFCNMVGMLPYSFTVTSHIIVTLIMALFIFIAVTIIGFIKHGFKYLSIFVPKGVPTILLPLITVIEIISYLSRPVSLSVRLFANMMAGHTMLKVFGGFVVSLGILGGWLPLSFSVALTGLEILVAFLQAYVFAILTCIYLNDALNLHH

SEQ ID NO: 145780 - protein, 91 aa, Unknown
  Bacterial polypetide isolated from the Sargasso Sea
MSELGKIKQIIGAVIDVEFGKEQIPNIYDALVVQENNLVLETQQQLGDGVVRTVAMGTTEGLKRGLDVTNTKAPISVPVGEKTLGRIMNVL

SEQ ID NO: 145781 - protein, 80 aa, Unknown
  Bacterial polypetide isolated from the Sargasso Sea
SEEDRILVGRARRIQRFLSQNTFVAKVFTGIDGSFVPLSETIEAFEALADGKYDHIPEQAFFMCGGLDDVERKAAELAKN

SEQ ID NO: 145782 - protein, 71 aa, Unknown
  Bacterial polypetide isolated from the Sargasso Sea
SVRLFANMMAGHTMLKVFGGFVISLGILGGWLPLSFSVALTGLEILVAFLQAYVFAILTCIYLNDALNLHH

SEQ ID NO: 145783 - protein, 87 aa, Unknown
  Bacterial polypetide isolated from the Sargasso Sea
IVVIEVISYLSRPVSLSVRLFANMMAGHTMMKVFGGFVISLGIVGGWLPLGFSVALTGLEILVAFLQAYVFAILTCIYLNDALNLHH

SEQ ID NO: 145784 - protein, 83 aa, Unknown
  Bacterial polypetide isolated from the Sargasso Sea
MTINPSEVTKLLKDQIKNFGEKAEVSEIGKVLSVGDGIARVYGLDNVQAGEMVEFEDGSKGMALNLESDNVGVVIFGDDRKIK

SEQ ID NO: 145785 - protein, 239 aa, Unknown
  Bacterial polypetide isolated from the Sargasso Sea
MTQFEVYRIGPEIKIGTFDISFTNASLFMVFSSLAILIIFNLGSKKNSILPNKIQLLAELSYSFVSKMISDTAGSKAKPYFSFIFSLFMFVLFCNMFGMIPYTFTVTSHIIVTFVLASFIFIGVTVIGFIKHGFGYLKLFVPSGVPVILLPLIVVIEIISYLSRPISLSVRLFANMMAGHTMMKVFGGFVISLGIVGGWLPLSFSVALTGLEILVAFLQAYVFAILTCIYLNDALNLHH

SEQ ID NO: 145786 - protein, 65 aa, Unknown
  Bacterial polypetide isolated from the Sargasso Sea
ANMMAGHTMLKVFGGFVLVLGAAGVLPILITVALTGLEVVVAILQAYVFTILSCLYLNDAFHPGH

SEQ ID NO: 145787 - protein, 239 aa, Unknown
  Bacterial polypetide isolated from the Sargasso Sea
MYQFNVYRIGPEIKLGSVDISFTNASLFMVISSLAILIIFNLGAKKKTLIPDKLQLLSELSYSFVAKMINDTAGSKAKPYFSFIFSLFMFVLFCNMFGMIPYAFTVTSHIIVTFVLAAFIFIGVTIIGFMKHGLGYLKLFVPSGVPMVLLPLIVVIEIISYLSRPISLSVRLFANMMAGHTMMKVFGGFVISLGIVGGWLPLSFSVALTGLEILVAFLQAYVFAILTCIYLNDALNLHH

SEQ ID NO: 145788 - protein, 121 aa, Unknown
  Bacterial polypetide isolated from the Sargasso Sea
MANSGKITQIIGPVVDVAFEKENTLPEILNALEIPKDDGSSLTLEVQQHLGEDRVRTIAMSGTEGLKRGMKVIDTGKAISMPIGEDINGRLFNVVGSAIDGMGQPKGKDRLPIHRDAPKLK

SEQ ID NO: 145789 - protein, 286 aa, Unknown
  Bacterial polypetide isolated from the Sargasso Sea
IDGFTTIGKGQRMGIFAGSGVGKSVLLSILAKQSKADVNVIALIGERGREVKEFIDKNLGEEGLKKSVIIVSTSDQAPMLRLKAALTATAISEYFRDQGKDVMFMMDSLTRVAMAQREIGLAVGEPPTTKGYTPSVFSLLPKIIERAGNGTVGSITGLYTILIEGDDLDDPIGDTSRSLLDGHIVLSRKLASMGHYPPVDVLNSISRLANDIISDGHKDQKKKILSLMSAYKENEDLISVGAYEEGSNTLIDEAIKAKESINDFLIQNIKDSTDFHYMQNEMNKLV

SEQ ID NO: 145790 - protein, 239 aa, Unknown
  Bacterial polypetide isolated from the Sargasso Sea
MNQFQVYKMGPEIKLGNLDLSFTNASLFMLISALSIALLLFFGSKNKSIIPNKIQLIAELIYNFISKMISDTAGSKARPYFPFIFSLFMFVLFCNMIGMLPYAFTVTSHIIVTLVMALFIFISVTIIGFIKHGFKYLSIFVPKGVPIVLLPLITIIEIISYLSRPVSLSVRLFANMMAGHTMLKVFGGFVISLGLLGGWLPLSFSVALTGLEILVAFLQAYVFAILTCIYLNDALNLHH

SEQ ID NO: 145791 - protein, 48 aa, Unknown
  Bacterial polypetide isolated from the Sargasso Sea
ARMTAMHKATDNASELRDQLKLTYNKARQTAITNEILEIVGGAEALNS

SEQ ID NO: 145792 - protein, 110 aa, Unknown
  Bacterial polypetide isolated from the Sargasso Sea
GYLKKFFNFSSPINAFVGILELLSEFIRVISFTFRLFGNIFAGEVLILMLTFLIPFVIVDIIYGLELFVGFIQAAVFALLTLVFAMMAVEHHDEEEHDDAVAPENEGTTV

SEQ ID NO: 145793 - protein, 247 aa, Unknown
  Bacterial polypetide isolated from the Sargasso Sea
VGKFKQGIDFSGQEEIIKKAFSIKKAPAVAITVNSPGGSPVQSHLIYKYIKDQAKKNKKKVIVFAEDVAASGGYLIACSGDEIYANSSSIVGSIGVIYSSFGFKDLIQKIGVQRRVYTAGKNKSTLDPFLDEKKEDVERLKKIQLDLHDDFIDVVEKSRGSKLKKDTGIELFSGEFWSGKKAKDLGLIDGIGNADEILKKKYGENVIIKKFEKTKGWLAKKLSSSGDQTDKLIGILEERSIWQRYGF

SEQ ID NO: 145794 - protein, 60 aa, Unknown
  Bacterial polypetide isolated from the Sargasso Sea
MAAMTVQLDIVSAESSIFSGRVASLQVTGSEGELGIMHGHAPLLSYIKPGMARIVKQDGS

SEQ ID NO: 145795 - protein, 288 aa, Unknown
  Bacterial polypetide isolated from the Sargasso Sea
DGSIDLPSNYKIGSVEQEAPSSKISLMETVLSHDNERSALLKESLQNLEPDRIAEIQLRLYDIDAFSAEARASKILSGLGFNELDQKKNCSEFSGGWRMRVALASVLFSQPDILLLDEPTNYLDLEGTIWLESFLSTYPSTTLIISHDRDLLNNSVNGILHLHDLKLTNYRGNFDQFEKELSNKIHLQKIMIKKQDAEKKHIKSFVDRFRYKASKARQAQSRLKKLEKMEQVTNLSFQPVLPFKFPCPKELASPLITIENGSIGYDKKVILSNINIFLGNDDRIALLG

SEQ ID NO: 145796 - protein, 194 aa, Unknown
  Bacterial polypetide isolated from the Sargasso Sea
MAANPMSQFKVYRIGPEIKFGNIDLSFTNASLFMLISAFTICLFLYFSSKQKSIIPSRLQLISEIFYNFIAKMISDTAGSKAKPYFPFIFTLFMFILLCNMIGMLPYSFTVTSHIIVTLIMALFIFAAVTIIGFVKHGFKYLSIFVPKGVPVVLLPLITIIEIISYLSRPVSLSVRLFANMMAGHTMLKVFGSF

SEQ ID NO: 145797 - protein, 67 aa, Unknown
  Bacterial polypetide isolated from the Sargasso Sea
MAINPSEVTKLLKEQIKNFGKKAEVSEIGKVLSVGDGIARVYGLDNVQAGEMVEFNDGSKGMALNLE

SEQ ID NO: 145798 - protein, 223 aa, Unknown
  Bacterial polypetide isolated from the Sargasso Sea
MAANPMSQFDVYRIGPEIKVGAFDISFTNASLFMIISTVSILLVFNFGSKRNSVLPNKMQLLAELSYTFVAKMISDTAGSKAKPYFAFIFSLFMFVLFCNMFGMIPYTFTVTSHIIVTFILASFIFIGVTIIGFIKHGFGYLKLFVPSGVPAVLLPLIVVIEIISYLSRPISLSVRLFANMMAGHTMMKVFGGFVISLGLVGGWLPLSFFGALTGLEILVAFL

SEQ ID NO: 145799 - protein, 152 aa, Unknown
  Bacterial polypetide isolated from the Sargasso Sea
MSISATEISDLIKKKIKELDLDTEARTEGTVVSLADGVARIHGLSDVMQGEMIEFPSNTYGLALNLERDSVGAVIMGSYEHISEGDVVKCTKRILEVPVGDGLLGRVVDALGNPIDGKGEINTKETSPIEKIAPGVIARKSVGQPVPTGLKS

SEQ ID NO: 145800 - protein, 25 aa, Unknown
  Bacterial polypetide isolated from the Sargasso Sea
IAFKGILSGDYDHLPEQAFYMVGTI

SEQ ID NO: 145801 - protein, 57 aa, Unknown
  Bacterial polypetide isolated from the Sargasso Sea
VAEVGTVLSVGDGIARVYGLDQVQAGEMVEFPGGIKGMALNLEMDNVGVSIFGDDTG

SEQ ID NO: 145802 - protein, 212 aa, Unknown
  Bacterial polypetide isolated from the Sargasso Sea
MLELARQRGITRMSYASSVAAPAMGDNDWLATLYGAHKICGEQMAAVYWQDWGVPSIGIRPAIIYGPGRDQGMSAAPTIALMAAEVGEAYTIPFTGDVGFVYVADAAERFIAAASRSFEGARVFDLDGTPATVTEMLALLNNHYPDAAINATGDPMPFPAETNSGALEQLIGLPDCRPLAAGIADTVAGFQAAKARGIDLAGMYQHTLRKTP

SEQ ID NO: 145803 - protein, 270 aa, Unknown
  Bacterial polypetide isolated from the Sargasso Sea
RGGAPTLISTPTLHGRVVEARGVIARVVGVSLRIGEKVRLVRPDTLEAQFGEVVGFAHDGALVMPLAGLIGLSDITEVQGCGATWSSVEAIGLLGRVVDGLGNPLDGRALPPSPSSFDATQPENAAATLNPLERPVISTPFATGVRAIDAMLTCGVGQRTGIFAPAGGGKSTIMGMIANGAATDAVVVALIGERGREVAEFIHDHLAQRRESTVVIAATSERPAAERIKAAELAARVAVGLRATGRNVLLLFDSLTRYARALRELGLAVG

SEQ ID NO: 145804 - protein, 185 aa, Unknown
  Bacterial polypetide isolated from the Sargasso Sea
QLLSELSYSFVAKMISDTAGSNAKPYFSFIFSLFMFVLFCNMFGMIPYAFTVTSHIIVTFVLAAFIFVGVTIIGFMKHGLGYLKLFVPSGVPMVLLPLIVVIEIISYLSRPISLSVRLFANMMAGHTMMKVFGGFVISLGIVGGWLPLSFSVALTGLEILVAFLQAYVFAILTCIYLNDALNLHH

SEQ ID NO: 145805 - protein, 244 aa, Unknown
  Bacterial polypetide isolated from the Sargasso Sea
MASNPMQQFTVYRIGPEIKIAGIDLSFTNASLFMVLSTSIILLFLFLGSKEKKIVPGKIQLMAEMFYNFVAKMISETAGSKAKPFFPFIFSLFMFVLFCNMVGMLPYSFTVTSHIIVTLIMALFIFIAVTIIGFVKHGFKYLSIFVPSGVPAVLLPLITIIEIISYLSRPVSLSVRLFANMMAGHTMLKVFGGFVVSLGILGGWLPLSFSVALTGLEILVAFLQAYVFAILTCIYLNDALNLHH

SEQ ID NO: 145806 - protein, 186 aa, Unknown
  Bacterial polypetide isolated from the Sargasso Sea
MAANPMSQFDVYRIGPEIKVGAFDISFTNASLFMILSTVSILLIFNLGSKKNSILPNKIQLLAELSYTFVSKMISDTAGSKAKPYFAFIFSLFMFVLFCNMFGMIPYTFTVTSHIIVTFVLAAFIFIGVTVIGFIKHGFGYLKLFVPSGVPAVLLPLIVVIEIISYLSRPISLSVRLFANMMAGHT

SEQ ID NO: 145807 - protein, 278 aa, Unknown
  Bacterial polypetide isolated from the Sargasso Sea
KQPQYQLIPIEEEYVAIKNANVRQAPFVGSPVVVTIPKNTKVYVPGKVKGENWLAIEGEGGIIGYSWGDLFLTQQQFAQQENDLKKQLEEIAQNLKEEEPKFFGSGTGFYVTEAGHIITNQHVTHGCEYMLLGEEQLKVMRNDVVNDLAILKSTNPVPNFLRISKKITPLKGEDIMVLGYPYGKLTSSESKVTKGIVSALQGLGNNYSQFQIDAAIQPGNSGGPVFDDEGALVGITVATADYKFYEENFKSLPQNMNFAIKSTMLENFLASLGITYDK

SEQ ID NO: 145808 - protein, 202 aa, Unknown
  Bacterial polypetide isolated from the Sargasso Sea
MASNPMYQFNVYRIGPEIKISEVDLSFTNASLFMVISSLAVLIIFNLGSKKNSLIPNKIQLLAELSYTFVSKMISDTAGSKAKPYFSFIFSLFMFVLFCNMFGMIPYAFTVTSHIIVTFVLAAFIFIGVTVIGFIKHGFGYLKLFVPSGVPIVLLPLIVVIEVISYLSRPVSLSVRLFANMMAGHNMMKVFGGFVISLGIVG

SEQ ID NO: 145809 - protein, 238 aa, Unknown
  Bacterial polypetide isolated from the Sargasso Sea
MHQFNVYKIGPEIKINGVDISFTNASLFMLISAIFISIFLLLGTKDRKIVPGKFQIVSEMLYNFISKMISDTAGKKAKPYFSFIFSLFIFVLFCNMVGMLPYSFTVTSHIIVTLAFAMFIFIGVTILGFVIHGFKYLKIFVPSGVPMVLLPIIMIIEIISYLSRPVSLSVRLFANMMAGHTMLKVFGGFVISLGLIAGWLPLTFSVALTGLEILVAFLQAYVFAILTCIYLNDALNLH

SEQ ID NO: 145810 - protein, 107 aa, Unknown
  Bacterial polypetide isolated from the Sargasso Sea
GFKYLSLFVPKGVPIVLLPLITIIEIISYLSRPVSLSVRLFANMMAGHTMLKVFGSFVISLGLLGGWLPLSFSVALTGLEILVAFLQAYVFAILTCIYLNDALNLHH

SEQ ID NO: 145811 - protein, 215 aa, Unknown
  Bacterial polypetide isolated from the Sargasso Sea
LVYLWSSGSLSILLLLFLATKKKSLIPSKIQLVGEMSYTFVAKMISDTAGANAKPFFPFIFTLFMFVLFCNMVGMLPYSFTVTSHIIVTFVLAAAIFIGVTVIGFIKHGIKYLELFVPKGVPVVLLPLIIIIEVISYLSRPVSLSVRLFANMMAGHTMLKVFGGFVISLGLLGGWLPLGFSVALTGLEILVAFLQAYVFAILTCIYLNDALNLHH

SEQ ID NO: 145812 - protein, 59 aa, Unknown
  Bacterial polypetide isolated from the Sargasso Sea
MDINPSEITKILKEQIKNLGEKTEVSEIGKVLSVGDGIARVYGLDNVQAGEMVEFKDGS

SEQ ID NO: 145813 - protein, 221 aa, Unknown
  Bacterial polypetide isolated from the Sargasso Sea
DISFTNASLFMVISSLAILIIFNLGSKKNLMIPNKIQLLAELSYTFVSKMISDTAGSKAKPYFAFIFSLFMFVLFCNMFGMIPYTFTVTSHIIVTFVLASFIFIGVTIIGFIKHGFGYLKLFVPSGVPIVLLPLIVIIEIISYLSRPISLSVRLFANMMAGHTMMKVFGGFVISLGIVGGWLPLSFSVALTGLEILVAFLQAYVFAILTCIYLNDALNLHH

SEQ ID NO: 145814 - protein, 48 aa, Unknown
  Bacterial polypetide isolated from the Sargasso Sea
MSEIRPDEISSIIRDQLSNSKSTTQLEETGTVLQIGDGVARIYGLTNA

SEQ ID NO: 145815 - protein, 93 aa, Unknown
  Bacterial polypetide isolated from the Sargasso Sea
MFFSLAAVEVGTHLYWEIAGLTVHGQVLLITWLVIAIILGIVVLGTLKLEQVPKGLQNFVEAVYEYVSGIAKDQLGEAEYRPWVPFVGTLFLF

SEQ ID NO: 145816 - protein, 91 aa, Unknown
  Bacterial polypetide isolated from the Sargasso Sea
MSQGTVVQVIGAVIDVEFSRQELPKIYDALEVEGEGLVLEVQQQLGDGIVRTIAMGQTEGLQRGAKVSNTGDAVKVPVGEKTLRRILNVLG

SEQ ID NO: 145817 - protein, 60 aa, Unknown
  Bacterial polypetide isolated from the Sargasso Sea
MSNGMVTQIIGAVIDVEFDKDNIPKVYEALMVDESGTTLEVQQQLGDGVVRTIAMGATEG

SEQ ID NO: 145818 - protein, 164 aa, Unknown
  Bacterial polypetide isolated from the Sargasso Sea
MFFNSLLTNFAALEVGQHLYWQIGNIRLHGQVFLTSWILLGALLVFISLGTKKMENDPKGIQNLLEFLWDYIRDLARTQIGEKVYRDWMPFIGTLFLFVFVSNWGGALIPWRLIKLPSGELGAPTADINTTIALALLVSLSYFYAGLSNKGWRYFEYYVHPTPI

SEQ ID NO: 145819 - protein, 209 aa, Unknown
  Bacterial polypetide isolated from the Sargasso Sea
MKQIDIEPNFELDTLSLDVDLRWDNLPWIFDYNIVTGDIATNLTGFTIRNSEELETPNNLLRLVNIFNITDSFEKLTNLDFRKLYKRGFSADSVKGKFGITEKSLKIKEPIILKSGSSEFSWTGEISRDKKGNLDKLNLEVVMTLPLREYLPAYAFVLGGPLTAGIVYIAGKAFERNLDKLSSGKWKINGKISEPKTEFDGWFEDKKTQ

SEQ ID NO: 145820 - protein, 212 aa, Unknown
  Bacterial polypetide isolated from the Sargasso Sea
MASNPMYQFNVYRIGPEIKIGEVDLSFTNASLFMVISSLAVLVIFNLGSKKNSLIPNKIQLLAELSYTFVSKMISDTAGSKAKPYFAFIFSLFMFVLFCNMFGMIPYAFTVTSHIIVTFVLAAFIFFGVTIIGFIKHGFGYLKLFVPSGVPVVLLPLIVVIEVISYLSRPVSLSVRLFANMMAGHTMMKVFGGFVISLGIVGGWLPLGFSVA

SEQ ID NO: 145821 - protein, 78 aa, Unknown
  Bacterial polypetide isolated from the Sargasso Sea
MEIKAAEISSVIKDQIANFETKADVAEVGTVLSVGDGIARVYGLDKVQAGEMVEFPGGIKGMALNLEMDNVGVSIFGD

SEQ ID NO: 145822 - protein, 190 aa, Unknown
  Bacterial polypetide isolated from the Sargasso Sea
MHQFEVYRVGPQINFGEINLSFTNASLFMVISAITILFFLFLGTQKKLLVPSKMQLIAEMSYTFVAKMINDTAGNNAKPFFPFIFTLFMFVLFCNMIGMLPYSFTVTSHIIVTFVLAAVVFIGVTIIGFIKHGIKYLELFVPKGVPIMLLPLIVIIEIISYLSRPVSLSVRLFANMMAGHTMLKVFGGFV

SEQ ID NO: 145823 - protein, 244 aa, Unknown
  Bacterial polypetide isolated from the Sargasso Sea
MASNPMQQFTVQRIGPEINIAGVDLSFTNASLFMVISATVIILFLFLGSKEKKIIPNKLQLIAEMSYTFVAKMINDTAGSKARPYFPFIFCLFMFVLFCNMVGMLPYSFTVTSHIIVTLIMALFIFIAVTIIGFIKHGFKYLSIFVPSGVPAVLLPLITIIEIISYLSRPVSLSVRLFANMMAGHTMLKVFGGFVVSLGILGGWLPLSFSVALTGLEILVAFLQAYVFAILTCIYLNDALNLHH

SEQ ID NO: 145824 - protein, 160 aa, Unknown
  Bacterial polypetide isolated from the Sargasso Sea
DLGDYFVEHVDLSEFKSIKYVNAQAIAKALLARFDNNEYDVATIFYSKFVNVVSQIPTAQQIIPAIFEDQSLASDTAVYDYEPDEETILADLLPRGVTTQIFAALLENGASEQGARMSAMDNATRNAGDMIDKLTIEFNRSRQAVITNELIEIISGAEAL

SEQ ID NO: 145825 - protein, 235 aa, Unknown
  Bacterial polypetide isolated from the Sargasso Sea
MTESLNPIISIVKEYLEQSGYNLHLFTSINDKHVEIINLDYKMDIKITKAMKLNNYIGCLSSVFNISKSNLEEGIVMRYKRVDNYNEMDSLGAFIVELLQNDYREKDIIQAIESNFKKTQEQAIKILADYVNELQVEQNAFQRTRLKIRDNPGFLVTMVRDKASNNLNININGINHIKYLEVIPIYIDSLVRLFQMPDSTGLDSSLINKQCKDKVEMKELEIQEIVAPIENSDVL

SEQ ID NO: 145826 - protein, 133 aa, Unknown
  Bacterial polypetide isolated from the Sargasso Sea
MIESAGGMIPFLCHVFLILFGGFFGLNFAFNKNFAQKSFGFDNIQAAYMGRPLGFLMTGCVLMAFLALFGIAGVTSANEIFGAIFVFTILAFLYNTALVMKILPTYDGKDHEIKNAIRPLIPMLVILIRYFNL

SEQ ID NO: 145827 - protein, 239 aa, Unknown
  Bacterial polypetide isolated from the Sargasso Sea
MHQFEVYRIGPEIKLGNIDISFTNASLFMVVSVIGILIIFNLGTKKNSLIPDKMQLLAELSYTFVSKMISDTAGSKAKPYFSFIFSLFMFVLFCNMFGMIPYTFTVTSHIIVTFVLAAFIFIGVTIIGFAKHGIGYLKLFVPSGVPIVLLPLIVVIEVISYLSRPVSLSVRLFANMMAGHTMMKVFGGFVISLGIVGGWLPLSFSVALTGLEILVAFLQAYVFAILTCIYLNDALNLHH

SEQ ID NO: 145828 - protein, 646 aa, Unknown
  Bacterial polypetide isolated from the Sargasso Sea
MFKKLTLSMQISGGYALVLLLLIVISLAAYFGLTKAINGFNDYRSLARDSNMAGRIQANMLTIQIQAYDYIFQKNESAYKVFNERNVILNDIIQKAMTEINEPELSQQLSDIRKDIVDYNSYFESVVKLIKSRNDEVTNVLVPKGTEVVKLISDTMHQSYNKGQIDVAYRAGSVLESVLTARLAASKFLETNLDADLQQALMAIDLAKGERLSALKTVATDLDAQSKLLQFTSSIDNYASSLKSVYSTISERNDIVQNQLDRIGADVARQTEDIKLTIQKRQDTLGPIVKAQNEQTLTTVISVSIAAILIGIFLAWFLVKLIKKPLGGEPRDMETIARAIANGDLTVELKQRENATGVYKAMIDMIDSLTSVIAQVRSGADNLSSASSQVSSTAQSLSQGATEQAASVEETTSAVEELNASVQQNSENARVTNNMATVAAEEARQGGIAVEQTVAAMKQIAAKISLIEDIAYKTNLLSLNAAIEAARAGEHGKGFTVVASEVRKLAENSSLTAQEINKLASESVGIAENAGRLIANIVPNIQKTSDLVQEISSSSEEQAIGISQINDSMLQLDKATQQNASASEELAATSEELNGQANQLLDAVEFFKLAISSERSHQGKSTVMAASGRKTAKAKQHVERTDFERF

SEQ ID NO: 145829 - protein, 244 aa, Unknown
  Bacterial polypetide isolated from the Sargasso Sea
MASNPMYQFNVYRIGPEIKIGEIDLSFTNASLFMVISSLAVLIIFNLGSKKNSLIPNKIQLIAELSYSFVSKMISDTAGSKAKPYFSFIFSLFMFVLFCNMFGMIPYAFTVTSHIIVTFVLAAFIFFGVTIIGFIKHGFGYLKLFVPSGVPIVLLPLIVVIEVISYLSRPVSLSVRLFANMMAGHTMMKVFGGFVISLGIVGGWLPLGFSVALTGLEILVAFLQAYVFAILTCIYLNDALNLHH

SEQ ID NO: 145830 - protein, 244 aa, Unknown
  Bacterial polypetide isolated from the Sargasso Sea
MATNPMHQFNVYRIGPEVKIAGIDISFTNSSLFMLLSAGAICIFLLLGTREKKLIPGKIQLVAEMFYNFIAKMISDTAGSKAKPYFPFIFSLFMFVLFCNMVGMFPYSFTVTSHIIVTLIMAMFIFVAVTIIGFIKHGFKYLKIFVPSGVPVLLLPLITVIEIISYLSRPVSLSVRLFANMMAGHTMLKVFGGFVISLGLLGGWLPLSFSVALTGLEILVAFLQAYVFAILTCIYLNDALNLHH

SEQ ID NO: 145831 - protein, 371 aa, Unknown
  Bacterial polypetide isolated from the Sargasso Sea
PGSGKTTLARIICNSNDFEFHKISAVHSGVVEIKKIIESAIIKLSNRVRSVLFIDEIHRLNRSQQDSLLGAIEEGVLILIGATTENPSFVLNKALISRCNILPLNNIARKGLEKIYYRAQKFLSTSNLLSEEAKDALFSLVDGDARFLLNIIEMIHANGSYELDRNSLMDLISSRPLKYDKSGEEHYNLISALHKSIRGSDVDASLYWLSRMLIGGEDPLYIFRRLLRIASEDVGLANPSALTYIVSAKQAYESVGLPEGEIFLAQSVVFLSTTDKSNAVYLAQKLAAESAKKHGSLSPPKHIINAPNKFMKELGYSEGYIYDHSLESNYSGQNYFPENFERRVFYEPKGLGFEKKIKDRLLKFKNFRKKD

SEQ ID NO: 145832 - protein, 232 aa, Unknown
  Bacterial polypetide isolated from the Sargasso Sea
MATNPMHQFKVHRIGPEIEISGIDLSFTNASLFMFISAALVILLLLIGTREKKLVPSKAQLVSELFYNFIAKMISDTAGKKAKPYFPFIFSLFIFILFCNMVGMLPYSFTVTSHIIVTLTFAIFIFVGVTILGFVIHGFKYLRIFVPSGVPLVLLPIITIIEIISYLSRPISLSVRLFANMMAGHTMLKVFGGFVISLGLVGGWLPLSFSVALTGLEILVAFLQAYVFAILT

SEQ ID NO: 145833 - protein, 413 aa, Unknown
  Bacterial polypetide isolated from the Sargasso Sea
RSGEGSLTGSGSLAFQQESDAPGLNFTVKSFPIRRPDAQLQLDGALTLQGSLSQPALGGEVKLSKGAISVSPSELSSGGGPGVPVDAEIPEAFWDFQKPVVVRGPRVESADAAALRRRVPRLGSLSFRNLRVALGPDLRITAPPVAQFFTGGLLTFNGSAGPDVRISGVVRLLKGRISLLTNVLKLDSSNANVAVFTPSLGLLPYLDVAFTTRISDRVGGFDGNDVVGNEELQGNFSNLDRLNLIKVIVAYSGPADRLSLDTLSLRSQPPLPQERLVALLAGNSLAGIAAGNAGTAVATLLGGTLLSPVLGGLGNLFDNRITASLYPAFLEPYVQDSGKDGNQGRVPSQLVLGAEVGVDLTDRFNFSVLAAPNRSDIPAEAVLRYQATDKLGIQGALDQQGRWQSQLQLFFRF

SEQ ID NO: 145834 - protein, 239 aa, Unknown
  Bacterial polypetide isolated from the Sargasso Sea
MTQFEVYRIGPEIKVGAFDISFTNASLFMVISSLAILIIFNLGSKKNSILPNKIQLLAELSYSFVSKMISDTAGSKAKPYFSFIFSLFMFVLFCNMFGMIPYTFTVTSHIIVTFILAAFIFIGVTVIGFIKHGFGYLKLFVPSGVPIVLLPLIVVIEIISYLSRPISLSVRLFANMMAGHTMMKVFGGFVVSLGIVGGWLPLSFSVALTGLEILVAFLQAYVFAILTCIYLNDALNLHH

SEQ ID NO: 145835 - protein, 247 aa, Unknown
  Bacterial polypetide isolated from the Sargasso Sea
MAAKGEKHSPLEQFEIIPFTKTEIGGYDISFTNSSLSMIITVAVITLFLTLTVNPRSLVPTRMQLISELMYNFVAQLLSDTVGDNGKKYFPFVFSLFMFVLIGNMVGMVPYQFTFTSHIIVTFALASVVFIGVTILGFVNHGIKFFTFFYIPGVPFYMHPLLIPIEVISYLSRPISLSVRLFANMLAGHTLLKVFAGFVVAMPFFTGALPLVFIVALTGLEILIAFLQAYVFAILTCLYINDAYHLH

SEQ ID NO: 145836 - protein, 244 aa, Unknown
  Bacterial polypetide isolated from the Sargasso Sea
MASNPMQQFTVHKIGPEIKIAGIDLSFTNASLFMVISASVILLFLFLGSKEKKIIPNKIQLIAEMFYTFVAKMISDTAGSKAKPYFPFIFSLFMFVLFCNMVGMLPYSFTVTSHIIVTLIMALFIFIAVTIIGFLKHGFKYLSIFVPSGVPAVLLPLITVIEIISYLSRPVSLSVRLFANMMAGHTMLKVFGGFVVSLGVLGGWLPLSFSVALTGLEILVAFLQAYVFAILTCIYLNDALNLHH

SEQ ID NO: 145837 - protein, 260 aa, Unknown
  Bacterial polypetide isolated from the Sargasso Sea
MSATGEVLTPQGYISHHLTHLQVGSGFWTVNIDSMIFSVLLGALFIWSFRRVAVKATSGVPGKLQCFVEMLVEFVSGNVKDIFHGRNKVIAPLGLTVFVWIFLMNLMDLIPVDFIPHAAQLMGVPYLRVVPSADVNITMSMALGVFFLILYYSIKVKGIGGFVKELTLQPFNHPAAIPVNLILETVTLISKPVSLGLRLFGNMYAGELIFILIAGLLPWWSQWILSVPWAIFHILIITLQAFIFMVLTIVYLSMAQEDHG

SEQ ID NO: 145838 - protein, 154 aa, Unknown
  Bacterial polypetide isolated from the Sargasso Sea
SLFMFVLFCNMFGMIPYAFTVTSHIIITFILASFIFVGVTIIGFVKHGFGYLKLFVPSGVPVVLLPLIVVIEIISYLSRPISLSVRLFANMMAGHTMMKVFGGFVISLGIVGGWLPLSFSVALTGLEILVAFLQAYVFAILTCIYLNDALNLHH

SEQ ID NO: 145839 - protein, 239 aa, Unknown
  Bacterial polypetide isolated from the Sargasso Sea
MSQFDVYRIGPEIKVGAFDISFTNASLFMIISTVSILLIFNLGSKKNSILPNKIQLLAELSYTFVSKMISDTAGSKAKPYFAFIFSLFMFVLFCNMFGMIPYTFTVTSHIIVTFVLAAFIFIGVTVIGFIKHGFGYLKLFVPSGVPAVLLPLIVVIEIISYLSRPISLSVRLFANMMAGHTMMKVFGGFVISLGIVGGWLPLSFSVALTGLEILVAFLQAYVFAILTCIYLNDALNLHH

SEQ ID NO: 145840 - protein, 237 aa, Unknown
  Bacterial polypetide isolated from the Sargasso Sea
MHQFEIKRLLDINIAGYDISFTNSALFMLIAVFLISFTTIFSVRKNSIIPSRMQSIVEMSYEFVADMVRQNVGSQGKNYFPFIFTIFMFVLFMNMLGMIPYGFTVTSHIAVTFALAMLIFIGVTVIGFVKHGLGFFGFFVPKGVPVFMLPLLVVIEVISYFTRPISLSVRLFANMMAGHTMLKVFSGFVILMGFLGGWLPLAVMVAFTGLEILIAFLQAYVFAILTCIYLNDALHMH

SEQ ID NO: 145841 - protein, 322 aa, Unknown
  Bacterial polypetide isolated from the Sargasso Sea
MTKKNTFKSPVTKKDYVGNLEPRYAGIPTFMRTPLAETLEDVDIGLVGVPYDGGVTNRAGARHGPREVRNQSSLMRTIHHINRESPFDIANIADLGDVSFSEPFDHQAVNNDITDFFGLIKESGVIPLSVGGDHSITYPIFKGIANDGPIGMVHIDAHTDTWGEIWGSKFHHGSPFRLAVEDGLLDPKRTIQIGIRGAQNFMDGIDFSLDSGMRVVFMEEFFERGVKEVIKEALDIVEDGPTYISFDVDGLDPVFAPGTGTPEVGGITTIEAQTLLRGLKGLNLIGADVVEVAPPFDQTGNTALVGATMMYEILCLLADRFK

SEQ ID NO: 145842 - protein, 239 aa, Unknown
  Bacterial polypetide isolated from the Sargasso Sea
MTQFEVYRIGPEIKIGAFDISFTNASLFMVISSIAILIIFNLGSKKNSMLPNKIQLLAELSYTFVSKMISDTAGSKAKPYFSFIFSLFMFVLFCNMFGMIPYTFTVTSHIIVTFVLAAFIFIGVTVIGFLKHGLGYLKLFVPSGVPIVLLPLIVIIEIISYLSRPISLSVRLFANMMAGHTMMKVFGGFVISLGIIGGWLPLSFSVALTGLEILVAFLQAYVFAILTCIYLNDALNLHH

SEQ ID NO: 145843 - protein, 398 aa, Unknown
  Bacterial polypetide isolated from the Sargasso Sea
MHIPHRTGDDTVTHSVIPAGLADEMIEIRHRIHAHPELGFEEFATSDLVAEQLQSWGYTVHRGLGGTGVVAQLKVGEGTQRLGLRADMDALPIHEATGLPYESRIAGKMHACGHDGHTAMLLAAAKHLARERRFSGTLNLIFQPAEEGLGGAKKMLDEGLFELFPCDAIFAMHNMPGFPTGKFGFLPGSFMASSDTVIVDVQGRGGHGAVPHKAVDSVVVCAQIVIALQTIVSRNVSPLDMAIVTVGAIHAGEAPNVIPDRAQMRLSVRALKPEVRDLLETRIKEVVHAQAAVFGATATIDYQRRYPVLVNDAEMTAFARNVAREWVGDANLIDGMVPLTGSEDFAFLLEKRPGCYLIIGNGDGEGGCMVHNPGYDFNDAALPTGASYWVKLAETFLV

SEQ ID NO: 145844 - protein, 244 aa, Unknown
  Bacterial polypetide isolated from the Sargasso Sea
MASNPMQQFTVHKIGPEIKIADIDLSFTNSSLFMVISASVIILFLFLGSKEKKIIPNKLQLIAELSYTFVAKMISDTAGSKAKPYFPFIFSLFMFVLFCNMVGMLPYSFTVTSHIIVTLIMALFIFIAVTIIGFIKHGFKYFSIFVPSGVPAVLLPLITVIEIISYLSRPVSLSVRLFANMMAGHTMLKVFGGFVVSLGILGGWLPLSFSVALTGLEILVAFLQAYVFAILTCIYLNDALNLHH

SEQ ID NO: 145845 - protein, 128 aa, Unknown
  Bacterial polypetide isolated from the Sargasso Sea
EKIDKLLIAHNEFVSTMSQKPEIKTLLPVATLDEDSDSLQSHWDYIYEPDAIDLLDGVLMRYIESQVYRGATENFACEMAAKMVAMKSATDNAGDIIDKLQLVYNKARQASITQEISEIVGGAAAVSE

SEQ ID NO: 145846 - protein, 70 aa, Unknown
  Bacterial polypetide isolated from the Sargasso Sea
MSTGKVIQIIGAVIDVEFEKDNIPNVYEALTIDGLEIVLEVQQQLGDGIVRTIAMGSTEGLKRGLIAERT

SEQ ID NO: 145847 - protein, 122 aa, Unknown
  Bacterial polypetide isolated from the Sargasso Sea
NIYFIGVTILGFLIHGFKYLKIFVPSGVPLVLLPIISIIEIISYLSRPVSLSVRLFANMMAGHTMLKVFGGFVISLGLIGGWLPLTFSVALTGLEILVAFLQAYVFAILTCIYLNDALNLHH

SEQ ID NO: 145848 - protein, 92 aa, Unknown
  Bacterial polypetide isolated from the Sargasso Sea
VLLPLIVVIEIISYLSRPISLSVRLFANMMAGHTMMKVFGGFVISLGIVGGWLPLSFSVALTGLEILVAFLQAYVFAILTCIYLNDALNLHH

SEQ ID NO: 145849 - protein, 141 aa, Unknown
  Bacterial polypetide isolated from the Sargasso Sea
MSTQGGVQYSKIAEIKGPLVIVDGVENAAFDELVEIETNDGEKRLGKVLEVGNGKAIVQVFEGTTGLSVSGTNAKFVGKVMEMPVSEEVLGRVFDGLGRPKDGLPDPVASSFLDINGAPMNPEQREYPKDFIQTGVSVIDG

SEQ ID NO: 145850 - protein, 239 aa, Unknown
  Bacterial polypetide isolated from the Sargasso Sea
MYQFNVYRIGPEIKLGSVDISFTNASLFMVISSLAILIIFNLGAKKKTLIPDKLQLLSELSYTFVAKMISDTAGSKAKPYFSFIFSLFMFVLFCNMFGMIPYAFTVTSHIIVTFVLAAFIFIGVTIIGFMKHGLGYLKLFVPSGVPMVLLPLIVIIEIISYLSRPISLSVRLFANMMAGHTMMKVFGGFVISLGIVGGWLPLSFSVALTGLEILVAFLQAYVFAILTCIYLNDALNLHH

SEQ ID NO: 145851 - protein, 103 aa, Unknown
  Bacterial polypetide isolated from the Sargasso Sea
MKLFVPSGVPIVLLPLIIIIEIISYLSRPISLSVRLFANMMAGHTMMKVFGGFVISLGVVGGWLPLSFSVALTGLEILVAFLQAYVFAILTCIYLNDALNLHH

SEQ ID NO: 145852 - protein, 239 aa, Unknown
  Bacterial polypetide isolated from the Sargasso Sea
MSQFDVYRIGPEIKVGAFDISFTNASLFMILSTVSILLIFNLGSKKNSILPNKIQLLAELSYTFVSKMISDTAGSKAKPYFAFIFSLFMFVLFCNMFGMIPYTFTVTSHIIVTFVLAAFIFIGVTVIGFIKHGFGYLKLFVPSGVPAVLLPLIVVIEIISYLSRPISLSVRLFANMMAGHTMMKVFGGFVISLGIVGGWLPLSFSVALTGLEILVAFLQAYVFAILTCIYLNDALNLHH

SEQ ID NO: 145853 - protein, 93 aa, Unknown
  Bacterial polypetide isolated from the Sargasso Sea
MVLLPIISIIEIISYLSRPISLSVRLFANMMAGHTMLKVFGGFVISLGLIGGWLPLTFSVALTGLEILVAFLQAYVFAILTCIYLNDALNLHH

SEQ ID NO: 145854 - protein, 239 aa, Unknown; identical to SEQ ID NO: 145734
  Bacterial polypetide isolated from the Sargasso Sea

SEQ ID NO: 145855 - protein, 55 aa, Unknown
  Bacterial polypetide isolated from the Sargasso Sea
EVFTGAPGKYVSVKDTIQGFKEILDGVHDDVPEQAFYMVGSIEEVLEKAKTVKSD

SEQ ID NO: 145856 - protein, 351 aa, Unknown
  Bacterial polypetide isolated from the Sargasso Sea
MLVLIFLSWRATRNIKDVPSGLQNVFELIFQFFIDTADEAGGKKARRFLPVVITIFLAVLAFNWMGILPGVGSIGKVETIEEWVHHHSHSGHCYDVAKTSKNKNIDKYLLAELCVLEEDASHGFVVFDDVSSINIMPLGRGESARAPLHAIGDYEVQDIVDIKKKITSGTKPEDINEFNTIKENIKSGKVLKLYENPDDGTISPESYLGKNTGELIPFFRGASTDVNTTLAIAIFAMIAIQFWGFSSLGFSGYGGKFINFSHGPINAFVGILELFGEFAKTISFTFRLFGNMFAGEIVLISMGFLLPLIGMMPFMGLELFVGVIQAFIFSMLTLVFGVMAVTSHSEHEDHD

SEQ ID NO: 145857 - protein, 239 aa, Unknown
  Bacterial polypetide isolated from the Sargasso Sea
MTQFEVYRIGPEIKVGAFDISFTNASLFMVVSSLAILIIFNIGSKKNSLLPNKIQLLAELSYTFVSKMISDTAGSKAKPYFSFIFSLFMFVLFCNMFGMIPYTFTVTSHIIVTFVLAAFIFIGVTIIGFIKHGLGYLKLFVPSGVPVILLPLIVVIEIISYLSRPISLSVRLFANMMAGHTMMKVFGGFVISLGVVGGWLPLSFSVALTGLEILVAFLQAYVFAILTCIYLNDALNLHH

SEQ ID NO: 145858 - protein, 250 aa, Unknown
  Bacterial polypetide isolated from the Sargasso Sea
MAKGESPLKQFEIQPIIDINLFGLDISFTNSALWMTVTTAFILIFFTAPFLKSKKTNSVSDLYPSRMQVAAELGFSFINSLLSDTVGKEGKKYFSLVFTLFMFILFGNLFGMIPYSFTFTSHIIVTLALAMGVFIFVTILGFVKHGVKFFGFFVIPGLPIYMLPLLIPIEIISYLSRPISLSVRLFANMLAGHTLLKVFAGFVSALGIFGILPLVFIIALTGLEILIAFLQAYVFAILTCLYINDALHLH

SEQ ID NO: 145859 - protein, 167 aa, Unknown
  Bacterial polypetide isolated from the Sargasso Sea
MVGSQGKNYFPFIFTIFMFVLFMNMLGMIPYGFTVTSHIAVTFALAMLIFIGVTVIGFVKHGLGFFGFFVPKGVPVFMLPLLVVIEVISYFTRPISLSVRLFANMMAGHTMLKVFSGFVILMGFLGGWLPLAVMVAFTGLEILIAFLQAYVFAILTCIYLNDALHMH

SEQ ID NO: 145860 - protein, 194 aa, Unknown
  Bacterial polypetide isolated from the Sargasso Sea
MANLKEIRDRIVSVKNTRKITEAMRLVAAAKVRRAQDQVLKSRPFADKLARVLENIQSRVQFEAVDSPLLSKREVKSISLVCITADRGLCGGYNTNIIKKVEIRYAELVKQGYQPNLILVGKKAIGYFQNRKDRYVIKSTFKELEQVPTVKDSEGVTNEILAEFLSENSDRVEIIYTKFITLVSCAPVVQTLLP

SEQ ID NO: 145861 - protein, 244 aa, Unknown
  Bacterial polypetide isolated from the Sargasso Sea
MATNPMHQFNVYRIGPEIRLGEVDISFTNASLFMVISSLAILILLNLGAKKNSLIPSKIQLLGELSYSFVSKMISDTAGSKAKPYFSFIFSLFMFVLFCNMFGMIPYAFTVTSHIIVTFVLAAFIFIAVTVIGFIKHGFGYLKLFVPSGVPIVLLPLIVVIEIISYLSRPISLSVRLFANMMAGHTMMKVFGGFVISLGIVGGWLPLSFSVALTGLEILVAFLQAYVFAILTCIYLNDALNLHH

SEQ ID NO: 145862 - protein, 239 aa, Unknown
  Bacterial polypetide isolated from the Sargasso Sea
MYQFNVYRIGPEIKLGSVDISFTNASLFMVISSLAILIIFNLGAKKKTLIPDKLQLLSELSYSFVAKMISDTAGSKAKPYFSFIFSLFMFVLFCNMFGMIPYAFTVTSHIIVTFVLAAFIFVGVTIIGFMKHGLGYLKLFVPSGVPMVLLPLIVVIEIISYLSRPISLSVRLFANMMAGHTMMKVFGGFVISLGIVGGWLPLSFSVALTGLEILVAFLQAYVFAILTCIYLNDALNLHH

SEQ ID NO: 145863 - protein, 244 aa, Unknown
  Bacterial polypetide isolated from the Sargasso Sea
MATNPMHQFSVHRIGPEIKIAGIDISFTNASLFMLISVAAIFLLLFLGTREKKIIPDKIQLITEMFYNFIAKMISDTAGSKAKPYFPFIFSLFMFVLFCNMIGMLPYSFTVTSHIIVTLILAIFIFIAVTIIGFIKHGFGYLKLFVPSGVPVVLLPLITVIEIISYLSRPVSLSVRLFANMMAGHTMLKVFGGFVISLGLLGGWLPLSFSVALTGLEILVAFLQAYVFAILTCIYLNDALNLHH

SEQ ID NO: 145864 - protein, 322 aa, Unknown
  Bacterial polypetide isolated from the Sargasso Sea
MTKKTTFKSPVTKKDYVGNLEPRYAGIPTFMRTPLAETLEDVDIGLIGVPYDGGVTNRAGARHGPREVRNQSSLMRTIHHINRESPFDIANIADLGDVSFSEPFDHQAVNNDITDFFGLVKESGVIPLSVGGDHSITYPIFKGIANDGPIGMVHIDAHTDTWGEIWGSKFHHGSPFRLAVEDGLLDPKRTIQIGIRGAQNFMDGIDFSLDSGMRVVFMEEFFERGVKEVIKDALNTVGDGPTYISFDVDGLDPVFAPGTGTPEVGGITTIEAQTLLRGLKGLNLIGADVVEVAPPFDQTGNTALVGATMMYEILCLLTDRFK

SEQ ID NO: 145865 - protein, 42 aa, Unknown
  Bacterial polypetide isolated from the Sargasso Sea
VSLEDSIKGFNGILKGDYDDLPEQAFYMVGTIEEAVEKAKTM

SEQ ID NO: 145866 - protein, 421 aa, Unknown
  Bacterial polypetide isolated from the Sargasso Sea
MVKPTLEEIRASDLTPLERELALASFGAEALADAPAALTPAAAAVAAIEAALREPGHGHPGAARLEAGTPPSRESAAAEAASDAASSSSASPLPAPYDPALDSNPHMQAWRSRLDALRERNAIAKPMRACGRLTRAAGLVLEAVGLRLSVGAEVMIELPRGSSLPMAEAEVVGFSGDKLFLMPTTEVIGLLPGARVYPLESAPIADPMAGAKRLPVGWELLGRVLDASGRPLDGLGPLGAHADAPLSAPVINPLNREPIHKVLDVGVRAINALLTVGRGQRMGLFAGSGVGKSVLLGTMARYTSAEVIVIGLIGERGREVKEFIEQILGEEGLARSVVIAAPADVSPLLRMQAASYSTSLAEYFRDQGKHVLLLMDSLTRYAMAQREIALAVGEPPATKGYPPSVFAKLPGARRAYRQRPG

SEQ ID NO: 145867 - protein, 61 aa, Unknown
  Bacterial polypetide isolated from the Sargasso Sea
MSIQASEISSILKDQIKNFGQEAEVAEVGRVLSVGDGIARVYGLDNVQAGEMVEFPGGIQA

SEQ ID NO: 145868 - protein, 239 aa, Unknown
  Bacterial polypetide isolated from the Sargasso Sea
MHQFNVYKIGPEIKINGIDLSFTNASLFMLISAISISIFLLLGTKDKKIIPGKFQLLSEMLYNFISKMINDTAGKKAKPYFPFIFSLFIFVLFCNMVGMLPYSFTVTSHIIVTLAFAMFIFIGVTILGFVIHGFKYLKIFVPSGVPVVLLPIIMIIEIISYLSRPVSLSVRLFANMMAGHTMLKVFGGFVISLGLVAGWLPLTFSVALTGLEILVAFLQAYVFAILTCIYLNDALNLHH

SEQ ID NO: 145869 - protein, 237 aa, Unknown
  Bacterial polypetide isolated from the Sargasso Sea
MHQFEIKRLLDINIAGFDISFTNSALFMLIAVFIISFTTIISVRKNSIIPSRMQSIVELSYEFVADMVRQNVGSQGKNYFPFIFTLFMFVLFLNMLGMIPYGFTVTSHIAVTFALAMLIFIGVTIIGFVKHGLGFFGFFVPKGVPIFMLPLLVVIEVISYFTRPISLSVRLFANMMAGHTMLKVFSGFVILMGFLGGWLPLAVMVAFTGLEILIAFLQAYVFAILTCIYLNDALHMH

SEQ ID NO: 145870 - protein, 150 aa, Unknown
  Bacterial polypetide isolated from the Sargasso Sea
LCYFCNMVGMLPYSFTVTSHIIVTLIMALFIFIAVTIIGFINHGFKYLSIFVPSGVPAVLLPLITVIEIISYLSRPVSLSVRLFANMMAGHTMLKVFGGFVVSLGILGGWLPLSFSVALTGLEILVAFLQAYVFAILTCIYLNDALNLHH

SEQ ID NO: 145871 - protein, 105 aa, Unknown
  Bacterial polypetide isolated from the Sargasso Sea
MALTLRVLCPDQNVFDGQADEVILPSTTGQLGVLPGHVSLLTALDVGVLRMRDGNQWTAIALMGGFAEVDDDEVSVLVNAAEPASGINAEEAQKQLSEAEQAWSK

SEQ ID NO: 145872 - protein, 244 aa, Unknown; identical to SEQ ID NO: 145633
  Bacterial polypetide isolated from the Sargasso Sea

SEQ ID NO: 145873 - protein, 239 aa, Unknown
  Bacterial polypetide isolated from the Sargasso Sea
MHQFNVYRIGPEIKLGEVDISFTNASLFMVICSLAILLIFNLGTKKNSLVPDKLQLLAELSYSFVAKMISDTAGTKAKPYFSFIFSLFMFVLFCNMFGMVPYSFTVTSHIIVTFVLAAFIFIGVTIIGFIKHGFGYLKLFVPSGVPIVLLPLIVVIEIISYLSRPISLSVRLFANMMAGHTMMKVFGGFVVSLGIIGGWLPLSFSVALTGLEILVAFLQAYVFAILTCIYLNDALNLHH

SEQ ID NO: 145874 - protein, 1463 aa, Unknown
  Bacterial polypetide isolated from the Sargasso Sea
LVLISSAAVGVGTVLAVQSLNSTAEDLLGSFRGPLEQRIGAALGHPLKIGPYKGLRPWGVALGETAIAPTSSDRSTIKLQGLSVHLDPLASLRQWQPVVRLKLQGLDGVLDRQADGRYWRFGDVPQGGDAPPDLDLRFELVQPARIRLTPSGEEIQLSSRGSVQIAQKRFTAMSRLRWPDGAGSLAVDVKGRWDRPELVLSSRVRSLDLSRLEPFLPGPDATELAGEAGGDLAIRWTPDRFRCQGQLQVRDLELQNTTLPDPLRSSAVGFSCRNDRLSLDPSRWRLGEWRADAKGFLQVSGPVDLRINVASLKRKDRAQLRLDGPWSNPRWRLAGLVDLPELDGPLRVQGQLRTPWTDPAFRQIQVQNALITSAGLRLRLDGTIGDQIDLRSRELSLAPSFWQRWPVLKQSLGETSELSGALRASGSLASPELLLDLSQDRNLVLQQWDLRASWSKASGVLALDRFSSPVLRAEAQLPIRFQNGAAQLGELKAGFALTSLPLARLSALTSIPLEGRLSARGRFQGPLSDVNSTVALDLLRPGVGPLQLPERWQGQLTGSTRSEFNLRLASQAPATDGDLTARLASSGWPLQADLRRGGGSLTVRPGAERQLRWRADQLSIAGLQLSLPTASASGPLQGRLSGDGVLALKPVELVGDLHLDDPKLRGIALKRIELEGRVAAGRFQTRGRLQPQQGEIQLTAQGRVGGNLRSRIEASGLDVPWLVQMAQQLRGGQLPTAGPLGRAEDLGTLVIDTFGGSLEGHLRALQGSRQWLEVYGRDHPQPRVDPGDLRGRLDAVLNLAGPDLASLSLEAEARAHLWMDGEDRDRMLQLEPVVAQLSGPLQGGQGRFSLLHLPFSLLTLVAPVPSALRGAIGVTGSYDLTGRGPLLTTELALEQARFGEHALRLERQAVVLASDGLQLDLALRSDGAAEALQVRGSIPLNLRDALDLELESHGDALSFLAAPAGDALTLTRGSSDLRLILSGYLDQPQANGFLVVRDGAFTAAEQSFKNVNASLLFDFNRVEVSQLAATLESGGSVSAAGAIGLFTPREEETPLSIRLTKGTFRQERVDLAADGEITLRGALSQPLISGQLNLRQGVIQPRGGLLSRLRRAGGASPKQGVQPFQANASTPVSTAALLEEGWDFQDPLVLFGPGAPAQLPAAFQDLMPNLSAVRFRNFRLGLGPDLQVRMPPLISFRGGGQLLVNGPLDPSLELRGLIRLNRGRLNLFTSTFRLDPRAPNVAVFTPSLGLVPFVDIAMKTRVSDAVQPGTAGNANTADVFDTNGLGNIGDGGGQLRLVKVTVEAAGPADRLVGNLDLRSVPPMSEPQLLALIGGNSLSGLAGAGGTALATVLGQSLLSPVLGTLTDAMGQRMQIALFPTYVTPDIKDDNERTSGRVAPTFTLVTEIGVDVTDRFDFSVLAAPNTSDVPPQATVTYQVNPNTALSGSVDSNGTWQSQLQLFFRF

SEQ ID NO: 145875 - protein, 239 aa, Unknown
  Bacterial polypetide isolated from the Sargasso Sea
MTQFEVYRIGPEIKVGAFDISFTNASLFMVISSLAILIIFNLGSKKNSLLPNKIQLLAELSYTFVSKMISDTAGSKAKPYFSFIFSLFMFVLFCNMFGMIPYTFTVTSHIIVTFVLAAFIFIGVTIIGFIKHGLGYLKLFVPSGVPIVLLPLIVVIEIISYLSRPISLSVRLFANMMAGHTMMKVFGGFVISLGVVGGWLPLSFSVALTGLEILVAFLQAYVFAILTCIYLNDALNLHH

SEQ ID NO: 145876 - protein, 143 aa, Unknown
  Bacterial polypetide isolated from the Sargasso Sea
MGKKTGELIPFFRGASTDVNTTLAIAIFSMIAIQFWGFSSLGFKGYGGKFINFSQGPINAFVGILELFGEFAKTISFTFRLFGNMFAGEIVLISMGFLLPLVGMMPFMGLELFVGVIQALIFSMLTLVFGVMAVTSHSDHDDH

SEQ ID NO: 145877 - protein, 236 aa, Unknown
  Bacterial polypetide isolated from the Sargasso Sea
ELAEYLSDEFFVITVDQRGRGRSSYIEDHQKYTPKTYISDMHELIQSFNFKECYLIGTSMGGFMAMTMSVMNSALFPKIVLNDCGPEIHQVGINKISTYLGKNESFESIDEAVAILKARHESNFPLLTDTDWKRYCMNNLKINEDHSYNFDYDQNIRVVYETAKLNIGDMWNVWEEINSNIFVIRGALSQLLSESTFKKMQAKENVISIEIPDTGHAPLLTSKFELDSIKAFLLSN

SEQ ID NO: 145878 - protein, 117 aa, Unknown
  Bacterial polypetide isolated from the Sargasso Sea
FSPYRELAAFSQFASDLDEATKQQLANGKAFTELLKQKQYAPMSVAQQALSLFAADRGYMADVDVDKILDFEESLHGYLTSEKGELEEQINSTGDWNDDIESQFKDLVEDFKKTQTF

SEQ ID NO: 145879 - protein, 235 aa, Unknown
  Bacterial polypetide isolated from the Sargasso Sea
MYQFNVYRIGPEIKLGSVDISFTNASLFMVISSLAILIIFNLGAKKKTLIPDKLQLLSELSYSFVAKMISDTAGSKAKPYFSFIFSLFMFVLFCNMFGMIPYAFTVTSHIIVTFVLAAFIFVGVTIIGFMKHGLGYLKLFVPSGVPMVLLPLIVVIEIISYLSRPISLSVRLFANMMAGHTMMKVFGGFVISLGIVGGWLPLSFSVALTGLEILVAFLQAYVFAILTCIYLNDAL

SEQ ID NO: 145880 - protein, 622 aa, Unknown
  Bacterial polypetide isolated from the Sargasso Sea
MIQLESICKSYPNGTLFTNVNIYIKKGMRIGLVGQNGSGKTTLLRLMLGEERQDSGNIQKEKNIAIGYLEQEIISGTGRSIIEEVLASYPGAIEIEKKMVSLSNEIEKDPDNTTLIDRLGEAQNKYEAMGGWTLEKNAKKILGGLGFKDEQFSEPMESFSGGWRMRVALASILLQEPDIIFLDEPTNHLDLEATIWLEDFLTEWKGAMLVISHDRAFLDRSVNHIIDIDLKRVALYHGNYTEFKNEKKTRIEQQRSAYKNQQKHIKDTQRFIERFRYKNTKATQVQSRVKNLNKMELIEEPTDDRKVLSLLIPQPERSPLKVASCINVMKSYGDNQVFEDLDFNVERSEKIGLVGYNGAGKSTLLKMLAGVEEVTSGDIIYGSGVKIGYYAQHQLEILEKDETVYESLSKISVGWGETKIRSYLGSFMFSGEDIEKFVKVLSGGEKARLALARMLVSPSHLVLLDEPTNHLDMISRNVVEKALSDFSGSIVCISHDRHFLNQVTNKTCEVGNGGIKIYDGNYEYFEWKKKEEKDLLVNNDRVVEKAGKNKNSYAEKKRIRNRLTWINKRSNEIDKAIEGLNKEINDPENSSDHSLLKEKLDDLELLEGEYLELLEEKETLLK

SEQ ID NO: 145881 - protein, 724 aa, Unknown
  Bacterial polypetide isolated from the Sargasso Sea
MSKSLSKFITTNPKSFLFIFVVALIFSLFNLDNFKLDASSDSLVLESDDDLKYYREVNSDYSSSDFLIVIFDPQEDLFSKKTVVQVREMVTVFENIDGVQSVLSYLDAPLLFSPKMSMSELVDNLRTIEDEGADKDLARMEFKNSPLYTELLTDKETNYTAMQLILANNPEYDAAINKRYEILDLINSDQYSPDVHDLALEAVNEDIKLLNAQASIERDTLIEDTRQAMNEFRNSGDIYLGGTAMIASDMISFIKSDLQYFALGVLVMFVVTLSIIFKKLRWVTMPLVSSALIALFVIGFLGWMDWRVTVVSSNFISLLLIISISLTIHLIVRYQELYEINASATRQELVAMTITQMLKPCFYTALTTIIAFASLGVSEIKPVMDFGKMMVAGIFFAFLFSFILFPIFMLLFTSEKGKESRDFSRGVTVIFSSLTEKLGNYITLIAIVLFSISLYGINQLTVENRFIDYFKPSTEIYKGMDLLDTRLGGTAPLDIVINAPSDWNIQEEDNFDDDFGFEDDEFQNGYWWNTISLDRLEAIHDYIDSLPEIGKVLSVASGIKVARELKDGEPLSELDLALVKNMLPEDIKENLLSSYISQDENQVRISARVIESAEGLNRNELLEEISTNLENEYGLTKDQFRLTGLAVLYNNMLQSLFDSQIGTIVIVFTIIFLMFLILFRSFYLSIIGIIPNLLAASVVLGTMGLFGIPLDIMTITVAAISVGM

SEQ ID NO: 145882 - protein, 154 aa, Unknown
  Bacterial polypetide isolated from the Sargasso Sea
RHVRDVMINSSEKKIKITEVFDPSIPDVIGNEDQLIQIFINLIKNSIEAFSDESDSDNEIILSTNYEHGFIIKEKLSEERVKLPIKISVMDNGPGIPASISQEIFQPFVSTKKIGQGGLGLSIVSKIVSDHNGTIELDLTDQGTKFIIRLMAES

SEQ ID NO: 145883 - protein, 239 aa, Unknown
  Bacterial polypetide isolated from the Sargasso Sea
MSQFDVYRIGPEIKVGAFDISFTNASLFMILSTVSILLIFNLGSKKNSILPNKIQLLSELSYTFVSKMISDTAGSKAKPYFAFIFSLFMFVLFCNMFGMIPYTFTVTSHIIVTFVLAAFIFIGVTVIGFIKHGFGYLKLFVPSGVPAVLLPLIVVIEIISYLSRPISLSVRLFANMMAGHTMMKVFGGFVISLGIVGGWLPLSFSVALTGLEILVAFLQAYVFAILTCIYLNDALNLHH

SEQ ID NO: 145884 - protein, 244 aa, Unknown
  Bacterial polypetide isolated from the Sargasso Sea
MASNPMYQFNVYRIGPEIKIGEVDLSFTNASLFMVISSLAVLIIFNLGSKKNSLIPNKIQLLAELSYTFVSKMISDTAGSKAKPYFSFIFSLFMFVLFCNMFGMIPYAFTVTSHIIVTFVLASFIFFGVTIIGFIKHGFGYLKLFVPSGVPVVLLPLIVVIEVISYLSRPVSLSVRLFANMMAGHTMMKVFGGFVISLGIVGGWLPLGFSVALTGLEILVAFLQAYVFAILTCIYLNDALNLHH

SEQ ID NO: 145885 - protein, 741 aa, Unknown
  Bacterial polypetide isolated from the Sargasso Sea
MKTVLNTLRDITQAVASAHSLETALEVLVSSTKAAMETQCCSVYILEQQELVLSATDGLEKSAVGRVRMPLTQGLVGLAAEREEAVNLADARLHPRFKLFPEVAEEEYRAFLAVPIIYQKAVVGVIVVQQASARQFSEGEEAFLMTLAAQLAMAIRGLKQKAQVSSLHQQILFQGTSASSGIAIAHALVLGGEISLEQPDVRCEDIALESSRLVAAMGRCKEAIGALSQRFDREQDEEVASIFNALQLLLDDASLGGEYTREVQQGWEAESAVSRVSLRYIQQFLAMEDPYLKERASDIRDLGQKVLRQLIEPERLEHEPDKPVILVTKEADATMLAEFPRQKLAGIVTELGGVNSHAAILARALGVPAITGVEQLLSADIDQKLLVVNASRGQLMVSPSPAIVSEYRSLISAQKALQRQYAQELALPSVMLDGTRIRLYLNAGLLSGVASEIAEGADGIGLYRTEIPFMLQQRFPSESEQVKVYQQVLSAASGRPVVMRTLDVGGDKPLPYFPIKEDNPFLGWRGIRLSLDHPELFLVQLRAMLQAGAEGKQLSILLPMVSNLDEIDQALAYLEQAYVELKNDVNSNIEMPRIGIMLEVPAMLYQLDEVAKRVDFVSVGSNDLTQYLLAVDRNNPRVSSLFDSYHPGILRALHQARIDCEYHHLDISICGELAGEPMGAILLVAMGYNQLSMNQGSLARINYLLRRVSGDDLAQLLAQALSLSNGFQVRELVKEYFTQQG

SEQ ID NO: 145886 - protein, 367 aa, Unknown
  Bacterial polypetide isolated from the Sargasso Sea
MLVEETNFSNFSLLKTRFKSQRTEDGIEYKFTNKDLSGIFLVPKEKDRNVSFNFDYIRINQLAGSSKDSFLGLYNGIDSEFDFSTKAILINGQDYGNWKFSVVPDDNQLMLYGIEGTYGRWQITNNMNGISSLKIKKKTFGWRSSLEANIYSGSPEKAMKQIDIEPNFELDTLSLDVDLSWDNLPWIFDYNVVSGDISTNFTGFTIRNSEELETPNNLLRLVNIFNITDSFEKITNLDFRKLYKRGFSADSVKGKFGITEKSLKIKEPIILKSGSSEFSWTGEISRDKKGNLDKLNLEVVMTLPLREYLPAYAFVLGGPLTAGIVYIAGKAFERNLDKLSSGKWKVNGKISEPKTEFDGWFEDKKNQ

SEQ ID NO: 145887 - protein, 96 aa, Unknown
  Bacterial polypetide isolated from the Sargasso Sea
MSENGIIKQIIGAVIDVEFDKENIPNIYDALVVNDNNLVLETQQQLGDGVVRTVAMGTTEGLKRGLNVINTKAPISVPVGEGTLGRIMNVLGDPID

SEQ ID NO: 145888 - protein, 118 aa, Unknown
  Bacterial polypetide isolated from the Sargasso Sea
MATMHCEIVSAEKELFSGEIEMLSARGTIGELGIMPGHAPLLTGIQPGTVILRLADGTEEIFFASGGFLEIQPGSVTVLADVAARAEDLDEAQAEEARQAAEKAQSEAAAAQDFSLAA

SEQ ID NO: 145889 - protein, 50 aa, Unknown
  Bacterial polypetide isolated from the Sargasso Sea
MRKGQITQIIGAVVDVKFEGELPEILTALECDNGGNRLVLEVAQHLGESS

SEQ ID NO: 145890 - protein, 239 aa, Unknown; identical to SEQ ID NO: 145862
  Bacterial polypetide isolated from the Sargasso Sea

SEQ ID NO: 145891 - protein, 199 aa, Unknown
  Bacterial polypetide isolated from the Sargasso Sea
NLGSKKNSLIPNKIQLLAELSYTFIAKMINDTAGSKAKPYFAFIFSLFMFVLFCNMFGMIPYAFTVTSHIIVTFVLAAFIFIGVTIIGFIKHGLGYLKLFVPSGVPVVLLPLIVVIEIISYLSRPISLSVRLFANMMAGHTMMKVFGGFVISLGIVGGWLPLSFSVALTGLEILVAFLQAYVFAILTCIYLNDALNLHH

SEQ ID NO: 145892 - protein, 49 aa, Unknown
  Bacterial polypetide isolated from the Sargasso Sea
MALTLRVLCPDQNVFDGQADEVILPSTTGQLGVLPGHVSLLTALDVGVL

SEQ ID NO: 145893 - protein, 205 aa, Unknown
  Bacterial polypetide isolated from the Sargasso Sea
MALDIKPTRSELINLKRRIKQTSTGYNLLKMKRDGLFHEFRTLLSEMIEAREGLVGTYRDALQAINLASSIEGGLAVKSAAIASSKHPEVQVSKRNIMGVVVPKVEGQNLKLSVEDRGLGMVGGSPYIDEAADAYSLLVEKVVKAAEMEATLKRLLEEIEATKRRVNALEFKVIPEMKEAQTFIQLRLEEMEREETFRLKRFKNK

SEQ ID NO: 145894 - protein, 239 aa, Unknown
  Bacterial polypetide isolated from the Sargasso Sea
MHQFNVYRIGPEIKIDQIDISFTNASLFMVISSLVILIVFNLGSLKKRMVPGKMQLLAELSYSFISKMISDTAGSKGKPYFSFIFSLFMFVLFCNMLGMLPYAFTVTSHIIVTFVLAAFIFVGVTVIGFIKHGLGYLKLFVPSGVPIVLLPLIVIIEIISYLSRPISLSVRLFANMMAGHTMMKVFGGFVISLGLVGGWLPLSFSVALTGLEILVAFLQAYVFAILTCIYLNDALNLHH

SEQ ID NO: 145895 - protein, 684 aa, Unknown
  Bacterial polypetide isolated from the Sargasso Sea
MVANLYWFFFFLLLYISFCLFWGARTLRKNKTPEAYYLADRSVSPWVFFFSATVATFAGITIISFPSLVHADGYSFLATAAIVITIPLGSILFFKRQWMLSRKYNFITPGEMYFKYYQSNTLRVVVLIIGLFFAVPFLGIIMGSTGNVVEFISGGDITRDSAMWALTAVVLFYVVSGGFKPMVSVGVLQSWLFFVLFLTIGIGAFNFLGGLDFFEDLSIANSFISLGAWGKTNGYGGGDMSGYFNVPGVIQWIAGIGKNNPSGGPWTSVMILSFTLSYMGIVLSPTFSMWSYSVKSPRSFYFYQVWGSGAVVGIFLFIFVPLLAVGAHLLGANNIINANGFAIKQIFPELSLQNISNLVLVFIESFSSISPIIVGFLAICIIAALQSTLSAFIMTSGSMVARDLYRPYIDSKPTWKRELLVARLAMLLISIAALYLATYFETSLILLGGLAIAFGFQLFPVLLGMLWFPWITKGGAILGLITGLLFVTLAETFGQKLTGNSLPWGRWPLTIYSGLWGLFFNVIVCFLSSIFSSNDLDKDHRKSFHDFLNQHMGIHPSRKKIKSLAYVFFLIWAFFSIGPGLIFGNLIFGTSDQSYDQWVMGVPSLWAYQIIWWAAGVFMIWFLANKMDLSTLPKKPILNGDEYLSPDDVEEQGNYIDRMGGGYGWPLILIGLAVATVILSVYAL

SEQ ID NO: 145896 - protein, 244 aa, Unknown
  Bacterial polypetide isolated from the Sargasso Sea
MASNPMYQFNVYRIGPEIKLGAVDISFTNASLFMVISSLAILIIFNLGAKKKTLIPDKLQLLSELSYSFVAKMISDTAGSKAKPYFSLIFSLFMFVLFCNMFGMIPYAFTVTSHIIVTFVLAAFIFIGVTIIGFMKHGFGYLKLFVPSGVPMVLLPLIVVIEIISYLSRPISLSVRLFANMMAGHTMMKVFGGFVISLGIVGGWLPLSFSVALTGLEILVAFLQAYVFAILTCIYLNDALNLHH

SEQ ID NO: 145897 - protein, 467 aa, Unknown
  Bacterial polypetide isolated from the Sargasso Sea
MRIISLLLLLVSFFTNGQLELNNLFTDNMVLQRSSNVNIWGKSSPNQVIKVYSSWNKTSTKTKADNNGDWILKINTSSDQSPHQLIISTKDESKVINNVLLGEVWFGSGQSNMQMTFNGYVNEPINGSQDVIGKANNDKIRLLTVERKFSSEKLRDFNGKWELSSPKSVRNFSAAAYSFATYINETLNVPVGIIVTSWGGTPAEAWAEKTHLDKNFKPGVLKNNFKDRFEHFNLGYLFNGMINPLIPYTIKGALWYQGENNRLRANNYSKLMQVMVESWRNEWGQGEFPFYFVQIAPFRYDGPDNPSSALLRDSQLDAMFNIPNSGMVSTVDIGALNSIHPPEKIKVGNRLAYWALNKTYGFESITPSGPIVKSAKKEGSAVKITFDYAQNGFYNFNGPLKDFELAGDDDQYYTATAKISGRSIIVESENVPVPTKVRYGWKNYFEATLFNLEGLPASSFYIKELIK

SEQ ID NO: 145898 - protein, 223 aa, Unknown
  Bacterial polypetide isolated from the Sargasso Sea
MYQFNVYRIGPEIKLGSVDISFTNASLFMVISSLTILIIFNLGAKKKTLIPDKLQLLSELSYSFVAKMISDTAGSKAKPYFSFIFSLFMFVLFCNMFGMIPYAFTVTSHIIVTFVLAAFIFIGVTIIGFMKHGLGYLKLFVPSGVPMVLLPLIVVIEIISYLSRPISLSVRLFANMMAGHTMMKVFGGFVISLGIVGGWLPLSFSVALTGLEILVAFSQAYVF

SEQ ID NO: 145899 - protein, 239 aa, Unknown
  Bacterial polypetide isolated from the Sargasso Sea
MYQFNVYRIGPEIKLGSVDISFTNASLFMVISSLAILIIFNLGAKKKTLIPDKLQLLSELSYTFVAKMISDTAGSKAKPYFSFIFSLFMFVLFCNMFGMIPYAFTVTSHIIVTFVLAAFIFIGVTIIGFMKHGLGYLKLFVPSGVPMVLLPLIVVIEIISYLSRPISLSVRLFANMMAGHTMMKVFGGFVISLGIVGGWLPLSFSVALTGLEILVAFLQAYVFAILTCIYLNDALNLHH

SEQ ID NO: 145900 - protein, 256 aa, Unknown
  Bacterial polypetide isolated from the Sargasso Sea
MANLKEIRDRIVSVKNTRKITEAMRLVAAAKVRRAQDQVLKSRPFADKLARVLENIQSRVQFEAVDSPLLSKRDVRRISLVCITADRGLCGGYNTNIIKKVEIRYAELIKQGYEPNLILVGKKAIGYFQNRKDKYTIKSTFKELEQVPTATDSEGITSEVLAEFLSENSDRVEIIYTKFITLVSCAPVVQTLLPLDPQGIADENDEIFRLTTKDSKLLVEKSNIEKSDSEKLPSDIVFEQSPDQLLDSLLPCITES

SEQ ID NO: 145901 - protein, 97 aa, Unknown
  Bacterial polypetide isolated from the Sargasso Sea
MSDTGVIKQIIGAVIDVEFDKAQIPNIYDALVVSENNLVLETQQQLGDGVVRTVAMGTTEGLKRGLDVENTKAPISVPVGEATLGRIMNVLGDPIDM

SEQ ID NO: 145902 - protein, 414 aa, Unknown
  Bacterial polypetide isolated from the Sargasso Sea
MSSDQLQGYKKTLNSPYTGIKGWIDSRLPLIRMMEAEYLKFPVPKSLNYFWSFGGIAMFCLIGLILTGIFLGFHYKPSAEDAFDSVERIMRDVSFGWLIRYLHANLVSFFFIATFIHIFRALYFGSYKAPRELVYIFGLTMFMLMMATAFLGYTLPWGQMSYWGATVITNLFSAIPVVGDAILQLLLGDFTVGDSAVNRFYVLHWLLAFAIVGLVVFHVITLHMTGSNNPTGSEPQSWDETVSFHPYVTIKDLNAALFFFIIMAFILFYYPNILGHSDNYIKANPMITPAHIVPEWYFLPFYAILRAIPDKLGGVIAMFSSILALGLLPWLDTSKVRSCLFRPIWRYCVLLFAVNFLVLMYVGGKPAEDIYVLISRIGTAYWFLFIFVLAPLVGFLETPRQPLTITNYLQSKKA

SEQ ID NO: 145903 - protein, 202 aa, Unknown
  Bacterial polypetide isolated from the Sargasso Sea
MATNPMHQFEVYRIGPEIKLGEIDISFTNASLFMLISSIAILFVFNLGTKKNSVLPSKIQLLAELSYTFVSKMISDTAGSKAKPYFAFIFSLFMFVLFCNMFGMIPYTFTVTSHIIVTFILAIFIFIGVTIIGFIKHGFGYLKLFVPSGVPVLLLPLIVVIEIISYLSRPISLSVRLFANMMAGHTMMKVFGGFVISLGIVG

SEQ ID NO: 145904 - protein, 197 aa, Unknown
  Bacterial polypetide isolated from the Sargasso Sea
SSIVKAVKNKVKDLKEKNLDFKIICLGKKGADILMGLFGDNLISSENINDKNSYTLSEDISALLVKKLDNKEFGTCSVIYNQFKSAISQIVTEQSLIPCTIDSEEDENSQDEEINFEFEPDEKGILSELLPKNLSIQIYKAILESGAGEQGARMAAMDNATRNAGEMIDKLNLSYNRQRQAIITGELIEIISGAEAL

SEQ ID NO: 145905 - protein, 215 aa, Unknown
  Bacterial polypetide isolated from the Sargasso Sea
SNPITVKDLSVRLSKRLKKYDKKGEEHYNLISALHKSIRGSDPDAALYWLARILDGGEDPRFIARRLLRMALEDVGLADPQAQSICLHAWQSFERLGSPEGELALAQAALYLALAPKSNASYKGFNLSLDLVKKTGSEPPPKHILNAPTDLMKDQGYGAGYEYDHDSADGFSGQNYFPEKIDRLSAYQPVERGFERELKKRISYFKNLREKRKSI

SEQ ID NO: 145906 - protein, 53 aa, Unknown
  Bacterial polypetide isolated from the Sargasso Sea
AEVFTGSPGKYVSLAESIQGFKMILGGELDDLPEQSFYLVGNIDEAVEKASKL

SEQ ID NO: 145907 - protein, 139 aa, Unknown
  Bacterial polypetide isolated from the Sargasso Sea
MATIKIDIVSAEGEIHSGNASMIYAPAQMGEVGIAPRHAPLLTSLKPGEVRVEDEEGKEHFFYITGGMLEVQPHIVTVLADTAVRGDELDEAAAESAKKQAEEALEGASDETDIKRAQAELAEANARYRAAQKLKGIKQ

SEQ ID NO: 145908 - protein, 244 aa, Unknown
  Bacterial polypetide isolated from the Sargasso Sea
MAANPMSQFDVYRIGPEIKVGAFDISFTNASLFMIISTVSILLVFNLGSKRNSVLPNKMQLLAELSYTFVAKMISDTAGSKAKPYFAFIFSLFMFVLFCNMFGMIPYTFTVTSHIIVTFILAAFIFIGVTVIGFIKHGFGYLKLFVPSGVPAVLLPLIVVIEIISYLSRPISLSVRLFANMMAGHTMMKVFGGFVISLGLVGGWLPLSFSVALTGLEILVAFLQAYVFAILTCIYLNDALNLHH

SEQ ID NO: 145909 - protein, 239 aa, Unknown
  Bacterial polypetide isolated from the Sargasso Sea
MSQFDVYRIGPEIKVGAFDISFTNASLFMILSTVSILFIFNLGSKKNSILPNKIQLLAELSYTFVSKMISDTAGSKAKPYFAFIFSLFMFVLFCNMLGMIPYTFTVTSHIIVTFVLAAFIFIGVTVIGFIKHGFGYLKLFVPSGVPVVLLPLIVIIEIISYLSRPISLSVRLFANMMAGHTMMKVFGSFVISLGIVGGWLPLSFSVALTGLEILVAFLQAYVFAILTCIYLNDALNLHH

SEQ ID NO: 145910 - protein, 175 aa, Unknown
  Bacterial polypetide isolated from the Sargasso Sea
VAKMISDTAGSKAKPYFAFIFSLFMFVLFCNMFGMIPYTFTVTSHIIVTFVLAAFIFIGVTVIGFIKHGFGYLKLFVPSGVPAVLLPLIVVIEIISYLSRPISLSVRLFANMMAGHTMMKVFGGFVISLGIVGGWLPLSFSVALTGLEILVAFLQAYVFAILTCIYLNDALNLHH

SEQ ID NO: 145911 - protein, 240 aa, Unknown
  Bacterial polypetide isolated from the Sargasso Sea
MATNPMEQFKVHKIGPEIEVSGINLSFTNASLFMVISAGLILVLLLFGTRQKKLVPGKMQLISEMLYNFISKMISDTAGKKAKPFFPFIFSLFVFILFCNMVGMLPYSFTVTSHIIVTLTFALFIFVGVTILGFVMHGFKYLKIFIPSGVPIVLLPIISIIEIISYLSRPISLSVRLFANMMAGHTMLKVFGGFVISLGLIGGWLPLSFSVALTGLEILVAFLQAYVFAILTCIYLNDAL

SEQ ID NO: 145912 - protein, 225 aa, Unknown
  Bacterial polypetide isolated from the Sargasso Sea
MAAKGEKHSPLEQFEIIPFTRTEIGGYDISFTNSSLSMIITVAVITLFLTLTVNPRSLVPTRMQLISELMYNFVAQLLSDTVGDNGKKYFPFVFSLFMFVLIGNMVGMIPYQFTFTSHIIVTFALASVVFIGVTILGFVNHGIKFFTFFYIPGVPFYMHPLLIPIEVISYLSRPISLSVRLFANMLAGHTLLKVFAGFVVAMPFFTGVLPLVFIVALTGLEILIA

SEQ ID NO: 145913 - protein, 142 aa, Unknown
  Bacterial polypetide isolated from the Sargasso Sea
MAAMTVQLDIVSAESSIFSGRVASLQVTGSEGELGIMHGHAPLLSYIKPGMARIVKQDGSEEVFYLSGGLLEVQPSSVSVLADVVMRAKDIDEQAALEAKRRAEAHMATAGADFNYDAAMVELAKAMAQLRVVETIKKNIAR

SEQ ID NO: 145914 - protein, 92 aa, Unknown
  Bacterial polypetide isolated from the Sargasso Sea
MSIKASEISSIIRDQINNFESQADISEVGTVLKVGDGVAQVYGLDNVQAGEMVEFTGGVQGMALNLEEDNVGIVIFGDDRGIKEGDTVKRTQ

SEQ ID NO: 145915 - protein, 182 aa, Unknown
  Bacterial polypetide isolated from the Sargasso Sea
AELSYTFVSKMISDTAGSKAKPYFSFIFSLFMFVLFCNMFGMIPYAFTVTSHIIVTFVLAAFIFIGVTVIGFIKHGFGYLKLFVPSGVPVVLLPLIVVIEVISYLSRPVSLSVRLFANMMAGHTMMKVFGGFVISLGVVGGWLPLGFSVALTGLEILVAFLQAYVFAILTCIYLNDALNLHH

SEQ ID NO: 145916 - protein, 357 aa, Unknown
  Bacterial polypetide isolated from the Sargasso Sea
TNIHKHVINSINFPILIIDKNKTLLMVNPATEDFFKLSSKVLIKKSIEEILPFSSPVLSLIDSSIKKESTFKEYRVDLSTPISGSHKDVDVEVTPLIGLENYYQIILVEDFHEKKLVLQNENQKNKIAMSNMSQILAHEVKNPLSGIRGAAQILEKNVESNETIMTDLIITEVDRIRRLVDNLQIFDASTPIDLRPINIHSILRHVKDVMINSSNKEIKIKEVFDPSIPDVIGNEDQLIQVFINLIKNSIEAFSNEPDSDNEIILSTNYEHGYIVKEKSSEERVKLPIKISVMDNGPGISDSISQEIFQPFVSTKKVGQGGLGLSIVSKIISDHNGSIELDLTDQGTKFIIRLMSEF

SEQ ID NO: 145917 - protein, 286 aa, Unknown
  Bacterial polypetide isolated from the Sargasso Sea
GQGQRMGLFAGSGVGKSVLLGMMTRGSVADVVVVGLIGERGREVKEFIEEILGEEGRARSVVVAAPADASPLMRLKGCETALAIAEYFRDQGLNVLLLMDSLTRYAQAQREIALAVGEPPATKGYPPSVFAKLPALVERAGNGSDGQGSITAFFTVLTEGDDLQDPIADAARAILDGHIVLSRELADAGHYPAIDIEKSISRVMPMVTSPEHMELARTLKQFYSLYQQNRDLITIGAYSQGSDPRIDRAIIQKPYLDQFLQQGMREVIHYDAGLQALQLVAMPLMR

SEQ ID NO: 145918 - protein, 289 aa, Unknown
  Bacterial polypetide isolated from the Sargasso Sea
PSFELNSSILSRVQVLVLERLTNTNLESLFDRAESLLGLQINLDLNAKTELFKQADGDGRTLLNLIESIISWEVSDPLTVEDLSVRLSKRLKKYDKTGEEHYNLISALHKSIRGSDPDAALYWLARILDGGEDPRFIARRLLRMALEDVGLADPQAQSICLQAWESFERLGSPEGELALAQAALYLALAPKSNASYKGFANSLEMVEKTGSEPPPKHILNAPTELMRDQGYGASYEYDHDSEDGFSGQNYFPENIDRFTAYQPVERGFERELKKRISYFNNLREKRKSV

SEQ ID NO: 145919 - protein, 1587 aa, Unknown
  Bacterial polypetide isolated from the Sargasso Sea
MKWVFISAISINISLANIIHETGELSEFLGGNSPGSAYDNWVSHVTEGIASEGFNDYGPDWLDVQTTGFGNYNKLESGDPILSYWEDIFSGFILGDTTLVDSLLQDSVESFYYELVIFEDTVYNQVFHIIREQLDTSFIDINQSDNDLDDVVGSFRNGWGMYIINPQATREQVIVQVPHPCDDFIAPYIAMDIFLETNAFAFMINGAGREVLWTEVGNYSNSKSLSDPSRYPNTIFQKFQEVAVHPLVGIDPHWPLVFAIHSFDNESHAPRKSVIVAAGSQNSFTTKPIRDITEDHFDIINFTSEYPINEGQFGNSNSLHVTEYYEVFYDDQCVYDNGETEFPITLATELKGPSNGVQMLDLQGLTSSYSVYEPWIHIELDEKPMLFDSSGISNDSAYHNGSYPTGLNNFSLIREYYQPFIEALDSYLIHWETVSDQDPPDSIEFISAYNVDNSDQVYLNWIPVYDTNFKTFQIRTDTDTLFNEPVIFDLEDHEILQYMRRDHQTLTGLENTESWWFQIRGLDHFNNAGPWSEAVSNILPGHDHPDTLLYFTSNNDFESIINEDIDVDDYAIDSLNTFPGSSPTLVIFGNSWKSIQIEPFTPDTGTILQVFAMVDSISDIQAIGFSNGENSIRYSFSGHETLDIEEWIPVYQGVGQVGAWHSYRLPIGDDWLAWYDSLSILNEIHFINDHDDTSSAPGSVHFSMVRDITPDLPISPSVSIGYELGDIRDETDHQMITVSFYSTVQDTDSYAFSYDWEFGDGGSSSEADPTHDYIIEDDHDYTVILTVEDETGQRGWATTAIEVDQGNTSFPIKFNFVGDIMMGRRFEEDDGIITTQGVNALFEPTQELLGLSADITVANLEIPLSDQGYPHPSKSIIFRSAPENVSGLIYAGIDVVTLANNHILDYMEPAMIQTQNILSEAGIIYSGAGMNSYEAYLPAFKSVKGQTIAFIASSDRTGQYNNYQPYLNAGENKSGFAYMTPYYLKQQIQSAEDLADLIVVEMHAGSEYSYEPGLDYDSYTPLEGFTNLRTNPASEIGFQMIPKDGMEAEDYSWRLDRPQMWDRAIRHFAIDEGADIVIVHHPHIIQGVELYDGKLIAHSLGNFIFDLNYPETYPSMILNGEADESGFIAFSIDPVYIDDYLTLPAKGELGNYILDYISMRSKELNTYVHVDTDNQRAYVIVDSLSMPHDIIDQSVWIENYKPVDLNGEDYFQSEPIPLAKAGSISKILEGDPTITYYRLGREKIWMKNFEDEGSSLWNLNSNNETLQDSIFRRGGTALSHIRSPNSPDNIVTNLEERIPFKNEYSHTVHGFIKTENGKEVSIEVRCASGRTGESLFTSSMGDSISGSFDWARYWGDIPSDEEANYFDLRLNSGVPDSGLALSWFDDVGLVEWDSLKTLSGYPILIPHPNDYDYIQLFFNELPSELIGLQIQHTTIGAFSPLNAYPKVVKPVITVPGNFHFYDESTGPIGDRIWTNDGELIGYGQTPKLFCEEPGIYEVSLTLYGTNGSEHTSSISVIGIEPGTEQYEIGDVNGDGSITVIDALLCSNYILGLFELQPQEFLAADADGNNIINILDVLLVSDLSGQDI

SEQ ID NO: 145920 - protein, 99 aa, Unknown
  Bacterial polypetide isolated from the Sargasso Sea
MIYLITGIYLSLNTGISHDEYHEQLNWEINLKAIKNFFETGYYNELLEYKDRYHGIGFNFLSQPFQYLIKDFVLDYLDVNEYGSILISKHPIIFILFFI

SEQ ID NO: 145921 - protein, 495 aa, Unknown
  Bacterial polypetide isolated from the Sargasso Sea
SDLIVTKSESTGSGIGTTSLNDGLTYSQYYGTRVQDEEISLNVPEVSRILAIFESNDTNNPDLPTLIATDATASFTGNVVVGEQFIGNTSGAVARVVSVASPTSISFVYENQNTFEVDENISLKTSGIFATLTSVLPGDRNLINNYTLDDGQRLEFADFSRIIRKSDAEKPTRKLRIIFDYLLNNESAGTVETVNSYNTLSYSRDIPFVFDRFASDFIDFRPRVTPFTANDKSPFSFGSRSFSSTQSEIVASNKTVVVDYSYYQGRADRLYLSKDGFFTVKQGTPSRLPKLPLPNEEAFEVASIIYPPYVRSANQEVKVKKVRHKRYTMKDIGSLEHRIKNLENYTTLSLLETDTKNLSIKDPNTGLDKFKSGFFVDNFTSHLTHNLTGESKFDIDLIRGECRPRSTERNVPLIHETKSTLADPINSDYNWVEDFVDGNITRNGPALLLDYTEVEFLSQPFATRTENLNPFHIALFAGTIQLNPESDFWVEEVPL

SEQ ID NO: 145922 - protein, 600 aa, Unknown
  Bacterial polypetide isolated from the Sargasso Sea
MSLRIIIFLSFFLVGCGGSSSNDENSSDEALLTINVTNFPSNVKSYKPVNISVTSNYDCSFILESEDIYWISTNDNKNFSYRAPITLLHEAEFDVQISSIQNAYCPQGSISLTHTVTRDEDNLRHIPTPSPYNNSALKTEYFASHNLGFGGIEVTDRFTATICYPTPNDCETLENALFGQDAHNMATGDFNGDGFEDIVVAWALFPHTIELEQKVHAPVHIYLNDGNGNLYEDNSIYYSNEAPTHPAPYRLAIADFNGDGIDDIFVGSMGLQYRDPDSANDFILPYPDLLLLSDSSGRFSDASANIDDQNNGNGKICGFSHDASTGDFDNDGDYDIFACNLLLVNDSLGNFVIHQDLDFNLQQAYGNPMSSLIVDLNNDDYDDLVFWNFDNRPNSISEEGFALVSDGTANVDNWTLVELPEGPFGRNHNKFNHAAWGDLNNDGNNDVVVGITRDLPYYEGAYVQVLMGDGNGNLVDVTETNFNAQPRQATHHGESNIYLRDFDNDGDLDIFHSTRDFASNLHGSHIALNDGNASFLTISETRLPQKPKANEWDNNSYLFKGMPINLDNQGCLDLISTSDSWMDSSATRNYLYSLINLKCD

SEQ ID NO: 145923 - protein, 75 aa, Unknown
  Bacterial polypetide isolated from the Sargasso Sea
DEILSNLLPKNISTQIFKAMLENSASEQGSRMSAMDNATRNAGEMVDKLTIQYNRSRQAAITKELIEIISGAESL

SEQ ID NO: 145924 - protein, 185 aa, Unknown
  Bacterial polypetide isolated from the Sargasso Sea
MYQFNVYRIGPEIKLGEIDISFTNASLFMVISCLTILIIFNLGSKKKKIVPDKLQLLAELSYSFVAKMISDTAGTKAKPYFSFIFSLFMFVLFCNMLGMIPYSFTVTSHIIVTFVLAAFIFIGVTIIGFMKHGLGYLKLFVPSGVPMILLPLIVVIEIISYLSRPISLSVRLFANMMAGHTMMKV

SEQ ID NO: 145925 - protein, 214 aa, Unknown
  Bacterial polypetide isolated from the Sargasso Sea
VKKTGYIVVSSDRGLCGGLNVNMFRGLIANLKENKNNQIDSKLCLVGAKAVQFFRSVDVDVIAAASHLGEEPQVEDLVGAIKTMLDEYNEGKIDQLFIVHNDFVNTMTQKPEIKTLLPIDPEDGEQMQEHWDYIYEPDSKELLDYILMRYIESQVYRAVVENVACEMAAKMVAMKSATDNAGKLIDQLELDYNKARQAAITQEISEIVGGAAAV

SEQ ID NO: 145926 - protein, 84 aa, Unknown
  Bacterial polypetide isolated from the Sargasso Sea
MSTGNIVQVIGAVVDVEFPKEAIPSVYDALTLKDGDLVFEVQQQLGDGIVRTIAMGASEGLKRGLEVENTGAPISVPVGQETLG

SEQ ID NO: 145927 - protein, 130 aa, Unknown
  Bacterial polypetide isolated from the Sargasso Sea
LFTKEEFDKCFIFYNKFKNVITQIPQYQQIIPAAINKKEETKDNNLIRYEFEPEEDEILEELLPKNISIQIYKAFLENAASEQGSRMTAMDNATRNAGELVDKLTINYNRSRQASITKELIEIISGAESL

SEQ ID NO: 145928 - protein, 58 aa, Unknown
  Bacterial polypetide isolated from the Sargasso Sea
MANEKEIRTKIGSVKNTQKITKAMEMVAASKMRRTQETMKKALPYADKIRAVIGHIYK

SEQ ID NO: 145929 - protein, 33 aa, Unknown
  Bacterial polypetide isolated from the Sargasso Sea
MPSLDDLRKRITSVKSTQKITKAMKMVAAAKLR

SEQ ID NO: 145930 - protein, 177 aa, Unknown
  Bacterial polypetide isolated from the Sargasso Sea
TLKIITVGSKGYDQLKRTYKENIIEKISFKESKHVNYFDADKVGKTILDKFEKKEFDVCTIFYNQFKNVITQIPQEQQIIPLKTSESEGSSIEDNYEFEPEEDEILSNLLPKNISTQIFKAMLENSASEQGSRMSAMDNATRNAGEMVDKLTIQYNRSRQAAITKELIEIISGAESL

SEQ ID NO: 145931 - protein, 66 aa, Unknown
  Bacterial polypetide isolated from the Sargasso Sea
MRKGKITQIIGAVVDVKFDGKLPEILTALECINGGNRLVLEVAQHLGESSVRTIAMDATEGLKRGD

SEQ ID NO: 145932 - protein, 162 aa, Unknown
  Bacterial polypetide isolated from the Sargasso Sea
KRTYEENIIEKISFKESKHANYFDADKVGKIIIEKFEKKEFDVCTIFYNQFKNVITQIPQEQQIIPLKATESESNSSEDNYEFEPEEDEILSNLLPKNISTQIFKAMLENSASEQGSRMSAMDNATRNAGEMVDKLTIQYNRSRQAAITKELIEIISGAESL

SEQ ID NO: 145933 - protein, 72 aa, Unknown
  Bacterial polypetide isolated from the Sargasso Sea
LSNLLPKNISTQIFKAMLENSASEQGSRMSAMDNATRNAGEMVDKLTIEYNRSRQAAITKELIEIISGAESL

SEQ ID NO: 145934 - protein, 73 aa, Unknown
  Bacterial polypetide isolated from the Sargasso Sea
ILQDLLPKNVSIQIFKVLLESDAGEQGARMAAMDNATRNAGEMIDSLTLKYNRTRQAFITKELIEIISGAESI

SEQ ID NO: 145935 - protein, 164 aa, Unknown
  Bacterial polypetide isolated from the Sargasso Sea
NITDSFVDTNVSSAGYNIALEISAKLQSLYFEGKFDKCILVYNKFKSAISQEVTQQQLIPLDISNKNKEDKSNETESSNKAIYTYEPDEETILQDLLPKNVSIQIFKVLLESDAGEQGARMAAMDNATRNAGEMIDSLTLKYNRTRQAFITKELIEIISGAESI

SEQ ID NO: 145936 - protein, 66 aa, Unknown
  Bacterial polypetide isolated from the Sargasso Sea
MASLDDLKKRISSVKSTQKITKAMKMVAASKLRRAQESAEKGRPYSDKMNNIILNLSKSISDKENS

SEQ ID NO: 145937 - protein, 323 aa, Unknown
  Bacterial polypetide isolated from the Sargasso Sea
MDFDQYKKAIENVETIQVVGKVVKVIGLVIEAQIQGVSVGDLCMIELANGELIRAEVVGFKEDQVLLMPLGMITGIQPGSKVYPTGMPISVKVSPNMLGRVLNGLGEPIDGKGPIDSDEYVPIDEDPPDPFTRPRIHDVLSVGVKAIDGLLTLGRGQRVGIFAGSGVGKSTLMGMLARNCVAEINVICLVGERGREVNDFIEESLGEEGIKKSVVICATSDTPPLIRVKCAMVGTAVAEYFRSLGKDVLLMMDSVTRFAMAQREIGLATGEPPTTKGYTPSVFAMLPRLMERAGTSEKGSITGIYTVLVDGGDMDEPIADCAR

SEQ ID NO: 145938 - protein, 142 aa, Unknown
  Bacterial polypetide isolated from the Sargasso Sea
MSQLNPSEISSVLKEKIAGLDLSAERKNEGIVVSVSDGIVRIHGMGDVMYGEVIEFENGTKGMALNLEQDSVGAVVLGDYLEIIEGQKAVCTGKVLEVPVGEAMLGRVVNTLGVPIDGKGEINAEHSSPVEVVAPGVLHVSQ

SEQ ID NO: 145939 - protein, 128 aa, Unknown
  Bacterial polypetide isolated from the Sargasso Sea
MSNGTVTQIIGAVIDVEFDKDNIPKVYEALKIDESGTTLEVQQQLGDGVVRTIAMGATEGLKRGLSATRTNAPISVPVGPETLGRIVDVLGNPIDEKGPIGEKSKMPIHRKPPSYTDQSASNEVLETG

SEQ ID NO: 145940 - protein, 127 aa, Unknown
  Bacterial polypetide isolated from the Sargasso Sea
MEINPSEVTKILKEQIKKIGDKVEVTEVGQVLSVGDGIARIYGLDNVQAGEMVEFSDGSKGMALNLESDNVGVVIFGDDRAVKEGDTVKRTGAIVDTPVGKELLGRVVDGLGNPIDGKGALEKSIKK

SEQ ID NO: 145941 - protein, 120 aa, Unknown
  Bacterial polypetide isolated from the Sargasso Sea
MSNGTVIQIIGAVIDVEFPKENLPKIYDALTVDETGLVLEVQQQLGDGVVRTIAMGASEGLKRGVSVTNTENPISVPVGEATLGRIMNVLGEPIDEKGPVDAKSAMPIHRNPPSYEDQAE

SEQ ID NO: 145942 - protein, 245 aa, Unknown
  Bacterial polypetide isolated from the Sargasso Sea
RDLMAAISSGYSPTSNERNLLTGDENDNIHMLILFTSERGLCGGFNSVVTKSLREKIENLLQANKTVKIICVGKKGYDILKRQYSEMITEVIDMREVKSVSYQDAKNISDKIIKMFFDGEFDKCSIFYNKFQSVISQIPTEQQVVPIELEEDSSNESSVDQSFFDFEPGESEILEELLPLNFTVQIFKALLESAASEQGARMSAMDNASRNASDMIDNLTLFYNRSRQAVITKELIEIISGAEAV

SEQ ID NO: 145943 - protein, 64 aa, Unknown
  Bacterial polypetide isolated from the Sargasso Sea
QNQLLRSLQESAASELASRMTAMNNASDNAKELAKTLTLDYNKARQAAITQEILEVAGGAAAVG

SEQ ID NO: 145944 - protein, 245 aa, Unknown
  Bacterial polypetide isolated from the Sargasso Sea
MPSLKDLKNRIESVKSTRKITKAMQMVAAAKLRRAQEAAEMARPYAERFNAVMAKLAASVGDSDSAPRLLRGTGEDKVHLLVVMTAERGLCGGFNSNIAKLARTEAESLKAQGKTVKIITVGKKGRDALKRDLGDLFIDHVDMTAVKNIGYDDAQAVAKNLLDRFDKGEFDVAKIFYSKFQNVVSQIPTVQQVIPFQVDEDAAADEPEASVVYDYEPDEEAILADLLPRGVATAIFSGLLKTGLE

SEQ ID NO: 145945 - protein, 143 aa, Unknown
  Bacterial polypetide isolated from the Sargasso Sea
MPNLKDLKVRINSVKSTQKITSAMKMVAAAKLRRAQEYAEEARPYSARMDRMIAALAGKMSNVGGPKLLAGTGRSDNHLLVVMTADRGLCGGFNSSIVRATRKRIAQLKNDGKQVKLVCVGRKGSDQLQREAGELITESLEGI

SEQ ID NO: 145946 - protein, 98 aa, Unknown
  Bacterial polypetide isolated from the Sargasso Sea
SEKKDESEKNSEANAIYVYEPDEETILQDLLPKNISIQVFKVLLESDAGEQGARMAAMDNATRNAGEMIDSLTLKYNRTRQAFITKELIEIISGAESV

SEQ ID NO: 145947 - protein, 145 aa, Unknown
  Bacterial polypetide isolated from the Sargasso Sea
MEINPSEVTKILKEQIKNFGEKVEISEVGQVLSVGDGIARIYGLDNVQAGEMVEFSDGSKGMALNLESENVGVVIFGDDRNIKEGDVVKRTGSIVDTPVGKELLGRVVDGLGNPIDGKGVLDKGVKKSRVEVKAPGIIPRQSVSE

SEQ ID NO: 145948 - protein, 123 aa, Unknown
  Bacterial polypetide isolated from the Sargasso Sea
MTINPSEVTKLLKDQIKNFGEKAEVSEIGKVLSVGDGIARVYGLDNVQAGEMVEFEDGSKGMALNLENDNVGVVIFGDDRNIKEGDTIKRTNAIVDVPVGKELLGRVVDGLGNPIDEKEHYQQ

SEQ ID NO: 145949 - protein, 75 aa, Unknown
  Bacterial polypetide isolated from the Sargasso Sea
DEILEDLLPKNISTQIYKGFLENSASEQGSRMTAMDNATRNAGDLVEKLTINYNRSRQAAITKELIEIISGAESL

SEQ ID NO: 145950 - protein, 179 aa, Unknown
  Bacterial polypetide isolated from the Sargasso Sea
MVAQGKIVWISGPAVKADGMADAKMYETVSVGDAKLIGEVIRLTGDVAFIQVYESTSGLKPGEPVVGTGNPLSVLLGPGIIGQIYDGIQRPLKDLADKSGSFIGRGITTTPVDMTKEYHFVPSVAVGDEVQAGSIIGTVPETSLIEHKILVPPDHKGGKITKIVSEGDYALETEIASVR

SEQ ID NO: 145951 - protein, 136 aa, Unknown
  Bacterial polypetide isolated from the Sargasso Sea
MTVQLDVVSAEEKIFSGLVESVQVTGSEGELGILPFHAPLLTTLKPGMVRIVKQFGEEHVIYVAGGVLEVQPDTITVLADVAVRGEDLDEQAALAAQKRAEEAMQHAGADFNYAEAAAQLAEAIAQLRIIQKMRKK

SEQ ID NO: 145952 - protein, 89 aa, Unknown
  Bacterial polypetide isolated from the Sargasso Sea
MSKKGNITQVIGAVVDVKFDGELPEILTALECDNGGNRLVLEVAQHLGESSVRTIAMDSTEGLKRGDEVKDTGAPIQVPVGPETLGRIV

SEQ ID NO: 145953 - protein, 220 aa, Unknown
  Bacterial polypetide isolated from the Sargasso Sea
MAANPMYQFNVYRIGPEIKIGEIDLSFTNASLFMVISSLAILIIFNLGAQKRNIIPDKIQLLSELSYTFVSKMISDTAGSKAKPYFSFIFSLFMFVLFCNMFGMIPYSFTVTSHIIVTFVLAAFIFIGVTIIGFIKHGFGYLKLFVPSGVPAVLLPLIVVIEIISYLSRPISLSVRLFANMMAGHTMMKVFGGFVVSLGIVGGWLPLSFSVALTGFGDIS

SEQ ID NO: 145954 - protein, 80 aa, Unknown
  Bacterial polypetide isolated from the Sargasso Sea
SKLTVARARKIQRFMSQPFFVAEVFTGTPGKYVDLEDTIKGFDAICKGEYDHLPEAAFYMVGTIEEAIQKAEKMSEDAAA

SEQ ID NO: 145955 - protein, 70 aa, Unknown
  Bacterial polypetide isolated from the Sargasso Sea
KSVAGTLRLDLAQYRELEAFAKFGSDLDKNTQAQLTRGERMVEILKQGQYVPMPCRKASCYYICSLKGLS

SEQ ID NO: 145956 - protein, 142 aa, Unknown
  Bacterial polypetide isolated from the Sargasso Sea
MSINPSEVTKLLKDQIKNFGEKAEISEIGKVLSVGDGIARVYGLDNVQAGEMVEFEDGSKGMALNLENDNVGVVIFGDDRKIKEGDTIKRTNAIVDVPVGKELLGRVVDGLGNPIDGKGAISSKERKRVEVKAPRYNSKTIC

SEQ ID NO: 145957 - protein, 85 aa, Unknown
  Bacterial polypetide isolated from the Sargasso Sea
MPSLDDLKKRIKSVKSTQKITKAMKMVAAAKLRKAQESAEKGRPYSQKMQNIILNLTKSINDPQNAPKLLVGTGEDKKYLCIVLT

SEQ ID NO: 145958 - protein, 62 aa, Unknown
  Bacterial polypetide isolated from the Sargasso Sea
MSKGIITQVIGAVVDVKFEGELPEILTALECKNGNNRLVLEVAQHLGETTVRTIAMDATERL

SEQ ID NO: 145959 - protein, 165 aa, Unknown
  Bacterial polypetide isolated from the Sargasso Sea
DQLKRQYKENIIEKISFKESKNVNYFDADKVGKIIIDRFEKKEFDVCTIFYNQFKNVITQIPQEQQIVPLKSNEEKETNSYSSYEFEPDEDEILSNLLPKNISTQIFKAMLENSASEQGSRMSAMDNATRNAGEMVDKLTIQYNRSRQAAITKELIEIISGAESL

SEQ ID NO: 145960 - protein, 82 aa, Unknown
  Bacterial polypetide isolated from the Sargasso Sea
MRKGKITQVIGAVVDVKFDGELPEILTALECNNTGNRLVLEVAQHLGESSVRTIAMDATEGLKRGDEVTDTGSPIKVPVGLR

SEQ ID NO: 145961 - protein, 186 aa, Unknown
  Bacterial polypetide isolated from the Sargasso Sea
FQLLAELSYSFVSKMISDTAGSKAKPYFSFIFSLFMFVLFCNMFGMIPYSFTVTSHIIVTFTLAAFIFIGVTIIGFIKHGLGYLKLFVPSGVPIILLPLIVVIEIISYLSRPVSLSVRLFANMMAGHTMMKVFGGFVISLGIVGGWLPLSFSVALTGLEILVAFLQAYVFAILTCIYLNDALNLHH

SEQ ID NO: 145962 - protein, 75 aa, Unknown
  Bacterial polypetide isolated from the Sargasso Sea
QEREKYKDFYLNHFFVAEVFTGSPGKLVELESTIKGFDAICKGEYDHLPEAAFYMVGTIEEAIEKAEKMAKDAAA

SEQ ID NO: 145963 - protein, 203 aa, Unknown
  Bacterial polypetide isolated from the Sargasso Sea
SSINRETFKLVKSLENEGKNVQLIPVGKKSRDFFNRLMQDKIVESFSDLNVSITGYESALQVSNKLQQLYFDGKFDKCILIFNKFKSAISQEVTQQQLIPLDVSSSLKEKKSDDNTEAKAIYDYEPDEETILKDLLPKNVSIQIFKVLLESDAGEQGARMAAMDNATRNAGEMIDSLTLKYNRTRQAFITKELIEIISGAESI

SEQ ID NO: 145964 - protein, 75 aa, Unknown
  Bacterial polypetide isolated from the Sargasso Sea
MANNLTGKISQVLGAVVDVEFDGELPAIMNALKVDNNGTRLMLEVAQHLGENAVRTIAMDTTDGLVRGQTATDTG

SEQ ID NO: 145965 - protein, 160 aa, Unknown
  Bacterial polypetide isolated from the Sargasso Sea
YFAFIFSLFMFVLFCNMFGMIPYSFTVTSHIIVTFVLASFIFIGVTIIGFIKHGFGYLKLFVPSGVPIVLLPLIVVIEIISYLSRPISLSVRLFANMMAGHTMMKVFGGFVISLGIVGGWLPLSFSVALTGLEILVAFLQAYVFAILTCIYLNDALNLHH

SEQ ID NO: 145966 - protein, 114 aa, Unknown
  Bacterial polypetide isolated from the Sargasso Sea
NQFKNVITQIPQSQQIIPLKTDNSEENKSEDSYEFEPDEDEILSNLLPKNISTQIFKAMLENSASEQGSRMSAMDNATRNAGEMVDKLTIEYNRSRQAAITKELIEIISGAESL

SEQ ID NO: 145967 - protein, 195 aa, Unknown
  Bacterial polypetide isolated from the Sargasso Sea
KKNTIIPNKMQLLAELSYSFVSKMISDTAGIKAKPYFSFIFSLFMFVLFCNMFGMIPYSFTVTSHIIVTFVLAAFIFIGVTIIGFLKHGFGYLKLFVPSGVPMVLLPLIIIIEVISYLSRPISLSVRLFANMMAGHTMMKVFGGFVVSLGIVGGWLPLSFSVALTGLEILVAFLQAYVFAILTCIYLNDALNLHH

SEQ ID NO: 145968 - protein, 148 aa, Unknown
  Bacterial polypetide isolated from the Sargasso Sea
KETKNANYFDADKVGKIIIDRFYKKEFDVCTIFYNQFKNVITQIPQEQQIIPLKTSDVQDDNDNYNYEFEPEEDEILNNLLPKNISTQIFKAMLENSASEQGSRMSAMDNATRNAGEMVDKLTIEYNRSRQAAITKELIEIISGAESL

SEQ ID NO: 145969 - protein, 43 aa, Unknown
  Bacterial polypetide isolated from the Sargasso Sea
MASLDDLKKRIASVKSTQKITKAMKMVAAAKLRRAQESAGEGK

SEQ ID NO: 145970 - protein, 112 aa, Unknown
  Bacterial polypetide isolated from the Sargasso Sea
YREMAAFAQFGSDLDASTQKLLNRGSKLTELLKQDQYSPMPVAQQVIAVFSGVRGFLDDVDLANIKIVEKQIYEEIKTNNPDIIDSINTTGKLEQEIEKRLTSAIEKFKKNK

SEQ ID NO: 145971 - protein, 178 aa, Unknown
  Bacterial polypetide isolated from the Sargasso Sea
LSRFLLVGSKGHDQLKRVYGKYIVEKINFKGFRKITYKEAENVGKIIIKLFNESQFDVCKIFYNKFKNVITQIPQEQQLIPVEDKEKKDEKIQDNFYEFEPEENEILNDLLPRNISTQIFKAFLENAASEQGSRMTAMDNATRNAGDLVDKLTINYNRSRQAAITKELIEIISGAESL

SEQ ID NO: 145972 - protein, 60 aa, Unknown
  Bacterial polypetide isolated from the Sargasso Sea
IFKAMLENSASEQGSRMSAMDNATRNAGEMVDKLTIEYNRSRQAAITKELIEIISGAESL

SEQ ID NO: 145973 - protein, 139 aa, Unknown
  Bacterial polypetide isolated from the Sargasso Sea
KFITLVSCAPVVQTLLPLDPQGIAEENDEIFRLTTKDSKLLVEKSNIEKSDSEKLPSDIVFEQSPDQLLDSLLPLYLQNQVLRALQESAASELACRMTAMNNASDNAKELASTLNLTYNKARQAAITQEILEVVGGSAV

SEQ ID NO: 145974 - protein, 46 aa, Unknown
  Bacterial polypetide isolated from the Sargasso Sea
MPSLDDLKKRISSVKSTQKITKAMKMVASAKLRKAQESAEKGRPFS

SEQ ID NO: 145975 - protein, 94 aa, Unknown
  Bacterial polypetide isolated from the Sargasso Sea
MASLDDLKKRISSVKSTQKITKAMKMVAAAKLRRAQESAEKGRPYSEKMNNIILNLSGGISDKQSAPKLLVGTGEDKVHLCIVLTSDRGLCGGF

SEQ ID NO: 145976 - protein, 83 aa, Unknown
  Bacterial polypetide isolated from the Sargasso Sea
MPSLDDLKKRIKSVKSTQKITKAMKMVAAAKLKKAQENAEKGRPYSEKLRNIILNLTKSISDETNAPKLLAGNGKDKVYLCVV

SEQ ID NO: 145977 - protein, 254 aa, Unknown
  Bacterial polypetide isolated from the Sargasso Sea
MKNEGVIYRISGPVVTATGMEAGMYDVVRVGLEGLMGEVIELHGDKAVIQVYEDTSGIRPGEPVLNTRETLSVALGPGLLTQIYDGIQRPLATLEEVMGVFITRGVDADGFDMEKKWTFEPTVSVGDEVVGGQVIGNVQETETIVHKIMVKPGMGGVVKSISAGDYNVTEDVCTFEDGSAIQMLQKWPVRTPRPFQQKYAPDTPLITGMRILDFLFPLAKGGAAGIPGPFGSGKTVTQQSLAKYSDAQIVVYIG

SEQ ID NO: 145978 - protein, 208 aa, Unknown
  Bacterial polypetide isolated from the Sargasso Sea
NPLFEKRDSKNLLIIAITSNKGLCGGFNSNIIKEVNNIKTTSASKRVDLLTIGKKGDDILSKKFEVISSHNDVYDNFNYNNIKEIAETVMQKFSDKEYDEVTLVYNHFKNAATQIVTKEQYLPIEDSTEENNSVSGDYIFEPNRPKILNELIPKSLSIQLFKAISDSIAGEHGARMTAMHKATDNASELRDQLKLTYNKARQTAITNE

SEQ ID NO: 145979 - protein, 72 aa, Unknown
  Bacterial polypetide isolated from the Sargasso Sea
MSKEGKITQIIGAVVDVNFAGDLPEIYTALEANNAGNKLILEVAQHLGENDVRTIAMDATEGLKRGDKVINT

SEQ ID NO: 145980 - protein, 215 aa, Unknown
  Bacterial polypetide isolated from the Sargasso Sea
ASLFMVISTIAILIVFNLGAKKKSLIPDKIQLLAELSYSFVSKMISDTAGTKAKPYFSFIFSLFMFVLFCNMFGMIPYSFTVTSHIIVTFVLAAFIFIGVTVIGFIKHGLGYLKLFVPSGVPMVLLPLIVVIEIISYLSRPISLSVRLFANMMAGHTMMKVFGGFVVSLGIVGGWLPLSFSVALTGLEILVAFLQAYVFAILTCIYLNDALNLHH

SEQ ID NO: 145981 - protein, 155 aa, Unknown
  Bacterial polypetide isolated from the Sargasso Sea
MEINPSEVTKILKEQIKKFGDKAEVTEVGQVLSVGDGIARIYGLDNVQAGEMVEFSDGSKGMALNLESENVGVVIFGDDKAVKEGDTVKRTGAIVDTPVGKELLGRVVDGLGNPIDGKGALDKSLKRSRVEVKAPGIIPRKSVSEPMQTGLKSID

SEQ ID NO: 145982 - protein, 136 aa, Unknown
  Bacterial polypetide isolated from the Sargasso Sea
GWSRSTPLIKKLGGGVRIALAQFRELEAFAQFASDLDDASREQLELGQKVTELMKQKQYSPMSVSEMGLVLFAVDKGYLKDVELNKIADFESALISYMNSEHKDFMDSLAESGEYSDEILSTLTEALDKFKATQTW

SEQ ID NO: 145983 - protein, 149 aa, Unknown
  Bacterial polypetide isolated from the Sargasso Sea
MEINPSEVTKILKEQIKNFGEKAEISEVGQVLSVGDGIARIYGLDNVQAGEMVEFSDGSKGMALNLESENVGVVIFGDDRNIKEGDVVKRTGSIVDTPVGKELLGRVVDGLGNPIDGKGALDKTVKKSRVEVKAPGIIPRQSVSEPMQT

SEQ ID NO: 145984 - protein, 118 aa, Unknown
  Bacterial polypetide isolated from the Sargasso Sea
ALAQFRELEAFAQFASDLDDASREQLELGQKVTELMKQKQYSPMSVSEMGLVLFAVDKGYLKDVELNKIADFESALISYMNSEHKDFMDNLAESGEHSDEILATFTEALDKFKSTQTW

SEQ ID NO: 145985 - protein, 47 aa, Unknown
  Bacterial polypetide isolated from the Sargasso Sea
MASLDDLKKRIASVKSTQKITKAMKMVAAAKLRKAQENAENGRPYSE

SEQ ID NO: 145986 - protein, 125 aa, Unknown
  Bacterial polypetide isolated from the Sargasso Sea
PLDSTSRQLDPLIIGQEHYDTTRAVQGVLQKYKELKDIIAILGMDELSEDDKLAVNRARKIQRYLSQPFYVAETFTGTPGKYVSLKDTISGFQAIVNGDYDHLPEQAFYMIGEISEAEKRAEEIK

SEQ ID NO: 145987 - protein, 104 aa, Unknown
  Bacterial polypetide isolated from the Sargasso Sea
MSKGIITQVIGAVVDVKFDGELPEILTAIECKNGDNRLVLEVAQHLGETTVRTIAMDATEGLKRGDEVTNTNAPIQVPVGPETLGRIINVIGEPIDERGEVKTK

SEQ ID NO: 145988 - protein, 123 aa, Unknown
  Bacterial polypetide isolated from the Sargasso Sea
MSTGNIVQVIGAVVDVEFPKEAIPSVYDALTLKDGELVFEVQQQLGDGIVRTIAMGASEGLKRGLEVENTGAPISVPVGQETLGRVLDVLGNPIDEKGPVGAKANRPIHAKAPTFEEQSTEAD

SEQ ID NO: 145989 - protein, 114 aa, Unknown
  Bacterial polypetide isolated from the Sargasso Sea
NDFVNTMTQKPEIKTLLPIDPEDSDQMQEHWDYIYEPDSKELLDYILMRYIESQVYRAVVENVACEMAAKMVAMKSATDNAGKLIDQLELDYNKARQAAITQEISEIVGGAAAV

SEQ ID NO: 145990 - protein, 157 aa, Unknown
  Bacterial polypetide isolated from the Sargasso Sea
YIIKKISFKDKKKLSFADADTIGNEIVKLFKNNDFDKCIIFYNKFQNVMTQIPQTQQVIPAKNKDYNKSENDHSSYEFEPDEDEILEDLLPKNISTQIYKGFLENSASEQGSRMTAMDNATRNAGELVEKLTINYNRSRQASITKELIEIISGAESL

SEQ ID NO: 145991 - protein, 80 aa, Unknown
  Bacterial polypetide isolated from the Sargasso Sea
YEPDEEEVLSKILPKNFIVQIYKAILESRASEQGARMTAMDNATRNAGEMIDNLSLKYNRQRQAIITKELIEIISGAEAL

SEQ ID NO: 145992 - protein, 44 aa, Unknown
  Bacterial polypetide isolated from the Sargasso Sea
MSAMDNATRNAGEMVDKLTIEYNRSRQAAITKELIEIISGAESL

SEQ ID NO: 145993 - protein, 66 aa, Unknown
  Bacterial polypetide isolated from the Sargasso Sea
MASNKAGKVTQVLGAVVDVAFEGELPPILNALSTKIGDQDLVLEVAQHLGENTVRTIAMDATERPS

SEQ ID NO: 145994 - protein, 149 aa, Unknown
  Bacterial polypetide isolated from the Sargasso Sea
FKNKKKISFKDASLVGHEVVKLFKNNEFDKCIIFYNKFKNVMTQIPQSQQLIPAKKEDDTKTEQDSSYDFEPEEDEILEDLLPKNISTQIYKGFLENSASEQGSRMTAMDNATRNAGDLVEKLTINYNRSRQAAITKELIEIISGAESL

SEQ ID NO: 145995 - protein, 175 aa, Unknown
  Bacterial polypetide isolated from the Sargasso Sea
KKSRDFFIRVMKDQIVESFIDLNLSNTGYESALQVSNKLQDLYFDGKFDKCILVFNKFKSAISQEVTQQQLIPLDVSDSTKEDKEDNNAAKAIYDYEPDEETILKDLLPKNVSIQIFKVLLESDAGEHGARMAAMDNATRNAGEMIDGLTLKYNRTRQAFITKELIEIISGAESI

SEQ ID NO: 145996 - protein, 157 aa, Unknown
  Bacterial polypetide isolated from the Sargasso Sea
NIIEKISFKESKNANYFDAEKVGRVIIKKFEKKEFDVCTIFYNQFKNVITQIPKEQQIIPLKSSEKKENFSFEDNYEFEPDEDEILSNLLPKNISTQIFKAMLENSASEQGSRMSAMDNATRNAGEMVDKLTIEYNRSRQAAITKELIEIISGAESL

SEQ ID NO: 145997 - protein, 125 aa, Unknown
  Bacterial polypetide isolated from the Sargasso Sea
MRKGKITQIIGAVVDVKFDGELPEILTALECDNGGNRLVLEVAQHLGESSVRTIAMDATEGLKRGDEVTDTAAPIKVPVGPETLGRIINVIGEPIDEKGEVKSKENWPIHRAAPEFNDQSTETEI

SEQ ID NO: 145998 - protein, 227 aa, Unknown
  Bacterial polypetide isolated from the Sargasso Sea
MRWLQHKYIKKVEIRYAELVKQGYQPNLILVGKKAIGYFQNRKDRYVIKSTFKELEQVPTVQDSEGITNEILAEFLSENSDRVEIIYTKFITLVSCAPVVQTLLPLDPQGIAEENDEIFRLTTKNSKLLVEKSNIEKSDSDKLPSDIVFEQSPDQLLDSLLPLYLQNQVLRALQESAASELACRMTAMNNASDNAKELASTLNLTYNKARQAAITQEILEVVGGSAV

SEQ ID NO: 145999 - protein, 39 aa, Unknown
  Bacterial polypetide isolated from the Sargasso Sea
MPSLDDLKKRIKSVKSTQKITKAMKMVAAAKLRKAQESA

SEQ ID NO: 146000 - protein, 36 aa, Unknown
  Bacterial polypetide isolated from the Sargasso Sea
RNAGEMIDSLTLKYNRTRQAFITKELIEIISGAESI

SEQ ID NO: 146001 - protein, 51 aa, Unknown
  Bacterial polypetide isolated from the Sargasso Sea
MPSLDDLRKRISSVKSTQKITKAMKMVAAAKLRKAQEMAEKWKTTIVIKWM

SEQ ID NO: 146002 - protein, 83 aa, Unknown
  Bacterial polypetide isolated from the Sargasso Sea
MPSLDDLKKRISSVKSTQKITKAMKMVAAAKLRRAQESAEKGRPFSEKMNNIILNLSSSVSDKESASKFLIGTGNDNIHLCVV

SEQ ID NO: 146003 - protein, 93 aa, Unknown
  Bacterial polypetide isolated from the Sargasso Sea
MATIHVDIVSAEGEIHSGDAAMVFAPAKMGEIGIAPRHAPLLTALKPGEVRVEDTEGKEHFFYITGGMIEVQPHLVTVLADTALRGDQLDEAA

SEQ ID NO: 146004 - protein, 166 aa, Unknown
  Bacterial polypetide isolated from the Sargasso Sea
DQIKREYDKYIIKKFSFKDKKQISFKEAEIISKEIIDLFNKNEFDKCTLFFNNFKNVITQVPQAQQIIPAEQSISDSKDKNNLSYEFEPEEDEILEDLLPKNISTQVFKAFLENAASEQGSRMTAMDNATRNAGDLVDKLTINYNRSRQASITKELIEIISGAESL

SEQ ID NO: 146005 - protein, 132 aa, Unknown
  Bacterial polypetide isolated from the Sargasso Sea
MALLPLPLPFAELEVGHHLYWQIGDLYLHGQVFLSSWILIGILLAVVLVGTRGMKRDPIGLQNLLEFLWNFIRDIARDNIGEKYYRDWLPFIGTLFLFIFVSNWGGALIPWKIFELPEGELGAPTADINTTV

SEQ ID NO: 146006 - protein, 51 aa, Unknown
  Bacterial polypetide isolated from the Sargasso Sea
MAGAKEIRSKIASVQNTQKITKAMEMVAASKCVNRRIAWRPAVLMQRPCAK

SEQ ID NO: 146007 - protein, 95 aa, Unknown
  Bacterial polypetide isolated from the Sargasso Sea
SIKENKENDENLSYEFEPEEDEILEDLLPKNISTQVFKAFLENAASEQGSRMTAMDNATRNAGDLVDKLTINYNRSRQASITKELIEIISGAESL

SEQ ID NO: 146008 - protein, 252 aa, Unknown
  Bacterial polypetide isolated from the Sargasso Sea
KSTQKITKAMKMVAAAKLRRAQESAERGRPYSEKMNNIILNLSNGISDKENALKLLSGTGENKVHLCVVMTSDRGLCGGFNSNIIKKAKSYFSKTLNEGKQLKIITVGSKGNDQLKRVYGGKIIENISFKESKNANYFDADKVGRIIIEKFEAGEFDICTIFYNQFKNVITQIPQAQQIIPLKNKEEENNSGGSYEFEPDEDEILSNLLPKNISTQIFKAMLENSASEQGSRMRAMDNATRNAGEMVTNLLS

SEQ ID NO: 146009 - protein, 115 aa, Unknown
  Bacterial polypetide isolated from the Sargasso Sea
FYNQFKNVITQIPQAQQIIPLNNVEDKNSSDESYEFEPDEDEILSNLLPKNISTQIFRAMLENSASEQGSRMSAMDNATRNAGEMVDKLTIEYNRSRQAAITKELIEIISGAESL

SEQ ID NO: 146010 - protein, 250 aa, Unknown
  Bacterial polypetide isolated from the Sargasso Sea
SISATLPYSNKLSGLIQNISTSGESLDSPFFIKREIKKVLIVAITSNKGLCGGFNSNVIKEVIKLLQTEYSSKKAEIICIGKKGGDILSKKNNVIESFNSVFDEFSYDNVKPIAELFMEKFSDESYDEIVLVYNHSKNAATQTLTVEPYLPIEENKDEEKATNKGDYIFEPSQSEILNELIPKALIVQLFKAISDSIAGEHGARMTAMHKATDNASELRDQLKLTYNKARQTAITNEILEIVGGAEALNS

SEQ ID NO: 146011 - protein, 71 aa, Unknown
  Bacterial polypetide isolated from the Sargasso Sea
FDALLPLYLQNQLLRALQESAASELASRMTAMNNASDNAKELAKNLTIDYNKARQAAITQEILEVVGGASA

SEQ ID NO: 146012 - protein, 31 aa, Unknown
  Bacterial polypetide isolated from the Sargasso Sea
MVDKLTIQYNRSRQAAITKELIEIISGAESL

SEQ ID NO: 146013 - protein, 72 aa, Unknown
  Bacterial polypetide isolated from the Sargasso Sea
MASLDDLKKRIASVKSTQKITKAMKMVAAAKLRRAQESAEKGRPYSEKMNNVILNLSNGISDKENAPKLLSG

SEQ ID NO: 146014 - protein, 54 aa, Unknown
  Bacterial polypetide isolated from the Sargasso Sea
QILKTLQDAGAMDYTIIVSATASDPAPLQFLAPYTGCAFGEFFRDNGMHALIIY

SEQ ID NO: 146015 - protein, 56 aa, Unknown
  Bacterial polypetide isolated from the Sargasso Sea
MASLDDLKKRISSVKSTQKITKAMKMVAASKLRRAQENALKGRPYSEKMNNIILNL

SEQ ID NO: 146016 - protein, 51 aa, Unknown
  Bacterial polypetide isolated from the Sargasso Sea
ASEQGSRMSAMINATENAGEMVDKLTIEYNRSRQAAITKELIEIISGAESL

SEQ ID NO: 146017 - protein, 85 aa, Unknown
  Bacterial polypetide isolated from the Sargasso Sea
MPSLDDLRKRIASVKSTQKITKAMKMVAAAKLRKAQEMAEKGRPYSDKMDVIIQNLSKAINDPSNAPKLLVGTGEDKIHLCVVMT

SEQ ID NO: 146018 - protein, 282 aa, Unknown
  Bacterial polypetide isolated from the Sargasso Sea
ILGRAFSGTGRTIDTGPALTEEPKIEIDGPTVNPARRVLASHMIRTDVPMIDVFNCLVESQKIPIFSVAGEPYNQLLAQIGTHADADIVVFGGIGLIFDDYYYFRQAFEEAGVHARTVMFVHQGSDPTVEALLVPDMALAVAERFAVEEGKRVLVLLTDMTAYADALKEVGISMEHVPSNRGYIGDLYSQLARRYEKACDYKGAGSVTILSVTTMPGDDVTHPVPDNTGYITEGQLYLHNGVIDPFGSLSRLKQHVIGKVTREDHSQIMNTMVRFYAEAKDA

SEQ ID NO: 146019 - protein, 80 aa, Unknown
  Bacterial polypetide isolated from the Sargasso Sea
FEPNEEVLLNDIIPKNIAIQIHSALLENMASEQGSRMTAMDNATRNANDMIDGLTLFYNRSRQALITKELIEIISGAEAV

SEQ ID NO: 146020 - protein, 199 aa, Unknown
  Bacterial polypetide isolated from the Sargasso Sea
MSTTNRLNVVPTVTVLAVVKNRLSGAQKGYKLLKKKADALTMRYRQILAKIVAAKREMGTAMRASAFALTEAKYVAGEGIKHTVLDGVDRANVRVRAKTDNVAGVKLPRFEHHLEGADGGRADMTGLGGGGKQLQNCKRAYLGAVKLLVELASLQTAFITLDLAIKTTNRRVNALENVVTPRLENTVAYIKGELDELER

SEQ ID NO: 146021 - protein, 134 aa, Unknown
  Bacterial polypetide isolated from the Sargasso Sea
MEINPSEVTKILKEQIKKFGDKAEVTEVGQVLSVGDGIARIYGLDNVQAGEMVEFSDGSKGMALNLESENVGVVIFGDDKSVREGDTVKRTGAIVDTPVGKELLGRVVDGLGNPIDGKGALDKSVKRSRVEVKA

SEQ ID NO: 146022 - protein, 173 aa, Unknown
  Bacterial polypetide isolated from the Sargasso Sea
GVNMETARFFRNDFEENGSMENVVLYLNLANDPTIERIVTPRLALTAAESAQLRILQQKSGVRARFRNVFGLFLAAVHCELCTHLFCATIAIACDFPRLQVQIRNRRTRKSMTLRARYFAYTLEQHVFCILTDMSAYADALREVSAAREEVRLLLMQFLVGVPEVFAGVQTEI

SEQ ID NO: 146023 - protein, 90 aa, Unknown
  Bacterial polypetide isolated from the Sargasso Sea
ENAKEGSIYDYEPEQVEILEELLPRSIATQIFSALLENAASEQGARMSAMDNATRNAGEMIDKLTIQYNRSRQAAITNELIEIISGAEAL

SEQ ID NO: 146024 - protein, 48 aa, Unknown
  Bacterial polypetide isolated from the Sargasso Sea
QGSRMTAMDNATRNAGEMVDKLTIQYNRSRQAAITKELIEIISGAESL

SEQ ID NO: 146025 - protein, 86 aa, Unknown
  Bacterial polypetide isolated from the Sargasso Sea
MPSLDDLKKRIKSVKSTQKITKAMKMVAAAKLRKAQENAEKGRPYSQKMQNIILNLTKSINDPQNAPKLLVGTGKDKTYLCVVLTA

SEQ ID NO: 146026 - protein, 175 aa, Unknown
  Bacterial polypetide isolated from the Sargasso Sea
KSRDFFKRIMSDKIMESYVDMSIRGITYSSAFTISKNIQKLYSEEKFDVCIIIYNKFKSAITQEVTKKQLIPLKIEKQNNDEENDQKKSNSIYKYEPDEKEILTDLLPKNISVQIFKILLESDAGEQGARMAAMDNATRNAGEMIDNLTLKYNRTRQAFITKELIEIISGAESIQ

SEQ ID NO: 146027 - protein, 307 aa, Unknown
  Bacterial polypetide isolated from the Sargasso Sea
QHEAEERFLSQPDKHPHRMVHYGHYVFRTPTPLSVIEPGVDTYTGNAIFLEGHRQNSAMFAEQRQSAGLTRFSSLTPSFLALVLAPLFIILIGYGSVSREREAGTLTLLLTQGASRWQLVLGKLVALMLASGIFLLPLLLACVYVAFSNESALVVTLFCLGYMLYFMLWAVVVTACSTLFEKSSASFTVLIVIWMSACILLPRMGSSVATSIEPSIGKLEADFKVEEKLRSLGDGHDVNDPAFVKLKQDLLEKYNVDSVDDLPVNFRGIVAQYSEQRQAVVINEFAESRMQEELAQAHIARKFGWLS

SEQ ID NO: 146028 - protein, 233 aa, Unknown
  Bacterial polypetide isolated from the Sargasso Sea
HRIGPEIKLGVIDISFTNASLFMVISSIAILVIFNLGSKKNSLVPSKIQLLAELSYSFVSKMISDTAGSKAKPYFAFIFSLFMFVLFCNMFGMIPYSFTVTSHIIVTFVLAAFIFIGVTIIGFIKHGLGYLKLFVPSGVPMILLPLIVVIEIISYLSRPISLSVRLFANMMAGHTMMKVFGGFVVSLGIIGGWLPLSFSVALTGLEILVAFLQAYVFAILTCIYLNDALNLHH

SEQ ID NO: 146029 - protein, 96 aa, Unknown
  Bacterial polypetide isolated from the Sargasso Sea
LKFNEEKEANSDSSYEFDPEEDEILSNLLPKNISTQIFKAMLENSASEQGSRMSAMDNATRNAGEMVDKLTIQYNRSRQAAITKELIEIISGAESL

SEQ ID NO: 146030 - protein, 50 aa, Unknown
  Bacterial polypetide isolated from the Sargasso Sea
SEQGSRMTAMDNATRNAGELVDKLTINYNRSRQASITKELIEIISGAESL

SEQ ID NO: 146031 - protein, 58 aa, Unknown
  Bacterial polypetide isolated from the Sargasso Sea
MASLDDLKKRISSVKSTQKITKAMKMVAASKLRRAQESAEKGRPYSEKMNNIILNLSK

SEQ ID NO: 146032 - protein, 86 aa, Unknown
  Bacterial polypetide isolated from the Sargasso Sea
MPSLDDLRKRISSVKSTQKITKAMKMVAAAKLRKAQEMAEKGRPYSDKMEIIIQNLSKSISDPQNAPKLLIGTGEDKTHLCVVMTA

SEQ ID NO: 146033 - protein, 187 aa, Unknown
  Bacterial polypetide isolated from the Sargasso Sea
IFGKVLGEGKTLKIITVGSKGYDQLKRLYSDKIVEKISFKESKNANYFDAEKVGKIIIESFLKKEFDVCTIFYNKFKNVITQIPQEQQIIPLKSSESEGSTSEDNYEFEPEEDEILSNLLPKNISTQIFKAMLENSASEQGSRMSAMDNATRNAGEMVEKLTIQYNRSRQAAITKELIEIISGAESL

SEQ ID NO: 146034 - protein, 282 aa, Unknown
  Bacterial polypetide isolated from the Sargasso Sea
MPNLKDLKIRIDSVRSTQKITSAMKMVAAAKLRRAQEAAEAARPYAIRMERMLGSLAQSVGGTEGAPQLLAGTGTSETHLLVAFTADRGLCGGFNGSIVRQVRSMIIDLKAAGKTVKVFCVGRKGHDVLKREFPAEIIENREGLGRRGIEYHEAAGVANTITEFFEAGKFDVCTIVFNRFHSAMTQIVTPQQLIPFEPANSVDEEEETPTNEGPKAVYVFEPEEAEILADLLPRNLAVQIFQALLESSASEHGARMTAMDNATRNAGEMIDGLTLTYNRTRQ

SEQ ID NO: 146035 - protein, 68 aa, Unknown
  Bacterial polypetide isolated from the Sargasso Sea
LPKNISTQVFKAFLENAASEQGSRMTAMDNATRNAGDLVDKLTINYNRSRQASITKELIEIISGAESL

SEQ ID NO: 146036 - protein, 219 aa, Unknown
  Bacterial polypetide isolated from the Sargasso Sea
MDNPTKYLIIVATAERGLCGGFNSAIVKLARLRISALLKENKNVKILTIGKKGREQLKRDYGSLFVEHVDLSSEKSLTFEIAKKIAAGIITKFHGDDFEIAEIFYNRFESVISQIPSSFQILPVEVSQQNSEHDNTNFEFEPDEEEILNELIPKSIATSIFSVLQENAASEQGSRMAAMDNATRNAGEMIDKLTIDYNRSRQAAITNELIEIISGAEAL

SEQ ID NO: 146037 - protein, 228 aa, Unknown
  Bacterial polypetide isolated from the Sargasso Sea
YAGGYNTNIIKKVEIRYAELVKKGYQPSLILVGKKAIGYFQNRKDRYVIKSTFKELEQVPTVKDSEGVTNEILAEFLSENSDRVEIIYTKFITLVSCAPVVQTLLPLDPQGIAEENDEIFRLTTKDSKLLVEKSNIEKSDSEKLPSDIVFEQSPDQLLDSLLPLYLQNQVLRALQESAASELACRMTAMNNASDNAKELASTLNLTYNKARQAAITQEILEVVGGSAV

SEQ ID NO: 146038 - protein, 239 aa, Unknown
  Bacterial polypetide isolated from the Sargasso Sea
MYQFNVYRIGPEIKLGQIDISFTNASLFMVISSLAILIIFNLGASKKTLIPNKIQLLAELSYSFVSKMISDTAGSKAKPYFSFIFSLFMFVLFCNMLGMIPYSFTVTSHIIVTFVLAAFIFVGVTIIGFIKHGLGYLKLFVPSGVPMVLLPLIVVIEIISYLSRPISLSVRLFANMMAGHTMMKVFGGFVLSLGIVGGWLPLSFSVALTGLEILVAFLQAYVFAILTCIYLNDALNLHH

SEQ ID NO: 146039 - protein, 72 aa, Unknown
  Bacterial polypetide isolated from the Sargasso Sea
LLNLLPKNISTQIFKAMLENSASEQGSRMSAMDNATRNAGEMVDKLTIEYNRSRQAAITKELIEIISGAESL

SEQ ID NO: 146040 - protein, 162 aa, Unknown
  Bacterial polypetide isolated from the Sargasso Sea
MEINPSEVTKILKEQIKNFGDKAEVTEVGQVLSVGDGIARIYGLDNVQAGEMVEFSDGSKGMALNLESENVGVVIFGDDRNIKEGDVVKRTGNIVDTPVGKELLGRVVDGLGNPIDGKGALDKSVQKSRVEVKAPGIIPRQSVSEPMQTGLKSIDSLVPVGR

SEQ ID NO: 146041 - protein, 131 aa, Unknown
  Bacterial polypetide isolated from the Sargasso Sea
MEINPSEVTKILKEQIKKFGDKAEVTEVGQVLSVGDGIARIYGLDNVQAGEMVEFADGSKGMALNLESDNVGVVIFGDDRAVKEGDTVKRTGAIVDTPVGKELLGRVVDGLGNPIDGKGALDKGIKRSRVK

SEQ ID NO: 146042 - protein, 31 aa, Unknown
  Bacterial polypetide isolated from the Sargasso Sea
MVDKLTIEYNRSRQAAITKELIEIISGAESL

SEQ ID NO: 146043 - protein, 164 aa, Unknown
  Bacterial polypetide isolated from the Sargasso Sea
MGSGKVVSVIGAVIDVEFPREEVPQVYDALKIDQSGTTLEVQQQLGDGVVRTIAMGASEGIARGIPVSNTNAPISVPVGDPTLGRIMDVLGNPIDEKGPINESERMPIHRDPPSFEEQAGGRDLLETGVKVIDLICPFAKGGKVGLFGGSGVGKTVTMLELINN

SEQ ID NO: 146044 - protein, 255 aa, Unknown
  Bacterial polypetide isolated from the Sargasso Sea
MPNLKDLKIRIDSVKSTQKITSAMKMVAAAKLRRAQEAAESARPYAVRMERMLGSLAQSVGGTEGAPKLLAGTGTNETHLLVAFTADRGLCGGFNGSIVRQVRIMIMDLKAVGKTVKVFCVGRKGHDLLKREFPAEIIENKEGLGRRGIEYHEAAGVANTITEFFEAGEFDVCTIVFNRFHSAMTQIVTPQQLIPFDPTNNIDAEEETPTDSDPKAVYVFEPEEDEILADLLPRNLAIQIFQALLESSASEHGAR

SEQ ID NO: 146045 - protein, 55 aa, Unknown
  Bacterial polypetide isolated from the Sargasso Sea
MENAASEQGSRMTAMDNATRNAGDLVDKLTINYNRSRQASITKELIEIISGAESL

SEQ ID NO: 146046 - protein, 64 aa, Unknown
  Bacterial polypetide isolated from the Sargasso Sea
MKKNGKITQIIGAVVDVNFESDLPEIYTALEASNSGNKLILEVAQHLGENDVRTIAMDATEGLK

SEQ ID NO: 146047 - protein, 87 aa, Unknown
  Bacterial polypetide isolated from the Sargasso Sea
MASLDDLKKRISSVKSTQKITKAMKMVAASKLRKAQESAEKGRPYSDKMNNIILNLSKSISDKENSPKLLTGSGDDKVHLCIVMTSD

SEQ ID NO: 146048 - protein, 67 aa, Unknown
  Bacterial polypetide isolated from the Sargasso Sea
TKPLSLSFTLFGNILADELVVGVLVFLLPLILPIPVMFLGLFTSAIHALIFATLAPYYIGEAVEEHH

SEQ ID NO: 146049 - protein, 106 aa, Unknown
  Bacterial polypetide isolated from the Sargasso Sea
NDGRVTVEPGAGAANTEPKIASDIVFEQTPDQLLNALLPLYLQNQMLRSLQESAASELASRMTAMNNASDNAKELAKTLTLDYNKARQAAITQEILEVAGGAAAVG

SEQ ID NO: 146050 - protein, 64 aa, Unknown
  Bacterial polypetide isolated from the Sargasso Sea
SQPFHVAEVFTGSPGKLVGLEDTIEGFSGIINGDYDHLPEAAFYMVGTIEEAVEKGKKLMQEAA

SEQ ID NO: 146051 - protein, 53 aa, Unknown
  Bacterial polypetide isolated from the Sargasso Sea
NSASEQGSRMSAMDNATRNAGEMVDKLTIQYNRSRQAAITKELIEIISGAESL

SEQ ID NO: 146052 - protein, 49 aa, Unknown
  Bacterial polypetide isolated from the Sargasso Sea
EQGSRMSAMDNATRNAGEMVDKLTIQYNRSRQAAITKELIEIISGAESL

SEQ ID NO: 146053 - protein, 277 aa, Unknown
  Bacterial polypetide isolated from the Sargasso Sea
MANLKDIRNKIKSVKSIQQVTKAMKMVAAAKLRKSQENMEKSRPYSGSIKDTINSILPDINRSLLPILDNRPIQKSLFVAISADRGMAGGFNANVIKKTEKKISEFGKNKSELICIGKKAYDHFKTRDYNIVKYYIDFWNELKFNSAKSIGDDIVERYRNKEIDSVHFIYNEFKSVASQIIRSEQLFPLEYHISDNEAPIINKDFMPSKDEIVRTLIPKYINVQIWQYFLESNASEQAARMLAMENATENAGEMISDLSLEYNKARQAAITTEIMKL

SEQ ID NO: 146054 - protein, 124 aa, Unknown
  Bacterial polypetide isolated from the Sargasso Sea
EEFDICVIFYNQFKNVITQIPKAQQIIPLNVKNSERDKSEDSYEFEPDEDEILNNLLPKNISTQIFKAMLENVASEQGSRMSAMDNATRNAGEMVDKLTIEYNRSRQAAITKELIEIISGAESL

SEQ ID NO: 146055 - protein, 207 aa, Unknown
  Bacterial polypetide isolated from the Sargasso Sea
KQGYQPNLILVGKKAIGYFQNRKDRYVIKSTFKELEQVPTVKDSEGVTNEILAEFLSENSDRVEIIYTKFITLVSCAPVVQTLLPLDPQGIAEENDEIFRLTTKDSKLRVEKSNIEKSDSEKLPSDIVFEQSPDQLLDSLLPLYLQNQVLRALQESAASELACRMTAMNNASDNAKELASTLNLTYNKARQAAITQEILEVVGGSAV

SEQ ID NO: 146056 - protein, 155 aa, Unknown
  Bacterial polypetide isolated from the Sargasso Sea
LKNIVLKKKKQITFNEANIVGSEIISLFNQGEFDKCILFYNNFKNVITQIPQAQQIIPAEINKNYNDDKNSFSYDFEPEEDEILEDLLPKNISTQVFKALLENAASEQGSRMTAMDNATRNAGELVDKLTINYNRSRQASITKELIEIISGAESL

SEQ ID NO: 146057 - protein, 66 aa, Unknown
  Bacterial polypetide isolated from the Sargasso Sea
MASLDDLKKRISSVKSTQKITKAMKMVAAAKLKRAQESAEKGRPYSQKMNNVILNLSSGISDKENA

SEQ ID NO: 146058 - protein, 73 aa, Unknown
  Bacterial polypetide isolated from the Sargasso Sea
MASLDDLKKRITSVKSTQKITKAMKMVAAAKLRKAQESAEKGRPYSDKMHNIILNLSKNINDKENAPKLLTGS

SEQ ID NO: 146059 - protein, 252 aa, Unknown
  Bacterial polypetide isolated from the Sargasso Sea
QNQMTKARPYADKILNVIKHLAHAHPEYTSEFFAQRDVSKKGYIIISSDRGLCGGLNNNLFKLVVENIEKDSSSSIKPAFSLIGGKASSFFQRMGGDVIAQTSQLGDKPKIEQVLGLIKNTIDSFISKDIDEVYIVYNKFINTVSQEPIVQKVLPIQTEDKNEEYDYYWDYLYEPDAEAVLESLFTRYIESLIYRGLVENLACEQASRMVAMKAASDNASDLISELQLIYNKNRQAAITQEISEIISGAAAL

SEQ ID NO: 146060 - protein, 185 aa, Unknown
  Bacterial polypetide isolated from the Sargasso Sea
QLLAELSYSFVSKMINDTAGTKAKPYFSFIFSLFMFVLFCNMLGMIPYSFTVTSHIIVTFVLAAFIFIGVTIIGFIKHGFGYLKLFVPSGVPIVLLPLIVVIEIISYLSRPISLSVRLFANMMAGHTMMKVFGGFVVSLGIVGGWLPLSFSVALTGLEILVAFLQAYVFAILTCIYLNDALNLHH

SEQ ID NO: 146061 - protein, 143 aa, Unknown
  Bacterial polypetide isolated from the Sargasso Sea
TFTEAETIGNEIINLFKQDQFDKCILFFNNFKNVITQIPQAQQIIPAENNPSKEEEENLIFYEFEPEEDEILEDLLPKNISTQVFKAFLENAASEQGSRMTAMDNATRNAGELVDKLTINYNRSRQASITKELIEIISGAESL

SEQ ID NO: 146062 - protein, 119 aa, Unknown
  Bacterial polypetide isolated from the Sargasso Sea
CTIFYNQFKNVITQIPQEQQIIPLNTSEKEENSQEDNYEFEPEEDEILSNLLPKNISTQIFKAMLENSASEQGSRMSAMDNATRNAGEMVDKLTIEYNRSRQAAITKELIEIISGAESL

SEQ ID NO: 146063 - protein, 60 aa, Unknown
  Bacterial polypetide isolated from the Sargasso Sea
IFKAMLENSASEQGSRMSAMDNATRNAGEMVEKLTIQYNRSRQAAITKELIEIISGAESL

SEQ ID NO: 146064 - protein, 193 aa, Unknown
  Bacterial polypetide isolated from the Sargasso Sea
CKLAKIRFEKILKEGKKLKIITVGSKGLDQLKRIYGKYIVEKITFKDKKKITFQEAEYVGKKILELFEKKEFDKCILFYNNFKNVVTQIPQAQQIIPTEKAKNSKDNDDNFYEFEPDEDEILEDLLPKNISTQVFKAFLENAASEQGSRMTAMDNATRNAGELVDKLTINYNRSRQAAITKELIEIISGAESL

SEQ ID NO: 146065 - protein, 81 aa, Unknown
  Bacterial polypetide isolated from the Sargasso Sea
MVATSSTSAPAKGVVRQVIGPVLDVEFPAGKLPKILNALRIEAKNPAGQDIALTAEVQQLLGDHRVRAVAMSGTDGLVRGM

SEQ ID NO: 146066 - protein, 205 aa, Unknown
  Bacterial polypetide isolated from the Sargasso Sea
GGFNSSINRETFKLVKSLEGNGKKIQLMPVGKKSRDFFNRVMKDQIIESFVDLNVSSTGYESALNISNKLQELYFDGKFDKCILVFNKFKSAISQEVTQQQLIPLDVSNSEKEEEKESSSNAIYDYEPDEETILKDLLPKNVSIQIFKVLLESDAGEQGARMAAMDNATRNAGEMIDSLTLKYNRTRQAFITKELIEIISGAESI

SEQ ID NO: 146067 - protein, 26 aa, Unknown
  Bacterial polypetide isolated from the Sargasso Sea
LNLTYNKARQAAITQEILEVVGGSAV

SEQ ID NO: 146068 - protein, 137 aa, Unknown
  Bacterial polypetide isolated from the Sargasso Sea
DVAKKIIKLFNDSQFDVCAIFYNKFKNIITQIPQAQQIIPIESLKKSEEKKSESFYEFEPDEDEILNDLLPRNISTQIFKAFLENAASEQGSRMTAMDSATRNAGDLVDKLTINYNRSRQAAITKELIEIISGAESL

SEQ ID NO: 146069 - protein, 93 aa, Unknown
  Bacterial polypetide isolated from the Sargasso Sea
MEKIGKITQVIGAVVDVQFEGHLPEILTALEVNNSGSKLILEVAQHLGESSVRTIAMDSTEGLKRGDAAKDTGSPITIPVGPETLGRIINVVG

SEQ ID NO: 146070 - protein, 65 aa, Unknown
  Bacterial polypetide isolated from the Sargasso Sea
RELIIGDRQIGKTAIAVDAIINQKDSGIKCVYVAIGQKMSTIATIVRTLDEHGALDNTIIVAASA

SEQ ID NO: 146071 - protein, 110 aa, Unknown
  Bacterial polypetide isolated from the Sargasso Sea
TTGQLGILPGHISLLTAIDVGVLRVRADGGWNSIALMGGFAEVDADEVTVLVNQAELGSTIDGNAAEADFQKATTVVDGMEGQPASPEKVKAQQQLNMARARMQASKSAD

SEQ ID NO: 146072 - protein, 92 aa, Unknown
  Bacterial polypetide isolated from the Sargasso Sea
MASLDDLKKRIASVKSTQKITKAMKMVAAAKLRRAQESAEKGRPYSEKMNSIILNLSSGISDKENAPKLLSGSGNDKVHLCVVMTSDRGLCG

SEQ ID NO: 146073 - protein, 97 aa, Unknown
  Bacterial polypetide isolated from the Sargasso Sea
MASLDDLKKRISSVKSTQKITKAMKMVAAAKLRRAQESAEKGRPYSEKMNNIILNLSGGISDKENAPKLLSGTGEDKVHLCVVMTSDRGLCGGFIQI

SEQ ID NO: 146074 - protein, 58 aa, Unknown
  Bacterial polypetide isolated from the Sargasso Sea
AEVFTGSPGKYVDLEDTIKSFDGLVKGEYDHMPEAAFYMVGGIDEAIEKAKKLEAEAA

SEQ ID NO: 146075 - protein, 182 aa, Unknown
  Bacterial polypetide isolated from the Sargasso Sea
AEDEKDLKIITVGSKVNDQLKRAYGDKIILNISFKESKYANYFDAEKVGKMVIEKFGAEEFDVCTIFYNQFKNVITQIPQAQQIIPLNVENSVEDKSEDSYEFEPDEDEILSNLLPKNISTQIFKAMLENSASEQGSRMSAMDNATRNAGEMVDKLTIEYNRSRQAAITKELIEIISGAESL

SEQ ID NO: 146076 - protein, 117 aa, Unknown
  Bacterial polypetide isolated from the Sargasso Sea
MSKGTITQVIGAVVDVKFHGDLPEILTALECKNGDNRLVLEVAQHLGESTVRTIAMDATEGLKRGDEVTNTKAPIQVPVGPETLGRIINVIGEPIDEKGEVKTKETWPIHRAAPEFN

SEQ ID NO: 146077 - protein, 166 aa, Unknown
  Bacterial polypetide isolated from the Sargasso Sea
RNVKDHDDHSSDHKSDEHKHKSVEKGKQEGLLIPYFRSANTDLNTTLAIAIVAMVLVHFWGFSILGFGSHLSKFINFKSGPVGFFVGILEGISEFARIISFTFRLFGNIFAGEVLLFAMAFLLPLIGIIPFLGLELFVGLIQALIFSVLTLVFASMATVSHGDEGH

SEQ ID NO: 146078 - protein, 76 aa, Unknown
  Bacterial polypetide isolated from the Sargasso Sea
APEVLDRLFSRYVESLVYQGVVENIACEQAARMVAMKAASDNAGKLIDELQLVYNKARQAAITQELSEIVGGAAAV

SEQ ID NO: 146079 - protein, 152 aa, Unknown
  Bacterial polypetide isolated from the Sargasso Sea
MNSGEIVQVIGAVVDVKFPTDSVPKIFDALKLESSNVTLEVQQQLGDGIVRSIALGSTDGLRRGITVNNTREGIKVPVGEKTLGRIMNVLGDPIDEKGPIGEEERMVIHREAPKFVELSAATELLETGIKVIDLICPFAKGGKVGLFGGAGV

SEQ ID NO: 146080 - protein, 188 aa, Unknown
  Bacterial polypetide isolated from the Sargasso Sea
MFLNSLPTNFAALEVGQHLYWQIGNIRLHGQVFLTSWILLGALLVFISVGTKKMENDPKGLQNLLEFLWDYIRDLARTQIGEKVYRDWMPFIGTLFLFVFVSNWGGALIPWRLIKLPSGELGAPTADINTTIALALLVSLSYFYAGLSNKGWRYFEYYVHPTPIMLPFKILEDFTKPLSLSFRLFGNI

SEQ ID NO: 146081 - protein, 42 aa, Unknown
  Bacterial polypetide isolated from the Sargasso Sea
MASLDDLKKRIASVKSTQKITKAMKMVAAAKLRRAQESAEKG

SEQ ID NO: 146082 - protein, 77 aa, Unknown
  Bacterial polypetide isolated from the Sargasso Sea
MKKGKITQVIGAVVDVKFDGELPEILTALECKNGDNRLVLEVAQHLGESSVRTIAMDATEGLKRGDEVNDTGAPIKV

SEQ ID NO: 146083 - protein, 41 aa, Unknown
  Bacterial polypetide isolated from the Sargasso Sea
MDNATRNAGDLVDKLTITYNRSRQAAITKELIEIISGAESL

SEQ ID NO: 146084 - protein, 70 aa, Unknown
  Bacterial polypetide isolated from the Sargasso Sea
MSGGKEIKGQISSIKNTQKITKAMEMVAASKMKKAQSRMAAARPYAKMIKNVVGHLASAHPEYKHPFLID

SEQ ID NO: 146085 - protein, 139 aa, Unknown
  Bacterial polypetide isolated from the Sargasso Sea
MASMQCEIVSAEQSLFSGTITMLSARGTIGELGVMPGHAPLLTGIQPGAVTLRMEDGTEEVFYASGGFIEIQPGYVTLLADTAIRAEDLDEAQAEEARQQAQREMAEKAAGADFGMAAAMMAEAVAQQRTLDELRKRRR

SEQ ID NO: 146086 - protein, 143 aa, Unknown
  Bacterial polypetide isolated from the Sargasso Sea
LKNRIESVKNTRKITKAMQMVAAAKLRRAQDAAEASRPYSERFNTVLASLAASVGSSKSAPVLLRGTGKQDVHLLVVMTAERGLCGGFNSNIAKLARSHAAKLKEDGKHVKVITVGKKGRDALKRDLGEHFVEHVDLSEFKSI

SEQ ID NO: 146087 - protein, 250 aa, Unknown
  Bacterial polypetide isolated from the Sargasso Sea
MFFYSPLEQFTIISLIPMHIGNFYFSFTNSSLFMCLSTGLFMCLCVLVTARGGSLVPTPWQSLIEMIYEFVVSLVSEQVGEKGKQYFPILFTLFTFLLCSNLIGMIPYSFTTTSHFVVTFGLSVSVFIAVTIIGFQIHGLHFFSFLLPPGAPLILSPFLVVIELVSYIFRAISLGVRLFANMMAGHTLVKILSGFAWSMLSLSGVLKLAASIPFAVVFALMFLEVGVACLQAYVFTILTCIYLNDAIHLH

SEQ ID NO: 146088 - protein, 107 aa, Unknown
  Bacterial polypetide isolated from the Sargasso Sea
MPSLDDLKKRIYSIKSTQKITKAMKMVAAAKLRRAQENAERGRPFSEKMNNIILNLSSSISDKDSASKFLIGTGKDNVHLCVVITADRGLCGGFNTNICKKAKNYLK

SEQ ID NO: 146089 - protein, 135 aa, Unknown
  Bacterial polypetide isolated from the Sargasso Sea
METGKVVEIIGAVIDVQFPREAMPNIFDALLIEEGDLTLEVQQQIGDGIVRTIAMGTTDGLKRGLDVKNTGAPISVPVGDKTLGRIMNVLGQPVDNAGPIKAEKKMPIHRAAPTFSEQASEIELLETGIKVVDLI

SEQ ID NO: 146090 - protein, 85 aa, Unknown
  Bacterial polypetide isolated from the Sargasso Sea
MSKGIITQVIGAVVDVKFNGELPEILTALECKNGDNRLVLEVAQHLGETTVRTIAMDATEGLKRGDEVTNTKAPIQVPVGPETLG

SEQ ID NO: 146091 - protein, 44 aa, Unknown; identical to SEQ ID NO: 145992
  Bacterial polypetide isolated from the Sargasso Sea

SEQ ID NO: 146092 - protein, 169 aa, Unknown
  Bacterial polypetide isolated from the Sargasso Sea
KGLDQIKRDYGNYIVQKYSFKDKKQITFKEAEIVGKEIMKLFKQNEFDRCFLFYNNFKNVITQIPQAQQIIPTEKKLEETKDEDSTFYEFEPDEEEILEELLPKNISTQVFKAFLENAASEQGSRMTAMDNATRNAGDLVDKLTINYNRSRQASITKELIEIISGAESL

SEQ ID NO: 146093 - protein, 63 aa, Unknown
  Bacterial polypetide isolated from the Sargasso Sea
MPSLDDLRKRIASVKSTQKITKAMKMVAAAKLRKAQEMAEKGRPFSDKMDVIIQNLSKAINDP

SEQ ID NO: 146094 - protein, 76 aa, Unknown
  Bacterial polypetide isolated from the Sargasso Sea
MASLDDLKKRIASVKSTQKITKAMKMVAAAKLRRAQESAEKGRPYSEKMNNVILNLSNGISDKENAPKLLSGTVRK

SEQ ID NO: 146095 - protein, 65 aa, Unknown
  Bacterial polypetide isolated from the Sargasso Sea
SISPFFVAEVFTGSPGKLVDLDDTIKGFDAICKGEYDHLPEAAFYMVGGIEEAIEKAEKLSKDGK

SEQ ID NO: 146096 - protein, 112 aa, Unknown
  Bacterial polypetide isolated from the Sargasso Sea
REMAAFAQFGSDLDASTQKLLNRGAKLTELLKQDQYSPMTVAEQVISVFTGVKGYLDDVELNKIKKFEGDIIDKIKSDKPEIIDEIQSTGKLDEKTEKSLSQIIEKYKTDNK

SEQ ID NO: 146097 - protein, 150 aa, Unknown
  Bacterial polypetide isolated from the Sargasso Sea
NLNFESSSKIVRIILDEFEQGKYDSVKIVYNRFKNAATQTVTIESFLPILTKKENDTSDSSLDLIDYIYEPSQEQIINQLLPKSLKIQLLKSIKDSIASEHGARMTAMHKATDNAQELRDQLKLSYNKARQASITNEILEIVGGAEALSN

SEQ ID NO: 146098 - protein, 74 aa, Unknown
  Bacterial polypetide isolated from the Sargasso Sea
EILSNLLPKNISTQIFKAMLENSASEQGSRMSAMDNATRNAGEMVDKLTIEYNRSRQAAITKELIEIISGAESL

SEQ ID NO: 146099 - protein, 257 aa, Unknown
  Bacterial polypetide isolated from the Sargasso Sea
RLVAAAKVRRAQDLVLRSRPFADRLARVLESLQSRIALEAADTPLLQARDPQHITLVAMTGDRGLCGGFNANIIKRTEQRFAELKATGHEVALILVGRKVSTYFQNRDYPITASFTGLDQLPTSADAMQVSDAIQAEFLGGATDRVELVFTKFINLVSTTPVYQTLLPLDPQGIAQADDEIFRFIAKEGESAAGASNQADKLKSDLLFEQTPSQLLDVLLPLYLQNQVLRSLQESAASELASRMTAMNNASDNAKAL

SEQ ID NO: 146100 - protein, 82 aa, Unknown
  Bacterial polypetide isolated from the Sargasso Sea
MPSLDDLKKRIKSVKSTQKITKAMKMVAAAKLRKAQESAEKGRPYSQKMQNIILNLTKSINDPQNAPKLLVGTGEDKKYLCV

SEQ ID NO: 146101 - protein, 53 aa, Unknown
  Bacterial polypetide isolated from the Sargasso Sea
NAASEQGSRMTAMDNATRNAGDLVDKLTINYNRSRQASITKELIEIISGAESL

SEQ ID NO: 146102 - protein, 91 aa, Unknown
  Bacterial polypetide isolated from the Sargasso Sea
MAAAKEIRTKIASVKNTQKITKAMEMVAASKMRKAQDRMAAARPYADKMRNVVAHIAHANAEYRHPFLIEREVSRIGVIPGVDRSWVCAVD

SEQ ID NO: 146103 - protein, 129 aa, Unknown
  Bacterial polypetide isolated from the Sargasso Sea
IIKKLGGGVRLALAHFRELAAFAQFASDLDEATRKQLERGQRVTELMKQKQYAPLTVAEMAVSLYAANEGYLDDVPADKIVDFEAALHANFVDSASDLAQKINDTGDYNDEIEGELKKFVEDFKTTGTY

SEQ ID NO: 146104 - protein, 92 aa, Unknown
  Bacterial polypetide isolated from the Sargasso Sea
DNDESKSDQTYEFEPDEDEILNILLPKNISTQIFKAMLENSASEQGARMSAMDNATRNAGEMVDKLTIEYNRSRQAAITKELIEIISGAESL

SEQ ID NO: 146105 - protein, 107 aa, Unknown
  Bacterial polypetide isolated from the Sargasso Sea
MEIKAAEISSVIKDQIANFETKADVAEVGTVLSVGDGIARVYGLDQVQAGEMVEFPGGIKGMALNLEMDNVGVSIFGDDTGIKEGDTVKRTGEIVDVPVGKELVRPC

SEQ ID NO: 146106 - protein, 186 aa, Unknown
  Bacterial polypetide isolated from the Sargasso Sea
KNILKEGKKLKIITVGGKGYDQIKTEYGKYIIERKSFKEKKKISFNEAHEIGKKIINLFEQDQFDKCLIFYNNFKNVITQIPQAEQIIPTSIKKDKLKDNNSSSYEFEPDEDEILDDLLPKNVSTQIFKAFLENAASEQGSRMTAMDNATRNAGDLVDKLTINYNRSRQASITKELIEIISGAESL

SEQ ID NO: 146107 - protein, 57 aa, Unknown
  Bacterial polypetide isolated from the Sargasso Sea
MNKEGIITQLIGAVVDVKFQNELPEIYTALEANNGGNKLILEVAQHLGENSVRTIAM

SEQ ID NO: 146108 - protein, 215 aa, Unknown
  Bacterial polypetide isolated from the Sargasso Sea
MYQFNVYRIGPEIKLGDIDLSFTNASLFMVLSALTVLIIFKLGSKKNIIIPNKIQLLAELSYSFISKMISDTAGTKAKPYFSFIFSLFMFVLFCNMLGMIPYSFTVTSHIIVTFVLAAFIFIGVTIIGFLKHGLGYLKLFVPSGVPIVLLPLIVVIEIISYLSRPISLSVRLFANMMAGHTMMKVFGGFVVSLGIVGGWLPLSFSVALTGLEILV

SEQ ID NO: 146109 - protein, 160 aa, Unknown
  Bacterial polypetide isolated from the Sargasso Sea
YGKYIIKKLSFKDRKQISFKEAEEVGKIILELFKNQEFDKCSIFYNNFKNVITQIPQAQQIIPAEKKEENKEKSEIDFYEFEPEEDEILDELLPKNISTQVFKAFLENAASEQGSRMTAMDNATRNAGDLVDKLTITYNRSRQASITKELIEIISGAESL

SEQ ID NO: 146110 - protein, 79 aa, Unknown
  Bacterial polypetide isolated from the Sargasso Sea
MSKKGKITQVIGAVVDVSFEENLPEILTALEVDNGGNKLILEVAQHLGENEVRTIAMDSTEGLKRGDQVIDTTLPISVP

SEQ ID NO: 146111 - protein, 28 aa, Unknown
  Bacterial polypetide isolated from the Sargasso Sea
STLNLTYNKARQAAITQEILEVVGGSAV

SEQ ID NO: 146112 - protein, 113 aa, Unknown
  Bacterial polypetide isolated from the Sargasso Sea
LPQFGSDLDQATQKQLQRGQRLVEILKQPQYQPMPWVDQAISIFAATNGFLDDQPINKLGKFESEFLTFIQTKKADLRKSIEEKEMIDETAETELKSALNEFAEAFSAENSST

SEQ ID NO: 146113 - protein, 49 aa, Unknown
  Bacterial polypetide isolated from the Sargasso Sea
MANEKEIRTKIGSVKNTQKITKAMEMVAASKMRRTQVTMKKALPYADKI

SEQ ID NO: 146114 - protein, 53 aa, Unknown
  Bacterial polypetide isolated from the Sargasso Sea
EVFTGSPGKYVSLKDTIRGFKGILSGEFDHIPEQAFYMVGSIDEAVEKANKKK

SEQ ID NO: 146115 - protein, 257 aa, Unknown
  Bacterial polypetide isolated from the Sargasso Sea
MPSLKDLRNRITSVKSTQRITAAMKMVAAAKLRRAQEHALAARPYAERMEDMLRSLGDSSGAGGSRLLVGTGSDKTHLLVLISADRGLCGGFNISLMRGLREAIKRLQSEGKTVQLFIVGRKGVGLARREFADLIVEVAEDISKPSPSFEAASNIADSLLQRFSKNEFDSCTVFYNKFVSALTQTVTPQQLIPFSLAEDGTESIVTASSAHEFEPSEEQILDELLPRNISMQIFRAMLESFASEQGARMTAMDNATR

SEQ ID NO: 146116 - protein, 277 aa, Unknown
  Bacterial polypetide isolated from the Sargasso Sea
MANLKEIRDRIVSVKNTRKITEAMRLVAAAKVRRAQDQVLKSRPFADKLARVLENIQSRVQFEAVDSPLLSKREVKSISLVCITADRGLCGGYNTNIIKKVEIRYAELVKQGYQPNLILVGKKAIGYFQNRKDRYVIKSTFKELEQVPTFKDSEGVTNEILAQFLSENSDRVEIIYTKFITLVSCAPVVQTLLPLDPQGIADENDEIFRLTTKDSKLLVEKSNIEKSDSEKLPSDIVFEQSPDQLLDSLLPLYLQNQVLRALKESAASELACRMTAM

SEQ ID NO: 146117 - protein, 137 aa, Unknown
  Bacterial polypetide isolated from the Sargasso Sea
ITLVSCAPVVQTLLPLDPQGIAEENDEIFRLTTKDSKLLVEKSNIEKSDSEKLPSDIVFEQSPDQLLDSLLPLYLQNQVLRALQESAASELACRMTAMNNASDNAKELASTLNLTYNKARQAAITQEILEVVGGSAV

SEQ ID NO: 146118 - protein, 261 aa, Unknown
  Bacterial polypetide isolated from the Sargasso Sea
LRRAQESAEKGRPFSEKMNNIILNLSNSISDKENASKFLVGTGKDNIQLCVIITADKGLCGGFNTNICRKARSYFEKILKEGKTLKIFTVGSKGEDQLKRAYGSYIIEKVNFKGYKKITYKDAEEVGNKIIKLFNDSQFDVCKIFYNKFKNVMTQIPQIQQIIPVENEDGEKHKNSENHYEFEPEENEILDNLLPRNISTQIFKAFLENAASEQGSRMTAMDSATRNAGELVDKLTITYNRSRQAVITKELIEIISGAESL

SEQ ID NO: 146119 - protein, 125 aa, Unknown
  Bacterial polypetide isolated from the Sargasso Sea
MDINPSEVTKILKEQIKKFGDKSEVTEIGQVLSVGDGIARIYGLDNVQAGEMVEFADGSKGMALNLESDNVGVVIFGDDRAVKEGDTVKRTGAIVDTPVGKELLGRVVDGLGNPIDGKGALDKRY

SEQ ID NO: 146120 - protein, 82 aa, Unknown
  Bacterial polypetide isolated from the Sargasso Sea
MKKGKITQVIGAVVDVKFDGDLPEILTALECKNGDNRLVLEVAQHLGESSVRTIAMDATEGLKRGDEVIDTEAPIKVPVGPE

SEQ ID NO: 146121 - protein, 144 aa, Unknown
  Bacterial polypetide isolated from the Sargasso Sea
INIFRCRGIGKQIVDLFKNKEFDKCFIFYNKFKNVISQIPQQQQVIPAKIEEKDKKQEEMSSYEFEPEEDEILDDLLPKNISTQIFKAFLENSASEQGSRMTAMDNATRNAGDLVDKLTINYNRSRQASITKELIEIISGAESL

SEQ ID NO: 146122 - protein, 79 aa, Unknown
  Bacterial polypetide isolated from the Sargasso Sea
FEQSPDQLLDSLLPLYLQNQVLRALQESAASELACRMTAMNNASDNAKELASTLNLTYNKARQAAITQEILEVVGGSAV

SEQ ID NO: 146123 - protein, 223 aa, Unknown
  Bacterial polypetide isolated from the Sargasso Sea
FLKQRPEKKRVGYIVITTDRGLCGGLNVNLFRHLVKEMQIWHQQEVGVDLCIIGKKGESFFRRHGGEVLGLANQLGDTPEITELVGVVKVMLDRFESGDLDAVYLAGNDFVNTMVQRPMIRQLLPLQPDEKESGTGYWDYLYEPDSAQEILDALLRRYIESQVYQGVIENLACEQSARMVAMKSATDNAGDIIKELKLIYNKARQSSITQEISEIVSGAAAVE

SEQ ID NO: 146124 - protein, 169 aa, Unknown
  Bacterial polypetide isolated from the Sargasso Sea
SKGYDQLKRTYKENIIEKISFKESKNANYFDADKVGKIIIDKFEKKEFDVCTIFYNQFKNVITQIPQEQQIIPLKASEAEKNSSEDNYEFEPEEDEILSNLLPKNISTQVFKAMLENSASEQGSRMSAMDNATRNAGEMVDKLTIQYNRSRQAAITKELIEIISGAESL

SEQ ID NO: 146125 - protein, 78 aa, Unknown
  Bacterial polypetide isolated from the Sargasso Sea
MRKGKITQIIGAVVDVKFDGELPEILTALECDNSGNRLVLEVAQHLGESSVRTIAMDATEGLKRGDEVTDTGAPIKVP

SEQ ID NO: 146126 - protein, 146 aa, Unknown
  Bacterial polypetide isolated from the Sargasso Sea
MEIKTDNITALLQEQIKKFDLSVDVSEVGEVIEIGDGVARVSGLEKVMSSELVELPNDVYGMALNLEDDNVGVVLFGESSHVKEGDLAKRTGKVVEVPVGNAMLGRVVNPLGQPVDGKGAIETKDFLPIERKALGVMSRSPVNQPY

SEQ ID NO: 146127 - protein, 87 aa, Unknown
  Bacterial polypetide isolated from the Sargasso Sea
MPSLDDLKKRIKSVKSTQKITKAMKMVAAAKLRKAQENAERGRPYSQKMQNIIFNLTKSISDPENAPKLLVGTGKDEVHLCVVLTAD

SEQ ID NO: 146128 - protein, 153 aa, Unknown
  Bacterial polypetide isolated from the Sargasso Sea
MSKENGVIYRISGPVVTAIGIAPRMYEVVRVGNEGLMGEVIELHGDQSVIQVYEETSGIKPGEPVIRTGQTLSVQLGPGLLTQIYDGIQRPLPKLEETMGVFITRGVDADGLDLKKKWEFNPKVSSGDEVSSGDVIGIVQETETIEHRVMVPP

SEQ ID NO: 146129 - protein, 36 aa, Unknown
  Bacterial polypetide isolated from the Sargasso Sea
RNAGEMVDKLTIEYNRSRQAAITKELIEIISGAESL

SEQ ID NO: 146130 - protein, 134 aa, Unknown
  Bacterial polypetide isolated from the Sargasso Sea
ELYFEGKFDKCILVFNKFKSAISQEVTQQQLIPLDVSNSEKEEEKENSSNAIYDYEPDEETILKDLLPKNVSIQIFKVLLESDAGEQGARMAAMDNATRNAGEMIDSLTLKYNRTRQAFITKELIEIISGAESI

SEQ ID NO: 146131 - protein, 177 aa, Unknown
  Bacterial polypetide isolated from the Sargasso Sea
PVGKKSRDFFNRVMKDQIIESFVDLNVSSTGYESALNISNKLQELYFDGKFDKCILVFNKFKSAISQEVTQQQLIPLDVSNSEKEEEKENSSNAIYDYEPDEETILKDLLPKNVSIQIFKVLLESDAGEQGARMAAMDNATRNAGEMIDSLTLKYNRTRQAFITKELIEIISGAESI

SEQ ID NO: 146132 - protein, 244 aa, Unknown
  Bacterial polypetide isolated from the Sargasso Sea
RFNTVLASLAASVGSSDSAPILLRGTGRQDVHLLIVMTAERGLCGGFNSNIAKLARSHAAKLKQSGKRLKIITVGKKGRDALKRDFGEYFVEHVDLSEFKSIKYVNAQAIAKALLARFDDSEYDVATIFYSKFVNVVTQIPTAQQIIPAIFDDQSSASDKAVYDYEPDEETILADLLPRGVATQIFAALLENGASEQGARMSAMDNATRNAGDMIDKLTIEFNRSRQAVITNELIEIISGAEAL

SEQ ID NO: 146133 - protein, 68 aa, Unknown
  Bacterial polypetide isolated from the Sargasso Sea
VRYIESLVYQAVVENGACEQAARMIAMKSATDNAGDLIDDLQLVYNKARQAAITQELSEIVSGAAAIS

SEQ ID NO: 146134 - protein, 126 aa, Unknown
  Bacterial polypetide isolated from the Sargasso Sea
MEGKIDQLFIVHNDFVNTMTQKPEIKTLLPIDPEDGEQMQEHWDYIYEPDSKELLDYILMRYIESQVYRAVVENVACEMAAKMVAMKSATDNAGKLIDQLELDYNKARQAAITQEISEIVGGAAAV

SEQ ID NO: 146135 - protein, 57 aa, Unknown
  Bacterial polypetide isolated from the Sargasso Sea
MPSLDDLKKRIKSVKSTQKITKAMKMVAAAKLRKAQENAEKGRPYSKKMESIILNLT

SEQ ID NO: 146136 - protein, 197 aa, Unknown
  Bacterial polypetide isolated from the Sargasso Sea
YTNIVKQAKNYFNKILKESKNLKIITVGTKGLDQLKREYGKYIVKKIDFKNKKKISFKDASLVGDEIVKLFKNNEFDKCIIFYNKFKNVMTQIPQSQQLIPAKKVEDTKTDQESSYDFEPEEDEILEDLLPKNISTQIYKGFLENSASEQGSRMTAMDNATRNAGDLVEKLTINYNRSRQAAITKELIEIISGAESL

SEQ ID NO: 146137 - protein, 157 aa, Unknown
  Bacterial polypetide isolated from the Sargasso Sea
ILAEFLSENSDRVEIIYTKFITLVSCAPVVQTLLPLDPQGIAEENDEIFRLTTKDSKLLVEKSNIEKSDSEKLPSDIVFEQSPDQLLDSLLPLYLQNQVLRALQESAASELACRMTAMNNASDNAKELASTLNLTYNKARQAAITQEILEVVGGSAV

SEQ ID NO: 146138 - protein, 272 aa, Unknown
  Bacterial polypetide isolated from the Sargasso Sea
KILSGVVRPDKGEVFLNDESIKLNSPLDAKKNNIGMVFQHFNLFETLSVFENLSIDSDKKNEDLRLSVNNILKKYNFRIDLDIPVLNLSAGQKQKVEIIRCLIRNPKVLIMDEPTSVLTEQETEDLFVSLKQFSDEGILIIYITHKLKEVLSLCDEVAVMRKGKVVSVSKTKEEKIETLANKMVGENLSTVKKKNNNFKFSEEILKISNLNFRSDDPYETNLINLNFSIKKGECLGIAGISGNGQSELFQILSGEIITEYTSIKFRDKEISK

SEQ ID NO: 146139 - protein, 123 aa, Unknown
  Bacterial polypetide isolated from the Sargasso Sea
MTAAAIEQLDVQEIYGRVTKVLGLLVEIAGFGSGISIGSIVHLRPDHAGAPDDIPCEVIGFRDGHALLMPFGTLEGVGLGCKAVLQKTQSVILPDERWLGRVINALGQPIDGKGPLPKGGYPV

SEQ ID NO: 146140 - protein, 125 aa, Unknown
  Bacterial polypetide isolated from the Sargasso Sea
PNKNVYQGEAEEVILPSTTGQIGVLPGHISLVTAIDIGVLRLRMNSQWKSIALMGGFAEIESDEVIVLVNNAEIGSEINVQNAEQDLKEAKLAISKFSENEKNPEKIKALKEVSKAEARIQAAKN

SEQ ID NO: 146141 - protein, 263 aa, Unknown
  Bacterial polypetide isolated from the Sargasso Sea
KAMKMVAAAKLRKAQENAEKGRPYSEKMRNIINNLANSITEKETAPKLIAGTGQDKTYLCVLMTADRGLCGGFNTNICRLAKTNFQKILKEGKTLKIITVGTKGLDQIKRDYGKYVIKKLSFKERKKISFLEAEEVGQIILDLFHKNEFDKCILFYNNFKNVITQIPQAQQIIPAKKEKSSSESTTDDFYEFEPEEDEILENLLPKNISTQIFKAFLENAASEQGSRMTAMDNATRNAGELVEKLTINYNRTRQASITKELMK

SEQ ID NO: 146142 - protein, 112 aa, Unknown
  Bacterial polypetide isolated from the Sargasso Sea
ELAAFAQFASDLDEATRKQLERGQRVTELMKQKQYAPLTVAEMAVSLYAANEGYLDDVPADKIVDFESALHASFTDGASDLAQKINETGDYNEEIEADLKKFVEDFKSTGTY

SEQ ID NO: 146143 - protein, 239 aa, Unknown
  Bacterial polypetide isolated from the Sargasso Sea
MYQFNVYRIGPEIKLGSVDISFTNASLFMVISTLAVLIIFNLGAKKKSLIPDKIQLLAELSYSFVSKMISDTAGSKAKPYFSFIFSLFMFVLFCNMFGMIPYSFTVTSHIIVTFALAAFIFIGVTIIGFIKHGLGYLKLFVPSGVPIVLLPLIVIIEIISYLSRPVSLSVRLFANMMAGHTMMKVFGGFVISLGIIGGWLPLSFSVALTGLEILVAFLQAYVFAILTCIYLNDALNLHH

SEQ ID NO: 146144 - protein, 131 aa, Unknown
  Bacterial polypetide isolated from the Sargasso Sea
MVIEKFEAGEFDVCTIFYNQFKNVITQIPQAQQIIPLNNEGEENSSEESYEFEPDEDEILSNLLPKNISTQIFKAMLENSASEQGSRMSAMDNATRNAGEMVDKLTIEYNRSRQAAITKELIEIISGAESL

SEQ ID NO: 146145 - protein, 117 aa, Unknown
  Bacterial polypetide isolated from the Sargasso Sea
MSKGIITQVIGAVVDVKFDGELPEILTALECKNGDNRLVLEVAQHLGETTVRTIAMDATEGLKRGDEVINTNAPIQVPVGPETLGRIINVIGEPIDERGEVKTKESWPIHRAAPEFY

SEQ ID NO: 146146 - protein, 119 aa, Unknown
  Bacterial polypetide isolated from the Sargasso Sea
MCNFYNQFKNVITQIPQEHQIIPLKASESEGSSLENNYEFEPEEDEILSNLLPKNISTQIFKAMLENSASEQGSRMSAMDNATRNAGEMVDKLTIQYNRSRQAAITKELIEIISGAESL

SEQ ID NO: 146147 - protein, 149 aa, Unknown
  Bacterial polypetide isolated from the Sargasso Sea
MTINPSEVTKLLKDQIKNFGEKAEVSEIGKVLSVGDGIARVFGLDNVQAGEMVEFEDGSKGMALNLENDNVGVVIFGDDRNIKEGDTIKRTNAIVDVPVGKELLGRVVDGLGNAIDGKGPISVKNRKRVEVKAPGIIPRQSVNEPMQTG

SEQ ID NO: 146148 - protein, 167 aa, Unknown
  Bacterial polypetide isolated from the Sargasso Sea
MEINPSEVTKILKEQIKKFGDKAEVTEVGQVLSVGDGIARIYGLDNVQAGEMVEFSDGSKGMALNLESDNVGVVIFGDDRAVKEGDTVKRTGAIVDTPVGKELLGRVVDGLGNPIDGKGALDKSIKKSRVEVKAPGIIPRKSVNEPMQSGLKSVDSLVPIGERSKGN

SEQ ID NO: 146149 - protein, 214 aa, Unknown
  Bacterial polypetide isolated from the Sargasso Sea
YLCVVITADRGLGGGFNSNICKLAKSHFKKILKEGKELKIITVGSKGHDQIKSEYGDYIIHKKSFKEKKQITFKEANEIGKKVIELYEQEQFDKCLIFYNNFKNVITQIPQAEQIIPTFIKQEDKNKDKVLFYEFEPDEDEILEELLPKNVSIQILKAFLENAASEQGSRMTAMDNATRNAGDLVDKLTINYNRSRQASITKELIEIISGAESL

SEQ ID NO: 146150 - protein, 102 aa, Unknown
  Bacterial polypetide isolated from the Sargasso Sea
MQINPSEVTKLLKEQIKRFGEKAEVSEIGKVLSVGDGIARVYGLDNVQAGEMVEFDDGSKGMALNLENDNVGVVIFGDDRKIKEGDTVKRTNSIVDVPVGKE

SEQ ID NO: 146151 - protein, 124 aa, Unknown
  Bacterial polypetide isolated from the Sargasso Sea
MYSGDIQFVVVPGEEGELGIYPKHIPLITRIKPGSLRFKNSNNEDEVIVVAGGILEVQPNLVTVLADTAIRANDIDQKRSEEAKQIAEAKLKNNPDDIDLAKAHAELAFAIAELTAIKKYRGKK

SEQ ID NO: 146152 - protein, 244 aa, Unknown
  Bacterial polypetide isolated from the Sargasso Sea
NTRKITEAMRLVAAAKVRRAQEQVLRSRPFADRLARILENLQSRMRFEDASSPLMEQRDVETISLVSVTGDRGLCGGYNANIIKRTEQRFAELTGKGFNVKLVLIGNKAIGYFTKRDYPVQATFSGLEQVPTADEANTISTDVLAEFIGAGTDRVELIFTKFINLVSCKPVVQTLLPLDPQDIADPEDEIFRLTTKDGRLTVEPGAGPANTEPKIPSDIVFEQTPEQLLNALLPLYLQNQMLRS

SEQ ID NO: 146153 - protein, 286 aa, Unknown
  Bacterial polypetide isolated from the Sargasso Sea
MSGLKEIRNRISSVSSTMQITNAMKMVSAAKLKKAQDSISATLPYSNKLSELIKNISASTDSDDTNPLFEKRELKNLLIIAITSNKGLCGGFNSNIIKEVNNIKTTSAFKTVDLLTIGKKGDDILSKKFEVISSHNDVYDNFNYNNIKEIAETVMQKFSDKEYDEVTLVYNHFKNAATQIVTKEQYLPIEESVDENNSVSGDYIFEPNRPKILNELIPKSLSIQLFKAISDSIAGEHGARMTAMHKATDNASELRDQLKLTYNKARQTAITNEILEIVGGAEALNS

SEQ ID NO: 146154 - protein, 67 aa, Unknown
  Bacterial polypetide isolated from the Sargasso Sea
MPSLDDLKKRIKSVKSTQKITKAMKMVAAAKLRKAQENAEKGRPYSQKMQNIILNLTRSISDPQNAP

SEQ ID NO: 146155 - protein, 107 aa, Unknown
  Bacterial polypetide isolated from the Sargasso Sea
MAISLKVLAPNKNVYQGEAEEVILPSTTGQIGVLPGHISLVTAIDIGVLRLRMNSQWKSIALMGGFAEIESDEVIVLVNNAEIGSEINVQNAEQDLKEAKLAISKFS

SEQ ID NO: 146156 - protein, 188 aa, Unknown
  Bacterial polypetide isolated from the Sargasso Sea
MSGGKEIKGQISSIKNTQKITKAMEMVAASKMKKAQSRMAAARPYAKMIKNVVGHLASAHPEYKHPFLVKREKVKRVGLIIISTDRGLCGGLNTNLFKQALKQINEWNKNSIEVDVCAIGSKAEKFFKRLNVNLVAQVSHLGDSPEINDVIGSIKIMLDNFTDKKIDELHLAENKFINTMSQEPGLIN

SEQ ID NO: 146157 - protein, 84 aa, Unknown
  Bacterial polypetide isolated from the Sargasso Sea
LGMDELSEEDKLAVNRARKIQRYLSQPFYVAETFTGTPGKYVSLSETIKGFQAIVNGDYDHLPEQAFYMIGEISEAEKKADEVK

SEQ ID NO: 146158 - protein, 70 aa, Unknown
  Bacterial polypetide isolated from the Sargasso Sea
MASLDDLKKRIASVKSTQKITKAMKMVAAAKLRRAQESAEKGRPYSEKMNNIILNLSNGISDKENAPKLL

SEQ ID NO: 146159 - protein, 77 aa, Unknown
  Bacterial polypetide isolated from the Sargasso Sea
MSKEGKITQIIGAVVDVNFEGDLPEIYTALEANNAGNKLILEVAQHLGENDVRTIAMDATEGLKRGDKVINTGSPNK

SEQ ID NO: 146160 - protein, 242 aa, Unknown
  Bacterial polypetide isolated from the Sargasso Sea
MASGKEIKSKIGSIKNTQKITSAMEMVAASKMKKAQERVASSRPYAEKLRKVIGRVAQANLDFTHPFLEEREVKRVGYIVISTDRGLCGGLNSNEFKKVALEIKAWKEKGVDADFATLGSKAAGFFQRFGGQVLAKKAGLGDKPSVQDVIGPVKIMLDAFSEGKIDRLFLVYNNFVNTMKQEPIVDQLLPLPKAEEEVSTHAWDYLYEPNPEAILESLLVRFIESQVYQGVVENAASEQAAR

SEQ ID NO: 146161 - protein, 230 aa, Unknown
  Bacterial polypetide isolated from the Sargasso Sea
MANLKEIRDRIKSVKNTRKITEAMRLVAAAKVRRAQEQVLRSRPFADRLARVLENLQSRMRFEDADAPLMEQRDVETITLVSVTGDRGLCGGYNANIIKRTEQRFAELKGKGFEVKLVLIGNKAINYFTNRSYPIQATFSGLEQVPTADEANGIATDLLAEFLAAATDRVELIFTKFINLVSCKPVVQTLLPLDPQDIADPEDEIFRLTTKDGRLTVEPGAGPVNTEPKL

SEQ ID NO: 146162 - protein, 38 aa, Unknown
  Bacterial polypetide isolated from the Sargasso Sea
LILPIPVMFLGLFTSAIQALIFATLAAYYIGEAVEEHH

SEQ ID NO: 146163 - protein, 116 aa, Unknown
  Bacterial polypetide isolated from the Sargasso Sea
MDIRAAEISTILKDQIENFDADAEVTEVGKVLSVGDGIARVYGLDQIQAGEMVEFPGGIAGMALNLERDNVGVVIFGSDKTIKEGDVVKRTGSIVDVPIGKGLLGRVVDALGNPID

SEQ ID NO: 146164 - protein, 44 aa, Unknown
  Bacterial polypetide isolated from the Sargasso Sea
MPSLDDLKKRIKSVKSTQKITKAMKMVAAAKLKKAQEKAEKGRP

SEQ ID NO: 146165 - protein, 256 aa, Unknown
  Bacterial polypetide isolated from the Sargasso Sea
MNRLPFTAQNPLEQFELTPLLDIYSSSVDLSFTNSSLITLMAITFFVLLARLVFYTGNGTVIPNRWQSVLESMYELVAGLLNDNVGTRGQGYFPFIFTLFAFLLMVNLIGMVPYSYTITSQLIVTLLFSGMVYIGVTIIMVRTHGFHTLSVFLPGGAPFALYPLLIPIEIISNVMRVVSLAVRLFANMMAGHILLKVLLGFAWTMMMAQGIMFILHMIPMGVVFALLFLETGVAVIQAYVFVTFTCIYLNEAINLH

SEQ ID NO: 146166 - protein, 79 aa, Unknown
  Bacterial polypetide isolated from the Sargasso Sea
MSKKGKITQIIGAVVDVNFDGDLPEIYTALEVNNSGNKLILEVAQHLGENDVRTIAMDATEGLKRGDEVTNTGSPISVP

SEQ ID NO: 146167 - protein, 109 aa, Unknown
  Bacterial polypetide isolated from the Sargasso Sea
CITQIPQEQQIIPLKTIDEETNPSDDNYEFEPEEDEILSNLLPKNISTQIFKAMLENSASEQGSRMSAMDNATRNAGEMVDKLTIEYNRSRQAAITKELIEIISGAESL

SEQ ID NO: 146168 - protein, 73 aa, Unknown
  Bacterial polypetide isolated from the Sargasso Sea
MANNLTGKISQVLGAVVDIEFESELPAIMNALEVDNNGTRLVLEVAQHLGENAVRTIAMDTTDGLVRGQTATD

SEQ ID NO: 146169 - protein, 150 aa, Unknown
  Bacterial polypetide isolated from the Sargasso Sea
MPSLDDLKKRIVSVKSTQKITKAMKMVAAAKLKKAQDSAERSRPYSEKMQNIILNLTKSISDPENAPKLLVGTGNDKTYLCVVMTADKGLCGGFNSNICKLAKNFFEKIIKEGKNLKIIVVGSKGLDQLKRNYGKYIIKKMSFKDKKKLT

SEQ ID NO: 146170 - protein, 110 aa, Unknown
  Bacterial polypetide isolated from the Sargasso Sea
AFAQFGSDLDASTQKLLNRGSKLTELLKQNQYSPMTVAEQVISVFAGVNGYLDDVELDQIKIFETEIIDKIKSSKADLIKSIQISGKIDEDIEQSLKKIIEEYKKTKKNA

SEQ ID NO: 146171 - protein, 53 aa, Unknown
  Bacterial polypetide isolated from the Sargasso Sea
MPSLDDLKKRIKSVKSTQKITKAMKMVAAAKLRKAQESAEKGRPYSQKMQNII

SEQ ID NO: 146172 - protein, 270 aa, Unknown
  Bacterial polypetide isolated from the Sargasso Sea
MPSLDDLKKRIGSVKSTQKITKAMKMVAAAKLRRAQESAESSRPYSETMEDLISSISSGYSPTSSERNLLTGDNKDSIHMLILFTSERGLCGGFNSIVTKSLRDKIASLEESGKQVKIICVGKKGYDIIKRQHEDKIVEVVDMRSVKSASYQDAKNIADKIIKMYFDEEFDKCSIFYNKFKSVISQIPTEQQIVPIDMPENEPDTTKNDNTFFEFEPSESEILDELLPLNFTIQIFKALLESAASEQGARMSAMDNASRNASDMIDNLTL

SEQ ID NO: 146173 - protein, 188 aa, Unknown
  Bacterial polypetide isolated from the Sargasso Sea
EKEGKQVDLITIGKKSRDFFNRLMKSKILESFVDLGATGAGYSTALEISNKIQNLFFDNKFDICVLVYNKFVSAINQEVSRHQLIPLDINSKDEKKDDGSNNDTSIYTYEPDETSILQDLLPKNVSIQIFKVLLESNAGEQGARMAAMDNATRNAGEMIDALTLKYNRTRQAFITKELIEIISGAEAV

SEQ ID NO: 146174 - protein, 284 aa, Unknown
  Bacterial polypetide isolated from the Sargasso Sea
IKSVKNTSQITKAMEKVAQAKMPRAQQAALAGRSYADLMNRVLAEVVTHAGDFDHPFMESRGGDKRALILVTTDKGLCGALNTNLLRKVSDEFVTDNTRVLSAGRKGAQHATRAGWDLAAEFSYGDPPTIGEARALAKMAVELFEDGEVDHVDIAFTNFINTITQKPEVQTLLPITEIKGVSAGVEGEETSTDLPGGTTEFLFEPSAEGVLGELLPHYLNFQVHQILLENRASEHSARMVAMKNATDNANELIKDLTLEYNKLRQAAITNELLEITTAQMALGN

SEQ ID NO: 146175 - protein, 235 aa, Unknown
  Bacterial polypetide isolated from the Sargasso Sea
MHQFNVYRIGPEIKLGEVDISFTNASLFMVISSIAILVIFNLGSKKNSLIPDKIQLLAELSYSFISKMISDTAGSKAKPYFSFIFSLFMFVLFCNMFGMIPYSFTVTSHIIVTFVLASFIFLGVTIIGFVKHGLGYLKLFVPSGVPIVLLPLIVVIEIISYLSRPISLSVRLFANMMAGHTMMKVFGGFVVSLGIIGGWLPLSFSVALTGLEILVAFLQAYVFAILTCIYLNDAL

SEQ ID NO: 146176 - protein, 63 aa, Unknown
  Bacterial polypetide isolated from the Sargasso Sea
MASLDDLKKRIASVKSTQKITKAMKMVAAAKLRRAQESAEKRRPYSEKMNNVILNLSSGISDK

SEQ ID NO: 146177 - protein, 71 aa, Unknown
  Bacterial polypetide isolated from the Sargasso Sea
TYLLTRYVESLVYQGVVENIACEQAARMVAMKSASDNAGKLIDELQLVYNKARQAAITQELSEIVGGAAAV

SEQ ID NO: 146178 - protein, 152 aa, Unknown
  Bacterial polypetide isolated from the Sargasso Sea
KFSFKDRKQISFDDAKIIGDEIINLFNNNEFDRCILFYNNFKNVITQIPQAQQIIPAENNSNLNEENNQFYEFEPEEDEILEDLLPKNISTQIFKAFLENAASEQGSRMTAMDNATRNAGDLVDKLTINYNRSRQASITKELIEIISGAESL

SEQ ID NO: 146179 - protein, 226 aa, Unknown
  Bacterial polypetide isolated from the Sargasso Sea
GGYNTNIIKKVEIRYAELVKQGYQPNLILVGKKAIGYFQNRKDRYVIKSTFKELEQVPTVKDSEGVTNEILAEFLSENSDRVEIIYTKFITLVSCAPVVQTLLPLDPQGIAEENDEIFRLTTKDSKLLVEKSNIEKSDSEKLPSDIVFEQSPDQLLDSLLPLYLQNQVLRALQESAASELACRMTAMNNASDNAKELASTLNLTYNKARQAAITQEILEVVGGSAV

SEQ ID NO: 146180 - protein, 160 aa, Unknown
  Bacterial polypetide isolated from the Sargasso Sea
YFSFIFSLFMFVLFCNMFGMIPYSFTVTSHIIVTFVLAAFIFIGVTIIGFIKHGVGYLKLFVPSGVPIVLLPLIVVIEIISYLSRPISLSVRLFANMMAGHTMMKVFGGFVISLGIVGGWLPLSFSVALTGLEILVAFLQAYVFAILTCIYLNDALNLHH

SEQ ID NO: 146181 - protein, 82 aa, Unknown
  Bacterial polypetide isolated from the Sargasso Sea
DIVFEQSPDQLLDSLLPLYLQNQVLRALQESAASELACRMTAMNNASDNAKELASSLNLTYNKARQAAITQEILEVVGGSAV

SEQ ID NO: 146182 - protein, 47 aa, Unknown
  Bacterial polypetide isolated from the Sargasso Sea
GARMAAMDNATRNAGEMIDSLTLKYNRTRQAFITKELIEIISGAESI

SEQ ID NO: 146183 - protein, 60 aa, Unknown
  Bacterial polypetide isolated from the Sargasso Sea
MPSLDDLKKRIKSVKSTQKITKAMKMVAAAKLRKAQESAEKGRPYSQKMQNIIFKSHKIY

SEQ ID NO: 146184 - protein, 78 aa, Unknown
  Bacterial polypetide isolated from the Sargasso Sea
MASLDDLKKRIASVKSTQKITKAMKMVAAAKLRRAQESAEKGRPYSEKMNNVILNLSNGISDKENAPKLLSGTGQEKT

SEQ ID NO: 146185 - protein, 91 aa, Unknown
  Bacterial polypetide isolated from the Sargasso Sea
MPSLDDLKKRIGSVKSTQKITKAMKMVAAAKLRRAQESAESSRPYSDTMNEVIGSISNKVVSTSSERNLLTGTGDDQVQLLILFTSERGLC

SEQ ID NO: 146186 - protein, 73 aa, Unknown
  Bacterial polypetide isolated from the Sargasso Sea
MAGGKEVRTKIASVKNTQKITKAMEMVAASKMRKAQDRMLAARPYSEKIRNVISHLAHANPEYKHPYLVTREE

SEQ ID NO: 146187 - protein, 134 aa, Unknown
  Bacterial polypetide isolated from the Sargasso Sea
MSNGVVTQIIGAVIDVEFDRENIPSVYEALNIVGLETVLEVQQQLGDGIVRTIAMGSTEGLKRGLEVVRTNAPISVPVGQETLGRIMDVLGNPIDEKGDIGEKERQPIHKSPPSYTDQAGSNELLETGIKVIDL

SEQ ID NO: 146188 - protein, 110 aa, Unknown
  Bacterial polypetide isolated from the Sargasso Sea
NVITQIPQEQQIIPLKSTESEGSTSEDNYEFEPEEDEILSNLLPKNISTQIFKAMLENSASEQGSRMSAMDNATRNAGEMVEKLTIQYNRSRQAAITKELIEIISGAESL

SEQ ID NO: 146189 - protein, 126 aa, Unknown
  Bacterial polypetide isolated from the Sargasso Sea
KNEFDKCILFYNNFKNVITQIPQAQQIIPAENKSADLKKNDTLSYEFEPDEDEILEDLLPKNISTQVFKAFLENAASEQGSRMTAMDNATRNAGDLVDKLTINYNRSRQASITKELIEIISGAESL

SEQ ID NO: 146190 - protein, 81 aa, Unknown
  Bacterial polypetide isolated from the Sargasso Sea
MPSLDDLRKRITSVKSTQKITKAMKMVAAAKLRKAQENAEKGRPYSEKMNKIILNLSKSINNNENAPKIISWKWKQPIYIY

SEQ ID NO: 146191 - protein, 180 aa, Unknown
  Bacterial polypetide isolated from the Sargasso Sea
MPSLKDLKNRIGSVKSTQKITSAMKMVAAAKLRKAQEQALASRPYTSLIDSVVSKISHKAIGSSIDLLSGKEEIKTHLLVVFSADRGLCGGFNGSITRTVRSEINKLKDDGINVKLLMVGKKSADALNREFGDLFVEKIDGNSAKPNYTDAEVLAKKIIDLFKNNEFGTCRVIFNKFVSA

SEQ ID NO: 146192 - protein, 66 aa, Unknown
  Bacterial polypetide isolated from the Sargasso Sea
MASLDDLKKRIASVKSTQKITKAMKMVAAAKLRRAQESAEKGRPYSEKMNNVILNLSKGISDKENA

SEQ ID NO: 146193 - protein, 223 aa, Unknown
  Bacterial polypetide isolated from the Sargasso Sea
MAANPMYQFNVYRIGPEIKIGEIDLSFTNASLFMVISSLAILIIFNLGAQKKNIIPDKIQLLSELSYTFVSKMISDTAGSKAKPYFSFIFSLFMFVLFCNMFGMIPYSFTVTSHIIVTFVLAAFIFMGVTIIGFIKHGFGYLKLFVPSGVPAVLLPLIVVIEIISYLSRPISLSVRLFANMMAGHTMMKVFGGFVVSLGIVGGWLPLSFSVALTGLEILVAFL

SEQ ID NO: 146194 - protein, 178 aa, Unknown
  Bacterial polypetide isolated from the Sargasso Sea
KILKIMTVGSKGYDQLKRTYKDNIIEKISFKDSKYANYFDAEKVGNKIINKFEKKEFDVCTIFYNKFKNVITQIPQEQQIIPLKTSDNEGSSSENNYEFEPEEDEILSNLLPKNISTQIFRAMLENSASEQGSRMSAMDNATRNAGEMVDKLTIQYNRSRQAAITKELIEIISGAESL

SEQ ID NO: 146195 - protein, 87 aa, Unknown
  Bacterial polypetide isolated from the Sargasso Sea
MASLDDLKKRIASVKSTQKITKAMKMVAAAKLRRAQESAEKGRPYSEKMNNVILNLSNGISDKENAPKLLSGTGQEKTHLCVVMTSD

SEQ ID NO: 146196 - protein, 90 aa, Unknown
  Bacterial polypetide isolated from the Sargasso Sea
MPSLDDLKKRISSVKSTQKITKAMKMVASAKLRKAQENAEKGRPFSEKMNNIILNLSSSITDKDNASKFLIGTGKDDVHLCVVITADRGL

SEQ ID NO: 146197 - protein, 133 aa, Unknown
  Bacterial polypetide isolated from the Sargasso Sea
SNYVINEFHNSEFDTVKVYFNKFQSIISQIPTAQGLIPASVDNKENESFVSFEYEPDEDAILSELLPKAITTRIYTALLENAASEQGARMSAMDNATRNAGEMIDKLTIQFNRSRQAAITNELIEIISGAEAL

SEQ ID NO: 146198 - protein, 145 aa, Unknown
  Bacterial polypetide isolated from the Sargasso Sea
MEIKTDQITALLKEQLEKYDNSVDVSEVGEIIEVGDGVARASGLENVMSSELVELPNDVFGMALNLEEDNVGLVLFGETRLVKEGDIAKRTGRVVEVPVGKEMLGRVVNPLGQPLDGKGPINSSSTLPIERKALGVMARSPVNEP

SEQ ID NO: 146199 - protein, 201 aa, Unknown
  Bacterial polypetide isolated from the Sargasso Sea
GSFNSSICKSAPNFFKKILSENKDLKIITIGSKGYDQLKREYGKFIIQKISYKDKKNISFKEADEVSKIIIDLFNDNKFDKCHIFFNNFKNVITQVPQNLQIIPTHQISNKEENKDSDPYEFEPEEKDILEDLLPKNIATQVYTAFLENAASEQGSRMTAMDNATRNAGDLVDKLTINYNRSRQAAITKELIEIISGAESL

SEQ ID NO: 146200 - protein, 60 aa, Unknown
  Bacterial polypetide isolated from the Sargasso Sea
MNKEGIITQLIGAVVDVKFEGDLPEIYTALEVNNGSNKLILEVAQHLGESSVRTIAMDAT

SEQ ID NO: 146201 - protein, 187 aa, Unknown
  Bacterial polypetide isolated from the Sargasso Sea
YFNKILKDSKNLKIITVGTKGLDQLKRDYGKYIIKKINFKEKKKLSFKDAELIGNEIVKLFKNNEFDKCVIFFNKFKNVMTQIPQKQQVIPAKKDEKSKSEEHFSYEFEPEEDEILEDLLPRNISTQIYKGFLENSASEQGSRMTAMDNATRNAGDLVEKLTINYNRSRQAAITKELIEIISGAESL

SEQ ID NO: 146202 - protein, 134 aa, Unknown
  Bacterial polypetide isolated from the Sargasso Sea
MAISLKVLAPNQNVYQGEADEVILPSTTGQIGVLPGHISLVTAIDIGVLRLRVNSQWKSIALMGGFAEIESDEVIVLVNSAEIGSEINIQNAEDALKVAKSAISKFPENEKSPDKIKALNEISKAEARIQASKN

SEQ ID NO: 146203 - protein, 151 aa, Unknown
  Bacterial polypetide isolated from the Sargasso Sea
ISFKDSKNVNYFDADKVGKIVIEKFEKKEFDVCAIFYNQFKNVITQIPQEQQIIPLKTSEKEENSSEDNYEFEPEEDEILSNLLPKNISTQIFKAMLENSASEQGSRMSAMDNATRNAGEMVDKLTIEYNRSRQAAITKELIEIISGAESL

SEQ ID NO: 146204 - protein, 125 aa, Unknown
  Bacterial polypetide isolated from the Sargasso Sea
MRKGQITQIIGAVVDVKFDGELPEILTALECNNGGNRLVLEVAQHLGESSVRTIAMDATEGLKRGDEVTDTAAPIKVPVGPETLGRIINVIGEPIDERGEVKSSDNWPIHRAAPEFNDQSTETEI

SEQ ID NO: 146205 - protein, 159 aa, Unknown
  Bacterial polypetide isolated from the Sargasso Sea
IKDNIIDKISFKNSKNANYFDADKVGKIIIERFEKKEFDVCTIFYNQFKNVITQIPQEQQIIPLKSEENAEKDLVDNYEFEPEEDEILSNLLPKNISTQIFKAMLENSASEQGSRMSAMDNATRNAGEMVDKLTIEYNRSRQAAITKELIEIISGAESL

SEQ ID NO: 146206 - protein, 119 aa, Unknown
  Bacterial polypetide isolated from the Sargasso Sea
MSINPSEVTKLLKDQIKNFGEKAEVSEIGKVLSVGDGIARVYGLDNVQAGEMVEFEDGSKGMALNLENDNVGVVIFGDDRKIKEGDTIKRTNAIVDVPVGKELLGRVVDGLGNPIDGKG

SEQ ID NO: 146207 - protein, 168 aa, Unknown
  Bacterial polypetide isolated from the Sargasso Sea
GHDQIKTEYSKYIIDKKSFKDKKQISFKEANEIGTKVIELYEQEQFDKCFIFYNNFKNVITQIPQAEQIIPTFIKKDEKTKDHIFSYDFEPDEDEILDDLLPKNVSVQIFKAFLENAASEQGSRMTAMDNATRNAGDLVDKLTINYNRSRQASITKELIEIISGAESL

SEQ ID NO: 146208 - protein, 52 aa, Unknown
  Bacterial polypetide isolated from the Sargasso Sea
MNKEGVITQLIGAVVDVKFKDELPEIYTALETNNGGNKLILEVAQHLGENSV

SEQ ID NO: 146209 - protein, 199 aa, Unknown
  Bacterial polypetide isolated from the Sargasso Sea
MGAVSPPGGDISEPVSQGTLRIVKVFWGLDAGLARKRHFPAINWLNSYSLYPQSLNQWFRDNIASDFPEVRTEISALLKVEAELQEIVQLVGSDALPIDQQLTLEVARMIREYFLQQNGFDPVDAYSGVEQQYAMAKAILTFQNEAKKAMAAGARLQDVVNVPSRTELMRARFAEGYLENIGGLVEDMVGEITGTVEAN

SEQ ID NO: 146210 - protein, 276 aa, Unknown
  Bacterial polypetide isolated from the Sargasso Sea
MASLDDLKKRIAIVKSTQKITKAMKMVAAAKLRRAQESAEKGRPYSEKMNNVILNLSNGISDKENAPKLLSGTGQEKTHLCVVMTSDRGLCGGFNSNIIKKTKSYFAKILDEGKELKIITVGSKGNDQLKRVYGDKIIENISFKESKNANYFDADKVGKMVIEKFEAGEFDVCTIFYNQFKNVITQIPQAQQIIPLNNEGEESSSEESYEFEPDEDEILSNLLPKNISTQIFKAMLENSASEQGSRMSAMDNATRNAGEMVDKLTIEYNRSRQAAI

SEQ ID NO: 146211 - protein, 81 aa, Unknown
  Bacterial polypetide isolated from the Sargasso Sea
EFEPEEDEILTNLLPKNISTQIFKAMLENSASEQGSRMSAMDNATRNAGEMVDKLTIQYNRSRQAAITKELIEIISGAESL

SEQ ID NO: 146212 - protein, 157 aa, Unknown
  Bacterial polypetide isolated from the Sargasso Sea
YVIKKFSFKNKKQITFNEAEIIGKEIINLFIQNQFDKCILFYNNFKNVITQIPQAQQIIPAENSSSKDKEENLTSYEFEPEEDEILEDLIPKNISTQVFKAFLENAASEQGSRMTAMDNATRNAGELVDKLTINYNRSRQASITKELIEIISGAESL

SEQ ID NO: 146213 - protein, 246 aa, Unknown
  Bacterial polypetide isolated from the Sargasso Sea
CRPYAKMIKNVVGHLANAHPEYKHPFLVQRDSVKRVGLIIISTDRGLCGGLNTNLFKQALKKINEWKKNSIEVDVCAIGSKAERFFKRLDVNLVAQVSHLGDSPEINDVIGSIKIMLDNYIEGNIDELHLAENKFINTMSQEPGVTHLIPTEPSQEDERSHHWDYIYEPDSKSVIDNLLVRYVESLVYRGIVENVACEMSARMVAMKSASDNASNLIDELQLIYNKARQASITQELSEIVAGAAAV

SEQ ID NO: 146214 - protein, 56 aa, Unknown
  Bacterial polypetide isolated from the Sargasso Sea
MSTGKIVQVIGAVVDVEFAKDSIPQVYDALKVDEAGLTLEVQQQLGDGIVRTIAMG

SEQ ID NO: 146215 - protein, 68 aa, Unknown
  Bacterial polypetide isolated from the Sargasso Sea
MPQNISTQIFKAMLENSASEQGSRMSAMDNATRNAGEMVDKLTIQYNRSRQAAITKELIEIISGAESL

SEQ ID NO: 146216 - protein, 100 aa, Unknown
  Bacterial polypetide isolated from the Sargasso Sea
MEIKAAEISSVIKDQIANFETKADVAEVGTVLSVGDGIARVYGLDQVQAGEMVEFPGGIKGMALNLEMDNVGVSIFGDDTGIKEGDTVKRTGEIVDVPVG

SEQ ID NO: 146217 - protein, 76 aa, Unknown
  Bacterial polypetide isolated from the Sargasso Sea
MASLDDLKKRIASVKSTQKITKAMKMVAAAKLRRAQESAEKGRPYSEKMNNVILNLSNGISDKENAPKLLSGTGQE

SEQ ID NO: 146218 - protein, 51 aa, Unknown
  Bacterial polypetide isolated from the Sargasso Sea
PGKLVDLDSTIKGFDAICKGEYDHLPEAAFYMVGGIEEVVEKAEKMSKDNK

SEQ ID NO: 146219 - protein, 102 aa, Unknown
  Bacterial polypetide isolated from the Sargasso Sea
MVAQGKIVWISGPAVKADGMADAKMYETVSVGDAKLIGEVIRLTGDVAFIQVYESTSGLKPGEPVVGTGNPLSVLLGPGIIGQIYDGIQRPLKDLADKSGSF

SEQ ID NO: 146220 - protein, 50 aa, Unknown
  Bacterial polypetide isolated from the Sargasso Sea
MPSLDDLKKRISSVKSTQKITKAMKMVAAAKLRRAQENAEKGRPYSEKNE

SEQ ID NO: 146221 - protein, 43 aa, Unknown
  Bacterial polypetide isolated from the Sargasso Sea
VFLVPLILPIPVMFLGLFTSAIQALIFATLAAYYIGEAVEEHH

SEQ ID NO: 146222 - protein, 233 aa, Unknown
  Bacterial polypetide isolated from the Sargasso Sea
MAGMKEIRGKIKSVQNTRKITKAMEMVAASKMRRAQERMRAARPYADKVRDIAAHMSRANPEYRHPFMVSNEGAKTAGIILVTTDKGLCGGMNTNVLRASLQKFKELEGQGKTIEATAIGTKGLGFLNRLRAKVVSNVVHLGDTPHLEKLIGAVKVQLDLYSEGKVSAVYLAYTRFVNTMKQEPVIEQLLPLSAEQFERKEEDGTTPSTQWDYIYEPDAQAVWTNCWCVMSKR

SEQ ID NO: 146223 - protein, 419 aa, Unknown
  Bacterial polypetide isolated from the Sargasso Sea
MGRVTRVVGMTIEASGISAEIGAQCEIEIEGKHRSIDAEVIGFDGQKIVLMPVHFLDGIKAGCLVRLMHSESSCDVGEALLGRVVNGLGEPIDGKGDVNYESEMPLDSHAVNPMARGAITEVLDTGVKSINGCLTFGKGQRVGLIAGSGVGKSVLMAMLTRNTEADVVVIGLIGERGREVQEFVKTTLGEEGLKKAVVVAAPVDLSPVMRIKAAKLTHSVAEYFSSKGKNVLLLFDSLTRVAHAQREIGLAIGEPPTTKGYTPSVFSLLPKLIERAGVGPGGVGSISAFYTVLAEGDDRTDPIVDLSRATLDGQIMLSRTLADAAHYPAIDLEGSISRVASSIIAADHFNAAQKLRKYWSLYVQKQDLIQVGAYTPNTDPELDEAIRLKPMIDEFLRQDSSEEIGMEKAIESLQKVVAS

SEQ ID NO: 146224 - protein, 150 aa, Unknown
  Bacterial polypetide isolated from the Sargasso Sea
MSNGIVTQIIGAVIDVEFDKDNIPKVYEALMVDESGTTLEVQQQLGDGVVRTIAMGATEGLKRGLTASRTNAAISVPVGPETLGRIVDVLGNPIDEKGPIGEKQKMPIHRKPPSYTDQSVSNEVLETGIKVIDLMCPFAKGGKIDYLVAL

SEQ ID NO: 146225 - protein, 236 aa, Unknown
  Bacterial polypetide isolated from the Sargasso Sea
FNVYRIGPEIKLGEVDISFTNASLFMVISSLAILLIFNLGTKKNSLIPNKIQLLAELSYTFISKMINDTAGSKAKPYFAFIFSLFMFVLFCNMFGMIPYSFTVTSHIIVTFVLAAFIFIGVTIIGFIKHGFGYLKLFVPSGVPVVLLPLIVVIEIISYLSRPISLSVRLFANMMAGHTMMKVFGGFVISLGIIGGWLPLSFSVALTGLEILVAFLQAYVFAILTCIYLNDALNLHH

SEQ ID NO: 146226 - protein, 135 aa, Unknown
  Bacterial polypetide isolated from the Sargasso Sea
MTVHLDVVSAEKAIFSGRVESIQVTGSEGELGINPGHAPLISAIKPGMVRLVKQHGEEEVIYVAGGVLEVQPNNITVLADTAVRAEDLDEQAAQEAKRRAEEHIANPGADFNYAEAAHELAEAIAQLRLIQKLRK

SEQ ID NO: 146227 - protein, 244 aa, Unknown
  Bacterial polypetide isolated from the Sargasso Sea
MAANPMYQFNVYRIGPEIKIGEIDISFTNASLFMVISSIAIMIVFNLGSRKNSLIPNKLQLISELSYSFVSKMISDTAGSKAKPYFSFIFSLFMFVLFCNMFGMIPYSFTVTSHIIVTFVLAAFIFIGVTVIGFIKHGFGYLKLFVPSGVPMVLLPLIVVIEIISYLSRPISLSVRLFANMMAGHTMMKVFGGFVVSLGIIGGWLPLSFSVALTGLEILVAFLQAYVFAILTCIYLNDALNLHH

SEQ ID NO: 146228 - protein, 132 aa, Unknown
  Bacterial polypetide isolated from the Sargasso Sea
QTKIMKKLSGGVRTALAQYRELAAFSQFASDLDDATKAQLARGIRITELIKQKQYSPMSVAQQSLSIFAADRGYMDDVEVEKIGSFEKALHGYFTSEKADLEKSINETGDWNDDIEKQFTEVVEQFKKTQTF

SEQ ID NO: 146229 - protein, 123 aa, Unknown
  Bacterial polypetide isolated from the Sargasso Sea
IDALYLASNEFVNTMTQAPQVEQLLPLKAEENEMLSHHWDYVYEPDARELLDALMVRYIESQVYQAVVENGACEQAARMIAMKNATDNAGELIEELQLVYNKARQAAITQELAEIVGGAAAIG

SEQ ID NO: 146230 - protein, 294 aa, Unknown
  Bacterial polypetide isolated from the Sargasso Sea
MAANGDSQTVSEYIVHHLTNLTYGKLPGGYERYDGRVVAEGGQWTMAHRADEITAMGFNAIHVDSMIWSVGLGLLFCWLFRRVAVRATSGVPSGLVNFVEMVVEFVDGTVKDTFHGRNPLIAPLALTIFVWVFLMNLMDLIPVDLIPHSLMLAGVEYQKIVPSTDPNITMGMAIGVFVLMLFYSIKVKGFGFVKELTLNPFNHPLFIPVNLFMEVVGLLAKPFSLGLRLFGNMYAGEMIFILIAALFSVGLFWLLPAALLQIGWAIFHILVITLQAFIFMVLTIVYLSMAHEDH

SEQ ID NO: 146231 - protein, 238 aa, Unknown
  Bacterial polypetide isolated from the Sargasso Sea
MYQFNVYRIGPEIKINNIDISFTNASLFMVISSLAILIIFNLGTKRSIIPNKIQLLAELSYSFISKMISDTAGSKAKPYFSFIFSLFMFVLFCNMFGMIPYSFTVTSHIIVTFVLAAFIFIGVTIIGFIKHGLGYLKLFVPSGVPMVLLPLIVVIEIISYLSRPISLSVRLFANMMAGHTMMKVFGGFVVSLGIVGGWLPLGFSVALTGLEILVAFLQAYVFAILTCIYLNDALNLHH

SEQ ID NO: 146232 - protein, 211 aa, Unknown
  Bacterial polypetide isolated from the Sargasso Sea
MVISSIAILVVFNLGSKKNTLIPNKIQLLAELSYSFIAKMISDTAGSKAKPYFSFIFSLFMFVLFCNMFGMIPYSFTVTSHIIVTFVLAAFIFIGVTIIGFIKHGLGYLKLFVPSGVPMVLLPLIVVIEIISYLSRPVSLSVRLFANMMAGHTMMKVFGGFVVSLGIIGGWLPLSFSVALTGLEILVAFLQAYVFAILTCIYLNDALNLHH

SEQ ID NO: 146233 - protein, 411 aa, Unknown
  Bacterial polypetide isolated from the Sargasso Sea
MDVKISQFSMQVNGQQLVEDCDIELNVGRRYGLLGVNGCGKSNLLAALANRELPVPEHVDVFHLREEAEPSDRTALDAVVDHIKLEVTRLHKLEASTLAEGGPGDERLQPIYERLEELDSAAFEARAAELLHGLGFKKDMMRRATKDMSGGWRMRVALARALFAAPALLLLDEPTNHLDLSACVWLEHHLAKYDKCLLVISHSQDFLNGVCTHIIRLTNRKLKYYTGDYDTYQKTLEAENVIQQKKHDKEQADIKHLREFIASCGTYANMMKQANSKQKILDKMEAAGLTPSPKAEKTFELAFQECRKLPPPVLPFKEVSFSYPGADVSGGHLLSRLEFGVDCDSRIALVGPNGAGKSTLLKLMTGDLIPRSGSVSRHRNLSIGRYHQHSVDVLDPASHPVEFFLQKYDHM

SEQ ID NO: 146234 - protein, 441 aa, Unknown
  Bacterial polypetide isolated from the Sargasso Sea
MNRFINNTIQKVSLVNGERKKIFSGKVSRYDGNTIECSGFPATIGTLCKVITDDGNPAIAEIIGFSNGNNLASMHQPNSRVLVGSEVVAFDDGHSIPVGPGMLGRVVDALGQPLDGNMIHGVNESWPLAGESINPLNRLPVNSPLDVGVRIINSLLTVGKGQRLGIIAGSGVGKSVLLGMITRFTTADIVVVGLIGERGREVGNFVTSNLNEDTKKRTVMVVEPADKSPLLRIRAANRATAIAEYFRDKGKDVLLIMDSLTRVAHARREIGLALGEQPTSKGYPPSVISLIPSLIERTGSGEAGKGTITSFYTILADGDDQNDPVVDTARAILDGHIMLSRDQAQLGIYPAVDVSSSISRVMNEIVDENHIGASIKFRELVTTYSENKDLLMMGGYNQGQDPILDQAIAAWPKITEFIKQKENKKEDFNSSSSQLIQMFGG

SEQ ID NO: 146235 - protein, 290 aa, Unknown
  Bacterial polypetide isolated from the Sargasso Sea
MAGDKEILNKIRSVKNMQKITSAMEMVAASKIKKAQDQMNASVPYAERIRRVISHLGAANPDYKHPFLNEREINRVGIIVIATDRGLCGGLNVNLFKKVISEIATYQKEKIDVDLVLVGAKAVQFFKRLGGNVLATATHLGDQPKVNDLIGAIKIMLDSYNDEKIDKLLIAHNEFVSTMSQKPVIKTLLPVGKLDDDSDSLQSHWDYIYEPDAIDLLDGVLMRYIESQVYRGATENFACEMAAKMVAMKSATDNAGDIIDKLQLVYNKARQASITQEISEIVGGAAAVSE

SEQ ID NO: 146236 - protein, 239 aa, Unknown
  Bacterial polypetide isolated from the Sargasso Sea
MHQFNVYRIGPEIKIGQVDISFTNASLFMIISVISIIIIFNLGSKKKSIIPNKIQLLAELSYSFVSKMINDTAGSKAKPYFSFIFSLFMFVLFCNMFGMIPYSFTVTSHIIVTFVLASFIFIGVTVIGFLKHGLGYLKLFVPSGVPIILLPLIVIIEIISYLSRPISLSVRLFANMMAGHTMMKVFGGFVISLGIVGGWLPLSFSVALTGLEILVAFLQAYVFAILTCIYLNDALNLHH

SEQ ID NO: 146237 - protein, 144 aa, Unknown
  Bacterial polypetide isolated from the Sargasso Sea
MEINPSEVTKILKEQIKNFGDKAEVTEVGQVLSVGDGIARIYGLDNVEAGEMVEFSDGSKGMALNLESENVGVVIFGDDRNIKEGDVVKRTGNIVDTPVGKELLGRVVDGLGNPIDGKGALDKSVQKSRVEVKAPGIIPRQSVN

SEQ ID NO: 146238 - protein, 145 aa, Unknown
  Bacterial polypetide isolated from the Sargasso Sea
MEINPSEVTQILKEQIKKFGDKAEVTEVGQVLSVGDGIARIYGLDNVQAGEMVEFSDGSKGMALNLESENVGVVIFGDDRAVKEGDTVKRTGAIVDTPVGKELLGRVVDGLGNPIDGKGALDKSLKRSRVEVKAPGIIPRKSVSE

SEQ ID NO: 146239 - protein, 95 aa, Unknown
  Bacterial polypetide isolated from the Sargasso Sea
MSINPSEVTKLLKDQIKNFGEKAEVSEIGKVLSVGDGIARVYGLDNVQAGEMVEFEDGSKGMALNLESDNVGVVIFGDDRKIKEGDTVKRTNAIV

SEQ ID NO: 146240 - protein, 291 aa, Unknown
  Bacterial polypetide isolated from the Sargasso Sea
MASLKEVKSRILSVNSTQQITKAMKMVAAAKLRRAQDRVIQLRPYSDKLQTILNNLSSSSGSNSKLLEERKINKVLLIVVGSDKGLCGSFNSSVIKYTNQLIESNYKKHYENKKLTILPIGKKMFDHYKKRNFLILDNFWSILKKSSYDDVAGISNFLMNEFILENYDKIDIIFNEFKNVAVQNTMTSTFLPVNEENDDEDKNDTNYIFEPNQKDILNKLIPKALTANLFKTILESNASEQGARMTAMSQATDNATELLKELKLSYNRSRQAAITKEILEIVGGAEALNAN

SEQ ID NO: 146241 - protein, 67 aa, Unknown
  Bacterial polypetide isolated from the Sargasso Sea
KIERFLSQPFFVAEVFTNAPGKYVPLSETIRGFKGIVNGDYDEIPEQAFYMTGNIDEVVEKAKTEAA

SEQ ID NO: 146242 - protein, 49 aa, Unknown
  Bacterial polypetide isolated from the Sargasso Sea
TGSPGKYVSLEDSIKGFNGILNGDYDDLPEQAFYMVGTIEEAVEKAKTM

SEQ ID NO: 146243 - protein, 103 aa, Unknown
  Bacterial polypetide isolated from the Sargasso Sea
MEIKAAEISSVIKDQIANFETKADVAEVGTVLSVGDGIARVYGLDQVQAGEMVEFPGGIKGMALNLEMDNVGVSIFGDDTGIKEGDTVKRTGEIVDVPVGKNC

SEQ ID NO: 146244 - protein, 233 aa, Unknown
  Bacterial polypetide isolated from the Sargasso Sea
NAPELMIGNGKSDTYLLVVATADRGLCGAFNSNIVKLATQEINELIKQGKQVKIICIGKKGYDLIRRSHEEKIIDFISLKEVKSIAYSDAEGIGNNIVTRFEEGEFDICKLYFSSFKSVISQIPHAQQLIPLPIDNEIDSDDSDTNSNLAIYDYEPEESDVMEDLLPLNLNIQVFQGLLENAASEQGSRMSAMDNATRNAGEMINKLTLQYNRTRQAIITKELIEIISGAEAL

SEQ ID NO: 146245 - protein, 128 aa, Unknown
  Bacterial polypetide isolated from the Sargasso Sea
MKKLSGGVRTALAQYRELASFSQFASDLDDATKAQLASGQRITELLKQKQYAPMSVAQQSISLFAADRGFMDDVEIEKIGSFESALHAYLTAEYADLEKSINETGDWNDEVEKQFTEILESFKKTQTY

SEQ ID NO: 146246 - protein, 603 aa, Unknown
  Bacterial polypetide isolated from the Sargasso Sea
MIRKILIPIIIIFITLFSIYVLKLIFFKPFSFNHFLARQFIVNTLDSPESLTYIGLFEKYGYRSYNGKLSDYSLEKDIKDLKKLKKEYKILNSYQDEDLSFDELTSKKIAQFQMKNEIEQRTKYPYHTYPLNQMFGLHTQLLEFMTDIHPIKDEKDAEYYLSRLEKIPEVFSQILEKMEKRKELKIYPPIFMVERVIGQIENIIDIPIKENPLITVYEEKLTSAGINPKTIKLSKEKAEKIITEKVLPSYQLLLMHLHEIRPKANINHGVWSLPDGENYYSLRLRIMTTSNYSADEIHNIGLSEVERITNEIIDILETEGYENIDNVGQVLIELNESERFLFEDNQSSRKEIIDIYNNIVDESYELMPQYFRKLPKSKVIVKPVPAYSEKSAAGGYYRGPSLDGKRPGIFYANLYDIKATPKFGMKTLAFHEAIPGHHFQIALNLENTDLGIFRKYAVNSTAYTEGWALYAEQLAVEIGLSEDPYDKIGFLQSDLFRAVRLVVDTGIHHKRWSREKAIDYMYKKTGKAMSSVVAEIERYIAWPGQACSYKIGMLKILELRQNAKETLGSQFDIRDFHDFILENGEVPLTVLENNYKKWIKNKS

SEQ ID NO: 146247 - protein, 40 aa, Unknown
  Bacterial polypetide isolated from the Sargasso Sea
MASLDDLKKRISSVKSTQKITKAMKMVAASKLRRSQENAE

SEQ ID NO: 146248 - protein, 159 aa, Unknown
  Bacterial polypetide isolated from the Sargasso Sea
MEINPSEVTKILKEQINKFGDKAEISEVGQVLSVGDGIARIYGLDNVQAGEMVEFSDGSKGMALNLESDNVGVVIFGDDKAVKEGDTVKRTGAIVDTPVGKELLGRVVDGLGNPIDGKGALDKSIKRSRVEVKAPGIIPRKSVSEPMQTGLKSIDSLVP

SEQ ID NO: 146249 - protein, 77 aa, Unknown
  Bacterial polypetide isolated from the Sargasso Sea
MPSLDDLRKRISSVKSTQKITKAMKMVAAAKLRKAQEMAEKGRPYSEKMDTIIQNLSKAINDDSNAPKLLVGSGEDK

SEQ ID NO: 146250 - protein, 141 aa, Unknown
  Bacterial polypetide isolated from the Sargasso Sea
NISNKLQELYFESKFDKCILVFNKFKSAISQEVTQQQLIPLDVSNSEKEEEKENSSNAIYDYEPDEETILKDLLPKNVSIQIFKVLLESDAGEQGARMAAMDNATRNAGEMIDSLTLKYNRTRQAFITKELIEIISGAESI

SEQ ID NO: 146251 - protein, 72 aa, Unknown
  Bacterial polypetide isolated from the Sargasso Sea
MKDLLPKNVSIQIFKVLLESDAGEHGARMAAMDNATRNAGEMIDSLTLKYNRTRQAFITKELIEIISGAESV

SEQ ID NO: 146252 - protein, 167 aa, Unknown
  Bacterial polypetide isolated from the Sargasso Sea
MALLPFPLPFAELEVGHHLYWQIGDLYLHGQVFLSSWILIGILLVLVLAGTRNMQRDPLGLQNLLEFLWNFIRDIARDNIGEKYYRDWLPFIGTLFLFIFVSNWGGALIPWKIIELPEGELGAPTADINTTVAMALLVSLAYFYAGLSRKGLRFFELYVEPTPIMLP

SEQ ID NO: 146253 - protein, 84 aa, Unknown
  Bacterial polypetide isolated from the Sargasso Sea
MASLDDLKKRISSVKSTQKITKAMKMVAAAKLRRAQESAEKGRPYSDKMNNIIINLSKSMSDKENSPKLLVGSGDEKIHLCVVM

SEQ ID NO: 146254 - protein, 106 aa, Unknown
  Bacterial polypetide isolated from the Sargasso Sea
MDIQPSEISKILKEEIKNFGSDSEITEVGQVLSIGDGIARIYGLDNVQAGEMVMFDDGTRGMALNLEDDNVGVVLFGSDANIKEGDTVKRTNSIVDVPVGKELLGR

SEQ ID NO: 146255 - protein, 84 aa, Unknown
  Bacterial polypetide isolated from the Sargasso Sea
DSYEFEPDEDEILNNLLPKNISTQIFKAMLENSASEQGSRMSAMDNATRNAGEMVDKLTIEYNRSRQAAITKELIEIISGAESL

SEQ ID NO: 146256 - protein, 94 aa, Unknown
  Bacterial polypetide isolated from the Sargasso Sea
MSKGIITQVIGAVVDVKFDGELPEILTALECKNGDNRLVLEVAQHLGETTVRTIAMDATEGLKRGDEVINSNAPIQVPVGPETLGRIINVIGEQ

SEQ ID NO: 146257 - protein, 78 aa, Unknown
  Bacterial polypetide isolated from the Sargasso Sea
PDEDEILSNLLPKNISTQILKAMLENSASEQGSRMSAMDNATRNAGEMVDKLTIQYNRSRQAAITKELIEIISGAESL

SEQ ID NO: 146258 - protein, 319 aa, Unknown
  Bacterial polypetide isolated from the Sargasso Sea
MTTKNEDFIIEADNLTHYYGPQPAIENVDFKVKRGEILGFLGPNGAGKTTTMRILTGYMPPTRGNVEIDGMDIVKDSLECRKKIGYLPETVPLHTDMTVKNYLTFMGSLRGMSRRSINDQINNVIEICRLQDYYKTIVGKLSKGYRQRVGIAQAILHEPEILVMDEPTIGIDPIQVVETRRLIQDIGKQQTVVLSSHILPEVSMVCGRVLIINQGQIVAEDTPDNLATRLQATQQILVEISTTSKKIQPILENIEGVTDVRRRRNTDNITFEITVADGYDVRDEISKIIIENDCSLLSMQLNSMSLEQIFLKLTTTEGA

SEQ ID NO: 146259 - protein, 84 aa, Unknown
  Bacterial polypetide isolated from the Sargasso Sea
ENYEFEPDEDEILGNLLPKNISTQIFKAMLENSASEQGSRMSAMDNATRNAGEMVDKLTIQYNRSRQAAITKELIEIISGAESL

SEQ ID NO: 146260 - protein, 90 aa, Unknown
  Bacterial polypetide isolated from the Sargasso Sea
KENITQVIGAVVDVKFDGELPEILTALECDNGGNRLVLEVAQHLGESSVRTIAMDSTEGLKRGDEVKDTRCSNSSSSRSRNIRTNCKRYR

SEQ ID NO: 146261 - protein, 142 aa, Unknown
  Bacterial polypetide isolated from the Sargasso Sea
MNIQASEISAILKEQIKKFGKESEVAEVGTVLSVGDGIARVFGLDNVQAGEMVEFPNGIRGMALNLEIDNVGIVIFGSDRDIKEGDQVKRTKSIVDVPVGDELLGRVVDGLGNPLDGKGPIKTKKRSVADVKAPGIIPRKSV

SEQ ID NO: 146262 - protein, 182 aa, Unknown
  Bacterial polypetide isolated from the Sargasso Sea
SDEEKTLKIITVGSKGYDQLKRLYKDQIIEKISFKDSKNINYFDAEKVGKIIIKKFENKEFDICTIFYNKFKNVITQIPQEQQIIPLKSSGEEGNSSKDNYEFEPEEDEILSNLLPKNISTQIFKAMLENSASEQGSRMSAMDNATRNAGDMVDKLTIEYNRSRQAAITKELIEIISGAESL

SEQ ID NO: 146263 - protein, 159 aa, Unknown
  Bacterial polypetide isolated from the Sargasso Sea
GKYIIKKINLKDKKKLTFLDAEEIGKQIVELFKNKEFDKCFIFYNKFKNVISQIPQQQQVIPAKIEEKDKKQEEMSSYEFEPEEDEILDDLLPKNISTQIFKAFLENSASEQGSRMTAMDNATRNAGDLVDKLTINYNRSRQASITKELIEIISGAESL

SEQ ID NO: 146264 - protein, 56 aa, Unknown
  Bacterial polypetide isolated from the Sargasso Sea
MLENSASEQGSRMTAMDNATRNAGDLVDKLTIQYNRSRQAAITKELIEIISGAESL

SEQ ID NO: 146265 - protein, 95 aa, Unknown
  Bacterial polypetide isolated from the Sargasso Sea
MSKGIITQVIGAVVDVKFEGELPEILTALECKNGDNRLVLEVAQHLGETTVRTIAMDATEGLKRGDEVINTNAPIQVPVGPETLDRIINVIGEPN

SEQ ID NO: 146266 - protein, 44 aa, Unknown; identical to SEQ ID NO: 145992
  Bacterial polypetide isolated from the Sargasso Sea

SEQ ID NO: 146267 - protein, 87 aa, Unknown
  Bacterial polypetide isolated from the Sargasso Sea
MRKGQITQIIGAVVDVKFDGELPEILTALECDNGGNRLVLEVAQHLGESSVRTIAMDATEGLKRGDEVTDTAAPIKVPVGPETLGRI

SEQ ID NO: 146268 - protein, 96 aa, Unknown
  Bacterial polypetide isolated from the Sargasso Sea
MALKGKISQVMGAVVDVVFDQGDLPDIYNALSVDRGEEGKLVLEVAQHLGDSSVRTVAMDSTDGLIRGTEVIDSGSPISVPVGPDTLGRLFDVLGN

SEQ ID NO: 146269 - protein, 89 aa, Unknown
  Bacterial polypetide isolated from the Sargasso Sea
MPSLDDLRKRISSVKSTQKITKAMKMVAAAKLRKAQEMAEKGRPYSDKMDVIIQNLSKAINDPSNAPRLLVGTGEDKTHLCVVMTADRG

SEQ ID NO: 146270 - protein, 182 aa, Unknown
  Bacterial polypetide isolated from the Sargasso Sea
MKENKTLKIITVGSKGYDQLKRQYMENIIEKISFKESKNVNYFDADKVGKIIIDRFEKKEFDVCTIFYNQFKNVITQIPQEQQVIPLKSKEEKETDLNNSYEFEPDEDEILSNLLPKNISTQIFKAMLENSASEQGSRMSAMDNATRNAGEMVDKLTIQYNRSRQAAITKELIEIISGAESL

SEQ ID NO: 146271 - protein, 56 aa, Unknown
  Bacterial polypetide isolated from the Sargasso Sea
MLENSASEQGSRMSAMDNATRNAGEMVDKLTIQYNRSRQAAITKELIEIISGAESL

SEQ ID NO: 146272 - protein, 93 aa, Unknown
  Bacterial polypetide isolated from the Sargasso Sea
MSSGKIVQIIGAVLDVEFPSESIPNVYDALIVEGEGINTTLEVQQQLGDGVVRTIALGSTDGLQRGLSVRNTGEAISIPVGTKTLGRIMNVLG

SEQ ID NO: 146273 - protein, 120 aa, Unknown
  Bacterial polypetide isolated from the Sargasso Sea
MAISLKVLAPNKNVYQGEAEEVILPSTTGQLGVLPGHISLVTAIDIGVLRLRMNSQWKSIALMGGFAEIESDEVIVLVNNAEIGSEINVENAEQDLKEAKLAVSKFSENEKSPDKIKALN

SEQ ID NO: 146274 - protein, 253 aa, Unknown
  Bacterial polypetide isolated from the Sargasso Sea
YAERMERMLGSLAGSMASAEGASKLLAGTGKQDVHLIVMMTSDRGLCGAFNSSIVRDTRRMVEELQAGGKEVKILCVGRKGWAQVRREYAPLIVALIEGIGRPHLSFDDAQGISNRILEMFEAGEFDVCTLVYNRFKSVISQIVTRQQVIPFAVDVPAEGEEEETGGAAVVYDYEPDETEILEVLLPRNMSVQVFRSLLENNASEHGARMSAMDNATRNAGEMIDSLTLNYNRTRQAFITKELIEIISGAEAV

SEQ ID NO: 146275 - protein, 169 aa, Unknown
  Bacterial polypetide isolated from the Sargasso Sea
TKGYDQLKRVYGDNIIERISFKESKNVSYFDADKVGKTVIEKFENKEFDVCVIFYNQFKNVITQIPQEQQIIPLKTMNEETNSSDDNYEFEPEEDEILSNLLPKNISTQIFKAMLENSASEQGSRMSAMDNATRNAGEMVDKLTIEYNRSRQAAITKELIEIISGAESL

SEQ ID NO: 146276 - protein, 56 aa, Unknown; identical to SEQ ID NO: 146271
  Bacterial polypetide isolated from the Sargasso Sea

SEQ ID NO: 146277 - protein, 114 aa, Unknown
  Bacterial polypetide isolated from the Sargasso Sea
MSLSAMELSNLLEQRISNHYSDLNIDEIGRVLSVGDGIARVYGLNKIQSGEMVEFDSGIKGMALNLENDNVGIVCFGSDTNIREGDIVKRTGSIVDVPVGKGMLGRVVDGLGNP

SEQ ID NO: 146278 - protein, 90 aa, Unknown
  Bacterial polypetide isolated from the Sargasso Sea
DIIAILGMDELSDNDKLTVARARKIQKFMSQPFFVAEQFTGTPGRYVSLEDTVSGFDAILKGEVDELPENAFAYVGTIDEAIEKHKKSAA

SEQ ID NO: 146279 - protein, 97 aa, Unknown
  Bacterial polypetide isolated from the Sargasso Sea
MEIKAAEISSVIKDQISNFETKADVAEVGTVLSVGDGIARVYGLDQVQAGEMVEFPGGIKGMALNLEMDNVGVSIFGDDTGIKEGDTVKRTGEIVDV

SEQ ID NO: 146280 - protein, 286 aa, Unknown
  Bacterial polypetide isolated from the Sargasso Sea
MSGLKEIRNRISSVSSTMQITNAMKMVSAAKLKKAQDSISATLPYSNKLSELIKNISASTDSDDTNPLFEKRESKNVLIIAITSNKGLCGGFNSNIIKEVNNINTTSASKRVDLLTIGKKGDDILSKKFEVISSHNDVYDNFNYNKIKEIAETVMQKFSDKEYDEVTLVYNHFKNAATQIVTKEQYLPIEESADENNSVSGDYIFEPNRPKILNELIPKSLSIQLFKAISDSIAGEHGARMTAMHKATDNASELRDQLKLTYNKARQTAITNEILEIVGGAEALNS

SEQ ID NO: 146281 - protein, 286 aa, Unknown
  Bacterial polypetide isolated from the Sargasso Sea
MSGLKEIRNRISSVSSTMQITNAMKMVSAAKLKKAQDSITATLPYSNKLSELVKNISASIDSVDSNPLFVAREVKKPLIIVITSNKGLCGGFNSNIIKEVHNISTEYGSNRPDLLTIGKKGDDILKKKFNVISSHNDLFDEFSYLKVKSIASKIMELYTDEKYDEVILVYNHFKNAATQIITKEQFLPISENNDDNVSTSGDYIFEPNREKILEELIPKTLSIQLFKSISDSIAGEHGARMTAMHKATDNASELRDQLKLTYNKARQTAITNEILEIVGGAEALNS

SEQ ID NO: 146282 - protein, 63 aa, Unknown
  Bacterial polypetide isolated from the Sargasso Sea
STQIFKSMLENSASEQGSRMSAMDNATRNAGEMVDKLTIEYNRSRQAAITKELIEIISGAESL

SEQ ID NO: 146283 - protein, 628 aa, Unknown
  Bacterial polypetide isolated from the Sargasso Sea
MIRLEKLSKSFPDGDLFNNVNVSIKPGMRIGLIGPNGSGKTTLLRIILGKESPDSGNVHVDKSTTIGYLAQDIVAGTGRSILEEVLVSYPEVRELEGKMLALSEAISKDHNNMDLVYKLGDAQHRFEALGGWNLEDKAKKILSGLGFADEKFTEPMDVFSGGWRMRVALASILLQQPDILFLDEPTNHLDLEATIWLESFLANWKGGMVMISHDRTFLDRSINNILEIDLKKITLYHGNYTKYTEEKALRIEQHRNAFRNQQKQIKDTERFIERFRSKNTKATQVQSRVKMLDKMEKIEAPTKQNHSMNLRLPQPSRSLLNVASCRNVTKHYGDIEVFNNLDMVVERGQKIGLVGHNGAGKSTLLKILAGVESVTSGAVRIGSSMVSAYYAQHQLEILNPNETVFESIQKVSQGWSETEMRTYLGSFMFSGDEIEKYVKVLSGGEKARVALARMLVQPFHLLLLDEPTNHLDMMTRNVVERALVQFSGSIVCISHDRHFLNNVTNLTCEVGNGGIRLFEGNYEYYKWKKQDEKQSKSERSKVKVEPKEKSDYKERKKIRNRLNWIEKRFTTIDKEIKIERALTKNPDHVDDYEMLERTLKKINILEQEYLDLMEEQELLHSNHLLTSL

SEQ ID NO: 146284 - protein, 141 aa, Unknown
  Bacterial polypetide isolated from the Sargasso Sea
NYFDADKVGKIIIEKFEAGEFDVCTIFYNKFKNVITQIPQAQQIIPLNDEGSENSSDESYEFEPDEDEILSNLLPKNISTQIFKAMLENSASEQGSRMSAMDNATRNAGEMVDKLTIEYNRSRQAAITKELIEIISGAESL

SEQ ID NO: 146285 - protein, 93 aa, Unknown
  Bacterial polypetide isolated from the Sargasso Sea
MKEKKTSSEESYEFEPDEDEILSNLLPKNISTQIFKAMLENSASEQGSRMSAMDNATRNAGEMVDKLTIEYNRSRQAAITKELIEIISGAESL

SEQ ID NO: 146286 - protein, 246 aa, Unknown
  Bacterial polypetide isolated from the Sargasso Sea
LGDILKNLSASFSGQDNAPELLAGNGNDNSHLLVIATSERGLCGGFNTSIVKLAKDHISKLKSEGKEVKLIIIGKKGKELLQRDYGEDIIEIYDFSEVKDIGFAEAEKVSENILSLFEDNKFDVCSLYFARFESVLSQVPICQKLIPFDIDSEAQEDNDVENICYEYEPDEEDILRELLPKNLSVQILRALLENVASEFGARLTAMDNATRNASEMIDDLTITYNRSRQASITSELIEIISGAEAL

SEQ ID NO: 146287 - protein, 254 aa, Unknown
  Bacterial polypetide isolated from the Sargasso Sea
MVAQGKIVWISGPAVKADGMADAKMYETVSVGDAKLIGEVIRLTGDVAFIQVYESTSGLKPGEPVIGTGNPLSVLLGPGIIGQIYDGIQRPLKDLAAKSGSFIGRGITTTPVDMEKQYHFSPSVAVGDEVEAGNIIGTVPETSLIEHKILVPPDHKGGKITNIVSEGDYALETEIATVEKDGQSFPLKMYHKWPVRQPRPYLKRYDPTVPLLTGQRVIDTFFPLAKGGTGSIPGAFGTGKTVTLHQIAKWADSQ

SEQ ID NO: 146288 - protein, 183 aa, Unknown
  Bacterial polypetide isolated from the Sargasso Sea
MANLKEIRDRIKSVKNTRKITEAMRLVAAAKVRRAQEQVLRSRPFADRLARVLENLQSRMQMEDAAAPLMEQRPVQSVTLVACTGDRGLCGGYNSNIIRRTEQRFAELKGKGFDVKMVLIGRKAGSYFSNRNYPIQATFAGLEQVPTADEANTIATDLLAEFIAQSSDRVEIIFTKFINLVSC

SEQ ID NO: 146289 - protein, 82 aa, Unknown
  Bacterial polypetide isolated from the Sargasso Sea
YEFEPDEDEILSNLLPKNISTQIFKAMLENSASEQGSRMSAMDNATRNAGEMVDKLTIEYNRSRQAAITKELIEIISGAESL

SEQ ID NO: 146290 - protein, 86 aa, Unknown
  Bacterial polypetide isolated from the Sargasso Sea
MASLDDLKKRITSVKSTQKITKAMKMVAAAKLKRAQESAEKGRPYSQKMNNVILNLSNGISDKENAPKLLSGTGKDKIHLCIIMTS

SEQ ID NO: 146291 - protein, 72 aa, Unknown
  Bacterial polypetide isolated from the Sargasso Sea
MANNLTGKISQVLGAVVDVEFDGELPAIMNALEVDNNGTRLMLEVAQHLGENAVRTIAMDTTDGLVRGQTAT

SEQ ID NO: 146292 - protein, 57 aa, Unknown
  Bacterial polypetide isolated from the Sargasso Sea
MASLDDLKKRITSVKSTQKITKAMKMVAAAKLRRAQESAERGRPYSQKMNNIILNLS

SEQ ID NO: 146293 - protein, 53 aa, Unknown
  Bacterial polypetide isolated from the Sargasso Sea
NSASEQGSRMSAMDNATRNAGEMVDKLTIEYNRSRQAAITKELIEIISGAESL

SEQ ID NO: 146294 - protein, 91 aa, Unknown
  Bacterial polypetide isolated from the Sargasso Sea
MKIRAEEISNIIQQQIENFEKQTTKTEVGTVLEVGDGIARVYGLDNIVAGELVEFPNNLQGMALNLEEDNVGVVLFGDDRNIKEGDEARRT

SEQ ID NO: 146295 - protein, 127 aa, Unknown
  Bacterial polypetide isolated from the Sargasso Sea
RFENDELDQVFLAYNHFVSVISQVPMIEQLLPIKPIDAESVDEREVLFEPSPEEILQTLLKKYVQNQVYVSWLDTIAGEHAARMTSMDAATKNAGEIIEKLQLHYNRTRQAAITGELIEIISGAESL

SEQ ID NO: 146296 - protein, 92 aa, Unknown
  Bacterial polypetide isolated from the Sargasso Sea
MSKGIITQVIGAVVDVKFDGELPEILTALECKNGDNRLVLEVAQHLGETTVRTIAMDATEGLKRGDEVINTNAPIQVPVGPETLGRIINVIG

SEQ ID NO: 146297 - protein, 130 aa, Unknown
  Bacterial polypetide isolated from the Sargasso Sea
KIIKKLGGGIRLALAQYSELAAFAQFASDLDDTTRAQLDHGQKVTELMKQLQYAPMGVADMGVSIFAIEKGYMKDIEVAKILDFEAALIAYMHSEHAAFMADLNKTGNYNDQIEATLKGAIEKFKATQTW

SEQ ID NO: 146298 - protein, 112 aa, Unknown
  Bacterial polypetide isolated from the Sargasso Sea
MTVQLDVVSAEERIFSGLVESIQVTGSEGELGILPGHIPLLTGIKPGMVRIVKQFGEEHLIYVAGGVLEVQPHSVTVLADVAVRAEDLDEQAALAAQKRAEEAMQHAGADFN

SEQ ID NO: 146299 - protein, 86 aa, Unknown
  Bacterial polypetide isolated from the Sargasso Sea
MASLDDLKKRISSVKSTQKITKAMKMVAAAKLRRAQESAERGRPYSEKMNNIILNLSSGLSDKENAPKLLTGTGEDKFTYVWYDSR

SEQ ID NO: 146300 - protein, 91 aa, Unknown
  Bacterial polypetide isolated from the Sargasso Sea
MANNLTGKISQVLGAVVDVEFDGELPAIMNALEVDNNGTRLMLEVAQHLGENAVRTIAMDTTDGLVRGQTATDTGSPISMPVGPETLGRIM

SEQ ID NO: 146301 - protein, 245 aa, Unknown
  Bacterial polypetide isolated from the Sargasso Sea
NSKQLIELRRNKMGMVFQSFALLPHKTVLENIAFPLIIKGITTDNSITKAMEMVELVGLKGRENYFPRELSGGQQQRVGIARSLAVEPDIWFLDEPFSALDPLIRKEMQDEFLRLQDSLHKTIMFVTHDFDEALRLADRIAIMKDGIIEQLDTPDNIVLNPATEYVKKFTEDVPREKVLKIESIMDKYDGSVDEKKTISKDVIIETVAESILKSKENLIVIDEKNNNKPVGILNPGKVIKVLFGK

SEQ ID NO: 146302 - protein, 85 aa, Unknown
  Bacterial polypetide isolated from the Sargasso Sea
MKKGKITQVIGAVVDVKFDGDLPEILTALECNNSGNRLVLEVAQHLGESSVRTIAMDATEGLKRGDEVIDTGSPIKVPVGPETLG

SEQ ID NO: 146303 - protein, 76 aa, Unknown
  Bacterial polypetide isolated from the Sargasso Sea
MASLDDLKKRISSVKSTQKITKAMKMVAAAKLRRAQESAEKGRPYSDKMNNIILNLSGGISDIENAPKFTFWNRRG

SEQ ID NO: 146304 - protein, 134 aa, Unknown
  Bacterial polypetide isolated from the Sargasso Sea
MAISLKVLAPNKNVYQGEAEEVILPSTTGQIGVLPGHISLVTAIDIGVLRLRMNSQWKSIALMGGFAEIESDEVIVLVNNAEIGSEINVQNAEQDLKEAKLAISKFSENEKNPEKIKALKEISKAEARIQAAKN

SEQ ID NO: 146305 - protein, 74 aa, Unknown
  Bacterial polypetide isolated from the Sargasso Sea
MPSLDDLRKRITSVKSTQKITKAMKMVAAAKLRKAQENAEKGRPYSEKMNNVILNLSKSITDKENAPKVTGWDR

SEQ ID NO: 146306 - protein, 510 aa, Unknown
  Bacterial polypetide isolated from the Sargasso Sea
MPFSLAFAGVSGIVIGYPTLRLRSDYLAIVTLGFGEITRIVATNLRITGGPNGIYGIDSPSLFGYEISSPRAVYELGIAFFLIVLVFAIRLGQSRLGRAWTSIREDEAAAEAVGVPTLRVKLLAYVMGALIGGFGGSLFAARFGTIDPTGFTYLQSVTILIIVVLGGRGSIPGVILGAIIVAGLPEVLRFLNLWRIFGFAIGLVILMLLRPQGLWPAPLRRVAPPREGDGVAKPAHREIVADDILLDVRDMQRRFGGVRAVGGVSFTVRGGEILSLIGPNGAGKTTVFNCLTGVTRLSGGQVLWRGASLAGGAPHRIVHRGMARTFQGIRLFANMTAFENVLIGMDHRLHTSLIAELLALPSARSEAADHAAEGLGWLSFVGLSARAGERAADLPYGDQRRLEIARALASNPYLLLLDEPAAGMNPTEKHALMELIRRIRDLGVTVLLIEHDMMLVMGVSDRIIVMDHGVIIAEGSPGEIQADPRVIDAYLGTAEETADDATGEKSLWDS

SEQ ID NO: 146307 - protein, 82 aa, Unknown
  Bacterial polypetide isolated from the Sargasso Sea
MPSLDDLKKRISSVKSTQKITKAMKMVAASKLRRAQENAEKGRPYSEKMNNIILNLSNSISDKENSPKLLSGSGEDRVHLCM

SEQ ID NO: 146308 - protein, 68 aa, Unknown
  Bacterial polypetide isolated from the Sargasso Sea
MPKNISTQIFKAMLENSASEQGARMSAMDNATRNAGEMVDKLTIEYNRSRQAAITKELIEIISGAESL

SEQ ID NO: 146309 - protein, 95 aa, Unknown
  Bacterial polypetide isolated from the Sargasso Sea
MRKGKITQVIGAVVDVKFDGELPEILTALECNNAGNRLVLEVAQHLGESSVRTIAMDATEGLKRGDEVTDTGSPIKVPVGPETLGRIVNVIGEPI

SEQ ID NO: 146310 - protein, 90 aa, Unknown
  Bacterial polypetide isolated from the Sargasso Sea
MAISLKVLAPNKNVYQGEAEEVILPSTTGQIGILPGHISLVTAIDIGVLRLRMNSQWKSIALMGGFAEIESDEVIVLVNNAEIGSEINVQ

SEQ ID NO: 146311 - protein, 161 aa, Unknown
  Bacterial polypetide isolated from the Sargasso Sea
MEINPSEVTKILKEQIKKFGDKAEVTEVGQVLSVGDGIARIYGLDNVQAGEMVEFADGSKGMALNLESDNVGVVIFGDDKAVKEGDTVKRTGAIVDTPVGKELLGRVVDGLGNPIDGKGNLNKTVKRSRVEVKAPGIIPRKSVSEPMQSGLKSVDSLVQSE

SEQ ID NO: 146312 - protein, 136 aa, Unknown
  Bacterial polypetide isolated from the Sargasso Sea
MRLDIVTAEKLVYSDEVSSVVVPGAEGQLGILPNHAPLLTSLKPGELKVLKEGEETNIAVSGGFLEVLKNVVTILADTAERAEDIDVERAEAALKRAQEKVNSSESDLDLERAIRALKRSQARVFVSKRKRSSKVN

SEQ ID NO: 146313 - protein, 81 aa, Unknown
  Bacterial polypetide isolated from the Sargasso Sea
MRKGKITQIIGAVVDVKFDGELPEILTALECKNGDNRLVLEVAQHLGETSVRTIAMDATEGLKRGDEVTDTGGSYKGTSWS

SEQ ID NO: 146314 - protein, 40 aa, Unknown
  Bacterial polypetide isolated from the Sargasso Sea
DNATRNAGEMVDKLTIQYNRSRQAAITKELIEIISGAESL

SEQ ID NO: 146315 - protein, 36 aa, Unknown
  Bacterial polypetide isolated from the Sargasso Sea
RNAGEMVDKLTIQYNRSRQAAITKELIEIISGAESL

SEQ ID NO: 146316 - protein, 361 aa, Unknown
  Bacterial polypetide isolated from the Sargasso Sea
MISDTNIHKQVINSITFPIIIIDEHKLINMVNSAAEDFFKLSSKVLLEKSIESILPFSSPILSLIDNSLNTETTFKEYRVDLSTPISGSHKDVDVEVTPVIGSDNYYQIILIEGFNEKKLILQNENQKNKIAMSNMSQILAHEVKNPLAGIRGAAQILEKNIESNEIVMTDLIINEVDRIKRLVDNLQVFDASTPIDLKPINIHSILRHVRDVMINSSEKKIKITEVFDPSIPDVIGNEDQLIQVFINLIKNSIEAFSDESDSDNEIILSTNYEHGFIIKEKLSEERVKLPIKISVMDNGPGIPASISQEIFQPFVSTKKIGQGGLGLSIVSKIVSDHNGTIELDLTDQGTKFIIRLMAES

SEQ ID NO: 146317 - protein, 77 aa, Unknown
  Bacterial polypetide isolated from the Sargasso Sea
MTTNNKGAISQVIGAVVDVRFEENLPSILTALECNIGGKKVVLEVAQHLGESTVRTIAMESTDGMTRGDEVIDTGNQ

SEQ ID NO: 146318 - protein, 239 aa, Unknown
  Bacterial polypetide isolated from the Sargasso Sea
MYQFNVYRIGPEIKLGEVDISFTNASLFMVISTVAILAIFNFGSKKNSLIPDKLQLLAELSYSFISKMISDTAGSKAKPYFSFIFSLFMFVLFCNMFGMIPYSFTVTSHIIVTFVLAAFIFVGVTIIGFIKHGIGYLKLFVPSGVPLVLLPLIVVIEIISYLSRPISLSVRLFANMMAGHTMMKVFGGFVVSLGIIGGWLPLSFSVALTGLEILVAFLQAYVFAILTCIYLNDALNLHH

SEQ ID NO: 146319 - protein, 61 aa, Unknown
  Bacterial polypetide isolated from the Sargasso Sea
MANNLSGKISQVLGAVVDVEFEGELPSIMNALEVDNNGVRLVLEVAQHLGENAVRTIAMDT

SEQ ID NO: 146320 - protein, 80 aa, Unknown
  Bacterial polypetide isolated from the Sargasso Sea
MPSLDDLKKRIKSVKSTQKITKAMKMVAAAKLRKAQENAEKGRPYSQKMQNIILNLTKSINDPNNAPKLLVGTGKDKTYL

SEQ ID NO: 146321 - protein, 255 aa, Unknown
  Bacterial polypetide isolated from the Sargasso Sea
MRRTQETMKKALPYADKIRTVIGHIYKANPDYKHPFLEKREVKTAGYIVVSSDRGLCGGLNVNMFRGLIAELKENKSNQINSKLCLVGAKAVQFFRSVDVDVVAAASHLGEEPQVEDLVGSIKTMLDEYIDGKIDTLFIVHNDFVNTMTQKPEIKTLLPIDPEDSEQMQEHWDYIYEPDSKELLDYILMRYIESQVYRAVVENVACEMAAKMVAMKSATDNAGKIIDQLELDYNKARQAAITQEISEIVGGAAAV

SEQ ID NO: 146322 - protein, 63 aa, Unknown
  Bacterial polypetide isolated from the Sargasso Sea
STQIYKAFLENAASEQGSRMTAMDNATRNAGELVDKLTINYNRSRQASITKELIEIISGAESL

SEQ ID NO: 146323 - protein, 203 aa, Unknown
  Bacterial polypetide isolated from the Sargasso Sea
GGYNSNIVRETRLRVRELKDSGKVVKLLCIGRKGRDQLKGEFGEAILHTYEDVGRGGIEFAEAENITNRVLELFDAGEFDVCMIIYNKFVSAITQVVTPQKIIPVEMTDDIPDDGEISDFVYDFEPSEEGILEVLLPDNLKVQIFGAMLESSASEHGARMSAMDNATRNAGEMIDGLTLTFNRTRQAKITSELIEIISGAEAL

SEQ ID NO: 146324 - protein, 50 aa, Unknown
  Bacterial polypetide isolated from the Sargasso Sea
MASLDDLKKRISSVKSTQKITKAMKMVAASKLRRAQRNAEKGKTYSDKMN

SEQ ID NO: 146325 - protein, 77 aa, Unknown
  Bacterial polypetide isolated from the Sargasso Sea
MANNLTGKISQVLGAVVDVEFDGELPAIMNALEVDNNGTRLMLEVAQHLGENAVRTIAMDTTDGLVRGQTATDTGAP

SEQ ID NO: 146326 - protein, 192 aa, Unknown
  Bacterial polypetide isolated from the Sargasso Sea
MNFLQNIPPYLFFTGKGGVGKTSISCATAIRLAEQGKRVLLVSTDPASNVGQVFDQSIGNTIQSVSSVPGLSALEIDPQDAAQQYRARIIDPIKGLLPDDVVNSISEQLSGACTTEIAAFDEFTGLLTDASLLTHFDHIIFDTAPTGHTIRLLQLPGAWSSFIESNPDGASCLGPMAGLEKQREQYAHAVEA

SEQ ID NO: 146327 - protein, 334 aa, Unknown
  Bacterial polypetide isolated from the Sargasso Sea
MFFTGKGGVGKTSISCATAIRLAELGKRVLLVSTDPASNVGQVFDQTIGNTIQPVTAVSGLSALEIDPQDAAQQYRARIVDPIKGLLPDDVVNSISEQLSGACTTEIAAFDEFTGLLTDASLLTRFDHIIFDTAPTGHTIRLLQLPGAWSSFIESNPDGASCLGPMAGLEKQREQYAHAVEALSDPERTRLVLVARLQKSTLQEVARTHDELSAIGLKNQYLVINGVLPASEAERDALAAAIWQREQEALANLPAGLSDLPTDNLYLQPLNMVGVSALKGLLNEHAEITSLPEQSPQNKPENMSLSVLVDDIARSEHGLIMLMGKGGVGKTTKG

SEQ ID NO: 146328 - protein, 595 aa, Unknown
  Bacterial polypetide isolated from the Sargasso Sea
MSPFLNYSFLNDAPPFLFFTGKGGVGKTSLACASAVALCDSGKRVLLVSTDPASNVGQVFDTQIGNQITRIPQVDGLSALEIDPQAAAQAYRERIVGPVRGKLPESVVRSIEEQLSGACTTEIAAFDEFTALLTDSSLVGEYDHIVFDTAPTGHTIRLLQLPGAWSEFLEQGKGDASCLGPLAGLEKQRSQYAEAVAALSDAGKTRLILVARAQASTLREVARTHDELAAIGLANQQLVINGIFPQSELVDDPLATAVWQREQRAMADMPALLASLPQDRVPLLATNLVGVDSLRQLLGAASVTGTDEVESATTEPHPGLKQLVDELASDGHGLIMLMGKGGVGKTTLAAAVAVELASRGLPVHLTTSDPAAHLGETLAGALPSLEVSRIDPHAETERYRAQVLATKGASLDAQGRALLEEDLRSPCTEEIAVFQAFSRIIREAGKRFVVMDTAPTGHTLLLLDATGAYHREIARQMGGKGLHFTTPMMQLQDPKQTKVMIVTLPEPTPVQEAANLQADLRRAGIEPWAWVVNHMLAPASVTSPLLAQRAYRQQPHIEAVKEEHAKRYAVVPLQAVEPVGVKALQDLCHPIYKEM

SEQ ID NO: 146329 - protein, 363 aa, Unknown
  Bacterial polypetide isolated from the Sargasso Sea
VAQRNGVSLIHQEPQSFSHLSVAENIFMGHMDGNNLSRVKWQEINSRSNEILESIGLKIDPKIIMDGLSIADQQMIEIAGALSKNSKVLIMDEPTSPLTPNEVGKLFEIVNKLKSNGMAIIFISHRLEEIRQISDRVTIFRDGDLITTKRINEVTNEQIIKFMIGRNIDDTEVKENEFLKTEDYILNVKNLSLSKKFDDISFNLKKGEILGFAGLVGAGRTEVAKSIFGAEKFDKGQIIFKDKSIVNNSPNEAINRGFAYVPEDRKQMGIFGPVAVEDNVTSAVPKDISNNLGLINTKIVTSMTNDYIKKFNIVLTSGRQLIEELSGGNQQKCIISKWLLSKPKVLILDEPTRGVDVGVKSEM

SEQ ID NO: 146330 - protein, 356 aa, Unknown
  Bacterial polypetide isolated from the Sargasso Sea
KIYQDAETILKDLGIQLDVRSPASGLTLAAQQAVEIAKAISLNVKVLIMDEPTASLSSHEVSQLFSVTRRLRDEGVAVLFISHRLEEVFEIADRITVFRDGHKISTNPVNEVTRESLIQEMVGREVSKFYQSSKKAVEGKQVCSIKNLNKKTVFSDINFDLHQGEILGFAGLVGSRRTDVGLAIFGVSPADSGSIEIEGQTEDIQSPQQAQKFRIAYMTEDRRKLGLAMPMSITENITLASLKKYLGAFGFVDSEKEEQTAGEFKNRLEIKTPSLTHEVGKLSGGNQQKVMFSKWLNTQPRIFILDEPTRGIDIGAKAEVHQMIRELAKEGIAIICISSDLPEVLALSDRILVMRE

SEQ ID NO: 146331 - protein, 278 aa, Unknown
  Bacterial polypetide isolated from the Sargasso Sea
MEECRVAEVLLQLDGISKSFPGVKANDEVSFQINSGEIHALLGENGAGKSTLVKMIYGLMQPDSGSMKLGSENFRPSEPSKARQSGIAMVFQHFSLFDALNVAENIALGMENPPRLQDLSEKIETVSQSYGLPLGPRRLVGQLSAGERQRVEIIRCLLQNPKLLIMDEPTSVLTPNEVKTLFETLLRLKGEGKSILYISHKLEEIREICDYATILRNGKKVGSCIPRDASAKQIGEMMVGKSFSSPSRKTRAFGEELLKVSNLSIRTKDFFGTSLSDI

SEQ ID NO: 146332 - protein, 197 aa, Unknown
  Bacterial polypetide isolated from the Sargasso Sea
MKKSIKIQNISKSFPGVKANSNVSFDIDSGSIHAVVGENGAGKSTLMKILYGMIKPDSGDIYVFDEKISLSSPKDAIKYGLGMVHQHFMLADNFTVLESIILGIDSPGIANLKLEKYKDSLQEVMKRYSLNVDLDQYVDDLGVGEKQRVEILKVLFRGAKILILDEPTAVLVPQEVDELFKNLKDLQNNGVTIIFIS

SEQ ID NO: 146333 - protein, 276 aa, Unknown
  Bacterial polypetide isolated from the Sargasso Sea
MLPSPILALSGIVKTFPGVRALDEAGLKVYPGQVMALLGENGAGKSTLMKVLTGIYQADAGSISYRGQPVHFKGPRDSQDQGISIIHQELNLLPELSIAANIFLGREPRTRFGSIDHKQLRERASTLLARLGVKHGPDTRLGDLSIGEQQMVEIAKALSFDASVIIMDEPTDALTDTETEQLFVVIRELREQGCGIVYISHRLKEIFEICDRVTVLRDGKWIGEQAVSELDEDRIIEMMVGRRLEEQYPRLARELGPVSLQVKELAGPGVRGVSFS

SEQ ID NO: 146334 - protein, 97 aa, Unknown
  Bacterial polypetide isolated from the Sargasso Sea
MNTNLKISNVTKIYPGCVANDNVSLEFNSGKIYALLGENGAGKSTLVKILSGVIIPDEGKIYLNENNLKLNSPLDAKKNDIGMVFQHFNLFETLSVL

SEQ ID NO: 146335 - protein, 290 aa, Unknown
  Bacterial polypetide isolated from the Sargasso Sea
KKMNEIAYQKLLDLGLDIDVKKLMKELTLSEQRIVEIARAMVGNAKILIMDEPTAALTNKDSKILFGVLEKIRKTGVGIIYISHYLDEVFEVCQKIVVLRDAKNAGEFLTSKSNHDEVLSAMLGNAVQNLYPPKQKNKNDQIALSLKNVTFSGTLHDISFDVLKGEIFGVFGLLGSGLENLGRNIYGFLGKNNQGHISLFGKAYSPKNTQYAKERGIGFIPAERKTEGILSELPLRSNLTIPFLNNFIKNGIISINKEKEFANKWIKDFDIKCLNSEQLFRFLSGGNQQK

SEQ ID NO: 146336 - protein, 304 aa, Unknown
  Bacterial polypetide isolated from the Sargasso Sea
SINVSLSTNEIVANLNTSQWQVIEICKALAKKPKFIVMDEPTASLDEKQIDNLFEIINTLKKNGIGIIYISHKLKEIIKISDRITVLKDGKLNDSFIKNEVNEEGLIKSMIGENISIKNKHKNKINFENPVLQINNFNYLNIFKNININLFEGEVLGLSGLLGSGANELLRCAFGIMKQDSGQILLNNKNIIINKPRDAVANGIGYIPSDRKNEGLIQNNSIKDNSVLTIFDKLTKIGFFNFNEASKTTNSYINKLDIKVSNIDSFVMNLSGGNQQKVVIAKWLAKNCKILLFDEPTRGIDVAA

SEQ ID NO: 146337 - protein, 288 aa, Unknown
  Bacterial polypetide isolated from the Sargasso Sea
IHAIVGENGAGKSTLMKILYGMTKPDDGEIEIFDEPASMSSPKDAIYRGIGMVHQHFMLAKNLTVLENIILGIDRPSLKNLGLKKYKKSIQEVMSTYSLDIDLDMFVEELSVGEKQRVEIIKVLFRGAKILILDEPTAVLVPQEVNELFKNLNNLKENGVTIIFISHKLDEVLEIADAISVMRAGKLIDSVNNDNVSKTELAEMMIGKSLPTPPPRSTEKKQNVILDLKNLTSETVDGRKLFTDVSFNVFESEILGIAGVEGNGQKEVVESIIGINDIESGEIFFNGE

SEQ ID NO: 146338 - protein, 192 aa, Unknown
  Bacterial polypetide isolated from the Sargasso Sea
GLSDETAGTIEINGVRHQIARPSEAIAAGLAYVTEDRKVSGLVLTGDVRENLCLATLDRMSTPLMMNGKAETEAAGRMVETLNIKTASLKLGVSNLSGGNQQKVVLGKWFLTEPNVLLLDEPTRGVDVGAKREIYRVMSDFAKAGGTVIMISSETDEVLGMADRAIVMRDGRVAGTLDRAEMSAEKLLHLAA

SEQ ID NO: 146339 - protein, 88 aa, Unknown
  Bacterial polypetide isolated from the Sargasso Sea
MNTNLKVSNVTKIYPGCVANSNISLEFKSGKIYALLGENGAGKSTLVKILSGVVIPDKGEIFLNNKILKLNSPIDAKKNKIGMVFQPF

SEQ ID NO: 146340 - protein, 132 aa, Unknown
  Bacterial polypetide isolated from the Sargasso Sea
MRTNLKVSNITKIYPGCVANDNVSLEFESGKIYALLGENGAGKSTLVKILSGVILPDEGEIFLNNKVLKLNSPIDAKKNKIGMVFQHFNLFETLSVFENLIIDSNETRGNLREKIKIIMKKYNFNIDLDIPV

SEQ ID NO: 146341 - protein, 219 aa, Unknown
  Bacterial polypetide isolated from the Sargasso Sea
VMSKSNFSALNIESVSKKFPGVQALDKVSMNILTGKVHALMGENGAGKSTLIKILAGAYSKDEGKIFFDENELTIESPHDSLDLGIKVVHQEISLISGFTVGENIFLEDFPANKLGIVNWKKLYKDSEELFSKIGFDLDPRAIVSDLSISQQQMVEIARAVFQNASIVIMDEPTSSLTPNEIKKLFDVIENLKKNNKTILYVTHKIEEIFQIADEVTVL

SEQ ID NO: 146342 - protein, 114 aa, Unknown
  Bacterial polypetide isolated from the Sargasso Sea
MSTASDKFLFQSKAISKSFPGVKANEDISLSVEKSQIHALLGENGAGKSTLVKIFYGLLQPDKGEMLLEGYKYQPKNPKNARSSGIGMVFQHFSLFEPLTVLENILLGLDLQGK

SEQ ID NO: 146343 - protein, 107 aa, Unknown
  Bacterial polypetide isolated from the Sargasso Sea
MNTKLRVSEISKIYPGCVANDKVSLEFGSGKIYALLGENGAGKSTLVKILSGVVRPDKGEVFLNDESIKLNSPLDAKRNNIGMVFQHFNLFETLSVFENLSIDSDKK

SEQ ID NO: 146344 - protein, 143 aa, Unknown
  Bacterial polypetide isolated from the Sargasso Sea
MNTKLKVSEISKIYPGCIANDKVSLEFESGKIYALLGENGAGKSTLVKILSGVVKPDEGKVFLNNESIKLNSPLDAKKNNIGMVFQHFNLFETLSVFENLSIDSNKTNEDLRSLVNDILKKYNFKINLDVPVLNLSAGQKQKV

SEQ ID NO: 146345 - protein, 148 aa, Unknown
  Bacterial polypetide isolated from the Sargasso Sea
VKDNINMAIMDRNSQFYIMDTLKEIKNASAMQEKLNIKVSYWSQLTQSLSGGNQQKTVIAKWLSTKPEVLILDEPTKGIDVRSKSAVHEFMGELVGEGMSIIMISSELPEILGMCDRVVVMYKGLIKEILDVKNASSEQIVKLASGES

SEQ ID NO: 146346 - protein, 216 aa, Unknown
  Bacterial polypetide isolated from the Sargasso Sea
MPLTQEKTVLSLSGITKQFPGVLANDDINFDLLEGEVHTILGENGAGKSTLMSIIDGIYQPDEGTISLYGEKINFSNPRDSIDHGIGMVFQHFMLIPNHSVAENITLGLKGLGRLNIEDVKKDIHEICERYDLHVDPDKKIRELSIGEQQRVEIIKVIYRGAKILILDEPTAVLTPQESEALYKIIRRLADQNHSIIFISHKMKEVLGSSQRITVL

SEQ ID NO: 146347 - protein, 325 aa, Unknown
  Bacterial polypetide isolated from the Sargasso Sea
DQQAQVLHRVLRERAKSGASVLYVSHRLNDVLNLCDYVWVLRDGEVVHHAPSSRLTSAELIGHMSGANALTKRLVDEARRPGPIHLSVRNLLTEKMQQPVSLDCHRGEIFGLAGLMGAGRTELLEAIYGLAPHFSGSVVLCRGEERIALSSVDEAIRSGVGMVPENRASQGIFRGLTMAFNTTIAELGRIANRHLLKPRRETAAVEKLIQRLNIKSEGVDQPIEALSGGNQQKVILARWLHRECSLLLLDEPTRGVDVAAKLAIHDLLRELRDQGLCVVIASSELQELLTLCDRIAVMSSGQLVRTFDRDEFNQDTILAAAFFTH

SEQ ID NO: 146348 - protein, 127 aa, Unknown
  Bacterial polypetide isolated from the Sargasso Sea
MNTKLKVSGISKIYPGCIANNKVSLEFGSGKIYALLGENGAGKSTLVKILSGVVKPDEGEVFLNDESIKLNSPMDAKKNNIGMVFQHFNLFETLSVFENLSIDSDKKDEDLRVLVNNILKKYNFKID

SEQ ID NO: 146349 - protein, 299 aa, Unknown
  Bacterial polypetide isolated from the Sargasso Sea
KQIKELTLPEQRIVEIARAMVGKAKILIMDEPTAALTSKESKTLFEALEKTRKAGVGIIYISHYLDEVFDVCQRIVVLRDGKNAGEFKTTSSNHDEVLSAMLGNAVENLYPNKSKKENSDLALKFDNVTFSKNLYDLNFEVYKGEILGVFGLLGSGLEDLGRKIYGISGKTEKGKISLFGKDYTPISPQDAKKNGIGFIPAERKTEGILSELSLRNNMTIPFLNNFIPRTFIDTKKEKEFTNKWITDFDIKCLSSEQLFRFLSGGNQQKACIARWLVDEVSVLIIEEPTRGVDLGARKE

SEQ ID NO: 146350 - protein, 199 aa, Unknown
  Bacterial polypetide isolated from the Sargasso Sea
MEVRGVGKSFPGVRALNGVDLSLHKGQVLSLIGENGAGKSTLMKILAGVQPPDEGNILLDGAKVEIESTRAALDLGISLIHQELNLATNLSVGANVFLGREPLRGGFIDESTIRTESAKFLEMVGLDVAPDVLVGDLTIGRQQMVEIAKALSVNSRVLIMDEPTSSLSQAETENLFTVIKDLRGRGVSIIYISHRLARE

SEQ ID NO: 146351 - protein, 297 aa, Unknown
  Bacterial polypetide isolated from the Sargasso Sea
RFRYVCRRLSVGEKQRVEIIKVLFRGAKILILDEPTAVLVPQEVSELFKNLNNLKQNGVTIIFISHKLDEVLEIADDISVMRAGELIDSVKNENVSKTELAEMMIGKSLPTPPPRGTETKQNKILDIKSITSESVDGRKFFTDVSFSVFESEILGIAGVEGNGQKEVVESIIGIQNIESGEIFFNGENINNNTTRQRLESGISFIPEDRQLQAMIMDMNLTNNVIIGRQNIEKYKSNLATVKTKNAIKESENVISLFDVKTPNTNTLATALSGGNQQKFVVGRELEDNPSLLIASQP

SEQ ID NO: 146352 - protein, 211 aa, Unknown
  Bacterial polypetide isolated from the Sargasso Sea
MQPIVEFQNICKEYPGVVANNNVSFEITRQSIHAILGENGAGKSTLVKILYGHVKPDKGQIIINSDLATINSPTTAQSLGINMVFQHFSLFESLTVAENLILGMSEKISLSKLKSKSESICNKYGFNLNLNSPISALSVGQRQSVEIVRSLLNNPEILIMDEPTSVLTPEEIKKLFKIIKKLVADGLTVIFISHKLDEIINLSDHVTIMRN

SEQ ID NO: 146353 - protein, 241 aa, Unknown
  Bacterial polypetide isolated from the Sargasso Sea
KYSSPFDLVFYKNEIIAITGLLGSGKTAIASAIFGLNPLLEGDMLLHGEPYNPKSPADAISKGIFMCPKDRSTNAVVSDFDITNNMVLPFLDRHSWFSFLKPKNLERKATVSISELGIVCQSELDLVTTLSGGNQQKVMIGRWLSEKSEVLLLDEPFQGVDIKARRDIGSQIRQSSKDRATLVFVAELDEAVEIADKIVVLHEGSYSGIFENKENNIADILSLYSGKPSETLAEARGSLNG

SEQ ID NO: 146354 - protein, 281 aa, Unknown
  Bacterial polypetide isolated from the Sargasso Sea
IYISHRLEEVFRIADVVTVLKDGQLVETESISKLTRAELVKMMVGRTLEEVFPVSNNQPGKSVLIAENISNDTVLEQVSFDLRQGEIVGLAGMVGSGRTELARVLFGADPLISGSIKINGENAYFKNPSEAIKNKISLVPEDRKEQGLFTELPIRNNITMPILRKISQWGFLSRSKEQEIVNQSRNQLSITMASGSQEVQYLSGGNQQKVVLAKWLQTRPEVIIMDEPTRGVDVGAKFEIYQLMRHLNQEGIGILMISSELTEILGLSDRILVMREGKDRC

SEQ ID NO: 146355 - protein, 129 aa, Unknown
  Bacterial polypetide isolated from the Sargasso Sea
MNTNLKVTNITKIYPGCIANKNISLEFKSGKIYALLGENGAGKSTLVKILSGVIMPDEGQIFLNNKTLKLNSPIDAKKNKIGMVFQHFNLFETLSVFENLIIDSNETREKLREKIKTIMDKYNFSIDLD

SEQ ID NO: 146356 - protein, 126 aa, Unknown
  Bacterial polypetide isolated from the Sargasso Sea
MKEPILQFKKISKSYGNVLANNKISFNIKKNSVHALLGENGAGKSTLVKILYGLLQPDEGEILFNGNIFSTKSPKESMAKGIGMVFQHFSLFESLSVKENLILGLNEEISYGALVRDILAISKKYG

SEQ ID NO: 146357 - protein, 315 aa, Unknown
  Bacterial polypetide isolated from the Sargasso Sea
MDMKAGEIHALVGENGAGKSTLIKILTGIQHADQGEVLLQGQTVRISDAQEAQSLGIAAIFQEPMVFPDLDVAENIFISHRDRGFFIRWKKIYQDAETILNDLGIQLDVRSPASGLTLAAQQAVEIAKAISLNVKVLIMDEPTASLSSHEVSQLFSVTRRLRHEGVAVLFISHRLEEVFEIADRITVFRDGHKISTNPVNEVTRESLIHEMVGREVSKFYQSSKKAVEGKQVCSIKNLNKKTVFSDINFDLHQGEILGFAGLVGSRRTDVGLAIFGVSPADSGSIEIEGQAEDIQSPQQAQKLGIAYMTEDRRKL

SEQ ID NO: 146358 - protein, 290 aa, Unknown
  Bacterial polypetide isolated from the Sargasso Sea
SGLTLAAQQAVEIAKAISLNVKVLIMDEPTASLSSHEVSQLFSVTRRLRDEGVAVLFISHRLEEVFEIADRITVFRDGHKISTNPVNEVTRESLIQEMVGREVSKFYQSSKKAAEGKQVCSIKNLNKKTVFSDINFDLHQGEILGFAGLVGSRRTDVGLAIFGVSPADSGSIEIERKTEDIQSPQQAQKLGIAYMTEDRRKLGLAMPMSITENITLASLKKYLGALGFVDSEKEEQTAGEFKNRLEIKTPSLTHEVGKLSGGNQQKVMFSKWLNTQPRIFILDEPTRGID

SEQ ID NO: 146359 - protein, 308 aa, Unknown
  Bacterial polypetide isolated from the Sargasso Sea
MADAAQKPLLKMHGISKAFPGVQALNKVALTLFGGEVLALLGENGAGKSTLIKILGGAQQQDKGTIEINGNSVQLNNPQSSQAEGIGIIYQEFNLVPGLTARENIFLGQEPSSVCFIPRVQEEEKSRELFARIGVEIDPNTPCSELTVAQQQVVEIAKALAQDAKIIVMDEPTAALTPREVQRLLKIVQELRIQGIGIIYISHRLDEIDAIADRVTVLRDGEHVATRNKSKLHRNEMIELMVGRSLDKEFPSRECIPGPVRLAVRNLMRSNTVRNVTFKLHAGEIVGLTGLVGAGRTETARLIFGADS

SEQ ID NO: 146360 - protein, 116 aa, Unknown
  Bacterial polypetide isolated from the Sargasso Sea
MNSTFIKFNNITKKFPRVVANDDVSFDIKKSSVHALLGENGAGKSTLVKVLYGLLAADHGTITFNDQELNISSPSEARNKGIGMVFQHFSLFESLTVRDNLILGIDKKISYSDLKD

SEQ ID NO: 146361 - protein, 153 aa, Unknown
  Bacterial polypetide isolated from the Sargasso Sea
MSVKSNTTTPHYSKLSKFFFLANKQQENLITNNYSKKVQLKYNNMNQSIYQLSGGNQQKVVFSRALASNPKLLLLDEPTRGVDVGAKLDIYNLIIQLTKNGCGIVLNSSDLSEIMGMCDKILILKDHEQYKILENFKINSQDVLANFYESKKQ

SEQ ID NO: 146362 - protein, 219 aa, Unknown
  Bacterial polypetide isolated from the Sargasso Sea
MSDYILELNNITKNFPGVKALDNANFKLKKKSIHALLGENGAGKSTLIKIITGVYNQNEGKLFLNDQEKSFSSPNEAMNAGISVVHQERNLIRRFSVGENLMLTNLPKNNLGLIDYNTVAKESKKWLDIMELDIDPNTIVSDLTVAKMQLCEIAKALSLESKILLLDEPTSSLSPQDTKNLFALLKRLVVEQDVSIVFVSHKLEEVFEICDEVTVLRDG

SEQ ID NO: 146363 - protein, 130 aa, Unknown
  Bacterial polypetide isolated from the Sargasso Sea
MNTNLKISNVTKIYPGCVANDNVSLEFNSGKIYALLGENGAGKSTLVKILSGVIIPDEGKIYLNENNLNLNSPSDAKKNDIGMVFQHFNLFETLSVFENLIIDSDEQRESLREKIDLIMKKYNFPIDLDI

SEQ ID NO: 146364 - protein, 349 aa, Unknown
  Bacterial polypetide isolated from the Sargasso Sea
MVGITKRYPAVVANSGVSLTVLPGEIHAVLGENGAGKSTLMKIIYGSVKPDEGSVFFNGQAVQVRNPQEARALGIAMVFQHFSLFDTLTVAENVWLGLDKSLTLAEVTGRITAKAAEYGLDIDPLRPVHTLSVGEMQRVEIIRALLTNPKVLILDEPTSVLTPQAVEKLFVVLRKLASEGCSILYISHKLHEIRALCTACTVLRGGKVTGVCNPAEESNASLSRLMIGAEPPALEHRAVQTGATVLRVQGLSLPRADQFGVDLIDLQFEVKAGEVVGIAGVSGNGQKELLYALSGEDQRADAACIQVSGQNAGRMGPGQRRALGLHFVPEERLGRGAVPTMGLAHNLLL

SEQ ID NO: 146365 - protein, 379 aa, Unknown
  Bacterial polypetide isolated from the Sargasso Sea
MSLAVRFDDIRKDFGPVRVLHGVSFDLTPGRIYGLLGENGAGKSTLMKILAGYETASSGSVLVDGHAQQFAGSRDAEAQGIVLIHQEFNLAEHLTIAQNMYLGHEKKRGWFVDDAAMRADAARYLAQVGLEKAPDTKVRELIVAEKQMVEIAKALSRRARLLIMDEPTATLTPAETERLFTLMAKLKADGVTLIYISHKLDEVERITDEVIVMRDGRFVARGETAGLARQQMANLMVGRDVSDMFPDKITVPVDAPIALKVEGLAVPDWVEDLSFDVRAGEVLGFAGLVGAGRTEAFEAILGLRKRTAGRIEIAGRRADLKNPRDAMRHGLTYLSEDRKGKGLHVNLSLQDNVTLMTLERYAHPLLDMKAGRTALTKAV

SEQ ID NO: 146366 - protein, 390 aa, Unknown
  Bacterial polypetide isolated from the Sargasso Sea
MTKNPAIELRQISKSFGPVQANKDITIRVMPGTIHGIIGENGAGKSTLMSILYGFYKADAGEIFVDGKKISIPDSQAAITAGIGMVFQHFKLVENFSVLENIVLGAESGALLSPSLSKARAELAALAAEYELNVDPDAIIEDIGVGMQQRVEILKALYRQANILILDEPTGVLTPAEADQLFRILKRLREEGKTIILITHKLREIMDITDTVSVMRQGEMTATLRTDDTTPEDLAELMVGRKVLLRVDKAPAKPTKPVLEIQNLNMVDDFDVQRLKNINLTVKAGEILGIAGVAGNGQSELLQVLGGYSAATGIIKLNGSEIDLSTSVSGDGQARRALGMAHVPEDRQREGLIMDFMAWENAVFGYHREKSNQANRFFMDNNAIRRETGC

SEQ ID NO: 146367 - protein, 304 aa, Unknown
  Bacterial polypetide isolated from the Sargasso Sea
MSDYILELNNITKNFPGVKALDNANFRLKKKSIHALLGENGAGKSTLIKIITGVYNQNEGKLFLNNQEKSFSSPNEAMNAGISVVHQERNLIRRFSVGENLMLTNLPKNNLGLIDYNTVAKESKKWLDIMELDIDPNTIVSDLTVAKMQLCEIAKALSLESKILLLDEPTSSLSPQDTKNLFALLKRLVAEQDVSIVFVSHKLEEVFEICDEVTVLRDGKNACESEQITNLNRQKLVKLMIGRDEQIIKSKKNIDFTDESLLDLQSINTDLGHKNINLNLKKGEILGLYGLVGAGRTELIKCVL

SEQ ID NO: 146368 - protein, 499 aa, Unknown
  Bacterial polypetide isolated from the Sargasso Sea
MRFDNIGKVFPGVRALDGISFDVHAGEVHGLMGENGAGKSTLLKILGGEYQPDAGSVLVDGQPVQFASAAASIAAGIAVIHQELQYVPDLTVAENLLLGRLPNAFGWVRKREAKRFVRERLAAMGVDLDPDAKLGRLSIAQRQMVEICKALMRNARVIALDEPTSSLSHRETEVLFKLVDDLRAQGRALIYISHRMDEIYRLCDACTIFRDGRKIASHESLADVPRERLVAEMVGREISDIYHYAPRALGDVRFAADGIDGPALREPASFSVRAGEIVGFFGLVGAGRSELMRLVYGADRRRAGALTLDGARIDVKRTGDAIRHGIVLCPEDRKEEGIIAIASVAENINISCRRHSLRAGLFINRRAESETADRFIQRLKIKTPNRRQKIRFLSGGNQQKAILSRWLAEPDLKVVILDEPTRGIDVGAKHEIYDVIYRLAERGCAIVMVSSELPEVLGVSDRIVVMREGRIAGELPRDQANEHAVLSLALPQTSAVEAA

SEQ ID NO: 146369 - protein, 218 aa, Unknown
  Bacterial polypetide isolated from the Sargasso Sea
VGLAGMVGSGRTELARALFGADPLTSGSIKIDGENTFFNNPSEAIKKRISLVPEDRKEQGLFTELPIRNNITMSILKKISKWGFLSWSKEWEMVDQSRNQLSIAMASGSQEVQYLSGGNQQKVVLAKWLQTRPEVIIMDEPTRGVDIGAKFEIYQLMRHLNQEGIGILMISSELTEILGLSDRILVMREGSIVAELVPSETSEEQIIEYATTTVSKAA

SEQ ID NO: 146370 - protein, 400 aa, Unknown
  Bacterial polypetide isolated from the Sargasso Sea
MIWVSHSIPDARVADLSVGEKQRVEIVKCLIREPRLLVLDEPTAVLLPAEIDALLDTCARVVARGCAVVLVTHKLAEIRRIASRATVLQSGRVVARSSTPSADVDTLVRAMIQRPVTEEHGTGHSANQTASPAPLKSRSASPYGRPLADEALQIDGLTVRDASGVTRLEDCTLVVNRSEIVGIAGVEGNGQSELGAVLAGLQRASAGRFFVQGKDCTQAAPQTLTKAGVGVVPEDRHAVGCVPDMSLTENLFLNRLDDYTRRGFMRRRAMRRDARALMQRFDVRAASPDVAFRGLSGGNQQKAVLARELTLEGLAVLVAAQPTRGLDVGAVAAVYEHIRAARDRGVGVLLISSELDELMAVADRVLVMYRGRIMGTCVPDASQVNPQRERIGAWMAGQTA

SEQ ID NO: 146371 - protein, 519 aa, Unknown
  Bacterial polypetide isolated from the Sargasso Sea
MSEPLLTMRGIVKAFSGVKALDGIDLTVAPGECVGLCGENGAGKSTLMKVLSGVYPHGTWDGEIIWEGEPLKAASIRDTERAGIIIIHQELMLVPELSVAENIFLGNEITLPGGRMNYAAMYQRADELLRELGISGINSAQPVMNYGGGHQQLIEIAKALNKRAKLLILDEPSSSLTATEIHILLDIVRDLKRRGVACVYISHKLDEVAAVCDTISVIRDGRHVATEPMHALTTDRIISLMVGREIKNLFPREPHPIGEVIFEARHVTCFDVTNPRRKRVNDVSFALRRGEILGVAGLVGAGRTELMEAIFGAYPGVSEASVVMDGKPLKIRAPVDAIRAGIGMVPEDRKRHGIVPGLSVGHNITLAVLQRFAKGGRIDSAAELDTIHTEMKRLSVRAAHPMLSIASLSGGNQQKAVLTRMLLTDPKVLILDEPTRGVDVGAKYEIYKLIFQLAQRGMAIVMVSSELPEVLGISDRVLVIGEGELRGDFVNDGLTQEDILSAAIRPAQRSTNPTAASAA

SEQ ID NO: 146372 - protein, 499 aa, Unknown
  Bacterial polypetide isolated from the Sargasso Sea
MSLILELKQISKHYPGVKALEDVSLRLFAGEVHALLGENGAGKSTLVKVMTGAQSKDMGDILFLGDPQHFNTPMDAQKAGISTVYQEVNLVPNLTVAQNLFLGYEPRRLGLIHFKKMYADARAVLTQFKLDIDVSAPLSDYSIAVQQLIAIARGVAMSAKVLVLDEPTASLDAKEVQVLFGILNQLKAKGVAIVFITHFLDQVYQISDRITVLRNGQFVGEYLTAELPQPKLIEAMLGRSLQEQLVDKQEKERTVTRAEAVLLSLEDVSVKGSIQSMNLTVPKGQAVGLAGLLGSGRSEVCNAVFGLDLVDSGSIHLAGQKLNLSQPVDAISAGIALCPEDRKIDGIIGPLSIRENIILALQARIGWWRYLSNSRQQEIAQFFIDKLQIATPDADKPIEQLSGGNQQKVILARWLAIEPILLVLDEPTRGIDIGAHAEIVKLIRTLCDEGMSLLVASSELDELVAFSNKVVVLRDRYAVRELSGAELTSQHVMQAIAEG

SEQ ID NO: 146373 - protein, 537 aa, Unknown
  Bacterial polypetide isolated from the Sargasso Sea
MDPTSQPSRAAAPVLSVSGIGKTYAEPVLADVTLTLEAGHALALTGENGAGKSTLSKIIGGLVEPTAGTMQLGGQPYAPASRTQAEALGVRMVMQELNLLPTLTVAENLFLNRLPRRFGIIDRARLRDDARAAMAQVGLDTVDPDTPVGALGIGHQQMVEIARNLIGDCRVLILDEPTAMLTAREVELLFEQIDRLKARGVAIVYISHRLEELARVAERVAVLRDGRLVHAGDMAATTSDGLVTLMVGREIGEHIDLGERHIGAPRLVVSGLSRGTAVRDVSLEVRAGEIFGISGLIGAGRTELLRLIYGADAPDAGTIAIGQPPKPVRIGSPVEAVKQGIALITEDRKGEGLLLTQSITANVSLGQLDRLARGGIVDGARETALAEQQIDALRIRSHGATQAVGELSGGNQQKVVIGRWLARDMGVLLFDEPTRGIDVGAKFEIYTLMGALAREGRALVVVSSDLRELMLICDRIGVMSAGRMTAVFERGNWTQDALLAAAFAGFGRETPPGGAQHPDAGQAPGAARGTSNTGRQQ

SEQ ID NO: 146374 - protein, 519 aa, Unknown
  Bacterial polypetide isolated from the Sargasso Sea
MTEPLLTMRGIVKAFDGVKALDGIDLTVRPGECVGLCGENGAGKSTLMKVLSGVYPHGTWDGEIRWEGAPLEASGVRDTERAGIVIIHQELMLVPELSVAENIFLGNEITLPGGRMNFSAMVQRAEELLRELRIDSINVAQPVMNYGGGHQQLIEIAKALNKDAKLLILDEPSSSLSAAETRILLDIVRDLKRRGVACVYISHKLDEVAAVCDTVTVIRDGRHVATEPMAALTTDRIIAMMVGREIRDLYPREPHEIGEVVLEARNVTCRDVTNARRKRVDDVSFSVRRGEILGVAGLVGAGRTELMQAIFGAYPGACTASVTMNGRPLSIRSPADAIRAGIAMVPEDRKRHGIVPQLGVGHNITLAVLRRFAARGRIDAAAELDAIRTEMQRLSVRAAHPFLSIASLSGGNQQKAVLAKMLLTEPQVLILDEPTRGVDVGAKVEIYRLIFALAKRGVALIVVSSELPEVLGLADRVLVIGEGELRGDFVNQGLTQEQILGAALKPARLPAEPTAASAS

SEQ ID NO: 146375 - protein, 407 aa, Unknown
  Bacterial polypetide isolated from the Sargasso Sea
MTTQQQSEWLLEMIDVSKSFPGVKALDNVNLRVRPHSVHALMGENGAGKSTLLKCLFGIYEKDQGKIFFKGQEINFTSSKEALENGVSMVHQELNLVLQRSVMDNMWLGRYPTKGLFVDHGKMYQDTKHIFDELDIDIDPRVKVGTLSVSQMQMIEIAKAFSYDAKIVIMDEPTSSLTEKEVSHLFKIINKLKEKGCGIVYISHKMEEIFQLCDEITILRDGQWVATQPLKGMTMDQIIGMMVGRELTQRFPEKTNQPKEVILEVEHLTAKNQPSIQDITFNLHKGEILGIAGLVGAKRTDIVETLFGIRDRSEGIIKLHGQPVANHNAHEAIRNGFALVTEERRSTGIYSRLDIAFNSLIANMDNYKGSMGLLSDNKMKSDTQWVIDSMRVKTPTHRPRSAPSRGA

SEQ ID NO: 146376 - protein, 371 aa, Unknown
  Bacterial polypetide isolated from the Sargasso Sea
LDTATLVRDLGPADKQMIAIARAMAHAPKLLILDEPTSSLSENEAKRLFTLLQKLKEQGVAILYISHRMSDINSVADRIVAMRDGTISGLFEEKPLNYEGAVTAMLGQKLSQNEIKINERKREILNLKEVRLATDSKPFDLSFYENEIVSITGLIGSGKTTLASQIFGLSPNSKVKMTLNGDPYSPQSPKEAIAAGVYMCPKDRASNAVVSEFDISNNLALPFFKKHSRFSFLRAKSLSQNAKNSISELGIVCQSEVDSVTTLSGGNQQKVMVGRWLAEESSVLLLDEPFQGVDIKARRDIGIQIRSTSSQRATLIFVAELDEALEIADRVIVLHEGNLVGEYQNNSKNIPEIVSSFSGSAYKQDSSNYGT

SEQ ID NO: 146377 - protein, 508 aa, Unknown
  Bacterial polypetide isolated from the Sargasso Sea
MNKKQKELAIEVKGITKSYPGVVANKSVDFTVNKGEIHALVGENGAGKSTLMKILYGIEQADEGEVSVNGNVVQINKVDAAIKLGIGMVHQEFHLVPSFTAAENIGLGEEPRNSNGLINWDKLNKDVSEIAEKYGLDVDPNLRMIDASVGIQQRTEILKTLYRNADILILDEPTAVLTPQETDELFQVIRSLVDEGKTVIFITHKLREVMEISDRVTVMRDGEVQGVSETKKTSVKELANLMVGREVFLQVKKEKSKPTDVVLEVKDLWVHDARGLVAVKGVNFEVAKGEIVGIAGVDGNGQTELVEALAGLRDTSRGEILFEGKNIEKNSPRQRRREGLAHIPEDRSNTGLNVRLAIWENLIGTSYFRSPLSRGGIVSMKNILRHSNELRETFDIRSPGVTIRAGSLSGGNQQKVVVARELSEEPALTIASQPTRGVDIGNIEAIHEQIVEIRDSGKAVLLISAELDEVMSVADRVGVIYEGEFVEWVDPSKVNQEQMGLYMAGIKG

SEQ ID NO: 146378 - protein, 502 aa, Unknown
  Bacterial polypetide isolated from the Sargasso Sea
MSTNPILKISKVSRTFGAIQALKEANFEINEGEIMGLVGENGAGKSTLVKIISGFDPGFKGSYQINGKEVKFETPSQAEESGIAIAQQELSLIPNMSVAENIFLTGAKVKKFATLNTLAKMARPYLDEVGLTEVDPTTRINLLSVGEQHLVEVARLISREAKILILDEPTAALGEAESRRILEMVERLAANGKSIIYVSHRLDEIFKITKRITILRDGVSQGIQETKDIDVNKLVEIMLGRELANMFPSKADHISDDPKLVVKELWPDGVLEPVSFSAYKGEILGLSGQLGSGAGEVLASIAGALQSRSGSLTLNGETFLPKSPSHAIKKKIAYCSSDRKKDGLFLGRPIFENLTSPALGAISKYGFNFGSSEDNYSRNLAKEFLIDVKRMHDESGLLSGGNQQKVALGKWLSIKPDVLLVNEPTRGVDVGAKSEIYQRMRELAARGITIIFASTDIQEITYLPDRVITFYRGMMIDEHRLEKIKTPVILKEITDPFNETNL

SEQ ID NO: 146379 - protein, 502 aa, Unknown
  Bacterial polypetide isolated from the Sargasso Sea
MASDPVLKITNVSRTFGAIQALKEANFEINEGEIMGLVGENGAGKSTLVKIISGFDPGFKGSYQLNGKEVKFDTPSKAEESGIAIAQQELSLIPNMSVAENIFLTGAKVKKFATLNTLSKMARPYLDEVGLTDIDPSTRINLLSVGEQHLVEVARLISREAKILILDEPTAALGELESRRILEMVQRLAKNGKSIIYVSHRLDEIFKITKRITILRDGVSQGVQETKDIDVNKLVEIMLGRELANMFPSRADHISLESKIEVKDLWPDGVLEPVSFSAYQGEILGLSGQLGSGAGEVLASIAGALKSRSGSLTLNGETFLPKSPSQAIKKKIAYCSSDRKKDGLFLGRPIFENLTSPALDTISKFGFNFGSTEDSYAKNLAQEFLIDVKRVYDESGLLSGGNQQKVALGKWLSIKPDVLLVNEPTRGVDVGAKSEIYQRMRELAARGITIIFASTDIQEITYLPDRVITFYRGMMIDEHRLEQIKTPVILKEITDPFNETNL

SEQ ID NO: 146380 - protein, 273 aa, Unknown
  Bacterial polypetide isolated from the Sargasso Sea
EGAVTAMLGQKLSQNEIEINERKREILNLKGVRLANDSKPFDLSFYKNEIVSITGLIGSGKTTLASQIFGLSPNSKVKMTLNGDPYSPQSPKEAIAEGVFMCPKDRASNAVVSEFDISNNLALPFFKKHSRLSFLRTKRLSQNARNSISELGIVCQSEADSVTTLSGGNQQKVMVGRWLAEESSVLLLDEPFQGVDIKARRDIGIQIRSTSSHRATLIFVAELDEALEIADRVIVLHEGNLVGEYQNKSENIPEIVSSFSGSAYKQDSSNYGT

SEQ ID NO: 146381 - protein, 303 aa, Unknown
  Bacterial polypetide isolated from the Sargasso Sea
MSARVSTSEPANAPAADAPARSSRPDENGELLRLTGVTKRFPGVVALDSVSFDLRRAEVHAVCGENGAGKSTLMKIISGQYAPDEGSIVYKGSECRFASSLEAQAAGIAIIHQELNLVPHLSVAENIFLAREPRRGVFVDRARLRADAQRCLDRLGVDIAPGTLVRTLPVAQRQMVEIAKALSLDAEVLIMDEPTSSLTETETSQLFRIIHELKRAGVGIIYISHRLDEMTEIVDRVTVMRDGRYVSTDVFRETTIDKVVARMVGRSLEDKFPPRTSVPTAEVLLSVDQLARANVFGPVSFEL

SEQ ID NO: 146382 - protein, 506 aa, Unknown
  Bacterial polypetide isolated from the Sargasso Sea
MDTILKLDNITKSFPGVKALQGIHLEIARGEIHALLGENGAGKSTLMKILCGIYQPDEGTITIAGETRHFANYHDAVAAGVGIVFQEFSLIPYLNAVENMFLGRELKSALGLLERGKMRRAAAAIFERLGVAIDLSVPIRELSVAQQQFVEIGKALSLEARILILDEPTATLTPAEAEHLFAIMRDLKQQGVAMIFISHHLEEIFEVCDRITVLRDGQYVGMTEVAQSDVNHLVEMMVGRRIENSFPPKPPLRADAKIVLEVDKLQLLKDSPILRFTLREGEILGFAGLVGSGRTETALAVIGADPAYVKEIRINGTAAKLSDPADALRAGVGILPESRKTEGLITDFSIKQNISINNLGKYRSLRFFIDQRSEARATADIMKRVGVKAPTMHTEVATLSGGNQQKVVIARWLNHHTNILIFDEPTRGIDVGAKAEIYLLMRELTARGYSIIMISSELPEIVGMCDRVAVFRQGRIEAMLEGEQIDSNAVMTYATAGTRGATHEHA

SEQ ID NO: 146383 - protein, 513 aa, Unknown
  Bacterial polypetide isolated from the Sargasso Sea
MTKNPAIELRQISKSFGPVQANKDITIRVMPGSIHGIIGENGAGKSTLMSILYGFYKADAGEIFVDGKKISIPDSQAAIAAGIGMVFQHFKLVENFSVLENIVLGAESGALLSPSLSKARAELAALAAEYELNVDPDAIIEDIGVGMQQRVEILKALYRQANILILDEPTGVLTPAEADQLFRILKRLREEGKTIILITHKLREIMDITDTVSVMRQGEMTATLKTDDTSPEDLAELMVGRKVLLRVDKRPANPTKPVLEIQSLNMVDDFGVQRLKNINLTVEAGEILGIAGVAGNGQSELLQVLGGYSAATGIIKLNGSEIDLSTSVSGDGQARRALGMAHVPEDRQREGLIMDFMAWENAVFGYHREKSNQANRFFMDNNAIRKETEDKMKRFDVRPPNPRLTAKNFSGGNQQKIVLAREIERNPDLLLVGQPTRGVDIGAIEFIHQQIVALRDQGKAILLISVELDEILSLSDRVLVMFDGEIMGERNPANTNEKELGLLMAGVSEKAAQ

SEQ ID NO: 146384 - protein, 139 aa, Unknown
  Bacterial polypetide isolated from the Sargasso Sea
MAGECKFVSLLKLKNIRKEFPGCIANDNVDLDIDAGQIHALLGENGAGKSTLVKVIYGLLKPDFGQIIWNGEETDIISPLEARRLGIGMVFQHFSLFDALTVSENISLGITQTLKRSDLDDRISEISKSYGFSITQIAK

SEQ ID NO: 146385 - protein, 529 aa, Unknown
  Bacterial polypetide isolated from the Sargasso Sea
MVNDERCDAKGGGTAGALRTEKPMDTILRLSHITKSFPGVKALSDIDLEIARGEIHALLGENGAGKSTLMKILCGIHQPDAGTIEIDGTARHFADYHDAVAAGVGIVFQEFSLIPHLDAVDNLFLGRELRNRWGARDRKRMRHAAAAIFARLGVAIDLDAPIRALSVAQQQFVEIGKALSLDARILILDEPTATLTPAEAEHLFAIMRELKRQGVAMIFISHHLDEIFAVCDRITVLRDGQYVATTDVARTDVEQLVRMMVGRRIESSFPPKPACAADAPRVLEVNELQIERGGPVNRFTLHAGEILGFAGLVGSGRTETALAVIGATRAHRKDVRVRGAAAKLADPADALRAGIGILPESRKTEGLVTSFSIRDNISLNNLGKYRSMRWLIDRRGEARTTHDVMRRVGVKAPSIHTEVATLSGGNQQKVVIARWLNHHTSVLIFDEPTRGIDVGAKAEIYGLMRELTARGYAIIMISSELPEIVGMCDRVAVFRQGRIEATLAGDEIDPDTVMTYATAGTRGATHEPA

SEQ ID NO: 146386 - protein, 501 aa, Unknown
  Bacterial polypetide isolated from the Sargasso Sea
MKKIELLNLTKSFSSFKALSNVSIELLCGETHALMGENGAGKTTLIKVLAGILKPDQMTMKIDNNIQNIYSSIQSKNLGFNFIHQELNIVSYLSVAENMFLNHPYPKKYKTIIDWNKIYKLSSNALKELGVTHIDVKKKCAKLSTGDQMLVKIASCLIKTDTTPTLYVFDEPTAALTLQESEKLFKVINNLKKRGAIILYVSHRMNEILEISDKVTVLRDGMKVLTDKTSELSKEKIIRSMVGKDLSDNFPERTGNINENVVIDVNNVYTKNIRNINFKIKAGEVLGIAGLSNSGQREIFNMLMGVDNIDKGKISFMDQKYEPTSPNDAWKKLISFVPRERRKEALMLKMSVKSNTTTPHYSKLSKFFFLANKQQENLITNNYSKKVQLKYENMNQSIYQLSGGNQQKVVFSRALASNPKLLLLDEPTRGVDVGAKLDIYNLIIQLTKNGCGIVLNSSDLSEIMGMCDKILILKDHEQYKILENFKINSQDVLANFYESKK

SEQ ID NO: 146387 - protein, 414 aa, Unknown
  Bacterial polypetide isolated from the Sargasso Sea
MNQGISVIYQELALVLQMTVAENIFLGREPRNTFGLVDQTRLRSEAQDLLEQLGIKIDLDIEVGDLSVAYQQMIEIAKALSKNADLIVMDEPSAILAGTELEQLFNIIQSLVKRGVSVIYISHRLEEVFKIADVVSVLKDGQLVDTKPIKELDRSQLVRMMVGRSLEEVFPVSTHQPEDIIFEAKNISTDTILNKASLYLRKGEIVGLAGMVGSGRTELARALFGADTLTSGIISLKGKEIFLNNPSDAIKKKVSLVPEDRKQQGLFIELPIRNNISMSILRNISLWGFLNWKKEKEIVELARKKHSIAMVSGNQEIQFLSGGNQQKVVLAKWLQTRPEVIIMDEPTRGIDVGAKFEIYQLMRQLNKAGIAILMISSELIEILGMSDRILVMKEGSIVAELQSSETSEEQIIEY

SEQ ID NO: 146388 - protein, 104 aa, Unknown
  Bacterial polypetide isolated from the Sargasso Sea
MNNKIENTLFQCRAINKEFGNVRANNDISINVRTSQIHALLGENGAGKSTLVKIIYGLLQPDTGSMTFSDKEYSPKSPKDARALGVGMVFQHFSLFEPLTALKI

SEQ ID NO: 146389 - protein, 138 aa, Unknown
  Bacterial polypetide isolated from the Sargasso Sea
MNTNLKISNVTKIYPGCVANDNVSLEFNSGKIYALLGENGAGKSTLVKILSGVIIPDEGKIYLNENNLKLNSPLDAKKNDIGMVFQHFNLFETLSVFENLIIDSDEQREGLREKIDSIMRKYNFSIDLDIPVLNLSAG

SEQ ID NO: 146390 - protein, 262 aa, Unknown
  Bacterial polypetide isolated from the Sargasso Sea
MDEVIPPQLLRLKGITKEFPGCLANDRIDLEIQEGEIHALLGENGAGKSTLVKIIYGVLRPEEGELWWKGKLTPIPRPATARQLGIGMVFQHFSLFEAMTTLQNVALALPPINHDELREKLEQTAEAYGLVLHPDHYVHDLSMGERQRIEIVRCLLQNPKLFILDEPTSVLTPQETEILFQTLRKIASEGRAVLYISHKLEEVRSLCDRATILRGGKKVDACIPSEESAHSLAEKMIGQKIEIVEKKSAFGKSGMQLEVESL

SEQ ID NO: 146391 - protein, 145 aa, Unknown
  Bacterial polypetide isolated from the Sargasso Sea
MATDLRISNISKIYPGCIANDNVSLQFKSGKIYALLGENGAGKSTLVKILSGVVSPDNGEVFLNEKNLKLSSPLDAKKNKIGMVFQHFNLFETLSVFENLSIDATEDNKSLRVRINEILKKYNFSIDLDVPVLNLSAGHKQKVEI

SEQ ID NO: 146392 - protein, 215 aa, Unknown
  Bacterial polypetide isolated from the Sargasso Sea
MPLTQEKTVLSLRGITKQFPGVLANDDINFDLLEGEVHTILGENGAGKSTLMSIIDGIYQPDEGSISLYGEKINFSNPRDSIDHGIGMVFQHFMLIPNHSVAENITLGLKGLGRLNIEDVKKDIHEICERYDLHVDPDKKIRDLSIGEQQRVEIIKVIYRGAKILILDEPTAVLTPQESEALYKIIRRLADQNHSIIFISHKMKEILDLSQRITV

SEQ ID NO: 146393 - protein, 378 aa, Unknown
  Bacterial polypetide isolated from the Sargasso Sea
KSCEVLNSINVELDINEIVGNLNTSQWQIIEICKALVKNPKFIVMDEPTASLDENQIDNLFAIIKRLKNNGIGIIYISHKLNEIIKISDRITVLKDGKISKLYNNKNIDETILIKSMVGDAIEIKKERKKTKESRSVILELKNLNYQNKFKNINIELKDGEVLGLSGLLGSGTNDILRALFGIIKDNEGEIFFNNNKIKVNSPISAVNFGFGYIPSDRKNEGLILENSIKDNSVLTIFKSLTNLGIFNSRKAEKITNEYVEKLQVKVTDINNKVMNLSGGNQQKIVIAKWLAKNCKILLFDEPTRGIDVAAKAQIWKLINDFAKSGGAVIVASNEIPELILGCDRILTMNKGEMVKVFEENEFNEEKISMCISTSYLE

SEQ ID NO: 146394 - protein, 311 aa, Unknown
  Bacterial polypetide isolated from the Sargasso Sea
MVLNVRNLSKRFDMTQALEDVSMDMKAGEIHALVGENGAGKSTLIKILTGIQHADQGEVLLQGQTVRISDAQEAQSLGIAAIFQEPMVFPDLDVAENIFISHRDRGFFVRWKKIYQDAETILNDLGIQLDVRSPASGLTLAAQQAVEIAKAISLNVKVLIMDEPTASLSSHEVSQLFSVTRRLRDEGVAVLFISHRLEEVFEIADRITVFRDGHKISTNPVNEVTRESLIQEMVGREVSKFYQSSKKAVKGKQVCSIKNLNKKTVFSDINFDLHQGEILGFAGLVGSRRTDVGLAIFGVSPADSGSIEIEG

SEQ ID NO: 146395 - protein, 229 aa, Unknown
  Bacterial polypetide isolated from the Sargasso Sea
MSNANMLPSPILALSGIVKTFPGVRALDEAGLKVYPGQVMALLGENGAGKSTLMKVLTGIYQADAGSISYRGQPVHFKGPRDSQDQGISIIHQELNLLPELSIAANIFLGREPRTRFGSIDHKQLRERASTLLARLGVKHGPDTRLGDLSIGEQQMVEIAKALSFDASVIIMDEPTDALTDTETEQLFVVIRELREQGCGIVYISHRLKEIFEICDRVTVLRDGKWIGE

SEQ ID NO: 146396 - protein, 545 aa, Unknown
  Bacterial polypetide isolated from the Sargasso Sea
MTTAPKALGVEVLNASKSFGAFRALDSVSIKVKAGTIHALLGENGAGKSTLVKGLVGYGVLDSGQIAADGREVHIASPRDAQALGIGMVYQHFTLASGLSVEENLLLARGRMPWKIDWQGERAALAAFMQRMPFRLPLDAPVAVLAAGEKQKLEILKQLYLQQRFLILDEPTSVLTPQEADEVLGLMRDLSSRGELTVLMITHKFREVMAYADDVTVLRKGRQVGTSAVADTSRDELAAWMMGTVASHAPNEIHSGNEASLMAAVTVERLPRKPVDDMAQVRLALRDVSVEDDRGHTAVRHATLSVRAGEVLGLAGVSGNGQKELVEALVGQRRVKTGDMEVAGQAYHATREEMTHRRVFAIPEEPLKNACVTAMSVAQNLALRDFDREPLRRGGWWLDRRAVRERAAQLIAEFNVRPPLPERAIGTLSGGNVQRAVLARELGQPVDVLIVANPVFGLDFASVADIHARLMAARDAGAAVLLVSEDLDELLELADRIVVIAEGRLVFETPAARADRAVLGQHMAGHGDTAAHDAVPTERMKEAIG

SEQ ID NO: 146397 - protein, 507 aa, Unknown
  Bacterial polypetide isolated from the Sargasso Sea
MLQLDGITVEFGATRALDNVSFNVSPGEVVGLMGANGAGKSTLAKVIVGEIAFGSYRGTVTCNGSPAAFSHSRDAHRAGVALVHQEGSVVPQLTIGENVMLTIEPSRFGVIDWKGLYARADTAMRKLGLDIDTRKPLAGQGGVALMEQVEIARAIASGARVFVFDESTSALGAGEIEVLLRRMRELAAQGAGIIFISHRTDEILKVCDRVVILRDGRVAVCAPRAQLDHASIVRGMLGDGRSDTLAPLAQDSRLKTQGTLVRIRDWRISKSLDNPRDLAPINLALARNEIVAVYGPLGAGKTELLQSLYGLLPELSDGVLELAGAALRPRNPRDSILAGVAYVSAERQRDGVVAHLSVLQNMMLGWHRGAPRWKGPVVDEQSAEALCREYIRDLAIRTQGPAQPIANLSGGNQQKVLLARALINQPRLVLLDEPTRGIDLGAKQDVYRLIRKVAATGTAVLYATMEESEALELSDRILVLRDGKQVALLDTKDTNPHELLALAGGLQ

SEQ ID NO: 146398 - protein, 499 aa, Unknown
  Bacterial polypetide isolated from the Sargasso Sea
MSLILELKQISKHYPGVKALEDVSLRLFAGEVHALLGENGAGKSTLVKVMTGAQSKDMGDILFLGEPQHFNTPMDAQKAGISTVYQEVNLVPNLTVAQNLFLGYEPRRLGLIHFKKMYADARAVLTQFKLDIDVSAPLSDYSIAVQQLIAIARGVAMSAKVLVLDEPTASLDATEVQVLFGILNQLKAKGVAIVFITHFLDQVYQISDRITVLRNGRFIGEYLTAELPQPKLIEAMLGRSLQEQLIDKQEKERTVTRAEAVLLSLKDVSVKGSIQSMNLTVPKGQAVGLAGLLGSGRSEVCNAVFGLDLVDSGSIHLAGQKLKLSQPVDAISAGIALCPEDRKIDGIIGPLSIRENIILALQARIGWWRYLSKARQQEIAQFFINKLQIATPDADKPIEQLSGGNQQKVILARWLAIEPILLVLDEPTRGIDIGAHAEIVKLIRSLCDDGMSLLVASSELDELVAFSNKVVVLRDRYAVRELSGAELTSQHVMQAIAEG

SEQ ID NO: 146399 - protein, 313 aa, Unknown
  Bacterial polypetide isolated from the Sargasso Sea
PVKRGVSIIYISHRLEEVFRIADVVTVLKDGQLVETESIHELTRAELVRMMVGRTLEEVFPVSNNQPGKPVLIAENISTDTVLEQVSLDLRQGEIVGLAGMVGSGRTELARALFGADPLTSGSIKINGENAYLKNPFEAIKKKISLVPEDRKEQGLFTELPIRNNITMPILRKISQWGFLSRSKEQEIVDQSRNQLSIAMASGSQEVQYLSGGNQQKVVLAKWLQTRPEIIIMDEPTRGVDVGAKFEIYQLMRHLNQEGIGILMISSELTEILGLSDRILVMREGRIVAELVPSETSEEQIIEYATTTVSKAA

SEQ ID NO: 146400 - protein, 381 aa, Unknown
  Bacterial polypetide isolated from the Sargasso Sea
DLSKKYSLPIDVNLTIDDLGVGEKQRVEILKVLYRGANILILDEPTAVLVPQEVEELFENLKNLVSQGVTILFISHKLDEVMEIADRISVMRGGQHVGTVSKEEASKKILAEMMIGKDLPTPPSRETLISSENCLQLKDLNGEPSLGKIPFEDINLEIKKGEICGIAGVEGNGQRELSEAILGLYPVESGQIFLEDIEITKLSTRERRLTGISFIPEDRQSQGLVVESNLVENIILGKQSSNTYSSKFKNVLFKNASKNSKDVVDNYDVKTPSVQTLALALSGGNQQKFVVGREIDGKPRFLLASQPTRGVDIGAQALIWDKLKEARDMGLGVLLISADLDELLGLSDKLYVIYEGKLVKQLEPKEATPEQLGSYMTGLGI

SEQ ID NO: 146401 - protein, 275 aa, Unknown
  Bacterial polypetide isolated from the Sargasso Sea
MNTKLKVSEISKIYPGCIANDKVSLEFKSGKIYALLGENGAGKSTLVKILSGVVKPDEGEVFLNNESIKLNSPLDAKKNNIGMVFQHFNLFETLSVFENLSIDSDKKNEDLRLSVYNILKKYNFKIDLDIPVLNLSAGQKQKVEIIRCLIRNPKVLIMDEPTSVLTEQETEDLFISLKQFSDEGILIIYITHKLKEVLSLCDEVAVMRKGKIVSVSKTKEEKIETLANKMVGENLSAIKKKNNNFKYSEEILKISNLNFRSEDPYETNLINLNFS

SEQ ID NO: 146402 - protein, 185 aa, Unknown
  Bacterial polypetide isolated from the Sargasso Sea
MNTNLKISNITKIYPGCIANDNISLEFKSGKIYALLGENGAGKSTLVKILSGVIIPDKGEIFLNNKILKLNSPIDAKKNKIGMVFQHFNLFETLSVFENLIIDSDENRENLREKIQSVMKKYNFSIDLDIPVLNLSAGQKQKVEIIRCLIRNPEVLIMDEPTSVLTEQETSELFSSLRNSQWKAY

SEQ ID NO: 146403 - protein, 230 aa, Unknown
  Bacterial polypetide isolated from the Sargasso Sea
MNTNLKISNVTKIYPGCVANDNVSLEFNSGKIYALLGENGAGKSTLVKILSGVIIPDEGKIYLNENNLKLNSPLDAKKNDIGMVFQHFNLFETLSVFENLIIDSDEKRESLREKIDSIMKKYNFSIDLDIPILNLSAGQKQKVEIIRCLIRNPKVLIMDEPTSVLTEQETSELFLSLKKFSEEGILIIYITHKLKEVMQLCDEVAVMRRGKLVSCSQIKDENIESLANKM

SEQ ID NO: 146404 - protein, 277 aa, Unknown
  Bacterial polypetide isolated from the Sargasso Sea
MLGENGAGKSTLVKILYGLLQSDEGFINFNNEILKVNSPSQARKKGIGMVFQHFSLFESLTVRDNLILGIDEGISFSNLQNQLKDISSKYNLSLDLDAPITSLSAGEKQRVEIVRILLQDPQLLIMDEPTSVLTPQEVDSLFITLNALVKEGRTVLYITHKLEEVINICNDVTIMRNGEVIDSCSTKGETAKSLATKMLGQKLDDLKTDYSHIKKSVSFIAKNIKCSFNDPFFTDLKNVSFQVNEGEIFGIAGVAGNGQSELMNILTGENTEIDEGE

SEQ ID NO: 146405 - protein, 187 aa, Unknown
  Bacterial polypetide isolated from the Sargasso Sea
MATDLRISNISKIYPGCIANDNVSLQFKSGKIYALLGENGAGKSTLVKILSGVISPDNGEVFLNEKNLKLSSPLDAKKNKIGMVFQHFNLFETLSVFENLSIDATEDNKSLRLRINEILKKYNFSIDLDVPVLNLSAGQKQKVEIIRCLLRSPKVLIMDEPTSVLTEQETEELFISLKKFCDEGNIN

SEQ ID NO: 146406 - protein, 210 aa, Unknown
  Bacterial polypetide isolated from the Sargasso Sea
MSNTFIKFNNITKKFPRVVANNDVSFDIKKSSVHALLGENGAGKSTLVKVLYGLLAADQGTITFNNQKLNISSPSEARKKGIGMVFQHFSLFESLTVRDNLILGIDKKISYNDLKNQLLDISSKYNLPLDLDAPITSLSAGEKQRVEIVRILLQDPQLLIMDEPTSVLTPQEVQNLFVTLNALVNEGRTILYITHKLEEVITLCNDVTIM

SEQ ID NO: 146407 - protein, 326 aa, Unknown
  Bacterial polypetide isolated from the Sargasso Sea
NGAGIKKLLELLECSVSPLAIAGSLRVGDQQLVEIAKALSLEASIVVMDEPTSALTEAESARLERTIYRLRERGTTILYISHKMDEVFRIADRITVLRDGQHIRTTNRSDTSPEEVTGWMVGREIAGHEFHHHRERGNVLLTVRKLTLPWPEHPRGYRLKDISLDLHAGEILGVAGLMGAGRTELLETLFGAGEPTWTGQISLNGHSIRFCHPREACAAGIGMVTEDRKRLGLFSDLDVAANISLCSLRQTTQWGLVRRAKEESLVTESVSATGVKTPSIHAAITGLSGGNQQKCIIGRWLLTKHEFCFWDDQLVALMLEQSRLYS

SEQ ID NO: 146408 - protein, 265 aa, Unknown
  Bacterial polypetide isolated from the Sargasso Sea
MHTHLKISNLTKIYPGCIANDKVSLEFKSGKIYALLGENGAGKSTLVKILSGVIQPDEGQIFLNNKIIKLNSPIDAKKKKIGMVFQHFNLFETLSVFENLIIDSDENRENLREKIKLVMKKYNFSIDLDVPVLNLSAGQKQKVEIVRCLIRNPEVLIMDEPTSVLTEQETSDLFSSLRQFSMEGILIIYITHKLKEVMSLCDEVAVMRKGQLVSVSKIIDEKIETLANKMVGQNLKVVKKVSEKKSTEQLVKISNLNFTSEDPFE

SEQ ID NO: 146409 - protein, 289 aa, Unknown
  Bacterial polypetide isolated from the Sargasso Sea
MNTNLKISNVSKIYPGCIANDNISLEFKSGKIYALLGENGAGKSTLVKILSGVIIPDKGEIFLNNKILKLKSPIDAKKKKIGMVFQHFNLFETLSVFENLIIDSDENRENLHEKIQSIMKKYNFSIDLDIPVLNLSAGQKQKVEIIRCLIRNPEVLIMDEPTSVLTEQETSELFSSLRQFSMEGILIIYITHKLKEVMSLCDEVAVMRKGQLVSVSKIVNEKIETLANKMVGQNLKTVRKSISNERSSEKLIKISNLSFSSEDPFETNLVNINFEVNRGRCLGIAGISG

SEQ ID NO: 146410 - protein, 243 aa, Unknown
  Bacterial polypetide isolated from the Sargasso Sea
SFPKVIANKNVSFNIKRNTVHALLGENGAGKSTLVKILYGLLKSDQGKIIFNNHPLKVESPSEARKNKIGMVFQHFSLFDSLTVRENLILGIDQNMSFSSLQDKVNEISNRYKLPLDLDAPINTLSAGQKQRVEIVRILLQDPELLIMDEPTSVLTPQEVESLFETLNTLLKEGRTILYITHKLEEVINLCHEVTILRNGEVIESSKLENETAETLATKMLGKKLTEIKTDYSRITPKINLSS

SEQ ID NO: 146411 - protein, 158 aa, Unknown
  Bacterial polypetide isolated from the Sargasso Sea
LLGENGAGKSTLVKILSGVIIPDEGEIFLNKNILKLNSPLDAKKNDIGMVFQHFNLFETLSVFENLIIDSNETKENLRERIESIMKKYNFSINLDVPVLNLSAGQKQKVEIIRCLIRNPKVLIMDEPTSVLTEQETSELFLSLKKFSEEGILIIYITH

SEQ ID NO: 146412 - protein, 229 aa, Unknown
  Bacterial polypetide isolated from the Sargasso Sea
MNTHLKLSNVTKIYPGCVANDNISLEFKSGKIYALLGENGAGKSTLVKILSGVVIPDEGKIVLNNKIIKLNSPIDAKKNKIGMVFQHFNLFETLSVFENLIIDSGENIENLREKILSIMKKYNFSIDLDIPVLNLSAGQKQKVEIIRCLIRNPEVLIMDEPTSVLTEQETSELFSSLRQFSLEGILIIYITHKLKEVMSLCDEVAVMRKGKLVSVSKILDEKIETLANK

SEQ ID NO: 146413 - protein, 223 aa, Unknown
  Bacterial polypetide isolated from the Sargasso Sea
MNTNLKISNVTKIYPGCIANDNVSLEFESGKIYALLGENGAGKSTLVKILSGVIMPDEGEIFLNKNILKLNSPLDAKKNDIGMVFQHFNLFETLSVFENLIIDSDETKENLREKIKLTMKKYNFSINLDIPVLNLSAGQKQKVEIIRCLIRNPKVLIMDEPTSVLTEQETSELFLSLKKFSQEGILIIYITHKLKEVMQLCDEVAVMRKGKLVSISQIKEENI

SEQ ID NO: 146414 - protein, 333 aa, Unknown
  Bacterial polypetide isolated from the Sargasso Sea
LISVKRLSKHFPGVRALHEVQFELMAGEVHALMGENGAGKSTLMKILAGVYTRDTGEILHDGQPVEFSSPREAQAMGIGIIHQELQLMNHLSVAQNMFIGREPRGRFGLFLDEDKLNAQARDILARMHVNLDPRAVVSTLTVARQQMVEIAKALSFDSRVLIMDEPTSALNEAEIAELFRIIRELKSRGVGIVYISHKMDELKQIADRVTVLRDGEYVATVSAKDTSVEAIIGMMVGRTLTDVAPSHGTADKGEVALEVRNLNAGPLVRDVSFTLHKGEILGFAGLMGAGRTEVARAVFGADPSESGEIVVNGVEVTIRNPSDAVARGIGYLS

SEQ ID NO: 146415 - protein, 267 aa, Unknown
  Bacterial polypetide isolated from the Sargasso Sea
MKTNLKISNVSKIYPGCVANDNVSLEFESGKIYALLGENGAGKSTLVKILSGVIMPDEGEIFLNKNTLKLNSPLDAKKNDIGMVFQHFNLFETLSVFENLIIDSDETGENLREKIELIMKKYNFSINLDVPVLNLSAGQKQKVEIIRCLIRNPKVLIMDEPTSVLTEQETSELFLSLKTFSEEGILIIYITHKLKEVIQLCDEVAVMRKGKLVSVSKIKDENIESLANKMVGQNLKTVKKKKLTVSSSDQLIKIINLNFKSEDPFET

SEQ ID NO: 146416 - protein, 327 aa, Unknown
  Bacterial polypetide isolated from the Sargasso Sea
MAGIGKSFGPVHALKSVDLTVYPYEIHALLGENGAGKSTLMKVLSGIHEPTTGTITVNNVNYARLDHKLAARLGIGIIYQELSVIDELTVMENLYIGRHLTKKVCGVNIIDWKEMRIRAAMMLLRIGLKVDLDEKVANLSISHKQMLEIAKTLMLDAKVLIMDEPTSSLTNKEVDYLFLIMNQLRKEGTAIVYISHKLAEIRRICDRYTVMKDGSSVCSGMVSEVNNDDIVRLMVGRELQNRFNAMKENTGNIARETVFEVKNVTSRDKKKVRDISFSVNRGEILGFAGLVGSGRTELMDCLFGVDKRSSGEIIPHGKAITPRSPLD

SEQ ID NO: 146417 - protein, 206 aa, Unknown
  Bacterial polypetide isolated from the Sargasso Sea
MAKKELEILLKATKISKYFGDFVANQNIDISIAKGQIHALLGENGAGKSTLVKMFYGVLQPDRGFIEINNKKVSITSPNVARKNGIGMVFQHFSLFPALTVAENILIALDNKIKFNKVVNEITKLSKEWELFVDPLKLVSELSVGEKQRVEIIRCLMQNPSLLIMDEPTSVLTPQEIKNLFKILKRLASSGCSILYISHKLEEIVE

SEQ ID NO: 146418 - protein, 246 aa, Unknown
  Bacterial polypetide isolated from the Sargasso Sea
MNTNLKISNVTKIYPGCVANDNVSLEFNSGKIYALLGENGAGKSTLVKILSGVIIPDEGNIYLNENNLKLNSPLDAKKNDIGMVFQHFNLFETLSVFENLIIDSDEERESLREKIDTIMKKYNFSIDLDIPVLNLSAGQKQKVEIIRCLIRSPKVLIMDEPTSVLTEQETSELFLSLKKFSEEGILIIYITHKLKEVMQLCDEVAVMRRGKLVSVSEIKNENIESLANKMVGQNLKTIKKKKAKTS

SEQ ID NO: 146419 - protein, 173 aa, Unknown
  Bacterial polypetide isolated from the Sargasso Sea
MNTNLKISNVTKIYPGCVANDNVSLEFNSGKIYALLGENGAGKSTLVKILSGVIIPDEGEIYLNKNNLKLNSPLDAKKNDIGMVFQHFNLFETLSVFENLIIDSDEQRESLREKIDSIMKKYNFSIDLDIPVLNLSAGQKQKVEIIRCLIRNPKVLIMDEPTSVLTEQETSEL

SEQ ID NO: 146420 - protein, 189 aa, Unknown
  Bacterial polypetide isolated from the Sargasso Sea
MNTNLKISNVTKIYPGCVANDNVSLEFNSGKIYALLGENGAGKSTLVKILSGVVIADEGKIYLNENILKLNSPSDAKKNDIGMVFQHFNLFETLSVFENLIIDSDEKRESLREKIDTIMKKYNFSIDLDIPVLNLSAGQKQKVEIIRCLIRSPKVLIMDEPTSVLTEQETSELFLSLKKFSKEGNFNYL

SEQ ID NO: 146421 - protein, 578 aa, Unknown
  Bacterial polypetide isolated from the Sargasso Sea
MTHHIHDAKITKRFRPSAPYKEKDSAVSTKETCQMSEPVAVAAASSPQVPLIRVAGVTKRFGGVQALRGVSLDVLPGEVHALLGENGAGKSTLIKILSGVHTYDDGVIEIAGQKVAFDSPARSREAGVAVVYQDLSLVESLSVGANLMLGREPRTRLGFVKNRQLMATVREFLHSHGIPLDPRTPVGALPFAYRQMTEICKALMGDVRVLILDEPTSALTGGEEQILFDAIRAVTERGVGVIYVTHRLNEVFRISQRVTVFRDGANAGVFQTAHTDMKQLVAAIVGPGHAALQARERTAAGMAGDEPFPGQQTLATFHAAAAPVLKLSNVSNDRLRHVDLLIRRGEIHGLAGLIGSGRTEILQTIFGIRTIEAGAIVIEGQSRARMTPAEAILLGVALVPEDRHLEGLVLDHSIERNLTLPRLPQFSRWGWLRSQAAVNQAKHSMQELAVKAPGSSTPVKFLSGGNQQKVVFAKWNHPRPKILLLDEPTVGVDVGAREEIYDVIQDAAQAGTGVLVVSSDLDELLRLCARISVVVDGSIVRTIERADLANAEALHHLIQLSRSSIESLDGTSSRAHSK

SEQ ID NO: 146422 - protein, 354 aa, Unknown
  Bacterial polypetide isolated from the Sargasso Sea
MNTKLKVSKVSKIYPGCIANNNVSLDFESGKIYALLGENGAGKSTLVKILSGVINPDEGQIFLNDKLLKLTSPKDAKNNNIGMVFQHFNLFETLSVFENLSIDSEKNNDQLRILVNNILKKYNFKIDLDVPILNLSAGQKQKVEIVRCLIRNPKVLIMDEPTSVLTEQETEDLFLSLKKFSKEGILIIYITHKLKEVLSLCDEVAVMRKGKVVSISRTVNEELSSLANKMIGESLNKIKKMTSNNLSGEQILSVSRLNFNSEDPYEVNLVDINFTLNKGECLGIAGISGNGQNELFQILSGETISNNGSIKFRSKEISKLNPKERREYLMAFSPEDRISQAAVPSLKIYENVAL

SEQ ID NO: 146423 - protein, 372 aa, Unknown
  Bacterial polypetide isolated from the Sargasso Sea
MDIDPDTPLKYLSIGQWQMVEIAKALARNAKIIAFDEPTSSLSAREIENLFRVIRELRNEGRIILYVSHRMEEIFALSDAITVFKDGHYVKTFTDMQQVDHDALVQAMVGRDLGDIYGWKSRPYGTERLRLHEVKAPGVRTPISLSVRSGEIVGLFGLVGAGRSELMKGLFGGTRITAGQVFIDEQPIDIRKPSHAIEAGMMLCPEDRKAEGIIPVHSVRNNINISARRKHVLGGCVINNGWEETNADHHIRSLNIKTPGAEQLIMNLSGGNQQKAILGRWLSEEMKVILLDEPTRGIDVGAKHEIYNVIYALAARGVAVLFASSDLPEVLGVADRIVVMREGEIAGELLHEQADERQALSLAMPKVSQAVA

SEQ ID NO: 146424 - protein, 499 aa, Unknown
  Bacterial polypetide isolated from the Sargasso Sea
MNTKLIISKISKIYPGCIANDKVSLEFGSGKIYALLGENGAGKSTLVKILSGVVKPDEGEVFLNNENIKLNSPLDAKKNNIGMVFQHFNLFETLSVFENLSIDSSKKNEELRLLVNDILKKYNFKIDLDIPVLNLSAGQKQKVEIIRCLIRNPKVLIMDEPTSVLTEQETEDLFVSLKKFSQEGILIIYITHKLKEVLSLCDEVAVMRKGKVVSVSNTKEEKIESLANKMVGENLSTIKKKINNFKNSEEILKISNLNFTSDDPYETNLTNLNFSLKKGECLGIAGISGNGQSELFQILSGEIITENTSIMFRQKEISKLNPRERREYLMAFSPEDRISQAAVPELKIYENVALNNFKSSNFFEKGLVNEKKIKEHSKKILSNFSVNTDNVELKSQFLSGGNLQKLIIGRELITSPELLVCFNPTWGLDVGAINYIHETLININEQGKSSIVISTDNDELLRLSDRICVIYKGKLSKIMDANTITPEKLGVLMGGGSID

SEQ ID NO: 146425 - protein, 359 aa, Unknown
  Bacterial polypetide isolated from the Sargasso Sea
MVDIKFKELKIESVSKSFPGVQALDNVSMKISAGKVHALMGENGAGKSTLIKILAGAYSKDTGNILFDENKLNIRNPNDSLNYGIKVVYQEISLISEFSVAENIFLDNFPTNSLGVMNWNKLYKDTEELFNRVGFNLNPKSKIADLSISQQQMVEIARAVFKNASVVIMDEPTSSLTPNEIEKLFTVIKNLKQNNIAILYVTHKIDEIFKIADEVTVLRDGQHISNKLISETNEEFIIKDMVGRTVNATFERPKDILNAKTVMKVNKISSKNKIKNVSFDLHEGEILGFFGLMGAGRTELAKAVFGYDKITEGQIEVNNNIYKSFNTSTMVNNGIGYITEDRKGEGIVKDMNLRENMSL

SEQ ID NO: 146426 - protein, 186 aa, Unknown
  Bacterial polypetide isolated from the Sargasso Sea
MNTNLKISNVTKIYPGCVANDNVSLEFNSGKIYALLGENGAGKSTLVKILSGVIIPDEGEIYLNKNNLKLNSPLDAKKNDIGMVFQHFNLFETLSVFENLIIDSDEQRESLREKIDSIMKKYNFSIDLDIPVLNLSAGQKQKVEIIRCLIRNPKVLIMDEPTSVLTEQETSELFLSLKKFSEEGNF

SEQ ID NO: 146427 - protein, 501 aa, Unknown
  Bacterial polypetide isolated from the Sargasso Sea
MSDTILNIENITKSFPRVIANKKVTFDIKKNAVHAILGENGAGKSTLVKILYGLLEPDEGNIKLNNKDFKVNSPAEARKQGIGMVFQHFSLFDSLSVKENLILGIDEKMSYSDLENKLENISSRYNLPLDLDAPITALSAGEKQRVEIVRILLQDPQILIMDEPTSVLTPQEVESLFVTLNALVKEGRTILYITHKLEEVISICDTVTIMRSGEIIDTSSTANQTAKTLATKMLGQKLDDLKTNYGHIKDEVNFEVKNISCDFNDPFLTDLKNISFQVRLGEIYGIAGVAGNGQSELMDILTGENINIKSGSITFDNKKIEKYGPQKRRDLSISFVPENRLGHSAVPELSLSENILLSQFPKNNFIKNGIILKNNIDDFANNVINEFKVITPGNDAKASSLSGGNLQKYVIGREISSKPKILIISHPTWGIDAGAEHSIRESLIELSQNGTSIIVISQDLDELIEITHKISVIYDGNLSKPFKTSEIEIEKLGLLMGGKNE

SEQ ID NO: 146428 - protein, 499 aa, Unknown
  Bacterial polypetide isolated from the Sargasso Sea
MNTNLKISNVSKIYPGCIANDNISLEFKSGKIYALLGENGAGKSTLVKILSGVIIPDKGEIFLNNKILKLKSPIDAKKKKIGMVFQHFNLFETLSVFENLIIDSDENRENLHEKIQSIMKKYNFSIDLDIPVLNLSAGQKQKVEIIRCLIRNPEVLIMDEPTSVLTEQETSELFSSLRQFSMEGILIIYITHKLKEVMSLCDEVAVMRKGQLVSVSKIVNEKIETLANKMVGQNLKTVRKSISNERSREKLIKISNLSFSSEDPFETNLVNINFEVNRGECLGIAGISGNGQSELFQILSGEIISDKNSIEFNSNFIGNLNPQERREYLMAFSPEDRLEQAAIPQMKIFENVALNNFKSSNFFNNGLINENKIKEHAKKIISDFNVNTDNIELKSQFLSGGNLQKLIIGRELITSPDLLICFNPTWGLDVGAINYIHETLIKINDQNKSIILISTDTDELLKLSDKISVIHKGKLSKIMNSDEVTSEKLGILMGGGEID

SEQ ID NO: 146429 - protein, 395 aa, Unknown
  Bacterial polypetide isolated from the Sargasso Sea
MNTKLKVSEISKIYPGCIANDKVSLEFGSGRIYALLGENGAGKSTLVKILSGVVKPDEGEVFLNNESIKLNSPLDAKKNNIGMVFQHFNLFETLSVFENLSIDSDKKDEDLRVLVNEILKKYNFKIDLDIPVLNLSAGQKQKVEIIRCLIRNPKVLIMDEPTSVLTEQETDDLFISLKQFSKDGILIIYITHKLKEVLSLCDEVAVMRKGKVVSVSNTIDEKIESLANKMVGENLNTIKKKINNFKNSEEILKISNLNFKSDDPYETNLNNLNLSLKKGECLGIAGISGNGQNELFQILSGEIIAEGTSIMFRNKEIGRLNPRERREYLMAFSPEDRISQAAVPELKIYENVALNNFKSSNFFEKGLVNEKKIKEHSKKILSNFSVNTDNVELKS

SEQ ID NO: 146430 - protein, 503 aa, Unknown
  Bacterial polypetide isolated from the Sargasso Sea
MSKSIKIQDISKSYPGVKANSNVSFDIDNASIHAIVGENGAGKSTLMKILYGMVKPDFGEIYVFDEKISLSSPKDAINYGLGMVHQHFMLADNFTVLESIILGIDGAGITNLKLEKYRESINEVMSRYSLNVELDRFVDDLGVGEKQRVEILKVLFRGAKILILDEPTAVLVPQEVDELFKNLKELQKNGVTIIFISHKLDEVLKIADQITVMRGGEIVGTVDSEGIDKKDLAEMMIGKSLPKPPERTSESSQDNVLKIENLNSRNEEGKRVFEDISFEIKKSEILGIAGVEGNGQKELIESIIGIHTIEDGEVYLENQNLNDYGVKDRLDLGISFIPEDRQAQALVMEMKLNDNIILGRQTKDIYKTNLSTVNFKNAGEISRQVISDFNVKTPNETTIATALSGGNQQKFVVGRELDDDPKVLIASQPTRGIDIGAQALIWDKLRETRDNGLGVLLVSADLEELIGLSDRIIVIYQGKFVANLDPQNITPEDLGAYMTGLKQ

SEQ ID NO: 146431 - protein, 501 aa, Unknown
  Bacterial polypetide isolated from the Sargasso Sea
MNNTFIKFNNITKKFPRVIANDDVSFDIKKSSVHALLGENGAGKSTLVKVLYGLLAADHGTITFNDQELNISSPSEARNKGIGMVFQHFSLFESLTVRDNLILGIDKKISYSDLKDQLENISSKYNLPLDLDAPITSLSAGEKQRVEIVRILLQDPQLLIMDEPTSVLTPQEVENLFVTLNALVKEGRTILYITHKLEEVITLCNDVTIMRNGKVIDSCSTDNQTAKSLATKMLGEKLEDLKTDYSHIKNEISFSSKNISCSFNDPFFTDLKNISFNVNVGEIFGIAGVAGNGQSELMDILVGENTLIDSGELIFNNKNIEYLGPQKRRDLSIAFVPENRLGHSAVPELTLSENILLSQFPNNKFSRNGILNRNSIEDYAIKVIENFNVVTPGSDAKASSLSGGNLQKFVIGREISSKPKLLIISHPTWGIDAGAEHSIRESLIDLSKNGTSIIVLSQDLDELIEITHRIAVIFDGKLSKPINTNEVDITKLGLLMGGKNE

SEQ ID NO: 146432 - protein, 391 aa, Unknown
  Bacterial polypetide isolated from the Sargasso Sea
MNTKLKVSEISKIYPGCIANDKVSLEFISGKIYALLGENGAGKSTLVKILSGVVKPDQGEVFLNNESIKLNSPLDAKKNNIGMVFQHFNLFETLSVFENLSIDSDKKDEDLRILVNDILKKYNFKIDLDIPVLNLSAGQKQKVEIIRCLIRNPKVLIMDEPTSVLTEQETDDLFISLKQFSKDGILIIYITHKLKEVLSLCDEVAVMRKGKVVSVSNTIDEKIESLANKMVGESLNTIKKKINNFKNSEEILKISNLNFKSDDPYETNLNDLNLSLKKGECLGIAGISGNGQNELFQILSGEIITEGTSIMFRNKEISKLNPRERREYLMAFSPEDRISQAAVPELKIFENVALNNFKSSNFFEKGLVNEKKIKEHAKKILSNFSVNTDNV

SEQ ID NO: 146433 - protein, 429 aa, Unknown
  Bacterial polypetide isolated from the Sargasso Sea
MKLELKKISKFFPGIKALQNVDFNLKQNSIHALLGENGAGKSTLVKILCGVYQPDQGSIYLDKKKHIITDPTSSLQLGISAIHQESVMFDELSVMENIFIGNHIVKKNRLVDWPAMEKKTRDLLSNLEADIKPDEKIKDLSIAQRHIVQISRSLVHDADIVIMDEPTASLSQKEIEELYSIIRNLKKQNKSIIFISHKLDEVLEICDEFTVLRDGEVINTDLISNTNKDQLITNMAGREISQIFPKKHVTIEQEILNVKNLYKKTQFKNINFNLKKKEILGFYGLVGSGRTEVMKTIFGINKFDEGELTFKNSKLKIKTPKDAIQNGIVYLSEERQNLGMTGLMSVKDNINMAVMDKNSKYLILDKLKDLRNASELQEKLNIKVSYWSQLAQSLSGGNQQKTVIAKWLSTKPEIIILDEPTKGIDVRSK

SEQ ID NO: 146434 - protein, 181 aa, Unknown
  Bacterial polypetide isolated from the Sargasso Sea
MNTKLKVSEISKIYPGCIANDKVSLEFGSGKIYALLGENGAGKSTLVKILSGVVKPDEGKVFLNDESIKLNSPLDAKKNNIGMVFQHFNLFETLSVFENLSIDSDKKNEDLRVLVNDILKKYNFKIDLDVPVLNLSAGQKQKVEIIRCLIRNPKVLIMDEPTSVLTEQETEDLFISLKQFS

SEQ ID NO: 146435 - protein, 237 aa, Unknown
  Bacterial polypetide isolated from the Sargasso Sea
MNKQAEVAVAMRGITKRFPGVVALDDVTLQVRRGEVHAICGENGAGKSTLMKILSGVHQPDAGELEIAGQSVQFHSTRDAENAGVAIIHQELELVEELTVAANIFLGREPRTRFGFLNDAIAKRKAQELLGLLDASISPEEMTSGLRVGDQQLVEIAKALSLQASIIVMDEPTSALTDAETERLERTIATLRLQGCTILYFSHKMDEVFRLADRITILRDGHHVCTVNKTETTASEV

SEQ ID NO: 146436 - protein, 500 aa, Unknown
  Bacterial polypetide isolated from the Sargasso Sea
MNNTFIKFNNITKKFPRVVANDDVSFDIKKSSVHALLGENGAGKSTLVKVLYGLLAADHGTIIFNDQELNISSPSEARNKGIGMVFQHFSLFESLTVRDNLILGIDKKISYSDLKDQLENISSKYNLPLDLDAPITSLSAGEKQRVEIVRILLQDPQLLIMDEPTSVLTPQEVENLFVTLNALVKEGRTILYITHKLEEVITLCNDVTIMRNGKVIDSCSTDNQTAKSLATKMLGEKLEDLKTDYSHVKNEISFSSKNISCSFNDPFFTDLKNISFDVNIGEIFGIAGVAGNGQSELMDILVGENTSIDRGELIFNDKNIEHLDPQKRRDLSIAFVPENRLGHSAVPELTLSENILLSQFPNNQFSKNGILNHNSIEKYATKVIENFNVVTPGSDAKASSLSGGNLQKFVIGREISSKPRLLIISHPTWGIDAGAEHSIRESLINLSKNGTSIIVLSQDLDELIEITHKIAVIFEGKLSKPLNTNEVDITELGLLMGGKK

SEQ ID NO: 146437 - protein, 517 aa, Unknown
  Bacterial polypetide isolated from the Sargasso Sea
MSRSESPRPLLEMRGISKTFPAVRALDNVSLTVYPGEIHSLMGENGAGKSTLMKILSGAYRADAGGEILIDGARIDIDGPLAARDAGVAVIYQELCLSPNLSVAENIYIGRELRRGNRRWGTIDRAAMARGCEDVLARLGASFGPDTLVGTLSIAEQQLVEIARAVHTRARILVMDEPTTPLSSRETEHLFRLIRQLREEGLAIIYISHRMAEIYELSDRVSVLRDGTYVGTLERASLSAERLVAMMVGRDISGFYKKEHAPYDPGHLLLSVRDIADGARVRGCSLDLHAGEVLGIAGLVGAGRTELARLIFGAEPRVRGDVKVGERTFGAHSPRDAIDAGLVYLTEDRKRQGLFLDMSVRDNINISVCNRDARLGALDLARGAERAQDAIASLSIRVPNANVNVGALSGGNQQKVLLSRLLETKPRVLILDEPTRGVDIGAKSEIYRIINELARAGVGVIVISSELPEIIGVADRVLVMREGEIAGELGGYTPTPITQEAIIALATGSQAELADAH

SEQ ID NO: 146438 - protein, 231 aa, Unknown
  Bacterial polypetide isolated from the Sargasso Sea
MNTKLKVSEISKIYPGCVANDKVSLEFGSGKIYALLGENGAGKSTLVKILSGVVKPDEGEVFLNDESIKLNSPLDSKKNNIGMVFQHFNLFETLSVFENLSIDSDKKDEELRVLVNDILKKYNFKIDLDIPVLNLSAGQKQKVEIIRCLIRNPKILIMDEPTSVLTEQETDDLFISLKQFSKEGILIIYITHKLKEVLSLCDEVAVMRKGKVVSVSNTIDEKIESLANKMV

SEQ ID NO: 146439 - protein, 499 aa, Unknown
  Bacterial polypetide isolated from the Sargasso Sea
MNTKLKVSEISKIYPGCIANDKVSLEFGSGKIYALLGENGAGKSTLVKILSGVVKPDEGEVFLNNESIKLNSPLDAKKNNIGMVFQHFNLFETLSVFENLSIDSDKKDEELRALVNDILKKYNFKIDLDIPVLNLSAGQKQKVEIIRCLIRNPKVLIMDEPTSVLTEQETDDLFISLKQFSKDGILIIYITHKLKEVLSLCDEVAVMRKGKVVSVSNTIDEKIESLANKMVGENLNTIKKKINNFKNSEEILKISNLNFKSDDPYETNLNNLNLSLKKGECLGIAGISGNGQNELFQILSGEIITEGTSIMFRNKEIGKLNPRERREYLMAFSPEDRISQAAVPELKIYENVALNNFKSSNFFEKGLVNEKKIKEHSKKILSNFSVNTDNVELKSQFLSGGNLQKLIIGRELITSPELLVCFNPTWGLDVGAINYIHETLIQINEQGKSSILISTDNDELLKLSDRICVIYKGKLSKIMNADTVTAEKLGILMGGGSID

SEQ ID NO: 146440 - protein, 176 aa, Unknown
  Bacterial polypetide isolated from the Sargasso Sea
MNTNLKVSKITKIYPGCIANKNISLEFNSGKIYALLGENGAGKSTLVKILSGVIMPDEGEIFLNNKPLKLSSPIDAKKNNIGMVFQHFNLFETLSVFENLIIDSNETRDNLREKIKSIMEKYNFSIDLDIPVLNLSAGQKQKVEIIRCLIRNPEVLIMDEPTSVLTEQETSELFSS

SEQ ID NO: 146441 - protein, 232 aa, Unknown
  Bacterial polypetide isolated from the Sargasso Sea
MKTNLKISKVTKIYPGCIANKNISLEFKSGKIYALLGENGAGKSTLVKILSGVVIPDEGQIFLNNKNLKLNSPIDAKKNNIGMVFQHFNLFETLSVFENLIIDSNETRENLRKKIISIMEKYNFSIDLDIPVLNLSAGQKQKVEIIRCLIRSPQVLIMDEPTSVLTEQETIELFSSLKQFSEEGILIIYITHKLKEVMSLCDEVAVMRKGELVSISKIVDEKIETLANKMVG

SEQ ID NO: 146442 - protein, 502 aa, Unknown
  Bacterial polypetide isolated from the Sargasso Sea
MSDYILELNNITKNFPGVKALDNANFKLKKKSIHALLGENGAGKSTLIKIITGVYNQNEGKLFLNNQEKSFSSPNEAMNAGISVVHQERNLIRRFSVGENLMLTNLPKNNLGLIDYNTVAKESKKWLDIMELDIDPNTIVSDLTVAKMQLCEIAKALSLESKILLLDEPTSSLSPQDTKNLFALLKRLVAEQDVSIVFVSHKLEEVFEICDEVTVLRDGKNACDSEQITNLNRQKLVKLMIGRDEQIIKSKKDVDFIDENLLDLKSINTDLGHKNINLNLKKGEILGLYGLVGAGRTELIKCVLGLDKINSGQILLNNKEIKIKSPKDALEKYKIGYISEDRKKEGLILMHDVLSNAGITVWSNLKKILSFLNDSIVYNKVDPYVKQLEVKTPSYQQIVSNLSGGNQQKISVAKWLASGTDILFIDEPTVGIDIKTKSYLHELIIELSLKGTSIILITSDMPEMISLADRIITMKDFKVVGETINNHNYEEMSSSIMGNIHE

SEQ ID NO: 146443 - protein, 499 aa, Unknown
  Bacterial polypetide isolated from the Sargasso Sea
MNTKLKVSEISKIYPGCIANDKISLEFGSGKIYALLGENGAGKSTLVKILSGVVKPDEGEVFLNDESIKLNSPLDAKKNNIGMVFQHFNLFETLSVFENLSIDSDKKDKDLRVIVKDILKKYSFKIDLDIPVLNLSAGQKQKVEIIRCLIRNPKILIMDEPTSVLTEQETDDLFFSLKQFSKDGILIIYITHKLKEVLSLCDEVAVMRKGKVVSVSNTIDEKIESLANKMVGENLNTIKKKINNFKNSEEILKISNLNFKSDDPYETNLNNLNLSLKKGECLGIAGISGNGQNELFQILSGEIITEGTSIMFRNKEIGKLNPRERREYLMAFSPEDRISQAAVPELKIYENVALNNFKSSNFFEKGLVNEKKIKEHSKKILSNFSVNTDNVELKSQFLSGGNLQKLIIGRELITSPELLVCFNPTWGLDVGAINYIHETLIQINEQGKSSILISTDNDELLKLSDRVCVIYKGKLSKIMNADTVTAENLGILMGGGSID

SEQ ID NO: 146444 - protein, 280 aa, Unknown
  Bacterial polypetide isolated from the Sargasso Sea
MNTNLKISNVTKIYPGCVANDNISLEFNSGKIYALLGENGAGKSTLVKILSGVIIPDEGKIYLNENNLKLNSPLDAKKNDIGMVFQHFNLFETLSVFENLIIDSDEQRESVREKIDAIMKKYNFSIDLDIPVLNLSAGQKQKVEIIRCLIRSPKVLIMDEPTSVLTEQETSELFLSLKKFSDEGILIIYITHKLKEVMQLCDEVAVMRRGKLVSVSEIKNENIESLANKMVGQNLKTIKKKKAKTSSDQLIKITNLNFTSEDPFETNLMDINFSVNRGEC

SEQ ID NO: 146445 - protein, 502 aa, Unknown
  Bacterial polypetide isolated from the Sargasso Sea
MSENILTIKNVSKSFPKVIANKNVSFNIKKNTVHALLGENGAGKSTLVKILYGLLKSDEGEITFNNSPLKVQSPSEARKNKIGMVFQHFSLFDSLTVRENLILGIDQNMSFSNLQEKVNEISNRYKLPLDLDAPINTLSAGQKQRVEIVRILLQDPELLIMDEPTSVLTPQEVESLFETLNTLLKEGRTILYITHKLEEVINLCDEVTILRNGEVIESSKLENETAETLATKMLGKKLSEITTDYSNITSKINLSAKNLSIKFNDPFLVDLKNISFDIKEGEIFGIAGVAGNGQSELMNLLTGEEIEGVSGELDFNKIDIKNFSPKKRRDMSIAFVPENRLGHSAVPELTLTENILLSQFPDNDFQKNGLISFENIEVQAKKVIEKFNVVTPGPDAKASSLSGGNLQKFVIGREILSNPKLLIISHPTWGIDAGAEHAIRQSLIELAKNGTSIIVISQDLDELIEITHRLSVIFNGKLSKSYDTREISISQIGLLMGGHKVD

SEQ ID NO: 146446 - protein, 502 aa, Unknown
  Bacterial polypetide isolated from the Sargasso Sea
MSDNILELKKITKNFPGVKALDNANFRLKKKSIHALLGENGAGKSTLIKIITGVYNQNEGELFLNNKVQSFNSPNEAMNSGISVVHQERNLIRRFSVGENLMLTNLPKNNLGLIDYNAVAKESKKWLDIMELDIDPNTIVSDLTVAKMQLCEIAKALSLESKILLLDEPTSSLSPQDTKNLFILLKRLVAEQDVSIVFVSHKLEEVFEICDEVTVLRDGKNACESEQITNLNRQQLVKLMIGRDEQIINSKKEVNFDDQNLLNLQSINTDLGHKDINLNLKRGEILGLYGLVGAGRTELLKCVLGLEKINSGQIFLNNKEIKIKSPKDALEKFKIGYISEDRKKEGLILMHDVLSNAGITVWSNLKKILSFLNDQIVYNKVDPYVKQLEVKTPSYQQIVSNLSGGNQQKISVAKWLASGTDILFIDEPTVGIDIKTKSYLHELIIDLSLKGTSIILITSDMPEMISLADRIITMKDFKVVGETINNHNYEQMSSSIMGNIHE

SEQ ID NO: 146447 - protein, 401 aa, Unknown
  Bacterial polypetide isolated from the Sargasso Sea
MNTNLKISNVTKIYPGCIANDNISLEFESGKIYALLGENGAGKSTLVKILSGVIIPDEGEIFLNKNILKLNSPIDAKKNDIGMVFQHFNLFETLSVFENLIIDSEETPENLKEKIQLIMKKYNFSINLDVPVLNLSAGQKQKVEIIRCLIRNPKVLIMDEPTSVLTEQETSELFLSLKKFSEEKILIIYITHKLKEVMKLCDEVAVMRRGKLVSVSKIKDENIESLATKMVGQNLKTIKKKKSSISSSDQLIKVTDLNFTSEDPFETNLENINFSVNRGECLGIAGISGNGQSELFQILSGEIISDKNSIEFSNNFIGDLNPQERREYLMAFSPEDRLEQAAIPQMKIFENVALNNFKSSNFFNNGLINENRIKEHSKKIISDFNVNTDNIETKSPFLSGG

SEQ ID NO: 146448 - protein, 428 aa, Unknown
  Bacterial polypetide isolated from the Sargasso Sea
MNTKLKVSEISKIYPGCIANDKVSLEFGSGKIYALLGENGAGKSTLVKILSGVVKPDSGEVFLNNESIKLNSPLDAKKNNIGMVFQHFNLFETLSVFENLSIDSDNKDEDLRVLVNDILKKYNFKIDLDIPVLNLSAGQKQKVEIIRCLIRNPKVLIMDEPTSVLTEQETDDLFISLKQFSKDGILIIYITHKLKEVLSLCDEVAVMRKGKVVSVSNTINEKIESLANKMVGENLNTIKKKINNFKDSEEILKVSNLNFKSDDPYETNLKDLNLSLKKGECLGIAGISGNGQNELFQILSGEIITEGTSIMFRNKEIGKLNPRERREYLMAFSPEDRISQAAVPELKIYENVALNNFKSSNFFEKGLVNEKKIKEHSKKILSNFSVNTDNVELKSQFLSGGNLQKLIIGRELITSPEKLVCFNPTMGS

SEQ ID NO: 146449 - protein, 492 aa, Unknown
  Bacterial polypetide isolated from the Sargasso Sea
LNISKIYPGCVANDNVSLQFKSGKIYALLGENGAGKSTLVKILSGVISPDNGEVFLNEKNLKLSSPLDAKKNKIGMVFQHFNLFETLSVFENLSIDATEDNKSLRVRINEILKKYNFSIDLDVPVLNLSAGQKQKVEIIRCLLRSPKVLIMDEPTSVLTEQETEELFISLKKFCDEGILIIYITHKLKEVLSLCDEVAVMRKGKVVSVSQTQNEKVETLANKMVGQKLAKIKKKINISKNKDEIFKVKHLNFYSDDPFETNLVNLNFSVKKGECLGIAGISGNGQNELFQILSGEIITPDTSIIFRNKEIAKLNPKQRREYLMAFSPEDRISQAAVPELKIYENVALNNFKSSNFFEKGLVNERKIKEHSKKILSDFSVNTDNVELKSQFLSGGNLQKLILGRELITAPELLICYNPTWGLDVGAINYIHETLIKINDQEKSTILISTDTEELLKLSDRIAVIYKGKLSKIMPSEEVTPEKLGVLMGGGSID

SEQ ID NO: 146450 - protein, 516 aa, Unknown
  Bacterial polypetide isolated from the Sargasso Sea
MTVSHIGETALPAEAHSPALTSADPYLRLDGITVRFPGVLALDQVSLDVRRGEVHGLMGENGAGKSTLLKVLSGVNQPAAGSLSLDGVEQQFVTTKAAIAAGVAIIYQELHLVPELTVAENLMLGALPNRFGVLDEKALLARAVRELERLGEKIDPAQQVKNLSIGQRQMIEIGKALMRDARVIAFDEPTSSLSSRETTQLFRIIRALKAEGRAIIYVTHRMDEVYELCDRVTVFRDGRRIDTFEAGAGLDRDRLISCMVGRSIADVYGYRSRELGGVHLEVRELMGRGLREPASFSARKGEILGFFGLVGAGRSELMKLIYGAVKPEAGEIALKGRRVRFATPRDAVRAGVALCPEDRKQEGIVSIASVSDNLNISCRRHFSRFNVLNGRKEAQTAKEFIGKLSIKTRNGETPIGTLSGGNQQKVILSRWLAEEIDVFLMDEPTRGIDVGARSEIYGLLYGLAEAGRTVIVVSSDLAEVIGVADRVIVMKEGCIVGNLPKAQATPDALIKLALPR

SEQ ID NO: 146451 - protein, 515 aa, Unknown
  Bacterial polypetide isolated from the Sargasso Sea
MTAVSGNDGDTGGDAAESPPGGPLLALDGITVTFPGVRALDAVSLSVRAGEVHGLMGENGAGKSTLLKVLSGVNQPQAGTLTLNGTEQRFASTRAALEAGIAIIYQELHLVPELTVAENLMLGQLPSRLGVVDERTLAARALDALERLGEHIDPGIPVKYLSIGQRQMIEIGKALMRDARVIAFDEPTSSLSARETTQLFRIIRALRAEGRAIIYVTHRMEEVYELCDRVTVFRDGRRIDTFDSVTDLDRDRLIGCMVGRSIEDVYGYRPRAAGDVLIEAKGLAGPGLSEPVSFTARRGEIVGFFGLVGAGRSELMKLLYGAARPSAGHVELNGKRVAFGSPRDAVRAGLALCPEDRKQEGIVAIASVADNLNISARRHFSPARVLLDGRRERELAQRYIERLAIKTRDGDTPIGALSGGNQQKVVLARWLAERIDVFLMDEPTRGIDVGARAEIYNLFYELAEAGRTVILVSSDLAEVIGVSDRIIVMKEGRIAGEVAKAHATPDALIKLALPR

SEQ ID NO: 146452 - protein, 551 aa, Unknown
  Bacterial polypetide isolated from the Sargasso Sea
MTGDPLNCANPARPGSRATCRGTSMFTARVARPMAGDDARAASSGSTGVSAPPASSAADCVLEVRGVGKSFPGVVALDGVQFRVRRGTVHALMGENGAGKSTLMKIIAGVYTPDQGEILINGEPVVLNGPLDALDRGIAMIHQELNLMPYMTVAENIWIRREPKNRFGLIDHAALRRQTAALFERLSIDIDPETDVRTLTVASRQMVEIAKAVSFDSDVLIMDEPTSALTDKEVTHLFRIIRQLREQGKGIVYITHKMNELFEIADEFSVFRDGKYIGTHASSDVTRDDIIRMMVGREITQMFPKEEVPIGEVVLSVKNLGVDGVFRDVSFELRAGEILGVAGLVGSGRSNVAEALFGVVPATSGEIRIDGKPVRITTPAQAMKHGMAFLTEDRKDTGCFLNLDLLANMEAAVLSHRYVKFNFVRQAQLKRDCEEMSRMLRVKSPGLHEEIQNLSGGNQQKVLIGRWLLTQPRILILDEPTRGIDVGAKAEIHRLVSALAGKGVAVLMISSEMPEVLGMSDRVMVMHEGRMTGIVDRKDADQVRIMDLASR

SEQ ID NO: 146453 - protein, 227 aa, Unknown
  Bacterial polypetide isolated from the Sargasso Sea
IWRKRQRVAIGRAITRKPKVFLFDEPLSNLDAALRVQMRVELAKLHDQLNATMIYVTHDQTEAMTLANDIVVLDQGIVSQKGSPMNLYNNPDNLFVGGFIGSPKMNFIDSKILSKSSKSSEVDIMGTGKLNVPKISENTQEGDSIKIGIRPEHLILNSDLDSLWESKVFVVEKLGSGTYLYLEKEGDPLVVQTDGDTNIKVGDIVKIGFDPFRCHLFDNKGISFKNS

SEQ ID NO: 146454 - protein, 230 aa, Unknown
  Bacterial polypetide isolated from the Sargasso Sea
KPKQLSGVQRQRVAIGRAITRKPKVFLFDEPLSNLDAALRVQMRVELAKLHDQLNATMIYVTHDQTEAMTLADDIVVLDEGVISQSGSPMDLYSHPSNLFVAGFIGSPKMNFISTKISSSSSSSTEVDLFGQSKLAISKTSSNTSEGDQIQLGIRPEHLLVNQDADASWEGKVFVVEKLGSGTFLYLEKEGEPLVVEAEGDSNIKVGDTVKVGFSASRCHLFGNDSQAFK

SEQ ID NO: 146455 - protein, 218 aa, Unknown
  Bacterial polypetide isolated from the Sargasso Sea
VAIGRAITRKPKVFLFDEPLSNLDAALRVQMRVELAKLHDQLNATMIYVTHDQTEAMTLANDIVVLDEGIVSQKGSPMDLYNDPNNLFVGGFIGSPKMNFISTKITSKSNDKTEVDLMGSSKISIPKTSASASEGDSVQLGIRPEHLIVNQDGDGSWESKVFVVEKLGSGTFLYLEKEGEPLVVETEGDSNIKVGDTVKVGFSASRCHLFDSSKQAFK

SEQ ID NO: 146456 - protein, 313 aa, Unknown
  Bacterial polypetide isolated from the Sargasso Sea
LKIIGDVKAVHDFNLKIAEGEFIVLVGPSGCGKSTTLRMIAGLEDITSGLIYIDEKVINKIHPKNRDIAMVFQNYALYPHLSVKDNISFGLRAQKIPKVEVEKRVVEASETLGLEGLLSRRPGELSGGQKQRVAMGRAIVRNPKVFLFDEPLSNLDAKLRHKMRAEMKKLHKKVGTTTIYVTHDQIEAMTLADRIVIMKDGLIEQVGTPDEVYRRPNNIFVASFIGTPAMNFIEGKVSNVSKGSSMIMLEDQKSIKLKGKNFYNNQNIILGLRPEDITVTSKKSVKSHNIIELDAEISVIEPMGHETVVICDS

SEQ ID NO: 146457 - protein, 217 aa, Unknown
  Bacterial polypetide isolated from the Sargasso Sea
QLGRAITRKPKVFLFDEPLSNLDAALRVQMRVELAKLHDQLNATMIYVTHDQTEAMTLANDIVVLDEGIVSQKGSPMDLYNNPNNLFVGGFIGSPKMNFISTKIISKSGDKTEVDIMGSSKISIPKTSASASEGDSVELGIRPEHLTVNQSGDASWESKVFVVEKLGSGTFLYLEKEGEPLVVETDGDSNIKVGDTVKVGFDAERCHLFDSSKQAFK

SEQ ID NO: 146458 - protein, 220 aa, Unknown
  Bacterial polypetide isolated from the Sargasso Sea
DILDKYNIKPTVPVNAMLADRYPRMVQECIDRGWEIAGHGISATQMITSDISLPKEKETIATSLETLQKRYGKKVKGWFGQDYSQSTSTFKLLSEFGIEYVADFPNDDSPYATNYNSLICIPNQSEWDDTQLMAVRRLMPWRWRDVVCEAFDYLYNEAHPSGTVMTLSIHPWLLGQAHRIKYLDEALKKMTGYKDVWQTNALEVTTHYRNSSSKQSVNND

SEQ ID NO: 146459 - protein, 79 aa, Unknown
  Bacterial polypetide isolated from the Sargasso Sea
MSIRLTNISKKFGQFQALSPLNLDIQEGEMIGLLGPSGSGKTTLLRIIAGLEGADSGQIHFGNRDVTQVHVRDRRVGFV

SEQ ID NO: 146460 - protein, 75 aa, Unknown
  Bacterial polypetide isolated from the Sargasso Sea
MIGGEQPVVYVTHDQQEAMALADRIAVMRDGRIEQIGTPRELYMQPASTYVAQFIGRPQMNLLPAKNGVITGIRP

SEQ ID NO: 146461 - protein, 76 aa, Unknown
  Bacterial polypetide isolated from the Sargasso Sea
MSIRLTNISKKFGQFQALSPLNLDIQEGEMIGLLGPSGSGKTTLLRIIAGLEGADSGQIHFGNRDVTQVHVRDRRV

SEQ ID NO: 146462 - protein, 162 aa, Unknown
  Bacterial polypetide isolated from the Sargasso Sea
LDAQLRDELRPELRQLILHGSQPVVYVTHDQQEAMALANRIAVLKGGRIEQIGTPEELYKTPASCFVASFIGRPQINLLNIDQQLTIGIRPEDLHFDPEGMPCRLISREWQGASQLLLLDSPRGALRMLCSGDAALGESLSVSWPTRAEHRFDAISGRRLAG

SEQ ID NO: 146463 - protein, 240 aa, Unknown
  Bacterial polypetide isolated from the Sargasso Sea
MNKLLTLSNISKSFDRDRVHALKKISFECDKGDVISIVGSSGSGKSTLLRIIAGLEIPDKGEITLNGNLINDNKIFTSAEKRDCSLVFQDFALFPNMTVIENICFGKKAANNKTLIDELMEFTVITDLADRYPHEISGGQQQRVALVRALSNNPSLLLLDEPLSHLDFELKDNVRNELINLIQKVGATVLMVTHDTKDAMLMADKIIVLNDGQIDQINSPPKIFNFPANAYVARLLEKLI

SEQ ID NO: 146464 - protein, 114 aa, Unknown
  Bacterial polypetide isolated from the Sargasso Sea
MSIRIDQINKKFGDFIAVDNVSLSIQTGELTALLGPSGSGKTSLLRIIAGLEQADSGSIHFDDLDISARHVSERGVGFVFQHYALFKHMTVYENVAFGLTVKPKKHRPSPELIR

SEQ ID NO: 146465 - protein, 136 aa, Unknown
  Bacterial polypetide isolated from the Sargasso Sea
MEKLLEIKSLRHSYNTNSEVLKGIDFDVLKGEIISILGPSGCGKTTLLRIIAGLEKQSEGTVSIGNQIVAGHLQHLPTERRNIGLVVQERALFPHLTNLKNVKFGIKGNEKDKTSIAFEFLKLFKVEKYAENFPHE

SEQ ID NO: 146466 - protein, 235 aa, Unknown
  Bacterial polypetide isolated from the Sargasso Sea
SFDIYEGETVSLIGHSGCGKSTLLNLIAGITLPTEGGLLCDNREIAGPGPERAVVFQNHSLLPWLTCFDNVALAVDQVFRRTMSKAERKEWIEHNLDRVQMGHALHKRPGEISGGMKQRVGIARALAMKPKVLLLDEPFGALDALTRAHLQDAVMQIQQALNTTIVMITHDVDEAVLLSDRVMMMTNGPAATVGEILAIDLPRPRNRVQLADDSRYHHLRQQILHFLYEKQPKAA

SEQ ID NO: 146467 - protein, 97 aa, Unknown
  Bacterial polypetide isolated from the Sargasso Sea
MNRLKLDEITYSYSKNKIINGLNLEIIEGEIVCLIGESGTGKTTLLRIIAGLEIQDKGSVLLDGKVISNNDYNLETHKRNIGLVLQERALFPHLDVF

SEQ ID NO: 146468 - protein, 118 aa, Unknown
  Bacterial polypetide isolated from the Sargasso Sea
MSIEVKGVNKRFGQFTALNDINLNIQSGELVALLGPSGCGKTTLLRIIAGLETPDSGSIGFHGEDVSDHDVRDRNVGFVFQHYDPVPPHDGVRQRRLRPAHEAQGRAPERGEDRRESA

SEQ ID NO: 146469 - protein, 192 aa, Unknown
  Bacterial polypetide isolated from the Sargasso Sea
DPESGSVQLDGRDVRTLDLEWLRSQAGYVCQEPALFDLSVTGNVLFGPQPPPEESRVEEALRAVGAAPFVERLPEGRGTKVGEAGRGLSGGQRQRLAVARALVRSPPILLWDEATSALDVASEQLVHDALRASGQRERNRTAVIVAHRLSSVLCADRVAVLREGRIEQVGTPHELRQLKGGWFYQNFYASGS

SEQ ID NO: 146470 - protein, 213 aa, Unknown
  Bacterial polypetide isolated from the Sargasso Sea
PDAFLFDEPLSNLDAKLRTQMRTEIKKLHQKLKTTVIYVTHDQVEAMTLADRIVIMKDGVIEQIGTPLELFEKPATKFVATFIGSPSMNMIEAKITNISGELCMKTNDDISVSVPKHKINSLSEGQRISFGFRAEDIVPLKFGQKPKNSWSMKSKVNLAEPLGTETLIFTNLGNTEVVSRMFTPELVNSNDELEFALNLDRTYLFDGDTGLAI

SEQ ID NO: 146471 - protein, 283 aa, Unknown
  Bacterial polypetide isolated from the Sargasso Sea
MANVKFEKLSKNFGDVKAVEDFTLKIEDGEFIVLVGPSGCGKSTTLRMIAGLEDATTGLIYIDDKAVNKVHPKNRDIAMVFQNYALYPHLSVRDNISFGIRAQKLPKKEIEERTMKASETLGLEDLLHRRPGELSGGQKQRVAMGRAIVRNPKVFLFDEPLSNLDAKLRHRMRTEMKKLHKQFRTTTIYVTHDQVEAMTLADKIVIMRDGRIEQVGIPNELYQKPKNTFVASFIGTPAMNFIHGEVFEMNSQLGIKLPDGLTFSMPKKFASKGQKVILGIRPE

SEQ ID NO: 146472 - protein, 167 aa, Unknown
  Bacterial polypetide isolated from the Sargasso Sea
MGVTSVFVTHDQVEAMTLGDRLAVINAGVIEQVGSPIEVYEKPATHFVAEFIGTPQMNFINGKIHSNKFISDGFECSINNDLNDQEVIFGVRPENLKVSANGSIKIKVDLIEKLGADSIIYGYDKSNNYLCYRENGNTKIKANDEISLEIEDENYHLFDKETKERLN

SEQ ID NO: 146473 - protein, 85 aa, Unknown
  Bacterial polypetide isolated from the Sargasso Sea
MQKETTSISLKSCGKTFKDGTRALEEINLDISGGETVVLLGPSGCGKTTLLRIIAGLEEPDKGGQIIFNDEDVSKLQMKKGMWVW

SEQ ID NO: 146474 - protein, 176 aa, Unknown
  Bacterial polypetide isolated from the Sargasso Sea
CRVREKRDAVAQHIELVGLKGFENAYPHQLSGGMAQRVAIARGLVNRPRVLLLDEPFGALDALTRGRLQNELQRIWEHERITMILVTHDVDEALYLGDRVVTMAPRPGRIKRIVDVALPRPRERNDPRFIRLRDEVLADFAEHDGARRDPHEDEPPHGGTRIPVASPPITEWRLAW

SEQ ID NO: 146475 - protein, 293 aa, Unknown
  Bacterial polypetide isolated from the Sargasso Sea
MTLPRPPFPRTAMTTLASDSLDILHVSKHYAQRGAALAVLDDVSLHVRAGEFVTIVGSSGCGKSTLLRLIAGLDTDYAGEIRAGAERVHDTSLQRGIVFQDHRLFPWLTVAQNIEAALRNAPLDAAAKRRAVADHIALVGLNGFEHAYPNQLSGGMAQRVAIARGLVNRPRVLLLDEPFGALDAQTRARMQNELLRIWEQERITMILVTHDVDEAVYLGDRVVTMAPRPGRIERIVDVALPRPRRRDSPAFARLRDTVLADFDDHEPPGDDRPGGRRIDTPRPHRIGEWRLAW

SEQ ID NO: 146476 - protein, 226 aa, Unknown
  Bacterial polypetide isolated from the Sargasso Sea
MNNFIEIINLKKVFNISSNNKLLLFKNLNFNIPRNSITSIIGPSGCGKSTLLNILGLLDSSFGGEYFFDSISINKINNKKLNKIRNQKIGFVHQFFHLIPELSVVENIILPALVQKDKISDIIKDADNLLKVFEIFDKKNMKPNKLSGGEQQRVAIARSLINKPDLILADEMTGNLDENTSDEIINFFLNFVANHNISLIYVTHNQRYADMAETKYKLENKNLVLK

SEQ ID NO: 146477 - protein, 58 aa, Unknown
  Bacterial polypetide isolated from the Sargasso Sea
KKIILSLVVTHNMQQAARVSQKTAFFHLGHLIEFGNTEEIFTSPNEIKTQDYITGRFG

SEQ ID NO: 146478 - protein, 174 aa, Unknown
  Bacterial polypetide isolated from the Sargasso Sea
MNKLIEISNLKKIYNLSNKDKLLLIDNLNLTISKNSITSIIGPSGCGKSTLLNILGLLDSNFYGNYFFESKSIKEISSKNLSNIRNRKIGFVHQFFHLIPELTVLENVILPALVQSNNISDINNDAYKLLEMFEIIDKKNMKPNKLSGGEQQRVAIARSLINKPNLILADEMTG

SEQ ID NO: 146479 - protein, 241 aa, Unknown
  Bacterial polypetide isolated from the Sargasso Sea
MLNLGNPKLDLNGFDAFAKVRILSALAFNSKISNKKCLMEGIEKIDLKDIKIANQLDLSIKLLGISELKNNQLFETVHPCLVSKKSYIGNVNGVMNAVILNGKPVGESVLQGEGAGPGPTSSSLLSDLLSILRGNIKKPFGVSVNKLKTFKTYNVNNYVNSLYLRFEVKDRPGVLSQITNRLAKYKISVKRLIQTPDKKNNKATIVIVTHKTTELNCNSCLSIFKKNKNILKSPTIIRLLD

SEQ ID NO: 146480 - protein, 93 aa, Unknown
  Bacterial polypetide isolated from the Sargasso Sea
MSKNPEFVKFDKVDKSYDGKVLVVKDLQLDIAEGEFITMLGPSGSGKTTCLMMLAGFETPTHGEILLDGNIISNIPPHKRGIGMVFQNYALFP

SEQ ID NO: 146481 - protein, 204 aa, Unknown
  Bacterial polypetide isolated from the Sargasso Sea
MQAVRPLPAAGKKTKLNNTDKVIEIKGVSAGYGGDVMSKPKEVILKDINLKLSRGEVLGVIGESGSGKSTLARVIAGLLPSFKGEILLDGQQLKPRLEDRPRSELRKIQFVYQMADTAINPKQTIGNILGRPLEFYLNMYGQKQKDRVLELLDMVELPKEFFTRYPHELSGGQKQRINLARALAAEPEVLLCDEVTSALDSIVG

SEQ ID NO: 146482 - protein, 250 aa, Unknown
  Bacterial polypetide isolated from the Sargasso Sea
AIHVDGQVSSRSWDVRLDVEPGEVVAVMGPNGAGKSTLASVVTGLLALDRGRVCIGRQLVDAGDGRIVLPGRRGVGLLTQDALIFEHMSVLDNVAYGPRCHGLSRAQAQKVAYAQLAAVGCAHLAARRGGELSGGQAALVGLARAFAVEPAVLVLDEPTAALDIDAQIRVRDLLKSQLDRTNMTALIITHDVADTMRVAGRLVVLEHGRIIEDGVVSQLLENPKTAFTAQLAALVKFEVRTNSQGAESSS

SEQ ID NO: 146483 - protein, 141 aa, Unknown
  Bacterial polypetide isolated from the Sargasso Sea
MNSEQPIVSLKDVHKSFGDLEVLKGISFDVKKGEVICIIGPSGSGKSTLIRCINALNDINSGSIKVHGREVHDPKLDKLELRKKVGMVFQQFNLFPHKTALENVMMAPVLVLKQNKEEVRKRAEDLIRKVRLQGKEDSYPG

SEQ ID NO: 146484 - protein, 247 aa, Unknown
  Bacterial polypetide isolated from the Sargasso Sea
FSSFKNINIKNIAFNYKNSSDTTLKNLSFQIKRGEKIGITGPSGSGKTTLIHILLGLIKQSSGEIKIDDEILAKNNLTQWQKLLGFVPQSVFLTSKSIKENIAFGVEKDQIDKNKIKKLIDFSQLTEIVSTLPEKENSKIGERGIKLSGGQQQRLGIARAFYPDPKIVFFDEATNSLDVLTENEIMNSLNNLDKDITVIMIAHRLDVIKKFDKIIYLNKGKIDGFGTFDELLKNNLNFKKLVEAKNL

SEQ ID NO: 146485 - protein, 188 aa, Unknown
  Bacterial polypetide isolated from the Sargasso Sea
MIEIKNCFKSYSKEALFSNLSLKVSEGERIAIIGPSGCGKSTILKYLLGIAQPDSGSIIVDGINLNNISKSELMQVRMKIGMLFQSAALFDSLTISENIAFPLIESYGRKLNETTSDVNRVLDLVGLAGFNEKYPYQLSGGQQKRVGLARAIVTNPKYIFYDEPTTGLDPMMSKTIEDVMVRLNSVMN

SEQ ID NO: 146486 - protein, 233 aa, Unknown
  Bacterial polypetide isolated from the Sargasso Sea
MADILEIKNVSMTYNADSDNPVNALDGVDLNVAEGEFVSVIGPSGCGKSTLFNIIGGLINDHDGEVLIDDRPVDGAHKDVGVVFQEESTFPWRTTLDNVGFPLEVEGVEKAERQETARKFIKLVGLEGFENHYPAQLSGGMKQRTAVARTLAYEPRIMLLDEPFGALDEQTRMLLGDKMLEIWSELNQTMLLITHNITEAVQLSDRVVVMSFRPGVIKEIIDIELPRPRSSEV

SEQ ID NO: 146487 - protein, 237 aa, Unknown
  Bacterial polypetide isolated from the Sargasso Sea
NNQVAVDTLYEEFQFINTFSKNTLQQNESYNFDKSINVKIDYHQFLNSKKKILENINFDIKKNTLFGINGLNGTGKTTLSNFILGLIKPTSGKILLDDKYNIKQFENNYRKILSFVPQNTFLFEGSIYDNIVFGETYDDEEKLKNEKKVEQIINSSKIFQFISNLDKKMHTEIKENATNLSGGQKQCVSIARALYYNPKILILDEPTNSLDKDIKLEFFDLISSLKNNITIIAITHD

SEQ ID NO: 146488 - protein, 307 aa, Unknown
  Bacterial polypetide isolated from the Sargasso Sea
PVWWARRHPGHAGGGADCGRVPQRAHADGRVVGVPDPRHRHPCDPGRGHRPTLAQRSALIMTNSTHTTKAPLVMQAKGLVKRYGQVTALDGADFELRAGEILAVIGDNGAGKSSLIKALSGATVPDEGEILLDGQRIQFKSPIDARRAGIETVYQDLAVAPAMTIAENLFLGRELRRPGLLGSALRMLDKKKMLEESVARMAELKVGIRSMTQAVETLSGGQRQCVAVARAAAFARHVVIMDEPTAALGVKEGNMVLELIRRVRDKGLPVILISHNMPHVFEIADRIHIARLGKRAAVVNPKKISMS

SEQ ID NO: 146489 - protein, 62 aa, Unknown
  Bacterial polypetide isolated from the Sargasso Sea
MDAGELVFDIKGLGVSYGDFRAVRDVDFPIRSNEITAMIGPSGCGQSTVLRCLNRMNDLIDT

SEQ ID NO: 146490 - protein, 145 aa, Unknown
  Bacterial polypetide isolated from the Sargasso Sea
MTIYSKSGDKIYSITSPNSIYDNIELRFELKKPIINIISGEETKYIISSEESTLSDNNKLLKLKGNVKLKTLKKDQDILYADNFIWNIEKTNYLLEGNIRFENQNIILNSGKAILDKDNIIEFFYPVKYIIKDENNENKYEINSE

SEQ ID NO: 146491 - protein, 115 aa, Unknown
  Bacterial polypetide isolated from the Sargasso Sea
MTVAIRATDLVKSYTPGVRALDQVSLEVSSGEVLVVMGPSGSGKSTLIRTFNGLERLDGGALDVLGVRLDSTHAEPQVRAIRRRVGMVFQQFNLFPHLSILENISLAPVKVQKRP

SEQ ID NO: 146492 - protein, 292 aa, Unknown
  Bacterial polypetide isolated from the Sargasso Sea
VILSFGAGELENNRFKAVNNRNRQLDVKMEATRAISVSLIQLIASFALAFVIYLASFPAMLDTLTPGTFSEMITAMMLLLKPLKQLTTVNSDFQRGMAAATNVFMVLDEKPEQDTGTIELKQVTGAIEIKDLSFNYPGHQKQVLKQINIKVEPGQTVALVGRSGSGKTTISSLLPRFYEIEQGEILLDGINTKDCTLDSLRSQMAVVSQHVVLFNDTIANNIAYGYRGELSPERLLEVAEKAHVMEFVNQMPAGLDTEIGENGVTLSGGQRQRIAIARALLRQAPVLILDEA

SEQ ID NO: 146493 - protein, 110 aa, Unknown
  Bacterial polypetide isolated from the Sargasso Sea
DFIKKLPNGLETKVGERGIRLSGGQRQRIGIARALYNDPQVLVFDEATSSLDIQTESSFMNVVDSFKGDKTIIIVTHRISTVEYCDQVFNLNKGELQLKVSSNSQSISNI

SEQ ID NO: 146494 - protein, 198 aa, Unknown
  Bacterial polypetide isolated from the Sargasso Sea
IIENLNLKVHENEIVLICGNSGSGKTTLLEIISGITNPQKGKITWKNKILSSRQRRWFCGVVFQFPERYFIGTTIGKELKIGLKSFREKNIEIVLKKVGLEELNLTQPPEQLSGGQQRRLAVAVQLLRNPSILLFDEPTAGLDRSMRNDVKNLILDLKNKNTIIIVTHEPDLFEGIPSRMLIMEKGKIKNFVKENYEG

SEQ ID NO: 146495 - protein, 216 aa, Unknown
  Bacterial polypetide isolated from the Sargasso Sea
KKIFNISSNNKLLVFENLNFNISRDSITSIIGPSGCGKSTLLNILGLLDSCFDGEYIFEGSSINKINGKKLNKIRNQNIGFVHQFFHLIPELSVMENVILPALVQKDKIEDINNNAYNLLKVFEIYDKKNMKPNKLSGGEQQRVAIARSLINKPNLILADEMTGNLDEKTSDEIINFFLKFVKNHNISLIYVTHNQRYADMAEIKYELKSKNLILK

SEQ ID NO: 146496 - protein, 156 aa, Unknown
  Bacterial polypetide isolated from the Sargasso Sea
MSDSVSRIETRGVVKQFGGLRHPKVLAVDRVSFQIHEGEFVALIGPSGCGKSTILNMIAGLIPFNEGNVLIDGTDIYFGEKLPRNVGYVFQKDTVFPWRTVRKNIGYGLELSGMDKEAINVSVEEIIKRSGLDGFEDAFPLMLSGGMRQRVALMRT

SEQ ID NO: 146497 - protein, 72 aa, Unknown
  Bacterial polypetide isolated from the Sargasso Sea
PIATAQIEELIDELKKEHTIIIVTHSMAQAARVSQNTGFFHLGQLIEHGSTDKIFKNPDNTKTQDYITGRFG

SEQ ID NO: 146498 - protein, 243 aa, Unknown
  Bacterial polypetide isolated from the Sargasso Sea
KDTENLLLNNFHEKRLTHTDEKIEFNNKIEFKNVDFKYENSKELILKNVNLIIKKNSITGIVGQTGAGKSSLINLIVGFFSPSSGSVMSDMTEINNKNVFDWQKKISIVPQSIMLLDDSIENNIVFNNLKDENKLDICIKAACLQGLVNEFNQKKNNLIGENGKRISGGQRQRIGIARALYRDANILILDESFNSLDDKTKIIIMDNLKKLKKTIIIVTHLKEDLMICDTVLSIENRKISEIN

SEQ ID NO: 146499 - protein, 120 aa, Unknown
  Bacterial polypetide isolated from the Sargasso Sea
MNSEQPIVSLKNVHKSFGDLEVLKGISFDVNKGEVICIIGPSGSGKSTLIRCINALNDINSGSIKVHGREVHDPKLDKLELRKKVGMVFQQFNLFPHKTALENVMMAPVLVLKPKQGRCS

SEQ ID NO: 146500 - protein, 262 aa, Unknown
  Bacterial polypetide isolated from the Sargasso Sea
MDKKGLSVMQPVLVAKRLSKKYGKVVALDSADLELYPGEVLGVIGDNGAGKSTLIKVLCGAVIPDSGEILLDGKNVTFTSPIEARKLGIETVYQNLALSPALSITDNMFLGREIRQKGFMGSFLKFLDKKAMADEARKRLSDLGLLTIQNINQLVETLSGGQRQGVAVARATSFGTKVVIMDEPTAALGVKESRRVLELIGEVRSRGIPIILISHNMPHVFEVADRIHIHRLGTRLCVIDPKKHEMSDAVAYMTGAKQPPQN

SEQ ID NO: 146501 - protein, 474 aa, Unknown
  Bacterial polypetide isolated from the Sargasso Sea
MTFEQLSIFLIFLGLFFFLIWGKIRYDIVSFTALLVAIILGIVSIEEAFVGFSHPATILVALVLLVSAGMVNSGVIYLITNKIFSTPRTMSSHITIISSIGAILSSFINNIAALALLMPIDLQVAKKAKRTVKKTLMPLSFATILGGMVTLVGTPPNIIISAIRQKSLGEPFSFFDFTPVGITVCLAGLLFISTVGWKLIAEKINPQSEKKANEGKEFYFSELMISENSTYIGKPISELKELFEKFEATFIKTDSREKIITEGDKITVHTSPADLDEIRITLGLVIEDAKRLFDAEETDELEVLEVLVTESSRLINKTAESVGLFWRQQTMILGISRKGNNLKRELKKTKIRQGDILLLLTPRESHKEVVNWLGVLTLQDRDLIFTQHGKAWVSLSSFLFAVLLSSTGILSLTLALSILVCFYIFYNILPASQIYENIAWPIIVLLASMIPLGYALERTGGTELIVTLLMQFST

SEQ ID NO: 146502 - protein, 686 aa, Unknown
  Bacterial polypetide isolated from the Sargasso Sea
KYRLKSKDGVPIDGTIDETYQRVALALAGQESEPDVWYEPFLWALRNGAIPAGRITSNAGAFEHKPATSTINCTVSGTIEDSMDDILGKVHEAGLTLKAGCGIGYDFSTLRPRGAFVSGAGAYTSGPLSFMDIYDKMCFTVSSAGGRRGAQMGTMDIRHPDVVEFIQAKREDGRLRQFNLSLLITEEFVKAVKEDAPWQLIFPYTAREVEQDGIALDDPAQVFWADWPNREGVVFNELGQVACKVYKTLPARKLWNVIMTSTYDYAEPGFILIDKVNQMNNNWFCEEIRATNPCGEQPLPPYGACLLGSVNLTRFVRDPFTEQAAFDWSAFRKVVAIFTRMLDNVVEINQLPLARQREEIISKRRHGMGFLGLGSALTMLRIKYGSAAAVAFTEQVSQELALTGWRESLALAKEKGPAPIMEQEFEVTGKLLRLRPEMAADGIKLGDKVKGKVLHARYSRYMQQVAEVDPALVAELAEVGGRFTHHSSIAPTGTISLSLANNASNGIEPSFAHHYSRNVIKPGKKSKESVDVYSYELLAYRELVNPAAMPYAEDEATRLPDYFITADDISPAQHVDIQAAAQRWIDSSISKTANVPTDFPFEQFKDIYLYASDSGLKGCTTFRFNPAAFQGVLVKEQDLENTLYEFTLEDGSVVTAKGNEEIEYDGELHTAANLYDALKEGYYGKF

SEQ ID NO: 146503 - protein, 490 aa, Unknown
  Bacterial polypetide isolated from the Sargasso Sea
MKIFFLLIFFLQCSNPPTLYNISGYKKAIDPITSVIQSSGLQTNIGIKVINLKSNQTIYEWNPNSLFNPGSNAKLFTCIAALALLDTNTTFSTSVYQDTNAIYIVGGGDPHFSIDKLDTISQIISDTIKLHLGRDYWFLNNRVRMRSIDLAKRIDYVVVDNSIYDNIYFGPGWMWDEGSWWHASQVSAMSLNENCIDFYVKPGKLGKPIIINTYPTTNFISIQNESNTVNDTINFKTLKIKRDWESQTNNFIVSGNVMDTSSIDTLQRNIHDPSLFTGTVFSEMLINKGLDIKHVVKGVVPNNATKITEHESKPIFHSLNGLMKKSENLTAELLVKHIGLTVFDTVGSWKNGLLAIKTFLHDSVGIDTNTFSLSDGSGLSRYNYTSPNHFISALSWAYNNKNIRNKFLDTFPRGGLDGTLENRLENIDSTTTVLAKTGSLSGVSCLSGYIISKTNSPLAFSILINGFVNSSLPYRNLQDEIVYSLSKIKL
